United States Patent Application Publication US 2021/0260178 A1 - sequence listing, part 4

SEQ ID NO: 5235 - RNA, 1473 nt, Artificial Sequence
  derived and/or modified protein sequence (opt4) from LASV(LASV966-NIG-2009;Clade II)__AIT17718__GPCstabilized
augggccagaucaucaccuucuuccaggaggugccccacgugaucgaggaggugaugaacaucgugcugaucgcccugagccugcuggccauccugaagggcaucuacaacguggccaccugcggccuguucggccuggugagcuuccugcugcugugcggcagaagcugcagcaccaccuacaagggcguguacgagcugcagacccuggagcuggacauggccagccugaacaugaccaugccccugagcugcaccaagaacaacagccaccacuacaucagagugggcaacgagaccggccuggagcugacccugaccaacgccagcaucaucaaccacaaguucugcaaccugagcgacgcccacaagaagaaccuguacgaccacgcccugaugagcaucaucagcaccuuccaccugagcauccccaacuucaaccaguacgaggccaugagcugcgacuucaacggcggcaagaucagcgugcaguacaaccugagccacgccuacgccaucgacgccgccaaccacugcggcaccguggccaacggcgugcugcagaccuucaugagaauggccuggggcggcagcuacaucgcccuggacagcggcugcggcaacugggacugcaucaugaccagcuaccaguaccugaucauccagaacaccaccugggaggaccacugccaguucagcagacccagccccaucggcuaccugggccugcugagccagagaaccagagacaucuacaucagcagaagacgccggggcaccuucaccuggacccugagcgacagcgagggcaacgagacccccggcggcuacugccugaccagauggaugcugaucgaggccgagcugaagugcuucggcaacaccgccguggccaagugcaacgagaagcacgacgaggaguucugcgacaugcugagacuguucgacuucaacaagcaggccaucagaagacugaagacccccgcccagaugagcauccagcugaucaacaaggccgugaacgcccugaucaacgaccagcugaucaugaagaaccaccugagagacaucaugugcauccccuacugcaacuacagcaaguacugguaccugaaccacaccgugaccggcaagaccagccugcccagaugcuggcuggugagcaacggcagcuaccugaacgagacccacuucagcgacgacaucgagcagcaggccgacaacaugaucaccgagcugcugcagaaggaguacauggacagacagggcaagaccccccugggccugguggaccuguucguguucagcaccagcuucuaccugaucagcaucuuccugcaccuggugaagauccccacccacagacacgugaucggcaagcccugccccaagccccacagacugaaccacaugggcaucugcagcugcggcuucuacaagcaccccggcgugcccgugaaguggaagagauga

SEQ ID NO: 5236 - RNA, 1473 nt, Artificial Sequence
  derived and/or modified protein sequence (opt4) from LASV(LASV969-NIG-2009;Clade II)__AIT17724__GPCstabilized
augggccagaucaucaccuucuuccaggaggugccccacgugaucgaggaggugaugaacaucgugcugaucgcccugagccugcuggccauccugaagggcaucuacaacguggccaccugcggccuguucggccuggugagcuuccugcugcugugcggcagaagcugcagcaccaccuacaagggcguguacgagcugcagacccuggagcuggacauggccaaccugaacaugaccaugccccugagcugcaccaagaacaacagccaccacuacaucauggugggcaacgagaccggccuggagcugacccugaccaacaccagcaucaucaaccacaaguucugcaaccugagcgacgcccacaagaagaaccuguacgaccacgcccugaugagcaucaucagcaccuuccaccugagcauccccaacuucaaccaguacgaggccaugagcugcgacuucaacggcggcaagaucagcgugcaguacaaccugagccacaccuacgccguggacgccgccaaccacugcggcaccguggccaacggcgugcugcagaccuucaugagaauggccuggggcggcagcuacaucgcccuggacagcggcugcggcagcugggacugcaucaugaccagcuaccaguaccugaucauccagaacaccaccugggaggaccacugccaguucagcagacccagccccaucggcuaccugggccugcugagccagagaaccagagacaucuacaucagcagaagacgccggggcaccuucaccuggacccugagcgacagcgagggcaacgagacccccggcggcuacugccugaccagauggaugcugaucgaggccgagcugaagugcuucggcaacaccgccguggccaagugcaacgagaagcacgacgaggaguucugcgacaugcugagacuguucgacuucaacaagcaggccaucagaagacugaagacccccgcccagaugagcauccagcugaucaacaaggccgugaacgcccugaucaacgaccagcugaucaugaagaaccaccugagagacaucaugugcauccccuacugcaacuacagcaaguacugguaccugaaccacaccgugaccggcaagaccagccugcccagaugcuggcuggugagcaacggcagcuaccugaacgagacccacuucagcgacgacaucgagcagcaggccgacaacaugaucaccgagcugcugcagaaggaguacauggacagacagggcaagaccccccugggccugguggaccuguucguguucagcaccagcuucuaccugaucagcaucuuccugcaccuggugaagauccccacccacagacacaucaugggcaagcccugccccaagccccacagacugaaccacaugggcaucugcagcugcggccuguacaagcaccccggcgugcccgugaaguggaagagauga

SEQ ID NO: 5237 - RNA, 1473 nt, Artificial Sequence
  derived and/or modified protein sequence (opt4) from LASV(LASV971-NIG-2009;Clade II)__AIT17728__GPCstabilized
augggccagaucaucaccuucuuccaggaggugccccacgugaucgaggaggugaugaacaucgugcugaucgcccugagccugcuggccauccugaagggcaucuacaacguggccaccugcggccuguucggccuggugagcuuccugcugcugugcggcagaagcugcagcaccaccuacaagggcguguacgagcugcagacccuggagcuggacaugggcagccugaacaugaccaugccccugagcugcaccaagaacaacagccaccacuacaucauggugggcaacgagaccggccuggagcugacccugaccaacaccagcaucaucaaccacaaguucugcaaccugagcgacgcccacaagaagaaccuguacgaccacgcccugaugagcaucaucagcaccuuccaccugagcauccccaacuucaaccaguacgaggccaugagcugcgacuucaacggcggcaagaucagcgugcaguacaaccugagccacaccuacgccguggacgccgccaaccacugcggcaccaucgccaacggcgugcugcagaccuucaugagaauggccuggggcggcagcuacaucgcccuggacagcggcugcggcagcugggacugcaucaugaccagcuaccaguaccugaucauccagaacaccaccugggaggaccacugccaguucagcagacccagccccaucggcuaccugggccugcugagccagagaaccagagacaucuacaucagcagaagacgccggggcaccuucaccuggacccugagcgacagcgagggcaacgagacccccggcggcuacugccugaccagauggaugcugaucgaggccgagcugaagugcuucggcaacaccgccguggccaagugcaacgagaagcacgacgaggaguucugcgacaugcugagacuguucgacuucaacaagcaggccaucagaagacugaagacccccgcccagaugagcauccagcugaucaacaaggccgugaacgcccugaucaacgaccagcugaucaugaagaaccaccugagagacaucaugugcauccccuacugcaacuacagcaaguacugguaccugaaccacaccgugaccggcaagaccagccugcccagaugcuggcuggugagcaacggcagcuaccugaacgagacccacuucagcgacgacaucgagcagcaggccgacaacaugaucaccgagcugcugcagaaggaguacauggacagacagggcaagaccccccugggccugguggaccuguucguguucagcaccagcuucuaccugaucagcaucuuccugcaccuggugaagauccccacccacagacacgugaucggcaagcccugccccaagccccacagacugaaccacaugggcaucugcagcugcggccuguacaagcaccccggcgugcccgugaaguggaagagauga

SEQ ID NO: 5238 - RNA, 1473 nt, Artificial Sequence
  derived and/or modified protein sequence (opt4) from LASV(LASV975-NIG-2009;Clade II)__AIT17732__GPCstabilized
augggccagaucaucaccuucuuccaggaggugccccacgugaucgaggaggugaugaacaucgugcugaucgcccugagccugcuggccauccugaagggcaucuacaacguggccaccugcggccuguucggccuggugagcuuccugcugcugugcggcagaagcugcagcaccaccuacaagggcguguacgagcugcagacccuggagcuggacauggccagccugaacaugaccaugccccugagcugcaccaagaacaacagccaccacuacaucauggugggcaacgagaccggccuggagcugacccugaccaacaccagcaucaucaaccacaaguucugcaaccugagcgacgcccacaagaagaaccuguacgaccacgcccugaugagcaucaucagcaccuuccaccugagcauccccaacuucaaccaguacgaggccaugagcugcgacuucaacggcggcaagaucagcgugcaguacaaccugagccacaccuacgccguggacgccgccaaccacugcggcaccaucgccaacggcgugcugcagaccuucaugagaauggccuggggcggcagcuacaucgcccuggacagcggcugcggcagcugggacugcaucaugaccagcuaccaguaccugaucauccagaacaccaccugggaggaccacugccaguucagcagacccagccccaucggcuaccugggccugcugagccagagaaccagagacaucuacaucagcagaagacgccggggcaccuucaccuggacccugagcgacagcgagggcaacgagacccccggcggcuacugccugaccagauggaugcugaucgaggccgagcugaagugcuucggcaacaccgccguggccaagugcaacgagaagcacgacgaggaguucugcgacaugcugagacuguucgacuucaacaagcaggccaucagaagacugaagacccccgcccagaugagcauccagcugaucaacaaggccgugaacgcccugaucaacgaccagcugaucaugaagaaccaccugagagacaucaugugcauccccuacugcaacuacagcaaguacugguaccugaaccacaccgugaccggcaagaccagccugcccagaugcuggcuggugagcaacggcagcuaccugaacgagacccacuucagcgacgacaucgagcagcaggccgacaacaugaucaccgagcugcugcagaaggaguacaucgacagacagggcaagaccccccugggccugguggaccuguucguguucagcaccagcuucuaccugaucagcaucuuccugcaccuggugaagauccccacccacagacacaucgugggcaagcccugccccaagccccacagacugaaccacaugggcaucugcagcugcggccuguacaagcaccccggcgugcccgugaaguggaagagauga

SEQ ID NO: 5239 - RNA, 1473 nt, Artificial Sequence
  derived and/or modified protein sequence (opt4) from LASV(LASV976-NIG-2009;Clade II)__AIT17736__GPCstabilized
augggccagaucgugaccuucuuccaggaggugccccacgugaucgaggaggugaugaacaucgugcugaucgcccugagccugcuggccauccugaagggcaucuacaacguggccaccugcggccuguucggccuggugagcuuccugcugcugugcggcagaagcugcagcaccaccuacaagggcguguacgagcugcagacccuggagcuggacauggccagccugaacaugaccaugccccugagcugcaccaagaacaacagccaccacuacaucauggugggcaacgagaccggccuggagcugacccugaccaacaccagcaucaucaaccacaaguucugcaaccugagcgacgcccacaagaaggaccuguacgaccacgcccugaugagcaucaucagcaccuuccaccugagcauccccaacuucaaccaguacgaggccaugagcugcgacuucaacggcggcaagaucagcgugcaguacaaccugagccacaccuacgccguggacgccgccaaccacugcggcaccaucgccaacggcgugcugcagaccuucaugagaauggccuggggcggcagcuacaucgcccuggacagcggcugcggcagcugggacugcaucaugaccagcuaccaguaccugaucauccagaacaccaccugggaggaccacugccaguucagcagacccagccccaucggcuaccugggccugcugagccagagaaccagagacaucuacaucagcagaagacgccggggcaccuucaccuggacccugagcgacagcgagggcaacgagacccccggcggcuacugccugaccagauggaugcugaucgaggccgagcugaagugcuucggcaacaccgccguggccaagugcaacgagaagcacgacgaggaguucugcgacaugcugagacuguucgacuucaacaagcaggccaucaugagacugaagacccccgcccagaugagcauccagcugaucaacaaggccgugaacgcccugaucaacgaccagcugaucaugaagaaccaccugagagacaucaugugcauccccuacugcaacuacagcaaguacugguaccugaaccacaccgugaccggcaagaccagccugcccagaugcuggcuggugagcaacggcagcuaccugaacgagaccagauucagcgacgacaucgagcagcaggccgacaacaugaucaccgagaugcugcagaaggaguaccuggacagacagggcaagaccccccugggccugguggaccuguucguguucagcaccagcuucuaccugaucagcaucuuccugcaccuggugaagauccccacccacagacacaucaucggcaagcccugccccaagccccacagacugaaccacaugggcaucugcagcugcggccuguacaagcaccccggcgugcccgugaaguggaagagauga

SEQ ID NO: 5240 - RNA, 1473 nt, Artificial Sequence
  derived and/or modified protein sequence (opt4) from LASV(LASV978-NIG-2009;Clade II)__AIT17744__GPCstabilized
augggccagaucaucaccuucuuccaggaggugccccacgugaucgaggaggugaugaacaucgugcugaucgcccugagccugcuggccauccugaagggcaucuacaacguggccaccugcggccuguucggccugaugagcuuccugcugcugugcggcagaagcugcagcaccaccuacaagggcguguacgagcugcagacccuggagcuggacauggccaaccugaacaugaccaugccccugagcugcaccaagaacaacagccaccacuacaucauggugggcaacgagaccggccuggagcugacccugaccaacaccagcaucaucaaccacaaguucugcaaccugagcgacgcccacaagaagaaccuguacgaccacgcccugaugagcaucaucagcaccuuccaccugagcauccccaacuucaaccaguacgaggccaugagcugcgacuucaacggcggcaagaucagcgugcaguacaaccugagccacgccuacgccguggacgccgccaaccacugcggcaccaucgccaacggcgugcugcagaccuucaugagaauggccuggggcggcagcuacaucgcccuggacagcggcugcggcagcugggacugcaucaugaccagcuaccaguaccugaucauccagaacaccagcugggaggaccacugccaguucagcagacccagccccaucggcuaccugggccugcugagccagagaaccagagacaucuacaucagcagaagacgccggggcaccuucaccuggacccugagcgacagcgagggcaacgagacccccggcggcuacugccugaccagauggaugcugaucgaggccgagcugaagugcuucggcaacaccgccguggccaagugcaacgagaagcacgacgaggaguucugcgacaugcugagacuguucgacuucaacaagcaggccaucagaagacugaagacccccgcccagaugagcauccagcugaucaacaaggccgugaacgcccugaucaacgaccagcugaucaugaagaaccaccugagagacaucaugugcauccccuacugcaacuacagcaaguacugguaccugaaccacaccgugaccggcaagaccagccugcccagaugcuggcuggugagcaacggcagcuaccugaacgagacccacuucagcgacgacaucgagcagcaggccgacaacaugaucaccgagcugcugcagaaggaguacaucgacagacagggcaagaccccccugggccugguggaccuguucguguucagcaccagcuucuaccugaucagcaucuuccugcaccuggugaagauccccacccacagacacgugaucggcaagcccugccccaagccccacagacugaaccacaugggcaucugcagcugcggccuguacaagcaccccggcgugcccgugaaguggaagagauga

SEQ ID NO: 5241 - RNA, 1473 nt, Artificial Sequence
  derived and/or modified protein sequence (opt4) from LASV(LASV981-NIG-2009;Clade II)__AIT17752__GPCstabilized
augggccagaucaucaccuucuuccacgaggugccccacgugaucgaggaggugaugaacaucgugcugaucgcccugagccugcuggccauccugaagggcaucuacaacguggccaccugcggccuguucggccuggugagcuuccugcugcugugcggcagaagcugcagcaccaccuacaagggcguguacgagcugcagacccuggagcuggacauggccagccugaacaugaccaugccccugagcugcaccaagaacaacagccaccacuacaucauggugggcaacgagaccggccuggagcugacccugaccaacaccagcaucaucaaccacaaguucugcaaccugagcgacgcccacaagaagaaccuguacgaccacgcccugaugagcaucaucagcaccuuccaccugagcauccccaacuucaaccaguacgaggccaugagcugcgacuucaacggcggcaagaucagcgugcaguacaaccugagccacaccuacgccaucgacgccgccaaccacugcggcaccaucgccaacggcgugcugcagaccuucaugagaauggccuggggcggcagcuacaucgcccuggacagcggcugcggcagcugggacugcaucaugaccagcuaccaguaccugaucauccagaacaccaccugggaggaccacugccaguucagcagacccagccccaucggcuaccugggccugcugagccagagaaccagagacaucuacaucagcagaagacgccggggcaccuucaccuggacccugagcgacagcgagggcaacgagacccccggcggcuacugccugaccagauggaugcugaucgaggccgagcugaagugcuucggcaacaccgccguggccaagugcaacgagaagcacgacgaggaguucugcgacaugcugagacuguucgacuucaacaagcaggccaucagaagacugaagacccccgcccagaugagcauccagcugaucaacaaggccgugaacgcccugaucaacgaccagcugaucaugaagaaccaccugagagacaucaugugcauccccuacugcaacuacagcaaguacugguaccugaaccacaccgugaccggcaagaccagccugcccagaugcuggcuggugagcaacggcagcuaccugaacgagacccacuucagcgacgacaucgagcagcaggccgacaacaugaucaccgagcugcugcagaaggaguacaucgacagacagggcaagaccccccugggccugguggaccuguucguguucagcaccagcuucuaccugaucagcaucuuccugcaccuggugaagauccccacccacagacacgugaucggcaagcccugccccaagccccacagacugaaccacaugggcaucugcagcugcggccuguacaagcaccccggcgugcccgugaaguggaagagauga

SEQ ID NO: 5242 - RNA, 1473 nt, Artificial Sequence
  derived and/or modified protein sequence (opt4) from LASV(LASV982-NIG-2009;Clade II)__AIT17756__GPCstabilized
augggccagaucaucaccuucuuccaggaggugccccacgugaucgaggaggugaugaacaucgugcugaucgcccugagccugcuggccauccugaagggcaucuacaacguggccaccugcggccuguucggccuggugagcuuccugcugcugugcggcagaagcugcagcaucaccuacaagggcguguacgagcugcagacccuggagcuggacauggccagccugaacaugaccaugccccugagcugcaccaagaacaacagccaccacuacaucauggugggcaacgagaccggccuggagcugacccugaccaacaccagcaucaucaaccacaaguucugcaaccugagcgacgcccacaagaagaaccuguacgaccacgcccugaugagcaucaucagcaccuuccaccugagcauccccaacuucaaccaguacgaggccaugagcugcgacuucaacggcggcaagaucagcgugcaguacaaccugagccacaccuacgccguggacgccgccaaccacugcggcaccaucgccaacggcgugcugcagaccuucaugagaauggccuggggcggcagcuacaucgcccuggacagcggcugcggcagcugggacugcaucaugaccagcuaccaguaccugaucauccagaacaccaccugggaggaccacugccaguucagcagacccagccccaucggcuaccugggccugcugagccagagaaccagagacaucuacaucagcagaagacgccggggcaccuucaccuggacccugagcgacagcgagggcaacgagacccccggcggcuacugccugaccagauggaugcugaucgaggccgagcugaagugcuucggcaacaccgccguggccaagugcaacgagaagcacgacgaggaguucugcgacaugcugagacuguucgacuucaacaagcaggccaucagaagacugaaggcccccgcccagaugagcauccagcugaucaacaaggccgugaacgcccugaucaacgaccagcugaucaugaagaaccaccugagagacaucaugugcauccccuacugcaacuacagcaaguacugguaccugaaccacaccgugaccggcagaaccagccugcccagaugcuggcuggugagcaacggcagcuaccugaacgagacccacuucagcgacgacaucgagcagcaggccgacaacaugaucaccgagcugcugcagaaggaguacaucgacagacagggcaagaccccccugggccugguggaccuguucguguucagcaccagcuucuaccugaucagcaucuuccugcaccuggugaagauccccacccacagacacaucaucggcaagcccugccccaagccccacagacugaaccacaugggcaucugcagcugcggccuguacaagcaccccggcgugcccgugaaguggaagagauga

SEQ ID NO: 5243 - RNA, 1473 nt, Artificial Sequence
  derived and/or modified protein sequence (opt4) from LASV(LASV988-NIG-2009;Clade II)__AIT17758__GPCstabilized
augggccagaucaucaccuucuuccaggaggugccccacgugaucgaggaggugaugaacaucgugcugaucgcccugagccugcuggccauccugaagggcaucuacaacguggccaccugcggccuguucggccuggugagcuuccugcugcugugcggcagaagcugcagcaccaccuacaagggcguguacgagcugcagacccuggagcugaacauggccagccugaacaugaccaugccccugagcugcaccaagaacaacagccaccacuacaucauggugggcaacgagaccggccuggagcugacccugaccaacaccagcaucaucaaccacaaguucugcaaccugagcgacgcccacaagagaaaccuguacgaccacgcccugaugagcaucaucagcaccuuccaccugagcauccccaacuucaaccaguacgaggccaugagcugcgacuucaacggcggcaagaucagcgugcaguacaaccugagccacaccuacgccguggacgccgccaagcacugcggcaccaucgccaacggcgugcugcagaccuucaugagaauggccuggggcggcagcuacaucgcccuggacagcggcugcggcagcugggacugcaucaugaccagcuaccaguaccugaucauccagaacaccaccugggaggaccacugcgaguucagcagacccagccccaucggcuaccugggccugcugagccagagaaccagagacaucuacaucagcagaagacgccggggcaccuucaccuggacccugagcgacagcgagggcaacgagacccccggcggcuacugccugaccagauggaugcugaucgaggccgagcugaagugcuucggcaacaccgccguggccaagugcaacgagaagcacgacgaggaguucugcgacaugcugagacuguucgacuucaacaagcaggccaucagaagacugaaggcccccgcccagaugagcauccagcugaucaacaaggccgugaacgcccugaucaacgaccagcugaucaugaagaaccaccugagagacaucaugugcauccccuacugcaacuacagcaaguacugguaccugaaccacaccgugaccggcaagaccagccugcccagaugcuggcuggugagcaacggcagcuaccugaacgagacccacuucagcgacgacaucgagcagcaggccgacaacaugaucaccgagcugcugcagaaggaguacaucgacagacagggcaagaccccccugggccugguggaccuguucguguucagcaccagcuucuaccugaucagcaucuuccugcaccuggugaagauccccacccacagacacgugaucggcaagcccugccccaagccccacagacugaaccacaugggcaucugcagcugcggccuguacaagcaccccggcgugcccgugaaguggaagagauga

SEQ ID NO: 5244 - RNA, 1473 nt, Artificial Sequence
  derived and/or modified protein sequence (opt4) from LASV(LASV989-NIG-2009;Clade II)__AIT17762__GPCstabilized
augggccagaucaucaccuucuuccaggaggugccccacgugaucgaggaggugaugaacaucgugcugaucgcccugagccugcuggccauccugaagggcaucuacaacguggccaccugcggccuguucggccuggugagcuuccugcugcugugcggcagaagcugcagcaccaccuacaagggcguguacgagcugcagacccuggagcuggacauggccagccugaacaugaccaugccccugagcugcaccaagaacaacagccaccacuacaucauggugggcaacgagaccggccuggagcugacccugaccaacaccagcaucaucagccacaaguucugcaaccugagcgacgcccacaagaagaaccuguacgaccacgcccugaugagcaucaucagcaccuuccaccugagcauccccaacuucaaccaguacgaggccaugagcugcgacuucaacggcggcaagaucagcgugcaguacaaccugagccacaccuacgccguggacgccgccaaccacugcggcaccaucgccaacggcgugcugcagaccuucaugagaauggccuggggcggcagcuacaucgcccuggacagcggcugcggcagcugggacugcaucaugaccagcuaccaguaccugaucauccagaacaccaccugggaggaccacugccaguucagcagacccagccccaucggcuaccugggccugcugagccagagaaccagagacaucuacaucagcagaagacgccggggcaccuucaccuggacccugagcgacagcgagggcaacgaggcccccggcggcuacugccugaccagauggaugcugaucgaggccgagcugaagugcuucggcaacaccgccguggccaagugcaacgagaagcacgacgaggaguucugcgacaugcugagacuguucgacuucaacaagcaggccaucagaagacugaagacccccgcccagaugagcauccagcugaucaacaaggccgugaacgcccugaucaacgaccagcugaucaugaagaaccaccugagagacaucaugugcauccccuacugcaacuacagcagauacugguaccugaaccacaccgugaccggcaagaccagccugcccagaugcuggcuggugagcaacggcagcuaccugaacgagacccacuucagcgacgacaucgagcagcaggccgacaacaugaucaccgagcugcugcagaaggaguacauggacagacagggcaagaccccccugggccugguggaccuguucguguucagcaccagcuucuaccugaucagcaucuuccugcaccuggugaagauccccacccacagacacgugaucggcaagcccugccccaagccccacagacugaaccacaugggcaucugcagcugcggccuguacaagcaccccggcgugcccgugaaguggaagagauga

SEQ ID NO: 5245 - RNA, 1473 nt, Artificial Sequence
  derived and/or modified protein sequence (opt4) from LASV(LASV991-NIG-2009;Clade II)__AIT17770__GPCstabilized
augggccagaucgugaccuucuuccaggaggugccccacgugaucgaggaggugaugaacaucgugcugaucgcccugagccugcuggccauccugaagggcaucuacaacguggccaccugcggccuguucggccuggugagcuuccugcugcugugcggcagaagcugcagcaccaccuacaagggcguguacgagcugcaggcccuggagcuggacaugagcagccugaacaugaccaugccccugagcugcaccaagaacaacagccaccacuacaucauggugggcaacgagaccggccuggagcugacccugaccaacaccagcaucauccaccacaaguucugcaaccugagcgacgcccacaagaaggaccuguacgaccacgcccugaugagcaucaucagcaccuuccaccugagcauccccaacuucaaccaguacgaggccaugagcugcgacuucaacggcggcaagaucagcgugcaguacaaccugagccacaccuacgccguggacgccgccaaccacugcggcaccaucgccaacggcgugcugcagaccuucaugagaauggccuggggcggcagcuacaucgcccuggacagcggcugcggcggcugggacugcaucaugaccagcuaccaguuccugaucauccagaacaccaccugggaggaccacugccaguucagcagacccagccccaucggcuaccugggccugcugagccagagaaccagagacaucuacaucagcagaagacgccggggcaccuucaccuggacccugagcgacagcgagggcaacgagacccccggcggcuacugccugaccagauggaugcugaucgaggccgagcugaagugcuucggcaacaccgccguggccaagugcaacgagaagcacgacgaggaguucugcgacaugcugagacuguucgacuucaacaagcaggccaucaagagacugaagacccccgcccagaugagcauccaccugaucaacaaggccgugaacgcccugaucaacgaccagcugaucaugaagaaccaccugagagacaucaugugcauccccuacugcaacuacagcaaguacugguaccugaaccacaccgugaccggcaagaccagccugcccagaugcuggcuggugagcaacggcagcuaccugaacgagacccacuucagcgacgacaucgagcagcaggccgacaacaugaucaccgagcugcugcagaaggaguacaucgacagacagggcaagaccccccugggccugguggaccuguucguguucagcaccagcuucuaccugaucagcaucuuccugcaccuggugaagauccccacccacagacacgugaucggcaagcccugccccaagccccacagacugaaccacaugggcaucugcagcugcggccuguacaagcaccccggcgugcccgugagauggaagagauga

SEQ ID NO: 5246 - RNA, 1473 nt, Artificial Sequence
  derived and/or modified protein sequence (opt4) from LASV(LASV993-NIG-2009;Clade II)__AIT17778__GPCstabilized
augggccagaucaucaccuucuuccaggaggugccccacgugaucgaggaggugaugaacaucgugcugaucgcccugagccugcuggccauccugaagggcaucuacaacguggccaccugcggccuguucggccuggugagcuuccugcugcugugcggcagaagcugcagcaccaccuacaagggcguguacgagcugcagacccuggagcuggacauggccaaccugaacaugaccaugccccugagcugcaccaagaacaacagccaccacuacaucauggugggcaacgagaccggccuggagcugacccugaccaacaccagcaucaucaaccacaaguucugcaaccugagcgacgcccacaagaagaaccuguacgaccacgcccugaugagcaucaucagcaccuuccaccugagcauccccaacuucaaccaguacgaggccaugagcugcgacuucaacggcggcaagaucagcgugcaguacaaccugagccacaccuacgccagagacgccgccaaccacugcggcaccaucgccaacggcgugcugcagaccuucaugagaauggccuggggcggcagcuacaucgcccuggacagcggcugcggcagcugggacugcaucaugaccagcuaccaguaccugaucauccagaacaccaccugggaggaccacugccaguucagcagacccagccccaucggcuaccugggccugcugagccagagaaccagagacaucuacaucagcagaagacgccggggcaccuucaccuggacccugagcgacagcgagggcaacgagacccccggcggcuacugccugaccagauggaugcugaucgaggccgagcugaagugcuucggcaacaccgccguggccaagugcaacgagaagcacgacgaggaguucugcgacaugcugagacuguucgacuucaacaagcaggccaucagaagacugaagacccccgcccagaugaacauccagcugaucaacaaggccgugaacgcccugaucaacgaccagcugaucaugaagaaccaccugagagacaucaugugcauccccuacugcaacuacagcaaguacugguaccugaaccacaccgugaccggcaagaccagccugcccagaugcuggcuggugagcaacggcagcuaccugaacgagacccacuucagcgacgacaucgagcagcaggccgacaacaugaucaccgagcugcugcagaaggaguacauggacagacagggcaagaccccccugggccugguggaccuguucguguucagcaccagcuucuaccugaucagcaucuuccugcaccuggugaagauccccacccacagacacgugaucggcaagcccugccccaagccccacagacugaaccacaugggcaucugcagcugcggccuguacaagcaccccggcgugcccgugaaguggaagagauga

SEQ ID NO: 5247 - RNA, 1473 nt, Artificial Sequence
  derived and/or modified protein sequence (opt4) from LASV(Nig08-04;Clade II)__ADU56610__GPCstabilized
augggccagaucgugaccuucuuccaggaggugccccacgugaucgaggaggugaugaacaucgugcugaucgcccugagccugcuggccauccugaagggcaucuacaacguggccaccugcggccuguucggccugaucagcuuccugcugcugugcggcagaagcugcagcaccaccuacaagggcguguacgagcugcagacccuggagcuggacauggccaaccugaacaugaccaugccccugagcugcaccaagaacagcagccaccacuacaucauggugggcaacgagaccggccuggagcugacccugaccaacaccagcaucaucaaccacaaguucugcaaccugagcgacgcccacaagaagaaccuguacgaccacgcccugaugagcaucaucagcaccuuccaccugagcauccccaacuucaaccaguacgaggccaugagcugcgacuucaacggcggcaagaucagcgugcaguacaaccugagccacgccuacgccguggacgccgccaaccacugcggcaccaucgccaacggcgugcugcagaccuucaugagaauggccuggggcggcagcuacaucgcccuggacagcggcugcggcaacugggacugcaucaugaccagcuaccaguaccugaucauccagaacaccaccugggaggaccacugccaguucagcagacccagccccaucggcuaccugggccugcugagccagagaaccagagacaucuacaucagcagaagacgccggggcaccuucaccuggacccugagcgacagcgagggcaacgaggcccccggcggcuacugccugaccagauggaugcugaucgaggccgagcugaagugcuucggcaacaccgccaucgccaagugcaacgagaagcacgacgaggaguucugcgacaugcugagacuguucgacuucaacaagcaggccaucaagagacugaaggcccccgcccagaugagcauccagcugaucaacaaggccgugaacgcccugaucaacgaccagcugaucaugaagaaccaccugagagacaucaugugcauccccuacugcaacuacagcaaguacugguaccugaaccacaccgugaccggcaagaccagccugcccagaugcuggcugaucagcaacggcagcuaccugaacgagacccacuucagcgacgacaucgagcagcaggccgacaacaugaucaccgagcugcugcagaaggaguacauggacagacagggcaagaccccccugggccugguggaccuguucguguucagcaccagcuucuaccugaucagcaucuuccugcaccuggugaagauccccacccacagacacaucgugggcagacccugccccaagccccacagacugaaccacaugggcaucugcagcugcggccuguacaagcaccccggcgugcccgugaaguggaagagauga

SEQ ID NO: 5248 - RNA, 1473 nt, Artificial Sequence
  derived and/or modified protein sequence (opt4) from LASV(Nig08-A41;Clade II)__ADU56626__GPCstabilized
augggccagaucaucaccuucuuccaggaggugccccacgugaucgaggaggugaugaacaucgugcugaucgcccugagccugcuggccauccugaagggcaucuacaacguggccaccugcggccuguucggccuggugagcuuccugcugcugugcggcagaagcugcagcaccaccuacaagggcguguacgagcugcagacccuggagcugaacauggccagccugaacaugaccaugccccugagcugcaccaagaacaacagccaccacuacaucauggugggcaacgagaccggccuggagcugacccugaccaacaccagcaucaucaaccacaaguucugcaaccugagcgacgcccacaagagaaaccuguacgaccacgcccugaugagcaucaucagcaccuuccaccugagcauccccaacuucaaccaguacgaggccaugagcugcgacuucaacggcggcaagaucagcgugcaguacaaccugagccacaccuacgccguggacgccgccaagcacugcggcaccaucgccaacggcgugcugcagaccuucaugagaauggccuggggcggcagcuacaucgcccuggacagcggcugcggcagcugggacugcaucaugaccagcuaccaguaccugaucauccagaacaccaccugggaggaccacugccaguucagcagacccagccccaucggcuaccugggccugcugagccagagaaccagagacaucuacaucagcagaagacgccggggcaccuucaccuggacccugagcgacagcgagggcaacgagacccccggcggcuacugccugaccagauggaugcugaucgaggccgagcugaagugcuucggcaacaccgccguggccaagugcaacgagaagcacgacgaggaguucugcgacaugcugagacuguucgacuucaacaagcaggccaucagaagacugaaggcccccgcccagaugagcauccagcugaucaacaaggccgugaacgcccugaucaacgaccagcugaucaugaagaaccaccugagagacaucaugugcauccccuacugcaacuacagcaaguacugguaccugaaccacaccgugaccggcaagaccagccugcccagaugcuggcuggugagcaacggcagcuaccugaacgagacccacuucagcgacgacaucgagcagcaggccgacaacaugaucaccgagcugcugcagaaggaguacaucgacagacagggcaagaccccccugggccugguggaccuguucguguucagcaccagcuucuaccugaucagcaucuuccugcaccuggugaagauccccacccacagacacgugaucggcaagcccugccccaagccccacagacugaaccacaugggcaucugcagcugcggccuguacaagcaccccggcgugcccgugaaguggaagagauga

SEQ ID NO: 5249 - RNA, 1473 nt, Artificial Sequence
  derived and/or modified protein sequence (opt4) from LASV(Nig08-A47;Clade II)__ADU56630__GPCstabilized
augggccagaucaucaccuucuuccaggaggugccccacgugaucgaggaggugaugaacaucgugcugaucgcccugagccugcuggccauccugaagggcaucuacaacguggccaccugcggccuguucggccuggugagcuuccugcugcugugcggcagaagcugcagcaccaccuacaagggcguguacgagcugcagacccuggagcuggacauggccagccugaacaugaccaugccccugagcugcaccaagaacaacagccaccacuacaucauggugggcaacgagaccggccuggagcugacccugaccaacaccagcaucaucaaccacaaguucugcaaccugagcgacgcccacaagaagaaccuguacgaccacgcccugaugagcaucaucagcaccuuccaccugagcauccccaacuucaaccaguacgaggccaugagcugcgacuucaacggcggcaagaucagcgugcaguacaaccugagccacgccuacgccguggacgccgccaaccacugcggcaccaucgccaacggcgugcugcagaccuucaugagaauggccuggggcggcagcuacaucgcccuggacagcggcugcggcagcugggacugcaucaugaccagcuaccaguaccugaucauccagaacaccaccugggaggaccacugccaguucagcagacccagccccaucggcuaccugggccugcugagccagagaaccagagacaucuacaucagcagaagacgccggggcaccuucaccuggacccugagcgacagcgagggcaacgagacccccggcggcuacugccugaccagauggaugcugaucgaggccgagcugaagugcuucggcaacaccgccguggccaagugcaacgagaagcacgacgaggaguucugcgacaugcugagacuguucgacuucaacaagcaggccaucagaagacugaagacccccgcccagaugagcauccagcugaucaacaaggccgugaacgcccugaucaacgaccagcugaucaugaagaaccaccugagagacaucaugugcauccccuacugcaacuacagcaaguacugguaccugaaccacaccgugaccggcaagaccagccugcccagaugcuggcuggugagcaacggcagcuaccugaacgagacccacuucagcgacgacaucgagcagcaggccgacaacaugaucaccgagcugcugcagaaggaguacauggacagacagggcaagaccccccugggccugguggaccuguucguguucagcaccagcuucuaccugaucagcaucuuccugcaccuggugagaauccccacccacagacacgugaucggcaagcccugccccaagccccacagacugaaccacaugggcaucugcagcugcggccuguacaagcaccccggcgugcccgugaaguggaagagauga

SEQ ID NO: 5250 - RNA, 1473 nt, Artificial Sequence
  derived and/or modified protein sequence (opt4) from LASV(CSF;Clade III)__AAL13212__GPCstabilized
augggccagaucgugaccuucuuccaggaggugccccacgugaucgaggagaucaugaacaucgugcugaucacccugagccugcuggccauccugaagggcguguacaaccuggccaccugcggccugaucggccugaucaccuuccuguuccugugcggcagaagcugcagcaugaccuacaagggcagcuaccagcuggagacccuggagcugaacauggagacccugaacaugaccaugccccugagcugcaccaagaacaccagccaccacuacaucagagugggcaacgagaccggccuggagcugacccugaccaacaccagcaucaucaaccacaaguucugcaaccugagcgacgcccacaagaagaaccuguacgaccacagccugaugagcaucaucagcaccuuccaccugagcauccccaacuucaaccaguacgaggccaugagcugcgacuucaacggcggcaagaucagcauccaguacaaccugagccacaccuacgccggcgacgccgccaagcacugcggcacccuggccaacggcauccugcagaccuucaugagaauggccuggggcggcagcuacaucgcccuggacagcggcugcggcaacugggacugcaucaugaccagcuaccaguaccugaucauccagaacaccaccugggaggaccacugccaguucagcagacccagccccaucggcuaccugggccugcugagccagagaaccagagagaucuacaucagcagaagacgccggggcaccuucaccuggacccugagcgacagcgagggcaacgagaaccccggcggcuacugccugaccagauggaugcugaucgaggccgagcugaagugcuucggcaacaccgccguggccaagugcaacgagaagcacgacgaggaguucugcgacaugcugagacuguucgacuucaacaagcaggccauccagagacugaaggcccccgcccagaugagcauccagcugaucaacaaggccgugaacgcccugaucaacgaccagcugaucaugaagaaccaccugagagacaucaugugcauccccuacugcaacuacagcaaguacugguaccugaaccacaccaccaccggcagaaccagccugcccagaugcuggcuggugagcaacggcagcuaccugaacgagaccagauucagcgacgacaucgagcagcaggccgacaacaugaucaccgagaugcugcagaaggaguacaucgacagacagggcaagaccccccugggccugguggaccuguucguguucagcaccagcuucuaccugaucagcaucuuccugcaccugaucaagauccccacccacagacacaucgugggcggccccugccccaagccccacagacugaaccacaagggcaucugcagcugcggccuguacaagagacccggcgugagcgugagauggaagagauga

SEQ ID NO: 5251 - RNA, 1473 nt, Artificial Sequence
  derived and/or modified protein sequence (opt4) from LASV(ISTH2121-NIG-2012;Clade III)__AIT17540__GPCstabilized
augggccagaucgugaccuucuuccaggaggugccccacgugaucgaggagaucaugaacaucgugcugaucacccugagccugcuggccauccugaagggcaucuacaacuucgccaccugcggccugaucggccugaucaccuuccuguuccugugcggcagaagcugcagcaccaucuacaagggcagcuaccagcugcagacccuggagcugaacauggagacccugaacaugaccaugccccugagcugcaccaagaacaacagccaccacuacaucagagugggcaacgagaccggccuggagcugacccugaccaacaccagcaucaucaaccacaaguucugcaaccugagcgaggcccacaagaagaaccuguacgaccacgcccugaugagcaucaucagcaccuuccaccugagcauccccaacuucaaccaguacgaggccaugagcugcgacuucaacggcggcaagaucagcgugcaguacaaccugagccacagcuacgccguggacgccgccaaccacugcggcaccguggccaacggcgugcugcagaccuucaugagaauggccuggggcggcagcuacaucgcccuggacagcggcugcggcaacugggacugcaucaugaccagcuaccaguaccugaucauccagaacaccaccugggaggaccacugccaguucagcagacccagccccaucggcuaccugggccugcugagccagagaaccagagacaucuacaucagcagaagacgccggggcaccuucaccuggacccugagcgacagcgagggcaaggagacccccggcggcuacugccugaccagauggaugcugaucgaggccgagcugaagugcuucggcaacaccgccguggccaagugcaacgagaagcacgacgaggaguucugcgacaugcugagacuguucgacuucaacaagcaggccauccagagacugaagacccccgcccagaugagcauccagcugaucaacaaggccgugaacgcccugaucaacgaccagcugaucaugaagaaccaccugagagacaucaugugcauccccuacugcaacuacagcaaguacugguaccugaaccacaccagcaccggcagaaccagccugcccaagugcuggcuggugagcaacggcagcuaccugaacgagacccacuucagcgacgacaucgagcagcaggccgacaacaugaucaccgagaugcugcagaaggaguacaucgacagacagggcaagaccccccugggccugguggaccuguucguguucagcaccagcuucuaccugaucagcaucuuccugcaccuggugaagauccccacccacagacacaucgugggcaagagcugccccaagccccacagacugaaccacaugggcaucugcagcugcggccuguacaagcagcccggcgugcccgugaaguggaagagauga

SEQ ID NO: 5252 - RNA, 1473 nt, Artificial Sequence
  derived and/or modified protein sequence (opt4) from LASV(Nig08-A19;Clade III)__ADU56618__GPCstabilized
augggccagaucgugaccuucuuccaggaggugccccacgugaucgaggaggugaugaacaucgugcugaucgcccugagcauccuggccauccugaagggccuguacaacaucgccaccugcggccugaucggccuggugaccuuccugcugcugagcggcagaagcugcagcaugaccuacaagggcguguacgagcugcagacccuggagcugaacaugaacacccugaacaugaccaugccccugagcugcaccaagaacaacagccaccacuacaucauggugggcaacgagaccggccuggagcugacccugaccaacaccagccugcugcaccacaaguucugcaaccugagcgacgcccacaagaagaaccuguacgaccacacccugaugagcaucaucagcaccuuccaccugagcauccccaacuucaaccaguacgaggccaugagcugcgacuucaacggcggcaagaucaccgugcaguacaaccugagccacagcuacgccaucgacgccgccaaccacugcggcaccguggccaacggcgugcugcagaccuucaugagaauggccuggggcggcagcuacaucgcccuggacagcggcugcggcaagugggacugcaucaugaccagcuaccaguaccugaucauccagaacaccaccugggaggaccacugccaguucagcagacccagccccaucggcuaccugggccugcugagccagagaaccagagacaucuacaucagcagaagacgccggggcaccuucaccuggacccugagcgacagcgagggcaacgagacccccggcggcuacugccugaccagauggaugcugaucgaggccgagcugaagugcuucggcaacaccgccguggccaagugcaacgagaagcacgacgaggaguucugcgacaugcugagacuguucgacuucaacaagcaggccaucagaagacugaaggcccccgcccagaugagcauccagcugaucaacaaggccgugaacgcccugaucaacgaccagcugaucaugaagaaccaccugagagacaucaugugcauccccuacugcaacuacagcaaguacugguaccugaaccacaccagcaccggcagaaccagccugcccagaugcuggcuggugagcaacggcagcuaccugaacgagacccacuucagcgacgacaucgagcagcaggccgacaacaugaucaccgagaugcugcagaaggaguaccuggacagacagggcaagaccccccugggccugguggaccuguucguguucagcaccagcuucuaccugaucagcaucuuccugcaccuggugaagauccccacccacagacacaucgugggcaagcccugccccaagccccacagacugaaccacaugggcaucugcagcugcggccuguacaagcagcccggcgugcccgugagauggaagagauga

SEQ ID NO: 5253 - RNA, 1473 nt, Artificial Sequence
  derived and/or modified protein sequence (opt4) from LASV(ONM-299;Clade III)__ANH09734__GPCstabilized
augggccagaucgugaccuucuuccaggaggugccccacgugaucgaggagaucaugaacaucgugcugaucacccugagccugcuggccauccugaagggccuguacaacuucgccaccugcggccugaucggccugaucaccuuccuguuccugugcggcagaagcugcagcaugaucuacaagggcagcuaccagcuggagacccuggagcugaacauggagacccugaacaugaccaugccccugagcugcaccaagaacaacagccaccacuacaucagagugggcaacgagaccggccuggagcugacccugaccaacaccagcaucaucggccacaaguucugcaaccugagcgacgcccacaagaagaaccuguacgaccacagccugaugagcaucaucagcaccuuccaccugagcauccccaacuucaaccaguacgaggccaugagcugcgacuucaacggcggcaagaucagcauccaguacaaccugagccacaccuacgccggcgacgccgccaagcacugcggcaccguggccaacggcgugcugcagaccuucaugagaauggccuggggcggcagcuacaucgcccuggacagcggcugcggcaacugggacugcaucaugaccagcuaccaguaccugaucauccagaacaccaccugggaggaccacugccaguucagcagacccagccccaucggcuaccugggccugcugagccagagaaccagagacaucuacaucagcagaagacgccggggcaccuucaccuggacccugagcgacagcgagggcaaggagacccccggcggcuacugccugaccagauggaugcugaucgaggccgagcugaagugcuucggcaacaccgccguggccaagugcaacgagaagcacgacgaggaguucugcgacaugcugagacuguucgacuucaacaagcaggccauccagagacugaagacccccgcccagaugagcauccagcugaucaacaaggccgugaacgcccugaucaacgaccagcugaucaugaagaaccaccugagagacaucaugugcauccccuacugcaacuacagcaaguacugguaccugaaccacaccagcaccggcagaaccagccugcccaagugcuggcuggugagcaacggcagcuaccugaacgagacccacuucagcgacgacaucgagcagcaggccgacaacaugaucaccgagaugcugcagaaggaguacaucgacagacagggcaagaccccccugggccugguggacguguucguguucagcaccagcuucuaccugaucagcaucuuccugcaccuggugaagauccccacccacagacacaucgugggcaagagcugccccaagccccacagacugaaccacaugggcaucugcagcugcggccuguacaagcagcccggcgugcccgugagauggaagagauga

SEQ ID NO: 5254 - RNA, 1473 nt, Artificial Sequence
  derived and/or modified protein sequence (opt4) from LASV(ONM-700;Clade III)__ANH09738__GPCstabilized
augggccagaucgugaccuucuuccaggaggugccccacgugaucgaggagaucaugaacaucgugcugaucacccugagccugcuggccauccugaagggccuguacaacuucgccaccugcggccugaucggccugaucaccuuccuguuccugugcggcagaagcugcagcaugaucuacaagggcagcuaccagcuggagacccuggagcugaacauggagacccugaacaugaccaugccccugagcugcaccaagaacaacagccaccacuacaucagagugggcaacgagaccggccuggagcugacccugaccaacaccagcaucaucaaccacaaguucugcaaccugagcgacgcccacaagagaaaccuguacgaccacagccugaugagcaucaucagcaccuuccaccugagcauccccaacuucaaccaguacgaggccaugagcugcgacuucaacggcggcaagaucagcauccaguacaaccugagccacaccuacgccggcgacgccgccaagcacugcggcaccguggccaacggcgugcugcagaccuucaugagaauggccuggggcggcagcuacaucgcccuggacagcggcugcggcaacugggacugcaucaugaccagcuaccaguaccugaucauccagaacaccaccugggaggaccacugccaguucagcagacccagccccaucggcuaccugggccugcugagccagagaaccagagacaucuacaucagcagaagacgccggggcaccuucaccuggacccugagcgacagcgagggcaaggagacccccggcggcuacugccugaccagauggaugcugaucgaggccgagcugaagugcuucggcaacaccgccguggccaagugcaacgagaagcacgacgaggaguucugcgacaugcugagacuguucgacuucaacaagcaggccauccagagacugaagacccccgcccagaugagcauccagcugaucaacaaggccgugaacgcccugaucaacgaccagcugaucaugaagaaccaccugagagacaucaugugcauccccuacugcaacuacagcaaguacugguaccugaaccacaccagcaccggcagaaccagccugcccaagugcuggcuggugagcaacggcagcuaccugaacgagacccacuucagcgacgacaucgagcagcaggccgacaacaugaucaccgagaugcugcagaaggaguacaucgacagacagggcaagaccccccugggccugguggacguguucauguucagcaccagcuucuaccugaucagcaucuuccugcaccuggugaagauccccacccacagacacaucgugggcaagagcugccccaagccccacagacugaaccacaugggcaucugcagcugcggccuguacaagcagcccggcgugcccgugagauggaagagauga

SEQ ID NO: 5255 - RNA, 1473 nt, Artificial Sequence
  derived and/or modified protein sequence (opt4) from LASV(Weller;Clade III)__AAT49010__GPCstabilized
augggccagaucgugaccuucuuccaggaggugccccacgugaucgaggaggugaugaacaucgugcugaucgcccugagcgugcuggccauccugaagggccuguacaacuucgccaccugcggccugaucggccuggugaccuuccugcugcugagcggcagaagcugcagcaugaucuacaagggcguguacgagcugcagacccuggagcugaacauggagacccugaacaugaccaugccccugagcugcaccaagaacaccagccaccacuacaucagagugggcaacgacaccggccuggagcugacccugaccaacgagacccugcugcaccacaaguucugcaaccugagcgacgcccacaagagaaaccuguacgaccacgcccugaugagcaucaucagcaccuuccaccugagcauccccaacuucaaccaguacgaggccaugagcugcgacuucaacggcggcaagaucaccgugcaguacaaccugagccacagcuacgccguggacgccgccaagcacugcggcaccguggccaacggcgugcugcagaccuucaugagaauggccuggggcggcagcuacaucgcccuggacagcagaugcggcaacugggacugcaucaugaccagcuaccaguaccugaucauccagaacaccaccugggaggaccacugccaguucagcagacccagccccaucggcuaccugggccugcugagccagagaaccagagacaucuacaucagcagaagacgccggggcaccuucaccuggacccugagcgacagcgagggcaacgagacccccggcggcuacugccugaccagauggaugcugaucgaggccgagcugaagugcuucggcaacaccgccguggccaagugcaacgagaagcacgacgaggaguucugcgacaugcugagacuguucgacuucaacaagcaggccaucagaagacugaagacccccgcccagaugagcauccagcugaucaacaaggccgugaacgcccugaucaacgaccagcugaucaugaagaaccaccugagagacaucaugugcauccccuacugcaacuacagcaaguacugguaccugaaccacaccagcaccggcaagaccagccugcccagaugcuggcuggugagcaacggcagcuaccugaacgagacccacuucagcgacgacaucgagcagcaggccgacaacaugaucaccgagaugcugcagaaggaguaccuggacagacagggcaagaccccccugggccugguggaccuguucguguucagcaccagcuucuaccugaucagcaucuuccugcaccugaucaagauccccacccacagacacaucgugggcaagcccugccccaagccccacagacugaaccacaugggcaucugcagcugcggccuguacaagcagcccggcgugcccgugagauggaagagauga

SEQ ID NO: 5256 - RNA, 1476 nt, Artificial Sequence
  derived and/or modified protein sequence (opt4) from LASV(BA366;Clade IV)__ADI39451__GPCstabilized
augggccagaucgugaccuucuuccaggaggugccccacgugaucgaggaggugaugaacaucgugcugaucgcccugagcgugcuggccgugcugaagggccuguacaacguggccaccugcggccugaucggccugaucgccuuccugcugcugugcggcagaagcugcaccaccacccuguacaagggcguguacgagcugcaggcccuggagcugaacauggagacccugaacaugaccaugccccugagcugcaccaagaacaacagccaccacuacaucauggugggcaacgagaccggccuggagcugacccugaccaacaccagcaucaucaaccacaaguucugcaaccugagcgacgcccacaagaagaaccuguacgaccacgcccugaugagcaucaucagcaccuuccaccugagcauccccaacuucaaccaguacgaggccaugagcugcgacuucaacggcggcaagaucagcgugcaguacaaccugagccacaccuacgccguggacgccgccaaccacugcggcaccguggccaacggcgugcugcagaccuucaugagaauggccuggggcggcagcuacaucgcccuggacagcggcugcggcagcugggacugcaucaugaccagcuaccaguaccugaucauccagaacaccaccugggaggaccacugccaguucagcagacccagccccaucggcuaccugggccugcugagccagagaaccagagacaucuacaucagcagaagacgccggggcaccuucaccuggacccugagcgacagcgagggcaaggacacccccggcggcuacugccugaccagauggaugcugaucgaggccgagcugaagugcuucggcaacaccgccguggccaagugcaacgagaagcacgacgaggaguucugcgacaugcugagacuguucgacuucaacaagcaggccauccagagacugaaggcccccgcccagaugagcauccagcugaucaacaaggccgugaacgcccugaucaacgaccagcugaucaugaagaaccaccugagagacaucaugugcauccccuacugcaacuacagcaaguacugguaccugaaccacaccaucaccggcagaaccagccugcccaagugcuggcuggugagcaacggcagcuaccugaacgagacccacuucagcgacgacaucgagcagcaggccgacaacaugaucaccgagaugcugcagaaggaguacaucgagagacagggcaagaccccccugggccugguggaccuguucguguucagcaccagcuucuaccugaucagcaucuuccugcaccugaucaagauccccacccacagacacaucgugaacaagcccugccccaagccccacagacugaaccacaugggcgugugcagcugcggccuguacaagcagcccggcgugcccgugagauggaagagauga

SEQ ID NO: 5257 - RNA, 1476 nt, Artificial Sequence
  derived and/or modified protein sequence (opt4) from LASV(G1180-SLE-2010;Clade IV)__AIT17168__GPCstabilized
augggccagaucgugaccuucuuccaggaggugccccacgugaucgaggaggugaugaacaucgugcugaucgcccugagcauccuggccgugcugaagggccuguacaacuucgccaccugcggccuggugggccugcugaccuuccugcugcugugcggcagaagcugcaccgccagcagauacaagggcguguacgagcugcagacccuggagcugaacauggagacccugaacaugaccaugccccugagcugcaccaagaacaacagccaccacuacaucauggugggcaacgagaccggccuggagcugacccugaccaacaccagcaucaucaaccacaaguucugcaaccugagcgacgcccacaagaagaaccuguacgaccacgcccugaugagcaucaucagcaccuuccaccugagcauccccaacuucaaccaguacgaggccaugagcugcgacuucaacggcggcaagaucagcgugcaguacaaccugagccacagcuacgccggcgacgccgccaaccacugcggcaccguggccaacggcgugcugcagaccuucaugagaauggccuggggcggcagcuacaucgcccuggacagcggcugcggcagcugggacugcaucaugaccagcuaccaguaccugaucauccagaacaccaccugggaggaccacugccaguucagcagacccagccccaucggcuaccugggccugcugagccagagaaccagagacaucuacaucagcagaagacgccggggcaccuucaccuggacccugagcgacagcgagggcaaggacacccccggcggcuacugccugaccagauggaugcugaucgaggccgagcugaagugcuucggcaacaccgccguggccaagugcaacgagaagcacgacgaggaguucugcgacaugcugagacuguucgacuucaacaagcaggccauccagagacugaaggcccccgcccagaugagcauccagcugaucaacaaggccgugaacgcccugaucaacgaccagcugaucaugaagaaccaccugagagacaucaugugcauccccuacugcaacuacagcaaguacugguaccugaaccacaccaccaccggcaagaccagccugcccaagugcuggcuggugagcaacggcagcuaccugaacgagacccacuucagcgacgacaucgagcagcaggccgacaacaugaucaccgagaugcugcagaaggaguacauggagagacagggcaagaccccccugggccugguggaccuguucguguucagcaccagcuucuaccugaucagcaucuuccugcaccuggugaagauccccacccacagacacaucgugggcaagagcugccccaagccccacagacugaaccacaugggcaucugcagcugcggccuguacaagcagcccggcgugcccgugaaguggaagagauga

SEQ ID NO: 5258 - RNA, 1476 nt, Artificial Sequence
  derived and/or modified protein sequence (opt4) from LASV(G1190-SLE-2010;Clade IV)__AIT17172__GPCstabilized
augggccagaucgugaccuucuuccaggaggugccccacgugaucgaggaggugaugaacaucgugcugaucgcccugagcauccuggccgugcugaagggccuguacaacuucgccaccugcggccuggugggccuggugaccuuccugcugcugugcggcagaagcugcaccaccagccuguacaagggcguguacgagcugcagacccuggagcugaacauggagacccugaacaugaccaugccccugagcugcaccaagaacaacagccaccacuacaucauggugggcaacgagaccggccuggagcugacccugaccaacaccagcaucaucaaccacaaguucugcaaccugagcgacgcccacaagaagaaccuguacgaccacgcccugaugagcaucaucagcaccuuccaccugagcauccccaacuucaaccaguacgaggccaugagcugcgacuucaacggcggcaagaucagcgugcaguacaaccugagccacagcuacgccggcgacgccgccaaccacugcggcaccguggccaacggcgugcugcagaccuucaugagaauggccuggggcggcagcuacaucgcccuggacagcggcugcggcagaugggacugcaucaugaccagcuaccaguaccugaucauccagaacaccaccugggaggaccacugccaguucagcagacccagccccaucggcuaccugggccugcugagccagagaaccagagacaucuacaucagcagaagacgccggggcaccuucaccuggacccugagcgacagcgagggcaaggacacccccggcggcuacugccugaccagauggaugcugaucgaggccgagcugaagugcuucggcaacaccgccguggccaagugcaacgagaagcacgacgaggaguucugcgacaugcugagacuguucgacuucaacaagcaggccauccagagacugaaggcccccgcccagaugagcauccagcugaucaacaaggccgugaacgcccugaucaacgaccagcugaucaugaagaaccaccugagagacaucaugugcauccccuacugcaacuacagcaaguacugguaccugaaccacaccaccaccggcaagaccagccugcccaagugcuggcuggugagcaacggcagcuaccugaacgagacccacuucagcgacgacaucgagcagcaggccgacaacaugaucaccgagaugcugcagaaggaguacauggagagacagggcaagaccccccugggccugguggaccuguucguguucagcaccagcuucuaccugaucagcaucuuccugcaccuggugaagauccccacccacagacacaucgugggcaagcccugccccagaccccacagacugaaccacaugggcaucugcagcugcggccuguacaagcagcccggcgugcccgugaaguggaagagauga

SEQ ID NO: 5259 - RNA, 1476 nt, Artificial Sequence
  derived and/or modified protein sequence (opt4) from LASV(G1200-LIB-2010;Clade IV)__AIT17176__GPCstabilized
augggccagaucgugaccuucuuccaggaggugccccacgugaucgaggaggugaugaacaucgugcugaucgcccugagccugcuggccgugcugaagggccuguacaacguggccaccugcggccugaucggccugaucaccuuccugcugcugugcggcagaagcugcaccaccaaccuguacaagggcguguacgagcugcaggcccuggagcugaacauggagacccugaacaugaccaugccccugagcugcaccaagaacaacagccaccacuacaucauggugggcaacgagaccggccuggagcugacccugaccaacaccagcaucaucaaccacaaguucugcaaccugagcgacgcccacaagaagaaccuguacgaccacgcccugaugagcaucaucagcaccuuccaccugagcauccccaacuucaaccaguacgaggccaugagcugcgacuucaacggcggcagaaucagcgugcaguacaaccugagccacagcuacgccggcgacgccgccagccacugcggcaccaucgccaacggcgugcugcagaccuucaugagaauggccuggggcggcagcuacaucgcccuggacagcggcugcggcggcugggacugcaucaugaccagcuaccaguaccugaucauccagaacaccaccugggaggaccacugccaguucagcagacccagccccaucggcuaccugggccugcugagccagagaaccagagacaucuacaucagcagaagacgccggggcaccuucaccuggacccugagcgacagcgagggcaaggacacccccggcggcuacugccugaccagauggaugcugaucgaggccgagcugaagugcuucggcaacaccgccguggccaagugcaacgagaagcacgacgaggaguucugcgacaugcugagacuguucgacuucaacaagcaggccauccagagacugaaggcccccgcccagaugagcauccagcugaucaacaaggccgugaacgcccugaucaacgaccagcugaucaugaagaaccaccugagagacaucaugugcauccccuacugcaacuacagcaaguacugguaccugaaccacaccgugaccggcaagaccagccugcccaagugcuggcuggugagcaacggcagcuaccugaacgagacccacuucagcgacgacaucgagcagcaggccgacaacaugaucaccgagaugcugcagaaggaguacauggagagacagggcaagaccccccugggccugguggaccuguucguguucagcaccagcuucuaccugaucagcaucuuccugcaccuggugaagauccccacccacagacacguggugggcaagcccugccccaagccccacagacugaaccacaugggcaucugcagcugcggccuguacaagcagcccggcgugcccgugagauggaagagauga

SEQ ID NO: 5260 - RNA, 1476 nt, Artificial Sequence
  derived and/or modified protein sequence (opt4) from LASV(G1442-SLE-2011;Clade IV)__AIT17180__GPCstabilized
augggccagaucgugaccuucuuccaggaggugccccacgugaucgaggaggugaugaacaucgugcugaucgcccugagcauccuggccgugcugaagggccuguacaacguggccaccugcggccugaucggccuggugaccuuccugcugcugugcggcagaagcugcaccaccacccuguacaagggcguguacgagcugcagacccuggagcugaacauggagacccugaacaugaccaugccccugagcugcaccaagaacaacagccaccacuacaucagagugggcaacgagaccggccuggagcugacccugaccaacaccagcaucaucaaccacaaguucugcaaccugagcgacgcccacaagaagaaccuguacgaccacgcccugaugagcaucaucagcaccuuccaccugagcauccccaacuucaaccaguacgaggccaugagcugcgacuucaacggcggcaagaucagcgugcaguacaaccugagccacagcuacgccggcgacgccgccaaccacugcggcaccguggccaacggcgugcugcagaccuucaugagaauggccuggggcggcagcuacaucgcccuggacagcggcugcggcaacugggacugcaucaugaccagcuaccaguaccugaucauccagaacaccaccugggacgaccacugccaguucagcagacccagccccaucggcuaccugggccugcugagccagagaaccagagacguguacaucagcagaagacgccggggcaccuucaccuggacccugagcgacagcgagggcaaggacacccccggcggcuacugccugaccagauggaugcugaucgaggccgagcugaagugcuucggcaacaccgccguggccaagugcaacgagaagcacgacgaggaguucugcgacaugcugagacuguucgacuucaacaagcaggccauccagagacugaaggcccccgcccagaugagcauccagcugaucaacaaggccgugaacgcccugaucaacgaccagcugaucaugaagaaccaccugagagacaucaugugcauccccuacugcaacuacagcaaguacugguaccugaacaacaccgccaccggcaagaccagccugcccaagugcuggcugaucagcaacggcagcuaccugaacgagacccacuucagcgacgacaucgagcaggaggccgacaacaugaucaccgagaugcugcagaaggaguacauggagagacagggcaagaccccccugggccugguggaccuguucguguucagcaccagcuucuaccugaucagcaucuuccugcaccuggugaagauccccacccacagacacaucgugggcaagagcugccccaagccccacagacugaaccacaugggcaucugcagcugcggccuguacaagcagcccggcgugcccgugagauggaagagauga

SEQ ID NO: 5261 - RNA, 1476 nt, Artificial Sequence
  derived and/or modified protein sequence (opt4) from LASV(G1529-SLE-2011;Clade IV)__AIT17184__GPCstabilized
augggccagaucgugaccuucuuccaggaggugccccacgugaucgaggaggugaugaacaucgugcugaucgcccugagcauccuggccgugcugaagggccuguacaacguggccaccugcggccugaucggccuggugaccuuccugcugcugugcggcagaagcugcaccaccacccuguacaagggcguguacgagcugcaggcccuggagcugaacauggagacccugaacaugaccaugccccugagcugcaccaagaacaacagccaccacuacaucagagugggcaacgagaccggccuggagcugacccugaccaacaccagcaucaucgaccacaaguucugcaaccugagcgacgcccacaagaagaaccuguacgaccacgcccugaugagcaucaucagcaccuuccaccugagcauccccaacuucaaccaguacgaggccaugagcugcgacuucaacggcggcaagaucagcgugcaguacaaccugagccacagcuacgccggcgacgccgccaaccacugcggcaccguggccaacggcgugcugcagaccuucaugagaauggccuggggcggcagcuacaucgcccuggacagcggcugcaacggcugggacugcaucaugaccagcuaccaguaccugaucauccagaacaccaccugggacgaccacugccaguucagcagacccagccccaucggcuaccugggccugcugagccagagaaccagagacaucuacaucagcagaagacgccggggcaccuucaccuggacccugagcgacagcgagggcaaggacacccccggcggcuacugccugaccagauggaugcugaucgaggccgagcugaagugcuucggcaacaccgccguggccaagugcaacgagaagcacgacgaggaguucugcgacaugcugagacuguucgacuucaacaagcaggccaucagaagacugaaggcccccgcccagaugagcauccagcugaucaacaaggccgugaacgcccugaucaacgaccagcugaucaugaagaaccaccugagagacaucaugugcauccccuacugcaacuacagcaaguacugguaccugaacaacaccgccaccggcaagaccagccugcccagaugcuggcuggugagcaacggcagcuaccugaacgagacccacuucagcgacgacaucgagcagcaggccgacaacaugaucaccgagaugcugcagagagaguacauggagagacagggcaagaccccccugggccugguggaccuguucguguucagcaccagcuucuaccugaucagcaucuuccugcaccuggugaagauccccacccacagacacaucgugggcaagcccugccccaagccccacagacugaaccacaugggcaucugcagcugcggccuguacaagcagcccggcgugcccgugaaguggaagagauga

SEQ ID NO: 5262 - RNA, 1476 nt, Artificial Sequence
  derived and/or modified protein sequence (opt4) from LASV(G1618-SLE-2011;Clade IV)__AIT17188__GPCstabilized
augggccagaucgugaccuucuuccaggaggugccccacgugaucgaggaggugaugaacaucgugcugaucgcccugagcauccuggccgugcugaagggccuguacaacuucgccaccugcggcuucgugggccuggugagcuuccugcugcugugcggcagaagcugcaccaccagccuguacaagggcguguacgagcugcagacccuggagcugaacauggagacccugaacaugaccaugccccugagcugcaccaagaacaacagccaccacuacaucauggugggcaacgagaccggccuggagcugacccugaccaacaccagcaucaucaaccacaaguucugcaaccugagcgacgcccacaagaagaaccuguacgaccacgcccugaugagcaucaucagcaccuuccaccugagcauccccaacuucaaccaguacgaggccaugagcugcgacuucaacggcggcaagaucagcgugcaguacaaccugagccacagcuacgccguggacgccgccaaccacugcggcaccguggccaacggcgugcugcagaccuucaugagaauggccuggggcggcagcuacaucgcccuggacagcggcugcggcagcugggacugcaucaugaccagcuaccaguaccugaucauccagaacaccaccugggaggaccacugccaguucagcagacccagccccaucggcuaccugggccugcugagccagagaaccagagacaucuacaucagcagaagacgccggggcaccuucaccuggacccugagcgacagcgagggcaaggacacccccggcggcuacugccugaccagauggaugcugaucgaggccgagcugaagugcuucggcaacaccgccguggccaagugcaacgagaagcacgacgaggaguucugcgacaugcugagacuguucgacuucaacaagcaggccauccagagacugagagcccccgcccagaugagcauccagcugaucaacaaggccgugaacgcccugaucaacgaccagcugaucaugaagaaccaccugagagacaucaugugcauccccuacugcaacuacagcaaguacugguaccugaaccacaccaccaccggcagaaccagccugcccaagugcuggcuggugagcaacggcagcuaccugaacgagacccacuucagcgacgacaucgagcagcaggccgacaacaugaucaccgagaugcugcagaaggaguacauggagagacagggcaagaccccccugggccugguggaccuguucguguucagcaccagcuucuaccugaucagcaucuuccugcaccuggugaagauccccacccacagacacaucgugggcaagagcugccccaagccccacagacugaaccacaugggcaucugcagcugcggccuguacggccagcccggcgugcccgugaaguggaagagauga

SEQ ID NO: 5263 - RNA, 1476 nt, Artificial Sequence
  derived and/or modified protein sequence (opt4) from LASV(G1646-SLE-2011;Clade IV)__AIT17192__GPCstabilized
augggccagaucgugaccuucuuccaggaggugccccacgugaucgaggaggugaugaacaucgugcugaucgcccugagcauccuggccgugcugaagggccuguacaacuucgccaccugcggcuucaucggccuggugagcuuccugcugcugugcggcagaagcugcaccaccagccuguacaagggcguguacgagcugcagacccuggagcugaacauggagacccugaacaugaccaugccccugagcugcaccaagaacaacagccaccacuacaucauggugggcaacgagaccggccuggagcugacccugaccaacaccagcaucaucaaccacaaguucugcaaccugagcgacgcccacaagaagaaccuguacgaccacgcccugaugagcaucaucagcaccuuccaccugagcauccccaacuucaaccaguucgaggccaugagcugcgacuucaacggcggcaagaucagcgugcaguacaaccugagccacagcuacgccguggacgccgccaaccacugcggcaccguggccaacggcgugcugcagaccuucaugagaauggccuggggcggcagcuacaucgcccuggacagcggcugcggcagcugggacugcaucaugaccagcuaccaguaccugaucauccagaacaccaccugggaggaccacugccaguucagcagacccagccccaucggcuaccugggccugcugagccagagaaccagagacaucuacaucagcagaagacgccggggcaccuucaccuggacccugagcgacagcgagggcaaggacacccccggcggcuacugccugaccagauggaugcugaucgaggccgagcugaagugcuucggcaacaccgccguggccaagugcaacgagaagcacgacgaggaguucugcgacaugcugagacuguucgacuucaacaagcaggccauccagagacugaaggcccccgcccagaugagcauccagcugaucaacaaggccgugaacgcccugaucaacgaccagcugaucaugaagaaccaccugagagacaucaugugcauccccuacugcaacuacagcaaguacugguaccugaaccacaccaccaccggcagaaccagccugcccaagugcuggcuggugagcaacggcagcuaccugaacgagacccacuucagcgacgacaucgagcagcaggccgacaacaugaucaccgagaugcugcagaaggaguacauggagagacagggcaagaccccccugggccugguggaccuguucguguucagcaccagcuucuaccugaucagcaucuuccugcaccuggugaagauccccacccacagacacaucgugggcaagagcugccccaagccccacagacugaaccacaugggcaucugcagcugcggccuguacggccagcccggcgugcccgugaaguggaagagauga

SEQ ID NO: 5264 - RNA, 1476 nt, Artificial Sequence
  derived and/or modified protein sequence (opt4) from LASV(G1647-SLE-2011;Clade IV)__AIT17196__GPCstabilized
augggccagaucgugaccuucuuccaggaggugccccacgugaucgaggaggugaugaacaucgugcugaucgcccugagcauccuggccgugcugaagggccuguacaaccuggccaccugcggccuggugggccuggugaccuuccugcugcugugcggcagaagcugcaccaccagccuguacaagggcguguacgagcugcagacccuggagcugaacauggagacccugaacaugaccaugccccugagcugcaccaagaacaacagccaccacuacaucauggugggcaacgagaccggccuggagcugacccugaccaacaccagcaucaucaaccacaaguucugcaaccugagcgacgcccacaagaagaaccuguacgaccacgcccugaugagcaucaucagcaccuuccaccugagcauccccaacuucaaccaguacgaggccaugagcugcgacuucaacggcggcaagaucagcgugcaguacaaccugagccacagcuacgccggcgacgccgccaaccacugcggcaccguggccaacggcgugcugcagaccuucaugagaauggccuggggcggcagcuacaucgcccuggacagcggcugcggcagaugggacugcaucaugaccagcuaccaguaccugaucauccagaacaccaccugggaggaccacugccaguucagcagacccagccccaucggcuaccugggccugcugagccagagaaccagagacaucuacaucagcagaagacgccggggcaccuucaccuggacccugagcgacagcgagggcaaggacacccccggcggcuacugccugaccagauggaugcugaucgaggccgagcugaagugcuucggcaacaccgccguggccaagugcaacgagaagcacgacgaggaguucugcgacaugcugagacuguucgacuucaacaagcaggccauccagagacugaaggcccccgcccagaugaacauccagcugaucaacaaggccgugaacgcccugaucaacgaccagcugaucaugaagaaccaccugagagacaucaugugcauccccuacugcaacuacagcaaguacugguaccugaaccacaccaccaccggcaagaccagccugcccagaugcuggcuggugagcaacggcagcuaccugaacgagacccacuucagcgacgacaucgagcagcaggccgacaacaugaucaccgagaugcugcagaaggaguacauggagagacagggcaagaccccccugggccugguggaccuguucguguucagcaccagcuucuaccugaucagcaucuuccugcaccuggugaagauccccacccacagacacaucgugggcaagcccugccccaagccccacagacugaaccacaugggcaucugcagcugcggcuucuacaagcagcccggcgugcccgugaaguggaagagauga

SEQ ID NO: 5265 - RNA, 1476 nt, Artificial Sequence
  derived and/or modified protein sequence (opt4) from LASV(G1774-SLE-2011;Clade IV)__AIT17204__GPCstabilized
augggccagaucgugaccuucuuccaggaggugccccacgugaucgaggaggugaugaacaucgugcugaucgcccugagcauccuggccgugcugaagggccuguacaaccuggccaccugcggccuggugggccuggugaccuuccugcugcugugcggcagaagcugcaccagcagccuguacaagggcguguacgagcugcagacccuggagcugaacauggagacccugaacaugaccaugccccugagcugcaccaagaacagcagccaccacuacaucagagugggcaacgagaccggccuggagcugacccugaccaacaccagcaucaucaaccacaaguucugcaaccugagcgacgcccacaagaagaaccuguacgaccacgcccugaugagcaucaucagcaccuuccaccugagcauccccaacuucaaccaguacgaggccaugagcugcgacuucaacggcggcaagaucagcgugcaguacaaccugagccacagcuacgccggcgacgccgccaaccacugcggcaccguggccaacggcgugcugcagaccuucaugagaauggccuggggcggcagcuacaucgcccuggacagcggcugcgacagaugggacugcaucaugaccagcuaccaguaccugaucauccagaacaccaccugggaggaccacugccaguucagcagacccagccccaucggcuaccugggccugcugagccagagaaccagagacaucuacaucagcagaagacgccggggcaccuucaccuggacccugagcgacagcgagggcaaggacacccccggcggcuacugccugaccagauggaugcugaucgaggccgagcugaagugcuucggcaacaccgccguggccaagugcaacgagaagcacgacgaggaguucugcgacaugcugagacuguucgacuucaacaagcaggccauccagagacugaaggcccccgcccagaugagcauccagcugaucaacaaggccgugaacgcccugaucaacgaccagcugaucaugaagaaccaccugagagacaucaugugcauccccuacugcaacuacagcaaguacugguaccugaaccacaccaucaccggcaagaccagccugcccaagugcuggcuggugagcaacggcagcuaccugaacaagacccacuucagcgacgacaucgagcagcaggccgacaacaugaucaccgagaugcugcagaaggaguacauggagagacagggcaagaccccccugggccugguggaccuguucguguucagcaccagcuucuaccugaucagcaucuuccugcaccugaucaagauccccacccacagacacaucgugggcaagcccugccccaagccccacagacugaaccacaugggcaucugcagcugcggccuguacaagcagcccggcgugcccgugaaguggaagagauga

SEQ ID NO: 5266 - RNA, 1476 nt, Artificial Sequence
  derived and/or modified protein sequence (opt4) from LASV(G1792-SLE-2011;Clade IV)__AIT17208__GPCstabilized
augggccagaucgugaccuucuuccaggaggugccccacgugaucgaggaggugaugaacaucgugcugaucgcccugagcauccuggccgugcugaagggccuguacaacuucgccaccugcggccugaucggccuggugaccuuccugcugcugugcggcagaagcugcaccaccagccuguacaagggcguguacgagcugcagacccuggagcugaacauggagacccugaacaugaccaugccccugagcugcaccaagaacaacagccaccacuacaucauggugggcaacgagaccggccuggagcugacccugaccaacaccagcaucaucaaccacaaguucugcaaccugagcgacgcccacaagaagaaccuguacgaccacgcccugaugagcaucaucagcaccuuccaccugagcauccccaacuucaaccaguacgaggccaugagcugcgacuucaacggcggcaagaucagcgugcaguacaaccugagccacagcuacgccggcgacgccgccaaccacugcggcaccguggccaacggcgugcugcagaccuucaugagaauggccuggggcggcagcuacaucgcccuggacagcggcugcggccagugggacugcaucaugaccagcuaccaguaccugaucauccagaacaccaccugggaggaccacugccaguucagcagacccagccccaucggcuaccugggccugcugagccagagaaccagagacaucuacaucagcagaagacgccggggcaccuucaccuggacccugagcgacagcgagggcaaggacacccccggcggcuacugccugaccagauggaugcugaucgaggccgagcugaagugcuucggcaacaccgccguggccaagugcaacgagaagcacgacgaggaguucugcgacaugcugagacuguucgacuucaacaagcaggccauccagagacugaaggcccccgcccagaugagcauccagcugaucaacaaggccgugaacgcccugaucaacgaccagcugaucaugaagaaccaccugagagacaucaugugcauccccuacugcaacuacagcaaguacugguaccugaaccacaccaccaccggcaagaccagccugcccaagugcuggcuggugagcaacggcagcuaccugaacgagacccacuucagcgacgacaucgagcagcaggccgacaacaugaucaccgagaugcugcagaaggaguacauggagagacagggcaagaccccccugggccugguggaccuguucguguucagcaccagcuucuaccugaucagcaucuuccugcaccuggugaagauccccacccacagacacaucgugggcaagagcugccccaagccccacagacugaaccacaugggcaucugcagcugcggccuguacaagcagcccggcgugcccgugaaguggaagagauga

SEQ ID NO: 5267 - RNA, 1476 nt, Artificial Sequence
  derived and/or modified protein sequence (opt4) from LASV(G1897-SLE-2011;Clade IV)__AIT17210__GPCstabilized
augggccagaucgugaccuucuuccaggaggugccccacgugaucgaggaggugaugaacaucgugcugaucgcccugagcauccuggccgugcugaagggccuguacaaccuggccaccugcggccuggugggccuggugaccuuccugcugcugugcggcagaagcugcaccaccagccuguacaagggcguguacgagcugcagacccuggagcugaacauggagacccugaacaugaccaugccccugagcugcaccaagaacaacagccaccacuacaucauggugggcaacgagaccggccuggagcugacccugaccaacaccagcaucaucaaccacaaguucugcaaccugagcgacgcccacaagaagaaccuguacgaccacgcccugaugagcaucaucagcaccuuccaccugagcauccccaacuucaaccaguacgaggccaugagcugcgacuucaacggcggcaagaucagcgugcaguacaaccugagccacagcuacgccggcgacgccgccaaccacugcggcaccguggccaacggcgugcugcagaccuucaugagaauggccuggggcggcagcuacaucgcccuggacagcggcugcgacagaugggacugcaucaugaccagcuaccaguaccugaucauccagaacaccaccugggaggaccacugccaguucagcagacccagccccaucggcuaccugggccugcugagccagagaaccagagacaucuacaucagcagaagacgccggggcaccuucaccuggacccugagcgacagcgagggcaaggacacccccggcggcuacugccugaccagauggaugcugaucgaggccgagcugaagugcuucggcaacaccgccguggccaagugcaacgagaagcacgacgaggaguucugcgacaugcugagacuguucgacuucaacaagcaggccauccagagacugaaggcccccgcccagaugagcauccagcugaucaacaaggccgugaacgcccugaucaacgaccagcugaucaugaagaaccaccugagagacaucaugugcauccccuacugcaacuacagcaaguacugguaccugaaccacaccaccaccggcaagaccagccugcccaagugcuggcuggugagcaacggcagcuaccugaacgagacccacuucagcgacgacaucgagcagcaggccgacaacaugaucaccgagaugcugcagaaggaguacauggagagacagggcaagaccccccugggccugguggaccuguucguguucagcaccagcuucuaccugaucagcaucuuccugagacuggugaagauccccacccacagacacaucgugggcaagcccugccccaagccccacagacugaaccacaugggcaucugcagcugcggccuguacaagcagcccggcgugcccgugaaguggaagagauga

SEQ ID NO: 5268 - RNA, 1476 nt, Artificial Sequence
  derived and/or modified protein sequence (opt4) from LASV(G1932-SLE-2011;Clade IV)__AIT17212__GPCstabilized
augggccagaucgugaccuucuuccaggaggugccccacgugaucgaggaggugaugaacaucgugcugaucgcccugagcauccuggccgugcugaagggccuguacaaccuggccaccugcggccuggugggccuggugaccuuccugcugcugugcggcagaagcugcaccaccagccuguacaagggcguguacgagcugcagacccuggagcugaacauggagacccugaacaugaccaugccccugagcugcaccaagaacaacagccaccacuacaucauggugggcaacgagaccggccuggagcugacccugaccaacaccagcaucaucaaccacaaguucugcaaccugagcgacgcccacagaaagaaccuguacgaccacgcccugaugagcaucaucagcaccuuccaccugagcauccccaacuucaaccaguacgaggccaugagcugcgacuucaacggcggcaagaucagcgugcaguacaaccugagccacagcuacgccggcgacgccgccaaccacugcggcaccguggccaacggcgugcugcagaccuucaugagaauggccuggggcggcagcuacaucgcccuggacagcggcugcggcaagugggacugcaucaugaccagcuaccaguaccugaucauccagaacaccaccugggaggaccacugccaguucagcagacccagccccaucggcuaccugggccugcugagccagagaaccagagacaucuacaucagcagaagacgccggggcaccuucaccuggacccugagcgacagcgagggcaaggacacccccggcggcuacugccugaccagauggaugcugaucgaggccgagcugaagugcuucggcaacaccgccguggccaagugcaacgagaagcacgacgaggaguucugcgacaugcugagacuguucgacuucaacaagcaggccauccagagacugaaggcccccgcccagaugagcauccagcugaucaacaaggccgugaacgcccugaucaacgaccagcugaucaugaagaaccaccugagagacaucaugugcauccccuacugcaacuacagcaaguacugguaccugaaccacaccaccaccggcaagaccagccugcccagaugcuggcuggugagcaacggcagcuaccugaacgagacccacuucagcgacgacaucgagcagcaggccgacaacaugaucaccgagaugcugcagaaggaguacauggagagacagggcaagaccccccugggccugguggaccuguucguguucagcaccagcuucuaccugaucagcaucuuccugcaccuggugaagauccccacccacagacacaucgugggcaagcccugccccaagccccacagacugaaccacaugggcaucugcagcugcggccuguacaagcagcccggcgugcccgugaaguggaagagauga

SEQ ID NO: 5269 - RNA, 1476 nt, Artificial Sequence
  derived and/or modified protein sequence (opt4) from LASV(G1959-SLE-2011;Clade IV)__AIT17216__GPCstabilized
augggccagaucgugaccuucuuccaggaggugccccacgugaucgaggaggugaugaacaucgugcugaucgcccugagcauccuggccgugcugaagggccuguacaacuucgccaccugcggccuggugggccuggugaccuuccugcugcugugcggcagaagcugcaccaccagccuguacaagggcguguacgagcugcagacccuggagcugaacauggagacccugaacaugaccaugccccugagcugcaccaagaacaacagccaccacuacaucauggugggcaacgagaccggccuggagcugacccugaccaacaccagcaucaucaaccacaaguucugcaaccugagcgacgcccacaagaagaaccuguacgaccacgcccugaugagcaucaucagcaccuuccaccugagcauccccaacuucaaccaguacgaggccaugagcugcgacuucaacggcggcaagaucagcgugcaguacaaccugagccacagcuacgccggcgacgccgccaaccacugcggcaccguggccaacggcgugcugcagaccuucaugagaauggccuggggcggcagcuacaucgcccuggacagcggcugcggcagaugggacugcaucaugaccagcuaccaguaccugaucauccagaacaccaccugggaggaccacugccaguucagcagacccagccccaucggcuaccugggccugcugagccagagaaccagagacaucuacaucagcagaagacgccggggcaccuucaccuggacccugagcgacagcgagggcaaggacacccccggcggcuacugccugaccagauggaugcugaucgaggccgagcugaagugcuucggcaacaccgccguggccaagugcaacgagaagcacgacgaggaguucugcgacaugcugagacuguucgacuucaacaagcaggccauccagagacugaaggcccccgcccagaugagcauccagcugaucaacaaggccgugaacgcccugaucaacgaccagcugaucaugaagaaccaccugagagacaucaugugcauccccuacugcaacuacagcaaguacugguaccugaaccacaccaccaccggcaagaccagccugcccaagugcuggcuggugagcaacggcagcuaccugaacgagacccacuucagcgacgacaucgagcagcaggccgacaacaugaucaccgagaugcugcagaaggaguacauggagagacagggcaagaccccccugggccugguggaccuguucguguucagcaccagcuucuaccugaucagcaucuuccugcaccuggugaagauccccacccacagacacaucgugggcaagcccugccccaagccccacagacugaacuacaugggcaucugcagcugcggccuguacaagcagcccggcgugcccgugagauggaagagauga

SEQ ID NO: 5270 - RNA, 1476 nt, Artificial Sequence
  derived and/or modified protein sequence (opt4) from LASV(G2141-SLE-2011;Clade IV)__AIT17224__GPCstabilized
augggccagaucgugaccuucuuccaggaggugccccacgugaucgaggaggugaugaacaucgugcugaucgcccugagcauccuggccgugcugaagggccuguacaacguggccaccugcggccugaucggccuggugaccuuccugcugcugugcggcagaagcugcaccaccacccuguacaagggcguguacgagcugcaggcccuggagcugaacauggagacccugaacaugaccaugccccugagcugcaccaagaacaacagccaccacuacaucagagugggcaacgacaccggccuggagcugacccugaccaacaccagcaucauccagcacaaguucugcaaccugagcgacgcccacaagaagaaccuguacgaccacacccugaugagcaucaucagcaccuuccaccugagcauccccaacuucaaccaguacgaggccaugagcugcgacuucaacggcggcaagaucagcgugcaguacaaccugagccacagcuacgccggcgacgccgccagccacugcggcaccguggccaacggcgugcugcagaccuucaugagaauggccuggggcggcagcuacaucgcccuggacagcggcugcggcaacugggacugcaucaugaccagcuaccaguaccugaucauccagaacaccaccugggaggaccacugccaguucagcagacccagccccaucggcuaccugggccugcugagccagagaaccagagacaucuacaucagcagaagacgccggggcaccuucaccuggacccugagcgacagcgagggcagagacacccccggcggcuacugccugaccagauggaugcugaucgaggccgagcugaagugcuucggcaacaccgccguggccaagugcaacgagaagcacgacgaggaguucugcgacaugcugagacuguucgacuucaacaagcaggccauccagagacugaagacccccgcccagaugagcauccagcugaucaacaaggccgugaacgcccugaucaacgaccagcugaucaugaagaaccaccugagagacaucaugugcauccccuacugcaacuacagcaaguacugguaccugaacaacaccaucaccggcaagagcagccugcccaagugcuggcuggugagcaacggcagcuaccugaacgagacccacuucagcgacgacaucgagcaggaggccgacaacaugaucaccgagaugcugcagaaggaguacauggagagacagggcaagaccccccugggccugguggaccuguucguguucagcaccagcuucuaccugaucagcaucuuccugcaccuggugaagauccccacccacagacacaucgugggcaagcccugccccaagccccacagacugaaccacaugggcgugugcagcugcggccuguacaagcagcccggcgugcccgugagauggaagagauga

SEQ ID NO: 5271 - RNA, 1476 nt, Artificial Sequence
  derived and/or modified protein sequence (opt4) from LASV(G2147-SLE-2011;Clade IV)__AIT17228__GPCstabilized
augggccagaucgugaccuucuuccaggaggugccccacgugaucgaggaggugaugaacaucgugcugaucgcccugagcauccuggccgugcugaagggccuguacaacuucgccaccugcggccuggugggccugcugaccuuccugcugcugugcggcagaagcugcaccaccagccuguacaagggcguguacgagcugcagacccuggagcugaacauggagacccugaacaugaccaugccccugagcugcaccaagaacaacagccaccacuacaucauggugggcaacgagaccggccuggagcugacccugaccaacaccagcaucaucgaccacaaguucugcaaccugagcgacgcccacaagaagaaccuguacgaccacgcccugaugagcaucaucagcaccuuccaccugagcauccccaacuucaaccaguacgaggccaugagcugcgacuucaacggcggcaagaucagcgugcaguacaaccugagccacagcuacgccggcgacgccgccaaccacugcggcaccguggccaacggcgugcugcagaccuucaugagaauggccuggggcggcagcuacaucgcccuggacagcggcugcggcggcugggacugcaucaugaccagcuaccaguaccugaucauccagaacaccaccugggaggaccacugccaguucagcagacccagccccaucggcuaccugggccugcugagccagagaaccagagacaucuacaucagcagaagacgccggggcaccuucaccuggacccugagcgacagcgagggcaaggacacccccggcggcuacugccugaccagauggaugcugaucgaggccgagcugaagugcuucggcaacaccgccguggccaagugcaacgagaagcacgacgaggaguucugcgacaugcugagacuguucgacuucaacaagcaggccauccagagacugaaggcccccgcccagaugagcauccagcugaucaacaaggccgugaacgcccugaucaacgaccagcugaucaugaagaaccaccugagagacaucaugugcauccccuacugcaacuacagcaaguacugguaccugaaccacaccaccaccggcaagaccagccugcccaagugcuggcuggugagcaacggcagcuaccugaacgagacccacuucagcgacgacaucgagcagcaggccgacaacaugaucaccgagaugcugcagaaggaguacauggagagacagggcaagaccccccugggccugguggaccuguucguguucagcaccagcuucuaccugaucagcaucuuccugcaccuggugaagauccccacccacagacacaucgugggcaagagcugccccaagccccacagacugaaccacaugggcaucugcagcugcggccuguacaagcagcccggcgugcccgugaaguggaagagauga

SEQ ID NO: 5272 - RNA, 1476 nt, Artificial Sequence
  derived and/or modified protein sequence (opt4) from LASV(G2165-SLE-2011;Clade IV)__AIT17232__GPCstabilized
augggccagaucgugaccuucuuccaggaggugccccacgugaucgaggaggugaugaacaucgugcugaucgcccugagcauccuggccgugcugaagggccuguacaacuucgccaccugcggccuggugggccuggugaccuuccugcugcugugcggcagaagcugcaccaccagccuguacaagggcguguacgagcugcagacccuggagcugaacauggagacccugaacaugaccaugccccugagcugcaccaagaacaacagccaccacuacaucagagugggcaacgagaccggccuggagcugacccugaccaacaccagcaucaucaaccacaaguucugcaaccugagcgacgcccacaagaagaaccuguacgaccacgcccugaugagcaucaucagcaccuuccaccugagcauccccaacuucaaccaguacgaggccaugagcugcgacuucaacgagggcaagaucagcgugcaguacaaccugagccacagcuacgccggcgacgccgccaaccacugcggcaccguggccaacggcgugcugcagaccuucaugagaauggccuggggcggcagcuacaucgcccuggacagcggcugcggcaagugggacugcaucaugaccagcuaccaguaccugaucauccagaacaccaccugggaggaccacugccaguucagcagacccagccccaucggcuaccugggccugcugagccagagaaccagagacaucuacaucagcagaagacgccggggcaccuucaccuggacccugagcgacagcgagggcaaggacacccccggcggcuacugccugaccagauggaugcugaucgaggccgagcugaagugcuucggcaacaccgccguggccaagugcaacgagaagcacgacgaggaguucugcgacaugcugagacuguucgacuucaacaagcaggccaucgagagacugaaggcccccgcccagaugagcauccagcugaucaacaaggccgugaacgcccugaucaacgaccagcugaucaugaagaaccaccugagagacaucaugugcauccccuacugcaacuacagcaaguacugguaccugaaccacaccaccaccggcaagaccagccugcccaagugcuggcuggugagcaacggcagcuaccugaacgagacccacuucagcgacgacaucgagcagcaggccgacaacaugaucaccgagaugcugcagaaggaguacauggagagacagggcaagaccccccugggccugguggaccuguucguguucagcaccagcuucuaccugaucagcaucuuccugcaccuggugaagauccccacccacagacacaucgugggcaagagcugccccaagccccacagacugaaccacaugggcaucugcagcugcggccuguacaagcagcccggcgugcccgugaaguggaagagauga

SEQ ID NO: 5273 - RNA, 1476 nt, Artificial Sequence
  derived and/or modified protein sequence (opt4) from LASV(G2184-SLE-2011;Clade IV)__AIT17236__GPCstabilized
augggccagaucgugaccuucuuccaggaggugccccacgugaucgaggaggugaugaacaucgugcugaucgcccugagcauccuggccgugcugaagggccuguacaacuucgccaccugcggccuggugggccuggugaccuuccugcugcugugcggcagaagcugcaccaccagccuguacaagggcguguacgagcugcagacccuggagcugaacauggagacccugaacaugaccaugccccugagcugcaccaagaacaacagccaccacuacaucauggugggcaacgagaccggccuggagcugacccugaccaacaccagcaucaucaaccacaaguucugcaaccugagcgacgcccacaagaagaaccuguacgaccacgcccugaugagcaucaucagcaccuuccaccugagcauccccaacuucaaccaguacgaggccaugagcugcgacuucaacggcggcagaaucagcgugcaguacaaccugagccacagcuacgccggcgaggccgccaaccacugcggcaccguggccaacggcgugcugcagaccuucaugagaauggccuggggcggcagcuacaucgcccuggacagcggcugcggcaagugggacugcaucaugaccagcuaccaguaccugaucauccagaacaccaccugggaggaccacugccaguucagcagacccagccccaucggcuaccugggccugcugagccagagaaccagagacaucuacaucagcagaagacgccggggcaccuucaccuggacccugagcgacagcgagggcaaggacacccccggcggcuacugccugaccagauggaugcugaucgaggccgagcugaagugcuucggcaacaccgccguggccaagugcaacgagaagcacgacgaggaguucugcgacaugcugagacuguucgacuucaacaagcaggccauccagagacugaaggcccccgcccagaugagcauccagcugaucaacaaggccgugaacgcccugaucaacgaccagcugaucaugaagaaccaccugagagacaucaugugcauccccuacugcaacuacagcagauacugguaccugaaccacaccaccaccggcaagaccagccugcccaagugcuggcuggugagcaacggcagcuaccugaacgagacccacuucagcgacgacaucgagcagcaggccgacaacaugaucaccgagaugcugcagaaggaguacauggagagacagggcaagaccccccugggccugguggaccuguucguguucagcaccagcuucuaccugaucagcaucuuccugcaccuggugaagauccccacccacagacacaucgugggcaagagcugccccaagccccacagacugaaccacaugggcaucugcagcugcggccuguacaagcagcccggcgugcccgugaaguggaagagauga

SEQ ID NO: 5274 - RNA, 1476 nt, Artificial Sequence
  derived and/or modified protein sequence (opt4) from LASV(G2197-SLE-2011;Clade IV)__AIT17240__GPCstabilized
augggccagaucgugaccuucuuccaggaggugccccacgugaucgaggaggugaugaacaucgugcugaucgcccugagcauccuggccgugcugaagggccuguacaaccuggccaccugcggccuggugggccuggugaccuuccugcugcugugcggcagaagcugcaccaccagccuguacaagggcuucuacgagcugcagacccuggagcugaacauggagacccugaacaugaccaugccccugagcugcaccaagaacaacagccaccacuacaucagagugggcaacgagaccggccuggagcugacccugaccaacaccagcaucaucgaccacaaguucugcaaccugagcgacgcccacaagaagaaccuguacgaccacgcccugaugagcaucaucagcaccuuccaccugagcauccccaacuucaaccaguacgaggccaugagcugcgacuucaacggcggcaagaucagcgugcaguacaaccugagccacagcuacgccggcgacgccgccaaccacugcggcaccguggccaacggcgugcugcagaccuucaugagaauggccuggggcggcagcuacaucgcccuggacagcggcugcggcagaugggacugcaucaugaccagcuaccaguaccugaucauccagaacaccaccugggaggaccacugccaguucagcagacccagccccaucggcuaccugggccugcugagccagaagaccagagacaucuacaucagcagaagacgccggggcaccuucaccuggacccugagcgacagcgagggcaaggacacccccggcggcuacugccugaccagauggaugcugaucgaggccgagcugaagugcuucggcaacaccgccguggccaagugcaacgagaagcacgacgaggaguucugcgacaugcugagacuguucgacuucaacaagcaggccauccagagacugaaggcccccgcccagaugagcauccagcugaucaacaaggccgugaacgcccugaucaacgaccagcugaucaugaagaaccaccugagagacaucaugugcauccccuacugcaacuacagcaaguacugguaccugaaccacaccaccaccggcaagaccagccugcccaagugcuggcuggugagcaacggcagcuaccugaacgagacccacuucagcgacgacaucgagcagcaggccgacaacaugaucaccgagaugcugcagaaggaguacauggagagacagggcaagaccccccugggccugguggaccuguucguguucagcaccagcuucuaccugaucagcaucuuccugcaccuggugaagauccccacccacagacacaucgugggcaagagcugccccaagccccacagacugaaccacaugggcaucugcagcugcggccuguacaagcagcccggcgugcccgugaaguggaagagauga

SEQ ID NO: 5275 - RNA, 1476 nt, Artificial Sequence
  derived and/or modified protein sequence (opt4) from LASV(G2222-SLE-2011;Clade IV)__AIT17244__GPCstabilized
augggccagaucgugaccuucuuccaggaggugccccacgugaucgaggaggugaugaacaucgugcugaucgcccugagcauccuggccgugcugaagggccuguacaaccuggccaccugcggccuggugggccuggugaccuuccugcugcugugcggcagaagcugcaccaccaaccuguacaagggcguguacgagcugcagacccuggagcugaacauggagacccugaacaugaccaugccccugagcugcaccaagaacagcagccaccacuacaucagagugggcaacgagaccggccuggagcugacccugaccaacaccagcaucaucgaccacaaguucugcaaccugagcgacgcccacaagaagaaccuguacgaccacgcccugaugagcaucaucagcaccuuccaccugagcauccccaacuucaaccaguacgaggccaugagcugcgacuucaacggcggcaagaucagcgugcaguacaaccugagccacagcuacgugggcgacgccgccgaccacugcggcaccguggccaacggcgugcugcagaccuucaugagaauggccuggggcggcagcuacaucgcccuggacagcggcugcggcaagugggacugcaucaucaccagcuaccaguaccugaucauccagaacaccaccugggaggaccacugccaguucagcagacccagccccaucggcuaccugggccugcugagccagagaaccagagacaucuacaucagcagaagacgccggggcaccuucaccuggacccugagcgacagcgagggcaaggacacccccggcggcuacugccugaccagauggaugcugaucgaggccgagcugaagugcuucggcaacaccgccguggccaagugcaacgagaagcacgacgaggaguucugcgacaugcugagacuguucgacuucaacaagcaggccauccagagacugaaggcccccgcccagaugagcauccagcugaucaacaaggccgugaacgcccugaucaacgaccagcugaucaugaagaaccaccugagagacaucaugugcauccccuacugcaacuacagcaaguacugguaccugaaccacaccaucaccggcaagaccagccugcccagaugcuggcuggugagcaacggcagcuaccugaacgagaccagauucagcgacgacaucgagcagcaggccgacaacaugaucaccgagaugcugcagaaggaguacauggagagacagggcaagaccccccugggccugguggaccuguucguguucagcaccagcuucuaccugaucagcaucuuccugcaccuggugaagauccccacccacagacacaucgugggcaagcccugccccaagccccacagacugaaccacaugggcaucugcagcugcggccuguacaagcagcccggcgugcccgugaaguggaagagauga

SEQ ID NO: 5276 - RNA, 1476 nt, Artificial Sequence
  derived and/or modified protein sequence (opt4) from LASV(G2230-SLE-2012;Clade IV)__AIT17246__GPCstabilized
augggccagaucgugaccuucuuccaggaggugccccacgugaucgaggaggugaugaacaucgugcugaucgcccugagccugcuggccgugcugaagggccuguacaacguggccaccugcggccugaucggccugaucaccuuccugcugcugugcggcagaagcugcaccaccaaccuguacaagggcguguacgagcugcagacccuggagcugaacauggagacccugaacaugaccaugccccugagcugcaccaagaacagcagccaccacuacaucauggugggcaacgagaccggccuggagcugacccugaccaacaccagcaucaucaaccacaaguucugcaaccugagcgacgcccacaagaagaaccuguacgaccacacccugaugagcaucaucagcaccuuccaccugagcauccccaacuucaaccaguacgaggccaugagcugcgacuucaacggcggcaagaucagcgugcaguacaaccugagccacagcuacgccguggacgccgccaaccacugcggcaccguggccaacggcauccugcagaccuucaugagaauggccuggggcggcagcuacaucgcccuggacagcggcugcggcaacugggacugcaucaugaccagcuaccaguaccugaucauccagaacaccaccugggaggaccacugccaguucagcagacccagccccaucggcuaccugggccugcugagccagagaaccagagacaucuacaucagcagaagacgccggggcaccuucaccuggacccugagcgacagcgagggcaacgacacccccggcggcuacugccugaccagauggaugcugaucgaggccgagcugaagugcuucggcaacaccgccguggccaagugcaacgagaagcacgacgaggaguucugcgacaugcugagacuguucgacuucaacaagcaggccauccagagacugaaggcccccgcccagaugagcauccagcugaucaacaaggccgugaacgcccugaucaacgaccagcugaucaugaagaaccaccugagagacaucaugugcauccccuacugcaacuacagcaaguacugguaccugaaccacaccaccaccggcaagaccagccugcccaagugcuggcuggugagcaacggcagcuaccugaacgagacccacuucagcgacgacaucgagcagcaggccgacaacaugaucaccgagaugcugcagaaggaguacauggagagacagggcaagaccccccugggccugguggaccuguucguguucagcaccagcuucuaccugaucagcaucuuccugcaccuggugaagauccccacccacagacacaucgugggcaagcccugccccaagccccacagacugaaccacaugggcaucugcagcugcggccuguacaagcagcccggcgugcccgugagauggaagagauga

SEQ ID NO: 5277 - RNA, 1476 nt, Artificial Sequence
  derived and/or modified protein sequence (opt4) from LASV(G2259-SLE-2012;Clade IV)__AIT17250__GPCstabilized
augggccagaucgugaccuucuuccaggaggugccccacgugaucgaggaggugaugaacaucgugcugaucgcccugagccugcuggccgugcugaagggccuguacaacguggccaccugcggccugaucggccuggugaccuuccugcugcugugcggcagaagcugcaccaccaaccuguacaagggcguguacgagcugcagacccuggagcugaacauggagacccugaacaugaccaugccccugagcugcaccaagaacaacagccaccacuacaucauggugggcaacgagaccggccuggagcugacccugaccaacaccagcaucaucaaccacaaguucugcaaccugagcgacgcccacaagaagaaccuguacgaccacacccugaugagcaucaucagcaccuuccaccugagcauccccaacuucaaccaguacgaggccaugagcugcgacuucaacggcggcaagaucagcgugcaguacaaccugagccacagcuacgccguggacgccgccaaccacugcggcaccguggccaacggcgugcugcagaccuucaugagaauggccuggggcggcagcuacaucgcccuggacagcggcugcggcaacugggacugcaucaugaccagcuaccaguaccugaucauccagaacaccaccugggaggaccacugccaguucagcagacccagccccaucggcuaccugggccugcugagccagagaaccagagacaucuacaucagcagaagacgccggggcaccuucaccuggacccugagcgacagcgagggcaacgacacccccggcggcuacugccugaccagauggaugcugaucgaggccgagcugaagugcuucggcaacaccgccguggccaagugcaacgagaagcacgacgaggaguucugcgacaugcugagacuguucgacuucaacaagcaggccauccagagacugaaggcccccgcccagaugagcauccagcugaucaacaaggccgugaacgcccugaucaacgaccagcugaucaugaagaaccaccugagagacaucaugugcauccccuacugcaacuacagcaaguacugguaccugaaccacaccaccaccggcaagaccagccugcccaagugcuggcuggugagcaacggcagcuaccugaacgagacccacuucagcgacgacaucgagcagcaggccgacaacaugaucaccgagaugcugcagaaggaguacauggagagacagggcaagaccccccugggccugguggaccuguucguguucagcaccagcuucuaccugaucagcaucuuccugcaccuggugaagauccccacccacagacacaucgugggcaagcccugccccaagccccacagacugaaccacaugggcaucugcagcugcggccuguacaagcagcccggcgugcccgugagauggaagagauga

SEQ ID NO: 5278 - RNA, 1476 nt, Artificial Sequence
  derived and/or modified protein sequence (opt4) from LASV(G2263-SLE-2012;Clade IV)__AIT17254__GPCstabilized
augggccagaucgugaccuucuuccaggaggugccccacgugaucgaggaggugaugaacaucgugcugaucgcccugagcauccuggccgugcugaagggccuguacaacuucgccaccugcggcaucgugggccuggugaccuuccugcugcugugcggcagaagcugcaccaccagccuguacaagggcguguacgagcugcagacccuggagcugaacauggagacccugaacaugaccaugccccugagcugcaccaagaacaacagccaccacuacaucauggugggcaacgagaccggccuggagcugacccugaccaacaccagcaucaucaaccacaaguucugcaaccugagcgacgcccacaagaagaaccuguacgaccacgcccugaugagcaucaucagcaccuuccaccugagcauccccaacuucaaccaguacgaggccaugagcugcgacuucaacggcggcaagaucagcgugcaguacaaccugagccacagcuacgccggcgacgccgccaaccacugcggcaccguggccaacggcgugcugcagaccuucaugagaauggccuggggcggcagcuacaucgcccuggacagcggcugcgacagaugggacugcaucaugaccagcuaccaguaccugaucauccagaacaccaccugggaggaccacugccaguucagcagacccagccccaucggcuaccugggccugcugagccagagaaccagagacaucuacaucagcagaagacgccggggcaccuucaccuggacccugagcgacagcgagggcaagaacacccccggcggcuacugccugaccagauggaugcugaucgaggccgagcugaagugcuucggcaacaccgccguggccaagugcaacgagaagcacgacgaggaguucugcgacaugcugagacuguucgacuucaacaagcaggccauccagagacugaaggcccccgcccagaugagcaucagccugaucaacaaggccgugaacgcccugaucaacgaccagcugaucaugaagaaccaccugagagacaucaugugcauccccuacugcaacuacagcaaguacugguaccugaaccacaccaccaccggcaagaccagccugcccagaugcuggcuggugagcaacggcagcuaccugaacgagacccacuucagcgacgacaucgagcagcaggccgacaacaugaucaccgagaugcugcagaaggaguacauggacagacagggcaagaccccccugggccugguggaccuguucguguucagcaccagcuucuaccugaucagcaucuuccugcaccuggugaagauccccacccacagacacaucgugggcaagaccugccccaagccccacagacugaaccacaugggcaucugcagcugcggccuguacaagcagcccggcgugcccgugaaguggaagagauga

SEQ ID NO: 5279 - RNA, 1476 nt, Artificial Sequence
  derived and/or modified protein sequence (opt4) from LASV(G2280-SLE-2012;Clade IV)__AIT17258__GPCstabilized
augggccagaucgugaccuucuuccaggaggugccccacgugaucgaggaggugaugaacaucgugcugaucgcccugagcauccuggccgugcugaagggccuguacaacaucgccaccugcggccuggugggccuggugaccuuccugcugcugugcggcagaagcugcaccaccagccuguacaagggcguguacgagcugcagacccuggagcugaacauggagacccugaacaugaccaugccccugagcugcaccaagaacaacagccaccacuacaucauggugggcaacgagaccggccuggagcugacccugaccaacaccagcaucaucaaccacaaguucugcaaccugagcgacgcccacaagaagaaccuguacgaccacgcccugaugagcaucgugagcaccuuccaccugagcauccccaacuucaaccaguacgaggccaugagcugcgacuucaacggcggcaagaucagcgugcaguacaaccugagccacagcuacgccguggacgccgccaaccacugcggcaccguggccaacggcgugcugcagaccuucaugagaauggccuggggcggcagcuacaucgcccuggacagcggcugcggcggcugggacugcaucaugaccagcuaccaguaccugaucauccagaacgugaccugggaggaccacugccaguucagcagacccagccccaucggcuaccugggccugcugagccagagaaccagagacguguacaucagcagaagacgccggggcaccuucaccuggacccugagcgacagcgagggcaacgacacccccggcggcuacugccugaccagauggaugcugaucgaggccgagcugaagugcuucggcaacaccgccguggccaagugcaacgagaagcacgacgaggaguucugcgacaugcugagacuguucgacuucaacaagcaggccauccagagacugaaggcccccgcccagaugagcauccagcugaucaacaaggccgugaacgcccugaucaacgaccagcugaucaugaagaaccaccugagagacaucaugugcauccccuacugcaacuacagcaaguacugguaccugaaccacaccaccaccggcaagaccagccugcccaagugcuggcuggugagcaacggcagcuaccugaacgagacccacuucagcgacgacaucgagcagcaggccgacaacaugaucaccgagaugcugcagaaggaguacauggagagacagggcaagaccccccugggccugguggaccuguucguguucagcaccagcuucuaccugaucagcaucuuccugcaccuggugaagauccccacccacagacacaucgugggcaagcccugccccaagccccacagacugaaccacaugggcaucugcagcugcggccuguacaagcagcccggcgugcccgugaaguggaagagauga

SEQ ID NO: 5280 - RNA, 1476 nt, Artificial Sequence
  derived and/or modified protein sequence (opt4) from LASV(G2295-SLE-2012;Clade IV)__AIT17262__GPCstabilized
augggccagaucgugaccuucuuccaggaggugccccacgugaucgaggaggugaugaacaucgugcugaucgcccugagcauccuggccgugcugaagggccuguacaaccuggccaccugcggccuggugggccuggugaccuuccugcugcugugcggcagaagcugcaccaccagccuguacaagggcguguacgagcugcagacccuggagcugaacauggagacccugaacaugaccaugccccugagcugcaccaagaacaacagccaccacuacaucauggugggcaacgagaccggccuggagcugacccugaccaacaccagcaucaucaaccacaaguucugcaaccugagcgacgcccacaagaagaaccuguacgaccacgcccugaugagcaucaucagcaccuuccaccugagcauccccaacuucaaccaguacgaggccaugagcugcgacuucaacggcggcaagaucagcgugcaguacaaccugagccacagcuacgccggcgacgccgccacccacugcggcaccguggccaacggcgugcugcagaccuucaugagaauggccuggggcggcagcuacaucgcccuggacagcggcugcggcaagugggacugcaucaugaccagcuaccaguaccugaucauccagaacaccaccugggaggaccacugccaguucagcagacccagccccaucggcuaccugggccugcugagccagagaaccagagacaucuacaucagcagaagacgccggggcaccuucaccuggacccugagcgacagcgagggcaaggacacccccggcggcuacugccugaccagauggaugcugaucgaggccgagcugaagugcuucggcaacaccgccguggccaagugcaacgagaagcacgacgaggaguucugcgacaugcugagacuguucgacuucaacaagcaggccauccagagacugaagacccccgcccagaugagcauccagcugaucaacaaggccgugaacgcccugaucaacgaccagcugaucaugaagaaccaccugagagacaucaugugcauccccuacugcaacuacagcaaguacugguaccugaaccacaccaccaccggcaagaccagccugcccagaugcuggcuggugagcaacggcagcuaccugaacgagacccacuucagcgacgacaucgagcagcaggccgacaacaugaucaccgagaugcugcagaaggaguacauggagagacagggcaagaccccccugggccugguggaccuguucguguucagcaccagcuucuaccugaucagcaucuuccugcaccuggugaagauccccacccacagacacaucgugggcaagcccugccccaagccccacagacugaaccacaugggcaucugcagcugcggccuguacaagcagcccggcgugcccgugaaguggaagagauga

SEQ ID NO: 5281 - RNA, 1476 nt, Artificial Sequence
  derived and/or modified protein sequence (opt4) from LASV(G2315-SLE-2012;Clade IV)__AIT17266__GPCstabilized
augggccagaucgugaccuucuuccaggaggugccccacgugaucgaggaggugaugaacaucgugcugaucgcccugagcauccuggccgugcugaagggccuguacaaccuggccaccugcggccuggugggccuggugaccuuccugcugcugugcggcagaagcugcaccaccagccuguacaagggcguguacgagcugcagacccuggagcugaacauggagacccugaacaugaccaugccccugagcugcaccaagaacaacagccaccacuacaucauggugggcaacgagaccggccuggagcugacccugaccaacaccagccugaucaaccacaaguucugcaaccugagcgacgcccacaagaagaaccuguacgaccacgcccugaugagcaucaucagcaccuuccaccugagcauccccaacuucaaccaguacgaggccaugagcugcgacuucaacggcggcaagaucagcgugcaguacaaccugagccacagcuacgccguggacgccgccaaccacugcggcaccguggccaacggcgugcugcagaccuucaugagaauggccuggggcggcagcuacaucgcccuggacagcggcugcggcggcugggacugcaucaugaccagcuaccaguaccugaucauccagaacaccaccugggaggaccacugccaguucagcagacccagccccaucggcuaccugggccugcugagccagagaaccagagacaucuacaucagcagaagacgccggggcaccuucaccuggacccugagcgacagcgagggcaaggacacccccggcggcuacugccugaccagauggaugcugaucgaggccgagcugaagugcuucggcaacaccgccguggccaagugcaacgagaagcacgacgaggaguucugcgacaugcugagacuguucgacuucaacaagcaggccauccagagacugaaggcccccgcccagaugagcauccagcugaucaacaaggccgugaacgcccugaucaacgaccagcugaucaugaagaaccaccugagagacaucaugugcauccccuacugcaacuacagcaaguacugguaccugaaccacaccaccaccggcagaaccagccugcccagaugcuggcuggugagcaacggcagcuaccugaacgagacccacuucagcgacgacaucgagcagcaggccgacaacaugaucaccgagaugcugcagaaggaguacauggagagacagggcaagaccccccugggccugguggaccuguucguguucagcaccagcuucuaccugaucagcaucuuccugcaccuggugaagauccccacccacagacacaucgugggcaagagcugccccaagccccacagacugaaccacaugggcaucugcagcugcggccuguacaagcagcccggcgugcccgugaaguggaagagauga

SEQ ID NO: 5282 - RNA, 1476 nt, Artificial Sequence
  derived and/or modified protein sequence (opt4) from LASV(G2318-SLE-2012;Clade IV)__AIT17270__GPCstabilized
augggccagaucgugaccuucuuccaggaggugccccacgugaucgaggaggugaugaacaucgugcugaucgcccugagcgugcuggccgugcugaagggccuguacaacuucgccaccugcggccuggugggccuggugaccuuccugcugcugugcggcagaagcugcagcaccagcguguacaagggcguguacgagcugcagacccuggagcugaacauggagacccugaacaugaccaugccccugagcugcaccaagaacaacagccaccacuacaucauggugggcaacgagaccggccuggagcugacccugaccaacaccagcaucaucaaccacaaguucugcaaccugagcgacgcccacaagaagaaccuguacgaccacgcccugaugagcaucaucagcaccuuccaccugagcauccccaacuucaaccaguacgaggccaugagcugcgacuucaacggcggcaagaucagcgugcaguacaaccugagccacagcuacgccguggacgccgccaaccacugcggcaccguggccaacggcgugcugcagaccuucaugagaauggccuggggcggcagcuacaucgcccuggacagcggcugcggcggcugggacugcaucaugaccaacuaccaguaccugaucauccagaacaccaccugggaggaccacugccaguucagcagacccagccccaucggcuaccugggccugcugagccagagaaccagagacaucuacaucagcagaagacgccggggcaccuucaccuggacccugagcgacagcgagggcaaggacacccccggcggcuacugccugaccagauggaugcugaucgaggccgagcugaagugcuucggcaacaccgccguggccaagugcaacgagaagcacgacgaggaguucugcgacaugcugagacuguucgacuucaacaagcaggccauccagagacugaaggcccccgcccagaugagcauccagcugaucaacaaggccgugaacgcccugaucaacgaccagcugaucaugaagaaccaccugagagacaucaugugcauccccuacugcaacuacagcaaguacugguaccugaaccacaccaccaccggcagaaccagccugcccaagugcuggcuggugagcaacggcagcuaccugaacgagacccacuucagcgacgacaucgagcagcaggccgacaacaugaucaccgagaugcugcagagagaguacauggagagacagggcaagaccccccugggccugguggaccuguucguguucagcaccagcuucuaccugaucagcaucuuccugcaccuggugaagauccccacccacagacacaucgugggcaagagcugccccaagccccacagacugaaccacaugggcaucugcagcugcggccuguacaagcagcccggcgugcccgugaaguggaagagauga

SEQ ID NO: 5283 - RNA, 1476 nt, Artificial Sequence
  derived and/or modified protein sequence (opt4) from LASV(G2363-SLE-2012;Clade IV)__AIT17274__GPCstabilized
augggccagaucgugaccuucuuccaggaggugccccacgugaucgaggaggugaugaacaucgugcugaucgcccugagcauccuggccgugcugaagggccuguacaacguggccaccugcggccugaccggccugguggccuuccugcugcugugcggcagaagcugcaccaccacccuguacaagggcguguacgagcugcaggcccuggagcugaacauggagacccugaacaugaccaugccccugagcugcaccaagaacaacagccaccacuacaucagagugggcaacgagaccggccuggagcugacccugaccaacaccagcaucaucgagcacagauucugcaaccugagcgacgcccacaagaagaaccuguacgaccacgcccugaugagcaucaucagcaccuuccaccugagcauccccaacuucaaccaguacgaggccaugagcugcgacuucaacggcggcaagaucagcgugcaguacaaccugagccacagcuacgccguggacgccgccaaccacugcggcaccguggccaacggcgugcugcagaccuucaugagaauggccuggggcggcagcuacaucgcccuggacagcggcugcaacggcugggacugcaucaugaccagcuaccaguaccugaucauccagaacaccaccugggaggaccacugccaguucagcagacccagccccaucggcuaccugggccugcugagccagagaaccagagacaucuacaucagcagaagacgccggggcaccuucaccuggacccugagcgacagcgagggcaaggacacccccggcggcuacugccugaccagauggaugcugaucgaggccgagcugaagugcuucggcaacaccgccguggccaagugcaacgagaagcacgacgaggaguucugcgacaugcugagacuguucgacuucaacaagcaggccauccagagacugaaggcccccgcccagaugagcauccagcugaucaacaaggccgugaacgcccugaucaacgaccagcugaucaugaagaaccaccugagagacaucaugugcauccccuacugcaacuacagcaaguacugguaccugaacaacaccgccaccggcaagaccagccugcccagaugcuggcuggugagcaacggcagcuaccugaacgagacccacuucagcgacgacaucgagcagcaggccgacaacaugaucaccgagaugcugcagaaggaguacauggagagacagggcaagaccccccugggccugguggaccuguucguguucagcaccagcuucuaccugaucagcaucuuccugcaccuggugaagauccccacccacagacacaucgugggcaagcccugccccaagccccacagacugaaccacaugggcaucugcagcugcggccuguacaagcagcccggcgcccccgugagauggaagagauga

SEQ ID NO: 5284 - RNA, 1476 nt, Artificial Sequence
  derived and/or modified protein sequence (opt4) from LASV(G2384-SLE-2012;Clade IV)__AIT17276__GPCstabilized
augggccagaucgugaccuucuuccaggaggugccccacgugaucgaggaggugaugaacaucgugcugaucgcccugagcauccuggccgugcugaagggccuguacaacuucgccaccugcggccuggugggccuggugaccuuccugcugcugugcggcagaagcugcaccaccagccuguacaagggcguguacgagcugcagacccuggagcugaacauggagacccugaacaugaccaugccccugagcugcaccaagaacaacagccaccacuacaucauggugggcaacgagaccggccuggagcugacccugaccaacaccagcaucaucaaccacaaguucugcaaccugagcgacgcccacaagaagaaccuguacgaccacgcccugaugagcaucaucagcaccuuccaccugagcauccccaacuucaaccaguacgaggccaugagcugcgacuucaacggcggcaagaucagcgugcaguacaaccugagccacagcuacgccggcgacgccgccaaccacugcggcaccguggccaacggcgugcugcagaccuucaugagaauggccuggggcggcagcuacaucgcccuggacagcggcugcggcaagugggacugcaucaugaccagcuaccaguaccugaucauccagaacaccaccugggaggaccacugccaguucagcagacccagccccaucggcuaccugggccugcugagccagagaaccagagacaucuacaucagcagaagacgccggggcaccuucaccuggacccugagcgacagcgagggcaaggacacccccggcggcuacugccugaccagauggaugcugaucgaggccgagcugaagugcuucggcaacaccgccguggccaagugcaacgagaagcacgacgaggaguucugcgacaugcugagacuguucgacuucaacaagcaggccauccagagacugaaggcccccgcccagaugagcauccagcugaucaacaaggccgugaacgcccugaucaacgaccagcugaucaugaagaaccaccugagagacaucaugugcauccccuacugcaacuacagcaaguacugguaccugaaccacaccaccaccggcaagaccagccugcccaagugcuggcuggugagcaacggcagcuaccugaacgagacccacuucagcgacgacaucgagcagcaggccgacaacaugaucaccgagaugcugcagaaggaguacauggagagacagggcaagaccccccugggccugguggaccuguucguguucagcaccagcuucuaccugaucagcaucuuccugcaccuggugaagauccccacccacagacacaucgugggcaagagcugccccaagccccacagacugaaccacaugggcaucugcagcugcggccuguacaagcagcccggcgugcccgugagauggaagagauga

SEQ ID NO: 5285 - RNA, 1473 nt, Artificial Sequence
  derived and/or modified protein sequence (opt4) from LASV(G2392-SLE-2012;Clade IV)__AIT17280__GPCstabilized
augggccagaucgugaccuucuuccaggaggugccccacgugaucgaggaggugaugaacaucgugcugaucgcccugagcauccuggccgugcugaagggccuguacaacuucgccaccugcggccuggugggccuggugaccuuccugcugcugugcggcagaagcugcaccaccagccuguacaagggcguguacgagcugcagacccuggagcugaacauggagacccugaacaugaccaugccccugagcugcaccaagaacaacagccaccacuacaucagagugggcaacgagaccggccuggagcugacccugaccaacaccagcaucaucgaccacaaguucugcaaccugagcgacgcccacaagaagaaccuguacgaccacgcccugaugagcaucaucagcaccuuccaccugagcauccccaacuucaaccaguacgaggccaugagcugcgacuucaacggcggcaagaucagcgugcaguacaaccugagccacagcuacgccggcgacgccgccaaccacugcggcaccguggccaacggcgugcugcagaccuucaugagaauggccuggggcggcagcuacaucgcccuggacagcggcugcgagugggacugcaucaugaccagcuaccaguaccugaucauccagaacaccaccugggacaaccacugccaguucagcagacccagccccaucggcuaccugggccugcugagccagagaaccagagacaucuacaucagcagaagacgccggggcaccuucaccuggacccugagcgacagcgagggcaaggacacccccggcggcuacugccugaccagauggaugcugaucgaggccgagcugaagugcuucggcaacaccgccguggccaagugcaacgagaagcacgacgaggaguucugcgacaugcugagacuguucgacuucaacaagcaggccauccagagacugaaggugcccgcccagaugagcauccagcugaucaacaaggccgugaacgcccugaucaacgaccagcugaucaugaagaaccaccugagagacaucaugugcauccccuacugcaacuacagcaaguacugguaccugaaccacaccaccaccggcaagaccagccugcccaagugcuggcuggugagcaacggcagcuaccugaacgagacccacuucagcgacgacaucgagcagcaggccgacaacaugaucaccgagaugcugcagaaggaguacauggagagacagggcaagaccccccugggccugguggaccuguucguguucagcaccagcuucuaccugaucagcaucuuccugcaccuggugaagauccccacccacagacacaucgugggcaagagcugccccaagccccacagacugaaccacaugggcaucugcagcugcggcuucuacaagcagcccggcgugcccgugaaguggaagagauga

SEQ ID NO: 5286 - RNA, 1476 nt, Artificial Sequence
  derived and/or modified protein sequence (opt4) from LASV(G2405-SLE-2012;Clade IV)__AIT17284__GPCstabilized
augggccagaucgugaccuucuuccaggaggugccccacgugaucgaggaggugaugaacaucgugcugaucgcccugagcgugcuggccgugcugaagggccuguacaacuucgccaccugcggcaucgugggccuggugaccuuccugcugcugugcggcagaagcugcaccaccagccuguacaagggcguguacgagcugcagacccuggagcugaacauggagacccugaacaugaccaugccccugagcugcaccaagaacaacagccaccacuacaucauggugggcaacgacaccggccuggagcugacccugaccaacaccagcaucaucaaccacaaguucugcaaccugagcgacgcccacaagaagaaccuguacgaccacgcccugaugagcaucaucagcaccuuccaccugagcauccccaacuucaaccaguacgaggccaugagcugcgacuucaacggcggcaagaucagcgugcaguacaaccugagccacagcuacgccggcgacgccgccgaccacugcggcaccguggccaacggcgugcugcagaccuucaugagaauggccuggggcggcagcuacaucgcccuggacagcggcugcggcagaugggacugcaucaugaccagcuaccaguaccugaucauccagaacaccaccugggaggaccacugccaguucagcagacccagccccaucggcuaccugggccugcugagccagagaaccagagacaucuacaucagcagaagacgccggggcaccuucaccuggacccugagcgacagcgagggcaaggacacccccggcggcuacugccugaccagauggaugcugaucgaggccgagcugaagugcuucggcaacaccgccguggccaagugcaacgagaagcacgacgaggaguucugcgacaugcugagacuguucgacuucaacaagcaggccauccagagacugaaggcccccgcccagaugagcauccagcugaucaacaaggccgugaacgcccugaucaacgaccagcugaucaugaagaaccaccugagagacaucaugugcauccccuacugcaacuacagcaaguacugguaccugaaccacaccaccaccggcaagaccagccugcccaagugcuggcuggugagcaacggcagcuaccugaacgagacccacuucagcgacgacaucgagcagcaggccgacaacaugaucaccgagaugcugcagaaggaguacauggagagacagggcaagaccccccugggccugguggaccuguucguguucagcaccagcuucuaccugaucagcaucuuccugcaccuggugaagauccccacccacagacacaucgugggcaagcccugccccaagccccacagacugaaccacaugggcaucugcagcugcggccuguacaagcagcccggcgugcccgugaaguggaagagauga

SEQ ID NO: 5287 - RNA, 1476 nt, Artificial Sequence
  derived and/or modified protein sequence (opt4) from LASV(G2427-SLE-2012;Clade IV)__AIT17288__GPCstabilized
augggccagaucgugaccuucuuccaggaggugccccacgugaucgaggaggugaugaacaucgugcugaucgcccugagcauccuggccgugcugaagggccuguacaacuucgccaccugcggccuggugggccuggugaccuuccugcugcugugcggcagaagcugcaccaccagccuguacaagggcguguacgagcugcagacccuggagcugaacauggagacccugaacaugaccaugccccugagcugcaccaagaacaacagccaccacuacaucauggugggcaacgagaccggccuggagcugacccugaccaacaccagcaucaucaaccacaaguucugcaaccugagcgacgcccacaagaagaaccuguacgaccacgcccugaugagcaucaucagcaccuuccaccugagcauccccaacuucaaccaguacgaggccaugagcugcgacuucaacggcggcaagaucagcgugcaguacaaccugagccacagcuacgccguggacgccgccaaccacugcggcaccguggccaacggcgugcugcagaccuucaugagaauggccuggggcggcggcuacaucgcccuggacagcggcugcggcaacugggacugcaucaugaccagcuaccaguaccugaucauccagaacaccaccugggaggaccacugccaguucagcagacccagccccaucggcuaccugggccugcugagccagagaaccagagacaucuacaucagcagaagacgccggggcaccuucaccuggacccugagcgacagcgagggcaaggacacccccggcggcuacugccugaccagauggaugcugaucgaggccgagcugaagugcuucggcaacaccgccguggccaagugcaacgagaagcacgacgaggaguucugcgacaugcugagacuguucgacuucaacaagcaggccauccagagacugaaggcccccgcccagaugagcauccagcugaucaacaaggccgugaacgcccugaucaacgaccagcugaucaugaagaaccaccugagagacaucaugugcauccccuacugcaacuacagcaaguacugguaccugaaccacaccgugaccggcaagaccagccugcccaagugcuggcuggugagcaacggcagcuaccugaacgagacccacuucagcgacgacaucgagcagcaggccgacaacaugaucaccgagaugcugcagaaggaguacauggagagacagggcaagaccccccugggccugguggaccuguucguguucagcaccagcuucuaccugaucagcaucuuccugcaccuggugaagauccccacccacagacacaucgugggcaagagcugccccaagccccacagacugaaccacaugggcaucugcagcugcggccuguacaagcagcccggcgugcccgugagauggaagagauga

SEQ ID NO: 5288 - RNA, 1476 nt, Artificial Sequence
  derived and/or modified protein sequence (opt4) from LASV(G2431-SLE-2012;Clade IV)__AIT17292__GPCstabilized
augggccagaucgugaccuucuuccaggaggugccccacgugaucgaggaggugaugaacaucgugcugaucgcccugagcaucauggccgugcugaagggccuguacaacaucgccaccugcggccuggugggccuggugaccuuccugcugcugugcggcagaagcugcaccaccacccuguacaagggcguguacgagcugcagacccuggagcugaacauggagacccugaacaugaccaugccccugagcugcaccaagaacaacagccaccacuacaucauggugggcaacgagaccggccuggagcugacccugaccaacaccagcaucaucaaccacaaguucugcaaccugagcgacgcccacaagaagaaccuguacgaccacgcccugaugagcaucaucagcaccuuccaccugagcauccccaacuucaaccaguacgaggccaugagcugcgacuucaacggcggcaagaucagcgugcaguacaaccugagccacagcuacgccggcgacgccgccaaccacugcggcaccguggccaacggcgugcugcagaccuucaugagaauggccuggggcggcagcuacaucgcccuggacagcggcugcggcggcugggacugcaucaugaccagcuaccaguaccugaucauccagaacaccaccugggaggaccacugccaguucaccagacccagccccaucggcuaccugggccugcugagccagagaaccagagacaucuacaucagcagaagacgccggggcaccuucaccuggacccugagcgacagcgagggcaacgacacccccggcggcuacugccugaccagauggaugcugaucgaggccgagcugaagugcuucggcaacaccgccguggccaagugcaacgagaagcacgacgaggaguucugcgacaugcugagacuguucgacuucaacaagcaggccauccagagacugagagcccccgcccagaugagcauccagcugaucaacaaggccgugaacgcccugaucaacgaccagcugaucaugaagaaccaccugagagacaucaugugcauccccuacugcaacuacagcaaguacugguaccugaaccacaccaccaccggcagaaccagccugcccagaugcuggcuggugagcaacggcagcuaccugaacgagacccacuucagcgacgacaucgagcagcaggccgacaacaugaucaccgagaugcugcagaaggaguacauggagagacagggcaagaccccccugggccugguggaccuguucguguucagcaccagcuucuaccugaucagcaucuuccugcaccugaucaagauccccacccacagacacaucgugggcaagcccugccccaagccccacagacugaaccacaugggcgugugcagcugcggccuguacaagcagcccggcgugcccgugagauggaagagauga

SEQ ID NO: 5289 - RNA, 1476 nt, Artificial Sequence
  derived and/or modified protein sequence (opt4) from LASV(G2511-SLE-2012;Clade IV)__AIT17294__GPCstabilized
augggccagaucgugaccuucuuccaggaggugccccacgugaucgaggaggugaugaacaucgugcugaucgcccugagcauccuggccgugcugaagggccuguacaaccuggccaccugcggccuggugggccuggugaccuuccugcugcugugcggcagaagcugcaccaccagccuguacaagggcguguacgagcugcagacccuggagcugaacauggagacccugaacaugaccaugccccugagcugcaccaagaacaacagccaccacuacaucauggugggcaacgagaccggccuggagcugacccugaccaacaccagcaucaucgaccacaaguucugcaaccugagcgacgcccacaagaagaaccuguacgaccacgcccugaugagcaucaucagcaccuuccaccugagcauccccaacuucaaccaguacgaggccaugagcugcgacuucaacggcggcaagaucagcgugcaguacaaccugagccacagcuacgccggcgacgccgccaaccacugcggcaccguggccaacggcgugcugcagaccuucaugagaauggccuggggcggcagcuacaucgcccuggacagcggcugcggcggcugggacugcaucaugaccagcuaccaguaccugaucauccagaacaccaccugggaggaccacugccaguucagcagacccagccccgugggcuaccugggccugcugagccagagaaccagagacaucuacaucagcagaagacgccggggcaccuucaccuggacccugagcgacagcgagggcaaggacacccccggcggcuacugccugaccagauggaugcugaucgaggccgagcugaagugcuucggcaacaccgccguggccaagugcaacgagaagcacgacgaggaguucugcgacaugcugagacuguucgacuucaacaagcaggccauccagagacugaagacccccgcccagaugagcauccagcugaucaacaaggccgugaacgcccugaucaacgaccagcugaucaugaagaaccaccugagagacaucaugugcauccccuacugcaacuacagcaaguacugguaccugaaccacaccaccaccggcaagaccagccugcccagaugcuggcuggugagcaacggcagcuaccugaacgagacccacuucagcgacgacaucgagcagcaggccgacaacaugaucaccgagaugcugcagaaggaguacauggagagacagggcaagaccccccugggccugguggaccuguucguguucagcaccagcuucuaccugaucagcaucuuccugcaccuggugaagauccccacccacagacacaucgugggcaagcccugccccaagccccacagacugaaccacaugggcaucugcagcugcggccuguacaagcagcccggcgugcccgugaaguggaagagauga

SEQ ID NO: 5290 - RNA, 1476 nt, Artificial Sequence
  derived and/or modified protein sequence (opt4) from LASV(G2554-SLE-2012;Clade IV)__AIT17298__GPCstabilized
augggccagaucgugaccuucuuccaggaggugccccacgugaucgaggaggugaugaacaucgugcugaucgcccugagcauccuggccgugcugaagggccuguacaacaucgccaccugcggccugcugggccuggugugcuuccugcugcugugcggcagaagcugcaccaccagccuguacaagggcguguacgagcugcagacccuggagcugaacauggagacccugaacaugaccaugccccugagcugcaccaagaacaacagccaccacuacaucauggugggcaacgagaccggccuggagcugacccugaccaacaccagcaucaucaaccacaaguucugcaaccugagcgacgcccacaagaagaaccuguacgaccacgcccugaugagcaucaucagcaccuuccaccugagcauccccaacuucaaccaguacgaggccaugagcugcgacuucaacggcggcaagaucagcgugcaguacaaccugagccacagcuacgccguggacgccgccagccacugcggcaccaucgccaacggcgugcugcagaccuucaugagaauggccuggggcggcagcuacaucgcccuggacagcggcugcggcggcugggacugcaucaugaccagcuaccaguaccugaucauccagaacaccaccugggaggaccacugccaguucagcagacccagccccaucggcuaccugggccugcugagccagagaaccagagacaucuacaucagcagaagacgccggggcaccuucaccuggacccugagcgacagcgagggcaaggacacccccggcggcuacugccugaccagauggaugcugaucgaggccgagcugaagugcuucggcaacaccgccguggccaagugcaacgagaagcacgacgaggaguucugcgacaugcugagacuguucgacuucaacaagcaggccauccagagacugaaggcccccgcccagaugagcauccagcugaucaacaaggccgugaacgcccugaucaacgaccagcugaucaugaagaaccaccugagagacaucaugugcauccccuacugcaacuacagcaaguacugguaccugaaccacaccaccaccggcaagaccagccugcccaagugcuggcuggugagcaacggcagcuaccugaacgagacccacuucagcgacgacaucgagcagcaggccgacaacaugaucaccgagaugcugcagaaggaguacauggagagacagggcaagaccccccugggccugguggaccuguucguguucagcaccagcuucuaccugaucagcaucuuccugcaccuggugaagauccccacccacagacacguggugggcaagcccugccccaagccccacagacugaaccacaugggcaucugcagcugcggccuguacggccagcccggcgugcccgugaaguggaagagauga

SEQ ID NO: 5291 - RNA, 1476 nt, Artificial Sequence
  derived and/or modified protein sequence (opt4) from LASV(G2557-SLE-2012;Clade IV)__AIT17302__GPCstabilized
augggccagaucgugaccuucuuccaggaggugccccacgugaucgaggaggugaugaacaucgugcugaucgcccugagccugcuggccgugcugaagggccuguacaacguggccaccugcggccugaucggccuggugaccuuccugcugcugugcggcagaagcugcaccaccaaccuguacaagggcguguacgagcugcagacccuggagcugaacauggagacccugaacaugaccaugccccugagcugcaccaagaacaacagccaccacuacaucauggugggcaacgagaccggccuggagcugacccugaccaacaccagcaucaucagccacaaguucugcaaccugagcgacgcccacaagaagaaccuguacgaccacacccugaugagcaucaucagcaccuuccaccugagcauccccaacuucaaccaguacgaggccaugagcugcgacuucaacggcggcaagaucagcgugcaguacaaccugagccacagcuacgccguggacgccgccaaccacugcggcaccguggccaacggcgugcugcagaccuucaugagaauggccuggggcggcagcuacaucgcccuggacagcggcugcggcaacugggacugcaucaugaccagcuaccaguaccugaucauccagaacaccaccugggaggaccacugccaguucagcagacccagccccaucggcuaccugggccugcugagccagagaaccagagacaucuacaucagcagaagacgccggggcaccuucaccuggacccugagcgacagcgagggcaacgacacccccggcggcuacugccugaccagauggaugcugaucgaggccgagcugaagugcuucggcaacaccgccguggccaagugcaacgagaagcacgacgaggaguucugcgacaugcugagacuguucgacuucaacaagcaggccauccagagacugaaggcccccgcccagaugagcauccagcugaucaacaaggccgugaacgcccugaucaacgaccagcugaucaugaagaaccaccugagagacaucaugugcauccccuacugcaacuacagcaaguacugguaccugaaccacaccaccaccggcaagaccagccugcccaagugcuggcuggugagcaacggcagcuaccugaacgagacccacuucagcgacgacaucgagcagcaggccgacaacaugaucaccgagaugcugcagaaggaguacauggagagacagggcaagaccccccugggccugguggaccuguucguguucagcaccagcuucuaccugaucagcaucuuccugcaccuggugaagauccccacccacagacacaucgugggcaagcccugccccaagccccacagacugaaccacaugggcaucugcagcugcggccuguacaagcagcccggcgugcccgugagauggaagagauga

SEQ ID NO: 5292 - RNA, 1476 nt, Artificial Sequence
  derived and/or modified protein sequence (opt4) from LASV(G2587-SLE-2012;Clade IV)__AIT17310__GPCstabilized
augggccagaucgugaccuucuuccaggaggugccccacgugaucgaggaggugaugaacaucgugcugaucgcccugagcauccuggccgugcugaagggccuguacaaccuggccaccugcggccuggugggccuggugaccuuccugcugcugugcggcagaagcugcaccaccagccuguacaagggcguguacgagcugcagacccuggagcugaacauggagacccugaacaugaccaugccccugagcugcaccaagaacaacagccaccacuacaucauggugggcaacgagaccggccuggagcugacccugaccaacaccagcaucaucaaccacaaguucugcaaccugagcgacgcccacaagaagaaccuguacgaccacgcccugaugagcaucaucagcaccuuccaccugagcauccccaacuucaaccaguacgaggccaugagcugcgacuucaacggcggcaagaucagcgugcaguacaaccugagccacagcuacgccggcgacgccgccacccacugcggcaccguggccaacggcgugcugcagaccuucaugagaauggccuggggcggcagcuacaucgcccuggacagcggcugcggcaagugggacugcaucaugaccagcuaccaguaccugaucauccagaacaccaccugggaggaccacugccaguucagcagacccagccccaucggcuaccugggccugcugagccagagaaccagagacaucuacaucagcagaagacgccggggcaccuucaccuggacccugagcgacagcgagggcaaggacacccccggcggcuacugccugaccagauggaugcugaucgaggccgagcugaagugcuucggcaacaccgccguggccaagugcaacgagaagcacgacgaggaguucugcgacaugcugagacuguucgacuucaacaagcaggccauccagagacugaagacccccgcccagaugagcauccagcugaucaacaaggccgugaacgcccugaucaacgaccagcugaucaugaagaaccaccugagagacaucaugugcauccccuacugcaacuacagcaaguacugguaccugaaccacaccaccaccggcaagaccagccugcccagaugcuggcuggugagcaacggcagcuaccugaacgagacccacuucagcgacgacaucgagcagcaggccgacaacaugaucaccgagaugcugcagaaggaguacauggagagacagggcaagaccccccugggccugguggaccuguucguguucagcaccagcuucuaccugaucagcaucuuccugcaccuggugaagauccccacccacagacacaucgugggcaagcccugccccaagccccacagacugaacuacaugggcaucugcagcugcggccuguacaagcagcccggcgugcccgugaaguggaagagauga

SEQ ID NO: 5293 - RNA, 1476 nt, Artificial Sequence
  derived and/or modified protein sequence (opt4) from LASV(G2612-SLE-2012;Clade IV)__AIT17314__GPCstabilized
augggccagaucgugaccuucuuccaggaggugccccacgugaucgaggaggugaugaacaucgugcugaucacccugagcauccuggccgugcugaagggccuguacaacguggccaccugcggccuggugggccuggugaccuuccugcugcugugcggcagaagcugcaccaccagccuguacaagggcguguacgagcugcagacccuggagcugaacauggagacccugaacaugaccaugccccugagcugcaccaagaacaacagccaccacuacaucauggugggcaacgagaccggccuggagcugacccugaccaacaccagcaucaucaaccacaaguucugcaaccugagcgacgcccacaagaaggaccuguacgaccacgcccugaugagcaucaucagcaccuuccaccugagcauccccaacuucaaccaguacgaggccaugagcugcgacuucaacggcggcaagaucagcgugcaguacaaccugagccacagcuacgccguggacgccgccaaccacugcggcaccguggccaacggcgugcugcagaccuucaugagaauggccuggggcggcagcuacaucgcccuggacagcggcugcggcggcugggacugcaucaugaccagcuaccaguaccugaucauccagaacaccaccugggaggaccacugccaguucagcagacccagccccaucggcuaccugggccugcugagccagagaaccagagacaucuacaucagcagaagacgccggggcaccuucaccuggacccugagcgacagcgagggcaacgacacccccggcggcuacugccugaccagauggaugcugaucgaggccgagcugaagugcuucggcaacaccgccguggccaagugcaacgagaagcacgacgaggaguucugcgacaugcugagacuguucgacuucaacaagcaggccauccagagacugaaggcccccgcccagaugagcauccagcugaucaacaaggccgugaacgcccugaucaacgaccagcugaucaugaagaaccaccugagagacaucaugugcauccccuacugcaacuacagcaaguacugguaccugaaccacaccaccaccggcaagaccagccugcccaagugcuggcuggugagcaacggcagcuaccugaacgagacccacuucagcgacgacaucgagcagcaggccgacaacaugaucaccgagaugcugcagaaggaguacauggagagacagggcaagaccccccugggccugguggaccuguucguguucagcaccagcuucuaccugaucagcaucuuccugcaccuggugaagauccccacccacagacacaucgugggcaagcccugccccaagccccacagacugaaccacaugggcaucugcagcugcggccuguacaagcagcccggcgugcccgugaaguggaagagauga

SEQ ID NO: 5294 - RNA, 1476 nt, Artificial Sequence
  derived and/or modified protein sequence (opt4) from LASV(G2615-SLE-2012;Clade IV)__AIT17318__GPCstabilized
augggccagaucgugaccuucuuccaggaggugccccacgugaucgaggaggugaugaacaucgugcugaucgcccugagccugcuggccgugcugaagggccuguacaacguggccaccugcggccugaucggccuggugaccuuccugcugcugugcggcagaagcugcaccaccaaccuguacaagggcguguacgagcugcagacccuggagcugaacauggagacccugaacaugaccaugccccugagcugcaccaagaacaacagccaccacuacaucauggugggcaacgagaccggccuggagcugacccugaccaacaccagcaucaucaaccacaaguucugcaaccugagcgacgcccacaagaagaaccuguacgaccacgcccugaugagcaucaucagcaccuuccaccugagcauccccaacuucaaccaguacgaggccaugagcugcgacuucaacggcggcaagaucagcgugcaguacaaccugagccacagcuacgccguggacgccgccaaccacugcggcaccguggccaacggcgugcugcagaccuucaugagaauggccuggggcggcagcuacaucgcccuggacagcggcugcggcaacugggacugcaucaugaccagcuaccaguaccugaucauccagaacaucaccugggaggaccacugccaguucagcagacccagccccaucggcuaccugggccugcugagccagagaaccagagacaucuacaucagcagaagacgccggggcaccuucaccuggacccugagcgacagcgagggcaacgacacccccggcggcuacugccugaccagauggaugcugaucgaggccgagcugaagugcuucggcaacaccgccguggccaagugcaacgagaagcacgacgaggaguucugcgacaugcugagacuguucgacuucaacaagcaggccauccagagacugaaggcccccgcccagaugagcauccagcugaucaacaaggccgugaacgcccugaucaacgaccagcugaucaugaagaaccaccugagagacaucaugugcauccccuacugcaacuacagcaaguacugguaccugaaccacaccaccaccggcaagaccagccugcccaagugcuggcuggugagcaacggcagcuaccugaacgagacccacuucagcgacgacaucgagcagcaggccgacaacaugaucaccgagaugcugcagaaggaguacauggagagacagggcaagaccccccugggccugguggaccuguucguguucagcaccagcuucuaccugaucagcaucuuccugcaccuggugaagauccccacccacagacacaucgugggcaagcccugccccaagccccacagacugaaccacaugggcaucugcagcugcggccuguacaagcagcccggcgugcccgugagauggaagagauga

SEQ ID NO: 5295 - RNA, 1476 nt, Artificial Sequence
  derived and/or modified protein sequence (opt4) from LASV(G2723-SLE-2012;Clade IV)__AIT17322__GPCstabilized
augggccagaucgugaccuucuuccaggaggugccccacgugaucgaggaggugaugaacaucgugcugaucgcccugagccugcuggccgugcugaagggccuguacaacguggccaccugcggccugaucggccuggugaccuuccugcugcugugcggcagaagcugcaccaccaaccuguacaagggcgccuacgagcugcagacccuggagcugaacauggagacccugaacaugaccaugccccugagcugcaccaagaacaacagccaccacuacaucauggugggcaacgagaccggccuggagcugacccugaccaacaccagcaucaucaaccacaaguucugcaaccugagcgacgcccacaagaagaaccuguacgaccacacccugaugagcaucaucagcaccuuccaccugagcauccccaacuucaaccaguacgaggccaugagcugcgacuucaacggcggcaagaucagcgugcaguacaaccugagccacagcuacgccguggacgccgccaaccacugcggcaccguggccaacggcgugcugcagaccuucaugagaauggccuggggcggcagcuacaucgcccuggacagcggcugcggcaacugggacugcaucaugaccagcuaccaguaccugaucauccagaacaccaccugggaggaccacugccaguucagcagacccagccccaucggcuaccugggccugcugagccagagaaccagagacaucuacaucagcagaagacgccggggcaccuucaccuggacccugagcgacagcgagggcaacgacacccccggcggcuacugccugaccagauggaugcugaucgaggccgagcugaagugcuucggcaacaccgccguggccaagugcaacgagaagcacgacgaggaguucugcgacaugcugagacuguucgacuucaacaagcaggccauccagagacugaaggcccccgcccagaugagcauccagcugaucaacaaggccgugaacgcccugaucaacgaccagcugaucaugaagaaccaccugagagacaucaugugcauccccuacugcaacuacagcaaguacugguaccugaaccacaccaccaccggcaagaccagccugcccaagugcuggcuggugagcaacggcagcuaccugaacgagacccacuucagcgacgacaucgagcagcaggccgacaacaugaucaccgagaugcugcagaaggaguacauggagagacagggcaagaccccccugggccugguggaccuguucguguucagcaccagcuucuaccugaucagcaucuuccugcaccuggugaagauccccacccacagacacaucgugggcaagcccugccccaagccccacagacugaaccacaugggcaucugcagcugcggccuguacaagcagcccggcgugcccgugagauggaagagauga

SEQ ID NO: 5296 - RNA, 1476 nt, Artificial Sequence
  derived and/or modified protein sequence (opt4) from LASV(G2868-SLE-2012;Clade IV)__AIT17328__GPCstabilized
augggccagaucgugaccuucuuccaggaggugccccacgugaucgaggaggugaugaacaucgugcugaucacccugagcauccuggccgugcugaagggccuguacaacaucgccaccugcggccuggugggccuggugaccuuccugcugcugugcggcaagagcugcaccaccagccuguacaagggcguguacgagcugcagacccuggagcugaacauggagacccugaacaugaccaugccccugagcugcaccaagaacaacagccaccacuacaucagagugggcaacgagaccggccuggagcugacccugaccaacaccagcaucaucaaccacaaguucugcaaccugagcgacgcccacaagaagaaccuguacgaccacgcccugaugagcaucaucagcaccuuccaccugagcauccccaacuucaaccaguacgaggccaugagcugcgacuucaacggcggcaagaucagcgugcaguacaaccugagccacagcuacgccguggacgccgccaaccacugcggcaccguggccaacggcgugcugcagaccuucaugagaauggccuggggcggcagcuacaucgcccuggacagcggcugcggcaacugggacugcaucaugaccagcuaccaguaccugaucauccagaacaccaccugggaggaccacugccaguucagcagacccagccccaucggcuaccugggccugcugagccagagaaccagagacaucuacaucagcagaagacgccggggcaccuucaccuggacccugagcgacagcgagggcaacgacgcccccggcggcuacugccugaccagauggaugcugaucgaggccgagcugaagugcuucggcaacaccgccguggccaagugcaacgagaagcacgacgaggaguucugcgacaugcugagacuguucgacuucaacaagcaggccauccagagacugaaggcccccgcccagaugagcauccagcugaucaacaaggccgugaacgcccugaucaacgaccagcugaucaugaagaaccaccugagagacaucaugugcauccccuacugcaacuacagcaaguacugguaccugaaccacaccaccaccggcaagaccagccugcccaagugcuggcuggugagcaacggcagcuaccugaacgagacccacuucagcgacgacaucgagcagcaggccgacaacaugaucaccgagaugcugcagaaggaguacauggagagacagggcaagaccccccugggccugguggaccuguucguguucagcaccagcuucuaccugaucagcaucuuccugcaccuggugaagauccccacccacagacacguggugggcaagagcugccccaagccccacagacugaaccacaugggcaucugcagcugcggccuguacaagcagcccggcgugcccgugaaguggaagagauga

SEQ ID NO: 5297 - RNA, 1476 nt, Artificial Sequence
  derived and/or modified protein sequence (opt4) from LASV(G2903-SLE-2012;Clade IV)__AIT17332__GPCstabilized
augggccagaucgugaccuucuuccaggaggugccccacgugaucgaggaggugaugaacaucgugcugaucgcccugagcauccuggccgugcugaagggccuguacaaccuggccaccugcggccuggugggccuggugaccuuccugcugcugugcggcagaagcugcaccaccagccuguacaagggcguguacgagcugcagacccuggagcugaacauggagacccugaacaugaccaugccccugagcugcaccaagaacaacagccaccacuacaucagagugggcaacgagaccggccuggagcugacccugaccaacaccagcaucaucaaccacaaguucugcaaccugagcgacgcccacaagaagaaccuguacgaccacgcccugaugagcaucaucagcaccuuccaccugagcauccccaacuucaaccaguacgaggccaugagcugcgacuucaacggcggcaagaucagcgugcaguacaaccugagccacagcuacgccguggacgccgccaaccacugcggcaccguggccaacggcgugcugcagaccuucaugagaauggccuggggcggcagcuacaucgcccuggacagcggcugcggcagaugggacugcaucaugaccagcuaccaguaccugaucauccagaacaccaccugggaggaccacugccuguucagcagacccagccccaucggcuaccugggccugcugagccagagaaccagagacaucuacaucagcagaagacgccggggcaccuucaccuggacccugagcgacagcgagggcagagacacccccggcggcuacugccugaccagauggaugcugaucgaggccgagcugaagugcuucggcaacaccgccguggccaagugcaacgagaagcacgacgaggaguucugcgacaugcugagacuguucgacuucaacaagcaggccauccagagacugaaggcccccgcccagaugagcauccagcugaucaacaaggccgugaacgcccugaucaacgaccagcugaucaugaagaaccaccugagagacaucaugugcauccccuacugcaacuacagcaaguacugguaccugaaccacaccaccaccggcagaaccagccugcccagaugcuggcuggugagcaacggcagcuaccugaacgagacccacuucagcgacgacaucgagcagcaggccgacaacaugaucaccgagaugcugcagaaggaguacauggagagacagggcaagaccccccugggccugguggaccuguucguguucagcaccagcuucuaccugaucagcaucuuccugcaccuggugaagauccccacccacagacacaucgugggcaagagcugccccaagccccacagacugaaccacaugggcaucugcagcugcggccuguacaagcagcccggcgugcccgugaaguggaagagauga

SEQ ID NO: 5298 - RNA, 1476 nt, Artificial Sequence
  derived and/or modified protein sequence (opt4) from LASV(G2944-SLE-2012;Clade IV)__AIT17340__GPCstabilized
augggccagaucgugaccuucuuccaggaggugccccacgugaucgaggaggugaugaacaucgugcugaucgcccugagcauccuggccgugcugaagggccuguacaacuucgccaccugcggccuggugggccuggugaccuuccugcugcugugcggcagaagcugcaccaccagccuguacaagggcguguacgagcugcagacccuggagcugaacauggagacccugaacaugaccaugccccugagcugcaccaagaacaacagccaccacuacaucauggugggcaacgagaccggccuggagcugacccugaccaacaucagcaucaucaaccacaaguucugcaaccugagcgacgcccacaagaagaaccuguacgaccacgcccugaugagcaucaucagcaccuuccaccugagcauccccaacuucaaccaguacgaggccaugagcugcgacuucaacggcggcaagaucagcgugcaguacaaccugagccacagcuacgccggcgacgccgccaaccacugcggcaccguggccaacggcgugcugcagaccuucaugagaauggccuggggcggcagcuacaucgcccuggacagcggcugcggcgagugggacugcaucaugaccagcuaccaguaccugaucauccagaacaccaccugggaggaccacugccaguucagcagacccagccccaucggcuaccugggccugcugagccagagaaccagagacaucuacaucagcagaagacgccggggcaccuucaccuggacccugagcgacagcgagggcaaggacacccccggcggcuacugccugaccagauggaugcugaucgaggccgagcugaagugcuucggcaacaccgccguggccaagugcaacgagaagcacgacgaggaguucugcgacaugcugagacuguucgacuucaacaagcaggccauccagagacugaaggcccccgcccagaugagcauccagcugaucaacaaggccgugaacgcccugaucaacgaccagcugaucaugaagaaccaccugagagacaucaugugcauccccuacugcaacuacagcaaguacugguaccugaaccacaccaccaccggcaagaccagccugcccaagugcuggcuggugagcaacggcagcuaccugaacgagacccacuucagcgacgacaucgagcagcaggccgacaacaugaucaccgagaugcugcagaaggaguacauggagagacagggcaagaccccccugggccugguggaccuguucguguucagcaccagcuucuaccugaucagcaucuuccugcaccuggugaagauccccacccacagacacaucgugggcaagcccugccccagaccccacagacugaaccacaugggcaucugcagcugcggccuguacaagcagcccggcgugcccgugaaguggaagagauga

SEQ ID NO: 5299 - RNA, 1476 nt, Artificial Sequence
  derived and/or modified protein sequence (opt4) from LASV(G3010-SLE-2013;Clade IV)__AIT17344__GPCstabilized
augggccagaucgugaccuucuuccaggaggugccccacgugaucgaggaggugaugaacaucgugcugaucgcccugagcauccuggccgugcugaagggccuguacaacuucgccaccugcggccuggugggccuggugaccuuccugcugcugugcggcagaagcugcaccaccagccuguacaagggcguguacgagcugcagacccuggagcugaacauggagacccugaacaugaccaugccccugagcugcaccaagaacaacagccaccacuacaucauggugggcaacgagaccggccuggagcugacccugaccaacaccagcaucaucaaccacaaguucugcaaccugagcgacgcccacaagaagaaccuguacaaccacgcccugaugagcaucaucagcaccuuccaccugagcauccccaacuucaaccaguacgaggccaugagcugcgacuucaacggcggcaagaucagcgugcaguacaaccugagccacagcuacgccggcgacgccgccagccacugcggcaccguggccaacggcgugcugcagaccuucaugagaauggccuggggcggcagcuacaucgcccuggacagcggcugcggcaagugggacugcaucaugaccagcuaccaguaccugaucauccagaacaccaccugggaggaccacugccaguucagcagacccagccccaucggcuaccugggccugcugagccagagaaccagagacaucuacaucagcagaagacgccggggcaccuucaccuggacccugagcgacagcgagggcaaggacacccccggcggcuacugccugaccagauggaugcugaucgaggccgagcugaagugcuucggcaacaccgccguggccaagugcaacgagaagcacgacgaggaguucugcgacaugcugagacuguucgacuucaacaagcaggccauccagagacugaagacccccgcccagaugagcauccagcugaucaacaaggccgugaacgcccugaucaacgaccagcugaucaugaagaaccaccugagagacaucaugugcauccccuacugcaacuacagcaaguacugguaccugaaccacaccaccaccggcaagaccagccugcccaagugcuggcuggugagcaacggcagcuaccugaacgagacccacuucagcgacgacaucgagcagcaggccgacaacaugaucaccgagaugcugcagaaggaguacauggagagacagggcaagaccccccugggccugguggaccuguucguguucagcaccagcuucuaccugaucagcaucuuccugcaccuggugaagauccccacccacagacacaucgugggcaagagcugccccaagccccacagacugaaccacaugggcaucugcagcugcggccuguacaagcagcccggcgugcccgugagauggaagagauga

SEQ ID NO: 5300 - RNA, 1476 nt, Artificial Sequence
  derived and/or modified protein sequence (opt4) from LASV(G3016-SLE-2013;Clade IV)__AIT17348__GPCstabilized
augggccagaucgugaccuucuuccaggaggugccccacgugaucgaggaggugaugaacaucgugcugaucgcccugagcauccuggccgugcugaagggccuguacaacaucgccaccugcggccugaucggccuggugaccuuccugcugcugugcggcagaagcugcaccaccagccuguacaagggcguguacgagcugcagacccuggagcugaacauggagacccugaacaugaccaugccccugagcugcaccaagaacaacagccaccacuacaucauggugggcaacgagaccggccuggagcugacccugaccaacaccagcaucaucaaccacaaguucugcaaccugagcgacgcccacaagaagaaccuguacgaccacgcccugaugagcaucaucagcaccuuccaccugagcauccccaacuucaaccaguacgaggccaugagcugcgacuucaacggcggcaagaucagcgugcaguacaaccugagccacagcuacgccggcgacgccgccaaccacugcggcaccguggccaacggcgugcugcagaccuucaugagaauggccuggggcggcagcuacaucgcccuggacagcggcugcggcagaugggacugcaucaugaccagcuaccaguaccugaucauccagaacaccaccugggaggaccacugccaguucagcagacccagccccaucggcuaccugggccugcugagccagagaaccagagacaucuacaucagcagaagacgccggggcaccuucaccuggacccugagcgacagcgagggcaacgacacccccggcggcuacugccugaccagauggaugcugaucgaggccgagcugaagugcuucggcaacaccgccguggccaagugcaacgagaagcacgacgaggaguucugcgacaugcugagacuguucgacuucaacaagcaggccauccagagacugaaggcccccgcccagaugagcauccagcugaucaacaaggccgugaacgcccugaucaacgaccagcugaucaugaagaaccaccugagagacaucaugugcauccccuacugcaacuacagcaaguacugguaccugaaccacaccaccaccggcaagaccagccugcccaagugcuggcuggugagcaacggcagcuaccugaacgagacccacuucagcgacgacaucgagcagcaggccgacaacaugaucaccgagaugcugcagaaggaguacauggagagacagggcaagaccccccugggccugguggaccuguucguguucagcaccagcuucuaccugaucagcaucuuccugcaccuggugaagauccccacccacagacacaucgugggcaagcccugccccaagccccacagacugaaccacaugggcaucugcagcugcggccuguacaagcagcccggcgugcccgugaaguggaagagauga

SEQ ID NO: 5301 - RNA, 1476 nt, Artificial Sequence
  derived and/or modified protein sequence (opt4) from LASV(G3034-SLE-2013;Clade IV)__AIT17350__GPCstabilized
augggccagaucgugaccuucuuccaggaggugccccacgugaucgaggaggugaugaacaucgugcugaucgcccugagcauccuggccgugcugaagggccuguacaacguggccaccugcggccugaucggccuggugaccuuccugcugcugugcggcagaagcugcaccaccacccuguacaagggcguguacgagcugcaggcccuggagcugaacauggagacccugaacaugaccaugccccugagcugcaccaagaacaacagccaccacuacaucauggugggcaacgagaccggccuggagcugacccugaccaacaccagcaucaucgaccacaaguucugcaaccugagcgacgcccacaagaagaaccuguacgaccacgcccugaugagcaucaucagcaccuuccaccugagcauccccaacuucaaccaguacgaggccaugagcugcgacuucaacggcggcaagaucagcgugcaguacaaccugagccacagcuacgccggcgacgccgccaagcacugcggcaccguggccaacggcgugcugcagaccuucaugagaauggccuggggcggcagcuacaucgcccuggacagcggcugcaacggcugggacugcgugaugaccagcuaccaguaccugaucauccagaacaccaccugggaggaccacugccaguucagcagacccagccccaucggcuaccugggccugcugagccagagaaccagagacaucuacaucagcagaagacgccggggcaccuucaccuggacccugagcgacagcgagggcaaggacacccccggcggcuacugccugaccagauggaugcugaucgaggccgagcugaagugcuucggcaacaccgccguggccaagugcaacgagaagcacgacgaggaguucugcgacaugcugagacuguucgacuucaacaagcaggccauccagagacugaagacccccgcccagaugagcauccagcugaucaacaaggccgugaacgcccugaucaacgaccagcugaucaugaagaaccaccugagagacaucaugugcauccccuacugcaacuacagcaaguacugguaccugaaccacaccgugaccggcaagaccagccugcccagaugcuggcuggugagcaacggcagcuaccugaacgagacccacuucagcgacgacaucgagcagcaggccgacaacaugaucaccgagaugcugcagaaggaguacaucgagagacagggcaagaccccccugggccugguggaccuguucguguucagcaccagcuucuaccugaucagcaucuuccugcaccuggugaagauccccacccacagacacaucaucggcaagcccugccccaagccccacagacugaaccacaugggcaucugcagcugcggccuguacaagcagcccggcgugcccgugagauggaagagauga

SEQ ID NO: 5302 - RNA, 1476 nt, Artificial Sequence
  derived and/or modified protein sequence (opt4) from LASV(G3101-SLE-2013;Clade IV)__AIT17354__GPCstabilized
augggccagaucgugaccuucuuccaggaggugccccacgugaucgaggaggugaugaacaucgugcugaucgcccugagcauccuggccgugcugaagggccuguacaacuucgccaccugcggccuggugggccuggugaccuuccugcugcugugcggcagaagcugcaccaccagccuguacaagggcguguacgagcugcagacccuggagcugaacauggagacccugaacaugaccaugccccugagcugcaccaagaacaacagccaccacuacaucauggugggcaacgagaccggccuggagcugacccugaccaacaucagcaucaucaaccacaaguucugcaaccugagcgacgcccacaagaagaaccuguacgaccacgcccugaugagcaucaucagcaccuuccaccugagcauccccaacuucaaccaguacgaggccaugagcugcgacuucaacggcggcaagaucagcgugcaguacaaccugagccacagcuacgccggcgacgccgccaaccacugcggcaccguggccaacggcgugcugcagaccuucaugagaauggccuggggcggcagcuacaucgcccuggacagcggcugcggcggcugggacugcaucaugaccagcuaccaguaccugaucauccagaacaccaccugggaggaccacugccaguucagcagacccagccccaucggcuaccugggccugcugagccagagaaccagagacaucuacaucagcagaagacgccggggcaccuucaccuggacccugagcgacagcgagggcaaggacacccccggcggcuacugccugaccagauggaugcugaucgaggccgagcugaagugcuucggcaacaccgccguggccaagugcaacgagaagcacgacgaggaguucugcgacaugcugagacuguucgacuucaacaagcaggccauccagagacugaaggcccccgcccagaugagcauccagcugaucaacaaggccgugaacgcccugaucaacgaccagcugaucaugaagaaccaccugagagacaucaugugcauccccuacugcaacuacagcaaguacugguaccugaaccacaccaccaccggcaagaccagccugcccaagugcuggcuggugagcaacggcagcuaccugaacgagacccacuucagcgacgacaucgagcagcaggccgacaacaugaucaccgagaugcugcagaaggaguacauggagagacagggcaagaccccccugggccugguggaccuguucguguucagcaccagcuucuaccugaucagcaucuuccugcaccuggugaagauccccacccacagacacaucgugggcaagcccugccccagaccccacagacugaaccacaugggcaucugcagcugcggccuguacaagcagcccggcgugcccgugaaguggaagagauga

SEQ ID NO: 5303 - RNA, 1476 nt, Artificial Sequence
  derived and/or modified protein sequence (opt4) from LASV(G3110-SLE-2013;Clade IV)__AIT17360__GPCstabilized
augggccagaucgugaccuucuuccaggaggugccccacgugaucgaggaggugaugaacaucgugcugaucgcccugagcauccuggccgugcugaagggccuguacaacuucgccaccugcggccuggugggccuggugaccuuccugcugcugugcggcagaagcugcaccaccagccuguacaagggcguguacgagcugcagacccuggagcugaacauggagacccugaacaugaccaugccccugagcugcaccaagaacaacagccaccacuacaucagagugggcaacgagaccggccuggagcugacccugaccaacaccagcaucaucaaccacagauucugcaaccugagcgacgcccacaagaagaaccuguacgaccacgcccugaugagcaucaucagcaccuuccaccugagcauccccaacuucaaccaguacgaggccaugagcugcgacuucaacggcggcaagaucagcgugcaguacaaccugagccacagcuacgccggcgacgccgccaaccacugcggcaccguggccaacggcgugcugcagaccuucaugagaauggccuggggcggcagcuacaucgcccuggacagcggcugcggcaagugggacugcaucaugaccagcuaccaguaccugaucauccagaacaccaccugggacgaccacugccaguucagcagacccagccccaucggcuaccugggccugcugagccagagaaccagagacaucuacaucagcagaagacgccggggcaccuucaccuggacccugagcgacagcgagggcaaggacacccccggcggcuacugccugaccagauggaugcugaucgaggccgagcugaagugcuucggcaacaccgccguggccaagugcaacgagaagcacgacgaggaguucugcgacaugcugagacuguucgacuucaacaagcaggccaucagaagacugaaggcccccgcccagaugagcauccagcugaucaacaaggccgugaacgcccugaucaacgaccagcugaucaugaagaaccaccugagagacaucaugugcauccccuacugcaacuacagcaaguacugguaccugaaccacaccaccaccggcaagaccagccugcccagaugcuggcuggugagcaacggcagcuaccugaacgagacccacuucagcgacgacaucgagcagcaggccgacaacaugaucaccgagaugcugcagaaggaguacauggagagacagggcaagaccccccugggccugguggaccuguucguguucagcaccagcuucuaccugaucagcaucuuccugcaccuggugaagauccccacccacagacacaucgugggcaagagcugccccaagccccacagacugaaccacaugggcaucugcagcugcggcuucuacaagcagcccggcgugcccgugaaguggaagagauga

SEQ ID NO: 5304 - RNA, 1476 nt, Artificial Sequence
  derived and/or modified protein sequence (opt4) from LASV(G3148-SLE-2013;Clade IV)__AIT17364__GPCstabilized
augggccagaucgugaccuucuuccaggaggugccccacgugaucgaggaggugaugaacaucgugcugaucgcccugagcauccuggccgugcugaagggccuguacaacuucgccaccugcggccuggugggccuggugaccuuccugcugcugugcggcagaagcugcaccaccagccuguacaagggcguguacgagcugcagacccuggagcugaacauggagacccugaacaugaccaugccccugagcugcaccaagaacaacagccaccacuacaucauggugggcaacgagaccggccuggagcugacccugaccaacaccagcaucaucaaccacaaguucugcaaccugagcgacgcccacaagaagaaccuguacgaccacgcccugaugagcaucaucagcaccuuccaccugagcauccccaacuucaaccaguacgaggccaugagcugcgacuucaacggcggcaagaucagcgugcaguacaaccugagccacagcuacgccggcgacgccgccaaccacugcggcaccguggccaacggcgugcugcagaccuucaugagaauggccuggggcggcagcuacaucgcccuggacagcggcugcgacagaugggacugcaucaugaccagcuaccaguaccugaucauccagaacaccaccugggaggaccacugccaguucagcagacccagccccaucggcuaccugggccugcugagccagagaaccagagacaucuacaucagcagaagacgccggggcaccuucaccuggacccugagcgacagcgagggcaaggacacccccggcggcuacugccugaccagauggaugcugaucgaggccgagcugaagugcuucggcaacaccgccguggccaagugcaacgagaagcacgacgaggaguucugcgacaugcugagacuguucgacuucaacaagcaggccauccagagacugaaggcccccgcccagaugagcauccagcugaucaacaaggccgugaacgcccugaucaacgaccagcugaucaugaagaaccaccugagagacaucaugugcauccccuacugcaacuacagcaaguacugguaccugaaccacaccaccaccggcaagaccagccugcccaagugcuggcuggugagcaacggcagcuaccugaacgagacccacuucagcgacgacaucgagcagcaggccgacaacaugaucaccgagaugcugcagaaggaguacaucgagagacagggcaagaccccccugggccugguggaccuguucguguucagcaccagcuucuaccugaucagcaucuuccugcaccuggugaagauccccacccacagacacaucgugggcaagcccugccccaagccccacagacugaaccacaugggcaucugcagcugcggccuguacaagcagcccggcgugagcgugaaguggaagagauga

SEQ ID NO: 5305 - RNA, 1476 nt, Artificial Sequence
  derived and/or modified protein sequence (opt4) from LASV(G3151-SLE-2013;Clade IV)__AIT17368__GPCstabilized
augggccagaucgugaccuucuuccaggaggugccccacgugaucgaggaggugaugaacaucgugcugaucgcccugagcauccuggccgugcugaagggccuguacaacuucgccaccugcggccuggugggccuggugaccuuccugcugcugugcggcagaagcugcaccaccagccuguacaagggcguguacgagcugcagacccuggagcugaacauggagacccugaacaugaccaugccccugagcugcaccaagaacaacagccaccacuacaucauggugggcaacgagaccggccuggagcugacccugaccaacaccagcaucaucaaccacaaguucugcaaccugagcgacgcccacaagaagaaccuguacgaccacgcccugaugagcaucaucagcaccuuccaccugagcauccccaacuucaaccaguucgaggccaugagcugcgacuucaacggcggcaagaucagcgugcaguacaaccugagccacagcuacgccggcgacgccgccaaccacugcggcaccguggccaacggcgugcugcagaccuucaugagaauggccuggggcggcagcuacaucgcccuggacagcggcugcagcaagugggacugcaucaugaccagcuaccaguaccugaucauccagaacaccaccugggacgaccacugccaguucagcagacccagccccaucggcuaccugggccugcugagccagagaaccagagacaucuacaucagcagaagacgccggggcaccuucaccuggacccugagcgacagcgagggcaaggacacccccggcggcuacugccugaccagauggaugcugaucgaggccgagcugaagugcuucggcaacaccgccguggccaagugcaacgagaagcacgacgaggaguucugcgacaugcugagacuguucgacuucaacaagcaggccauccagagacugaaggcccccgcccagaugagcauccagcugaucaacaaggccgugaacgcccugaucaacgaccagcugaucaugaagaaccaccugagagacaucaugugcauccccuacugcaacuacagcaaguacugguaccugaaccacaccaccaccggcaagaccagccugcccaagugcuggcuggugagcaacggcagcuaccugaacgagacccacuucagcgacgacaucgagcagcaggccgacaacaugaucaccgagaugcugcagaaggaguacauggagagacagggcaagaccccccugggccugguggaccuguucguguucagcaccagcuucuaccugaucagcaucuuccugcaccuggugaagauccccacccacagacacaucgugggcaagagcugccccaagccccacagacugaacuacaugggcaucugcagcugcggcuucuacaagcagcccggcgugcccgugaaguggaagagauga

SEQ ID NO: 5306 - RNA, 1476 nt, Artificial Sequence
  derived and/or modified protein sequence (opt4) from LASV(G3157-SLE-2013;Clade IV)__AIT17370__GPCstabilized
augggccagaucgugaccuucuuccaggaggugccccacgugaucgaggaggugaugaacaucgugcugaucgcccugagcauccuggccgugcugaagggccuguacaacuucgccaccugcggccuggugggccuggugaccuuccugcugcugugcggcagaagcugcaccaccagccuguacaagggcguguacgagcugcagacccuggagcugaacauggagacccugaacaugaccaugccccugagcugcaccaagaacaacagccaccacuacaucauggugggcaacgagaccggccuggagcugacccugaccaacaccagcaucaucaaccacaaguucugcaaccugagcgacgcccacaagaagaaccuguacgaccacgcccugaugagcaucaucagcaccuuccaccugagcauccccaacuucaaccaguacgaggccaugagcugcgacuucaacggcggcaagaucagcgugcaguacaaccugagccacagcuacgccggcgacgccgccaaccacugcggcaccguggccaacggcgugcugcagaccuucaugagaauggccuggggcggcagcuacaucgcccuggacagcggcugcgacagaugggacugcaucaugaccagcuaccaguaccugaucauccagaacaccaccugggaggaccacugccaguucagcagacccagccccaucggcuaccugggccugcugagccagagaaccagagacaucuacaucagcagaagacgccggggcaccuucaccuggacccugagcgacagcgagggcaaggacacccccggcggcuacugccugaccagauggaugcugaucgaggccgagcugaagugcuucggcaacaccgccguggccaagugcaacgagaagcacgacgaggaguucugcgacaugcugagacuguucgacuucaacaagcaggccauccagagacugaaggcccccgcccagaugagcauccagcugaucaacaaggccgugaacgcccugaucaacgaccagcugaucaugaagaaccaccugagagacaucaugugcauccccuacugcaacuacagcaaguacugguaccugaaccacaccaccaccggcaagaccagccugcccaagugcuggcuggugagcaacggcagcuaccugaacgagacccacuucagcgacgacaucgagcagcaggccgacaacaugaucaccgagaugcugcagaaggaguacauggagagacagggcaagaccccccugggccugguggaccuguucguguucagcaccagcuucuaccugaucagcaucuuccugcaccuggugaagauccccacccacagacacaucgugggcaagcccugccccaagccccacagacugaaccacaugggcaucugcagcugcggccuguacaagcagcccggcgugagcgugaaguggaagagauga

SEQ ID NO: 5307 - RNA, 1476 nt, Artificial Sequence
  derived and/or modified protein sequence (opt4) from LASV(G3206-SLE-2013;Clade IV)__AIT17378__GPCstabilized
augggccagaucgugaccuucuuccaggaggugccccacgugaucgaggaggugaugaacaucgugcugaucgcccugagcauccuggccgugcugaagggccuguacaaccuggccaccugcggccuggugggccuggugaccuuccugcugcugugcggcagaagcugcaccaccagccuguacaagggcguguacgagcugcagacccuggagcugaacauggagacccugaacaugaccaugccccugagcugcaccaagaacaacagccaccacuacaucauggugggcaacgagaccggccuggagcugacccugaccaacaccagcaucaucaaccacaaguucugcaaccugagcgacgcccacaagaagaaccuguacgaccacacccugaugagcaucaucagcaccuuccaccugagcauccccaacuucaaccaguacgaggccaugagcugcgacuucaacggcggcaagaucagcgugcaguacaaccugagccacagcuacgccguggacgccgccaaccacugcggcaccguggccaacggcgugcugcagaccuucaugagaauggccuggggcggcagcuacaucgcccuggacagcggcugcagcggcugggacugcaucaugaccagcuaccaguaccuggugauccagaacaccaccugggaggaccacugccaguucagcagacccagccccaucggcuaccugggccugcugagccagagaaccagagacaucuacaucagcagaagacgccggggcaccuucaccuggacccugagcgacagcgagggcaagaacacccccggcggcuacugccugaccagauggaugcugaucgaggccgagcugaagugcuucggcaacaccgccguggccaagugcaacgagaagcacgacgaggaguucugcgacaugcugagacuguucgacuucaacaagcaggccauccagagacugaaggcccccgcccagaugagcauccagcugaucaacaaggccgugaacgcccugaucaacgaccagcugaucaugaagaaccaccugagagacaucaugugcauccccuacugcaacuacagcaaguacugguaccugaaccacaccaccaccggcagaaccagccugcccagaugcuggcuggugagcaacggcagcuaccugaacgagacccacuucagcgacgacaucgagcagcaggccgacaacaugaucaccgagaugcugcagaaggaguacauggagagacagggcaagaccccccugggccugguggaccuguucguguucagcaccagcuucuaccugaucagcaucuuccugcaccuggugaagauccccacccacagacacaucgugggcaagagcugccccaagccccacagacugaaccacaugggcaucugcagcugcggcuucuacaagcagcccggcgugcccgugaaguggaagagauga

SEQ ID NO: 5308 - RNA, 1476 nt, Artificial Sequence
  derived and/or modified protein sequence (opt4) from LASV(G3234-SLE-2013;Clade IV)__AIT17388__GPCstabilized
augggccagaucgugaccuucuuccaggaggugccccacgugaucgaggaggugaugaacaucgugcugaucgcccugagcauccuggccgugcugaagggccuguacaacguggccaccugcggccugaucggccuggugaccuuccugcugcugugcggcagaagcugcaccaccacccuguacaagggcguguacgagcugcaggcccuggagcugaacauggagacccugaacaugaccaugccccugagcugcaccaagaacaacagccaccacuacaucagagugggcaacgagaccggccuggagcugacccugaccaacaccagcaucaucaaccacaaguucugcaaccugagcgacgcccacaagaagaaccuguacgaccacgcccugaugagcaucaucagcaccuuccaccugagcauccccaacuucaaccaguacgaggccaugagcugcgacuucaacggcggcaucaucagcgugcaguacaaccugagccacagcuacgccggcgacgccgccaaccacugcggcaccguggccaacggcgugcugcagaccuucaugagaauggccuggggcggcagcuacaucgcccuggacagcggcugcaacggcugggacugcaucaugaccagcuaccaguaccugaucauccagaacaccaccugggacgaccacugccaguucagcagacccagccccaucggcuaccugggccugcugagccagagaaccagagacaucuacaucagcagaagacgccggggcaccuucaccuggacccugagcgacagcgagggcaaggacacccccggcggcuacugccugaccagauggaugcugaucgaggccgagcugaagugcuucggcaacaccgccguggccaagugcaacgagaagcacgacgaggaguucugcgacaugcugagacuguucgacuucaacaagcaggccauccagagacugaagacccccgcccagaugaacauccagcugaucaacaaggccgugaacgcccugaucaacgaccagcugaucaugaagaaccaccugagagacaucaugugcauccccuacugcaacuacagcaaguacugguaccugaacaacaccgccaccggcaagaccagccugcccagaugcuggcuggugagcaacggcagcuaccugaacgagacccacuucagcgacgacaucgagcagcaggccgacaacaugaucaccgagaugcugcagaaggaguacauggagagacagggcaagaccccccugggccugguggaccuguucguguucagcaccagcuucuaccugaucagcaucuuccugcaccuggugaagauccccacccacagacacaucgugggcaagcccugccccaagccccacagacugaaccacaucggcaucugcagcugcggccuguacaagcagcccggcgugcccgugaaguggaagagauga

SEQ ID NO: 5309 - RNA, 1476 nt, Artificial Sequence
  derived and/or modified protein sequence (opt4) from LASV(G502-SLE-2009;Clade IV)__AIT17126__GPCstabilized
augggccagaucgugaccuucuuccaggaggugccccacgugaucgaggaggugaugaacaucgugcugaucgcccugagcauccuggccgugcugaagggccuguacaacuucgccaccugcggccuggugggccugcugaccuuccugcugcugugcggcagaagcugcaccaccggccuguacaagggcguguacgagcugcagacccuggagcugaacauggagacccugaacaugaccaugccccugagcugcaccaagaacaacagccaccacuacaucauggugggcaacgagaccggccuggagcugacccugaccaacaccagcaucaucaaccacaaguucugcaaccugagcgacgcccacaagaagaaccuguacgaccacgcccugaugagcaucaucagcaccuuccaccugagcauccccaacuucaaccaguacgaggccaugagcugcgacuucaacggcggcaagaucagcgugcaguacaaccugagccacagcuacgccggcgacgccgccgaccacugcggcaccguggccaacggcgugcugcagaccuucaugagaauggccuggggcggcagcuacaucgcccuggacagcggcugcggcagaugggacugcaucaugaccagcuaccaguaccugaucauccagaacaccaccugggaggaccacugccaguucagcagacccagccccaucggcuaccugggccugcugagccagagaaccagagacaucuacaucagcagaagacgccggggcaccuucaccuggacccugagcgacagcgagggcaaggacacccccggcggcuacugccugaccagauggaugcugaucgaggccgagcugaagugcuucggcaacaccgccguggccaagugcaacgagaagcacgacgaggaguucugcgacaugcugagacuguucgacuucaacaagcaggccauccagagacugaaggcccccgcccagaugagcauccagcugaucaacaaggccgugaacgcccugaucaacgaccagcuggugaugaagaaccaccugagagacaucaugugcauccccuacugcaacuacagcagauacugguaccugaaccacaccaccaccggcagaaccagccugcccaagugcuggcuggugagcaacggcagcuaccugaacgagacccacuucagcgacgacaucgagcagcaggccgacaacaugaucaccgagaugcugcagaaggaguacauggagagacagggcaagaccccccugggccugguggaccuguucguguucagcaccagcuucuaccugaucagcaucuuccugcaccuggugaagauccccacccacagacacaucgugggcaagagcugccccaagccccacagacugaaccacaugggcaucugcagcugcggccuguacaagcagcccggcgugcccgugaaguggaagagauga

SEQ ID NO: 5310 - RNA, 1476 nt, Artificial Sequence
  derived and/or modified protein sequence (opt4) from LASV(G503-SLE-2009;Clade IV)__AIT17130__GPCstabilized
augggccagaucgugaccuucuuccaggaggugccccacgugaucgaggaggugaugaacaucgugcugaucgcccugagcauccuggccgugcugaagggccuguacaacuucgccaccugcggcuucgugggccuggugaccuuccugcugcugugcggcagaagcugcaccaccagccuguacaagggcguguacgagcugcagacccuggagcugaacauggagacccugaacaugaccaugccccugagcugcaccaagaacaacagccaccacuacaucagagugggcaacgacaccggccuggagcugacccugaccaacaccagcaucaucaaccacaaguucugcaaccugagcgacgcccacaagaagaaccuguacgaccacgcccugaugagcaucaucagcaccuuccaccugagcauccccaacuucaaccaguacgaggccaugagcugcgacuucaacggcggcaagaucagcgugcaguacaaccugagccacagcuacgccguggacgccgccagccacugcggcaccaucgccaacggcgugcugcagaccuucaugagaauggccuggggcggcagcuacaucgcccuggacagcggcugcgacagaugggacugcaucaugaccagcuaccaguaccugaucauccagaacaccaccugggaggaccacugccaguucagcagacccagccccaucggcuaccugggccugcugagccagagaaccagagacaucuacaucagcagaagacgccggggcaccuucaccuggacccugagcgacagcgagggcaaggacacccccggcggcuacugccugaccagauggaugcugaucgaggccgagcugaagugcuucggcaacaccgccguggccaagugcaacgagaagcacgacgaggaguucugcgacaugcugagacuguucgacuucaacaagcaggccauccagagacugaaggcccccgcccagaugagcauccagcugaucaacaaggccgugaacgcccugaucaacgaccagcugaucaugaagaaccaccugagagacaucaugugcauccccuacugcaacuacagcaaguacugguaccugaaccacaccaccaccggcaagaccagccugcccaagugcuggcuggugagcaacggcagcuaccugaacgagacccacuucagcgacgacaucgagcagcaggccgacaacaugaucaccgagaugcugcagaaggaguacauggagagacagggcaagaccccccugggccugguggaccuguucguguucagcaccagcuucuaccugaucagcaucuuccugcaccuggugaagauccccacccacagacacaucgugggcaagagcugccccaagccccacagacugaaccacaugggcaucugcagcugcggccuguacaagcagcccggcgugcccgugaaguggaagagauga

SEQ ID NO: 5311 - RNA, 1476 nt, Artificial Sequence
  derived and/or modified protein sequence (opt4) from LASV(G610-SLE-2009;Clade IV)__AIT17134__GPCstabilized
augggccagaucgugaccuucuuccaggaggugccccacgugaucgaggaggugaugaacaucgugcugaucgcccugagcauccuggccgugcugaagggccuguacaacuucgccaccugcggccuggugggccuggugaccuuccugcugcugugcggcagaagcugcaccaccagccuguacaagggcguguacgagcugcagacccuggagcugaacauggagacccugaacaugaccaugccccugagcugcaccaagaacaacagccaccacuacaucauggugggcaacgagaccggccuggagcugacccugaccaacaccagcaucaucaaccacaaguucugcaaccugagcgacgcccacaagaagaaccuguacgaccacgcccugaugagcaucaucagcaccuuccaccugagcauccccaacuucaaccaguacgaggccaugagcugcgacuucaacggcggcaagaucagcgugcaguacaaccugagccacagcuacgccggcgacgccgccaaccacugcggcaccguggccaacggcgugcugcagaccuucaugagaauggccuggggcggcagcuacaucgcccuggacagcggcugcggcagaugggacugcaucaugaccagcuaccaguaccugaucauccagaacaccaccugggaggaccacugccaguucagcagacccagccccaucggcuaccugggccugcugagccagagaaccagagacaucuacaucagcagaagacgccggggcaccuucaccuggacccugagcgacagcgagggcaaggacacccccggcggcuacugccugaccagauggaugcugaucgaggccgagcugaagugcuucggcaacaccgccguggccaagugcaacgagaagcacgacgaggaguucugcgacaugcugagacuguucgacuucaacaagcaggccauccagagacugaaggcccccgcccagaugagcauccagcugaucaacaaggccgugaacgcccugaucaacgaccagcugaucaugaagaaccaccugagagacaucaugugcauccccuacugcaacuacagcaaguacugguaccugaaccacaccaccaccggcaagaccagccugcccaagugcuggcuggugagcaacggcagcuaccugaacgagacccacuucagcgacgacaucgagcagcaggccgacaacaugaucaccgagaugcugcagaaggaguacauggagagacagggcaagaccccccugggccugguggaccuguucguguucagcaccagcuucuaccugaucagcaucuuccugcaccuggugaagauccccacccacagacacaucgugggcaagagcugccccaagccccacagacugaaccacaugggcaucugcagcugcggccuguacaagcagcccggcgugcccgugaaguggaagagauga

SEQ ID NO: 5312 - RNA, 1476 nt, Artificial Sequence
  derived and/or modified protein sequence (opt4) from LASV(G636-SLE-2009;Clade IV)__AIT17138__GPCstabilized
augggccagaucgugaccuucuuccaggaggugccccacgugaucgaggaggugaugaacaucgugcugaucgcccugagcauccuggccgugcugaagggccuguacaaccuggccaccugcggccuggugggccuggugaccuuccugcugcugugcggcagaagcugcaccaccagccuguacaagggcguguacgagcugcagacccuggagcugaacauggagacccugaacaugaccaugccccugagcugcaccaagaacaacagccaccacuacaucauggugggcaacgagaccggccuggagcugacccugaccaacaccagccugaucaaccacaaguucugcaaccugagcgacgcccacaagaagaaccuguacgaccacgcccugaugagcaucaucagcaccuuccaccugagcauccccaacuucaaccaguacgaggccaugagcugcgacuucaacggcggcaagaucagcgugcaguacaaccugagccacagcuacgccguggacgccgccagccacugcggcaccguggccaacggcgugcugcagaccuucaugagaauggccuggggcggcagcuacaucgcccuggacagcggcugcggcggcugggacugcaucaugaccagcuaccaguaccugaucauccagaacaccaccugggaggaccacugccaguucagcagacccagccccaucggcuaccugggccugcugagccagagaaccagagacaucuacaucagcagaagacgccggggcaccuucaccuggacccugagcgacagcgagggcaaggacacccccggcggcuacugccugaccagauggaugcugaucgaggccgagcugaagugcuucggcaacaccgccguggccaagugcaacgagaagcacgacgaggaguucugcgacaugcugagacuguucgacuucaacaagcaggccauccagagacugaaggcccccgcccagaugagcauccagcugaucaacaaggccgugaacgcccugaucaacgaccagcugaucaugaagaaccaccugagagacaucaugugcauccccuacugcaacuacagcaaguacugguaccugaaccacaccaccaccggcagaaccagccugcccagaugcuggcuggugagcaacggcagcuaccugaacgagacccacuucagcgacgacaucgagcagcaggccgacaacaugaucaccgagaugcugcagaaggaguacauggagagacagggcaagaccccccugggccugguggaccuguucguguucagcaccagcuucuaccugaucagcaucuuccugcaccuggugaagauccccacccacagacacaucgugggcaagagcugccccaagccccacagacugaaccacaugggcaucugcagcugcggccuguacaagcagcccggcgugcccgugaaguggaagagauga

SEQ ID NO: 5313 - RNA, 1476 nt, Artificial Sequence
  derived and/or modified protein sequence (opt4) from LASV(G692-SLE-2009;Clade IV)__AIT17146__GPCstabilized
augggccagaucgugaccuucuuccaggaggugccccacgugaucgaggaggugaugaacaucgugcugaucgcccugagcauccuggccgugcugaagggccuguacaaccuggccaccugcggccuggugggccuggugaccuuccugcugcugugcggcagaagcugcaccaccagccuguacaagggcguguacgagcugcagacccuggagcugaacauggagacccugaacaugaccaugccccugagcugcaccaagaacaacagccaccacuacaucauggugggcaacgagaccggccuggagcugacccugaccaacaccagcaucaucaaccacaaguucugcaaccugagcgacgcccacaagaagaaccuguacgaccacgcccugaugagcaucaucagcaccuuccaccugagcauccccaacuucaaccaguacgaggccaugagcugcgacuucaacggcggcaagaucagcgugcaguacaaccugagccacagcuacgccggcgacgccgccaaccacugcggcaccguggccaacggcgugcugcagaccuucaugagaauggccuggggcggcagcuacaucgcccuggacagcggcugcggcagaugggacugcaucaugaccagcuaccaguaccugaucauccagaacaccaccugggaggaccacugcagcuucagcagacccagccccaucggcuaccugggccugcugagccagagaaccagagacaucuacaucagcagaagacgccggggcaccuucaccuggacccugagcgacagcgagggcaaggacacccccggcggcuacugccugaccagauggaugcugaucgaggccgagcugaagugcuucggcaacaccgccguggccaagugcaacgagaagcacgacgaggaguucugcgacaugcugagacuguucgacuucaacaagcaggccauccagagacugaaggcccccgcccagaugagcauccagcugaucaacaaggccgugaacgcccugaucaacgaccagcugaucaugaagaaccaccugagagacaucaugugcauccccuacugcaacuacagcaaguacugguaccugaaccacaccaccaccggcaagaccagccugcccaagugcuggcuggugagcaacggcagcuaccugaacgagacccacuucagcgacgacaucgagcagcaggccgacaacaugaucaccgagaugcugcagaaggaguacauggagagacagggcaagaccccccugggccugguggaccuguucguguucagcaccagcuucuaccugaucagcaucuuccugcaccuggugaagauccccacccacagacacaucgugggcaagagcugccccaagccccacagacugaaccacaugggcaucugcagcugcggcuucuacaagcagcccggcgugcccgugaaguggaagagauga

SEQ ID NO: 5314 - RNA, 1476 nt, Artificial Sequence
  derived and/or modified protein sequence (opt4) from LASV(G733-SLE-2010;Clade IV)__AIT17154__GPCstabilized
augggccagaucgugaccuucuuccaggaggugccccacgugaucgaggaggugaugaacaucgugcugaucgcccugagcauccuggccgugcugaagggccuguacaacuucgccaccugcggcaucgugggccuggugagcuuccugcugcugugcggcagaagcugcaccaccagccuguacaagggcguguacgagcugcagacccuggagcugaacauggagacccugaacaugaccaugccccugagcugcaccaagaacaacagccaccacuacaucauggugggcaacgagaccggccuggagcugacccugaccaacaccagcaucaucaaccacaaguucugcaaccugagcgacgcccacaagaagaaccuguacgaccacgcccugaugagcaucaucagcaccuuccaccugagcauccccaacuucaaccaguacgaggccaugagcugcgacuucaacggcggcaagaucagcgugcaguacaaccugagccacagcuacgccggcgacgccgccaaccacugcggcaccaucgccaacggcgugcugcagaccuucaugagaauggccuggggcggcagcuacaucgcccuggacagcggcugcgacagaugggacugcaucaugaccagcuaccaguaccugaucauccagaacaccaccugggaggaccacugccaguucagcagacccagccccaucggcuaccugggccugcugagccagagaaccagagacaucuacaucagcagaagacgccggggcaccuucaccuggacccugagcgacagcgagggcaaggacacccccggcggcuacugccugaccagauggaugcugaucgaggccgagcugaagugcuucggcaacaccgccguggccaagugcaacgagaagcacgacgaggaguucugcgacaugcugagacuguucgacuucaacaagcaggccauccagagacugaaggcccccgcccagaugagcauccagcugaucaacaaggccgugaacgcccugaucaacgaccagcugaucaugaagaaccaccugagagacaucaugugcauccccuacugcaacuacagcaaguacugguaccugaaccacaccaccaccggcaagaccagccugcccaagugcuggcuggugagcaacggcagcuaccugaacgagacccacuucagcgacgacaucgagcagcaggccgacaacaugaucaccgagaugcugcagaaggaguacauggagagacagggcaagaccccccugggccugguggaccuguucguguucagcaccagcuucuaccugaucagcaucuuccugcaccuggugaagauccccacccacagacacguggugggcaagagcugccccaagccccacagacugaaccacaugggcaucugcagcugcggccuguacggccagcccggcgugcccgugaaguggaagagauga

SEQ ID NO: 5315 - RNA, 1476 nt, Artificial Sequence
  derived and/or modified protein sequence (opt4) from LASV(G771-SLE-2010;Clade IV)__AIT17158__GPCstabilized
augggccagaucgugaccuucuuccaggaggugccccacgugaucgaggaggugaugaacaucgugcugaucgcccugagcauccuggccgugcugaagggccuguacaacuucgccaccugcggccuggugggccuggugaccuuccugcugcugugcggcagaagcugcaccaccagccuguacaagggcguguacgagcugcagacccuggagcugaacauggagacccugaacaugaccaugccccugagcugcaccaagaacaacagccaccacuacaucauggugggcaacgagaccggccuggagcugacccugaccaacaccagcaucaucaaccacaaguucugcaaccugagcgacgcccacaagaagaaccuguacgaccacgcccugaugagcaucaucagcaccuuccaccugagcauccccaacuucaaccaguacgaggccaugagcugcgacuucaacggcggcaagaucagcgugcaguacaaccugagccacagcuacgccggcgacgccgccaaccacugcggcaccguggccaacggcgugcugcagaccuucaugagaauggccuggggcggcagcuacaucgcccuggacagcggcugcgacagaugggacugcaucaugaccagcuaccaguaccugaucauccagaacaccaccugggaggaccacugccaguucagcagacccagccccaucggcuaccugggccugcugagccagagaaccagagacaucuacaucagcagaagacgccggggcaccuucaccuggacccugagcgacagcgagggcaaggacacccccggcggcuacugccugaccagauggaugcugaucgaggccgagcugaagugcuucggcaacaccgccguggccaagugcaacgagaagcacgacgaggaguucugcgacaugcugagacuguucgacuucaacaagcaggccauccagagacugaaggcccccgcccagaugagcauccagcugaucaacaaggccgugaacgcccugaucaacgaccagcugaucaugaagaaccaccugagagacaucaugugcauccccuacugcaacuacagcaaguacugguaccugaaccacaccaccaccggcaagaccagccugcccaagugcuggcuggugagcaacggcagcuaccugaacgagacccacuucagcgacgacaucgagcagcaggccgacaacaugaucaccgagaugcugcagaaggaguacauggagagacagggcaagaccccccugggccugguggaccuguucguguucagcaccagcuucuaccugaucagcaucuuccugcaccuggugaagauccccacccacagacacaucgugggcaagagcugccccaagccccacagacugaaccacaugggcaucugcagcugcggccuguacaagcagcccggcgugcccgugaaguggaagagauga

SEQ ID NO: 5316 - RNA, 1476 nt, Artificial Sequence
  derived and/or modified protein sequence (opt4) from LASV(G808-SLE-2010;Clade IV)__AIT17164__GPCstabilized
augggccagaucgugaccuucuuccaggaggugccccacgugaucgaggaggugaugaacaucgugcugaucgcccugagcauccuggccgugcugaagggccuguacaacuucgccaccugcggccuggugggccuggugaccuuccugcugcugugcggcagaagcugcaccagcagccuguacaagggcguguacgagcugcagacccuggagcugaacauggagacccugaacaugaccaugccccugagcugcaccaagaacaacagccaccacuacaucagagugggcaacgagaccggccuggagcugacccugaccaacaccagcaucaucgaccacaaguucugcaaccugagcgacgcccacaagaagaaccuguacgaccacgcccugaugagcaucaucagcaccuuccaccugagcauccccaacuucaaccaguacgaggccaugagcugcgacuucaacggcggcaagaucagcgugcaguacaaccugagccacagcuacgccggcgacgccgccaagcacugcggcaccguggccaacggcgugcugcagaccuucaugagaauggccuggggcggcagcuacaucgcccuggacagcggcugcggcaacugggacugcaucaugaccagcuaccaguaccugaucauccagaacaccaccugggaggaccacugccaguucagcagacccagccccaucggcuaccugggccugcugagccagagaaccagagacaucuacaucagcagaagacgccggggcaccuucaccuggacccugagcgacagcgagggcaacgacgcccccggcggcuacugccugaccagauggaugcugauccaggccgagcugaagugcuucggcaacaccgccguggccaagugcaacgagaagcacgacgaggaguucugcgacaugcugagacuguucgacuucaacaagcaggccauccagagacugaaggcccccgcccagaugagcauccagcugaucaacaaggccgugaacgcccugaucaacgaccagcugaucaugaagaaccaccugagagacaucaugugcauccccuacugcaacuacagcaaguacugguaccugaaccacaccaccaccggcagaaccagccugcccagaugcuggcuggugagcaacggcagcuaccugaacgagacccacuucagcgacgacaucgagcagcaggccgacaacaugaucaccgagaugcugcagaaggaguacauggagagacagggcaagaccccccugggccugguggaccuguucguguucagcaccagcuucuaccugaucagcaucuuccugcaccuggugaagauccccacccacagacacaucgugggcaagagcugccccaagccccacagacugaaccacaugggcaucugcagcugcggccuguucaagcagcccggcgugcccgugaaguggaagagauga

SEQ ID NO: 5317 - RNA, 1476 nt, Artificial Sequence
  derived and/or modified protein sequence (opt4) from LASV(Guinea Faranah;Clade IV)__AMZ00381__GPCstabilized
augggccagaucgugaccuucuuccaggaggugccccacgugaucgaggaggugaugaacaucgugcugaucgcccugagcauccuggccgugcugaagggccuguacaacguggccaccugcggccugaucggccugaucgccuuccugcugcugugcggcagaagcugcaccagcacccuguacaagggcguguacgagcugcaggcccuggagcugaacauggagacccugaacaugaccaugccccugagcugcaccaagaacaacagccaccacuacaucauggugggcaacgagaccggccuggagcugacccugaccaacaccagcaucaucaaccacaaguucugcaaccugagcgacgcccacaagaagaaccuguacaaccacgcccugaugagcaucaucagcaccuuccaccugagcauccccaacuucaaccaguacgaggccaugagcugcgacuucaacggcggcaagaucagcgugcaguacaaccugagccacagcuacgccguggacgccgccaaccacugcggcaccguggccaacggcauccugcagaccuucaugagaauggccuggggcggcagcuacaucgcccuggacagcggcugcggcggcugggacugcaucaugagcagcuaccaguaccuggugauccagaacaccaccugggaggaccacugccaguucagcagacccagccccaucggcuaccugggccugcugagccagagaaccagagacaucuacaucagcagaagacgccggggcaccuucaccuggacccugagcgacagcgagggcaaggacacccccggcggcuacugccugaccagauggaugcugaucgaggccgagcugaagugcuucggcaacaccgccguggccaagugcaacgagaagcacgacgaggaguucugcgacaugcugagacuguucgacuucaacaagcaggccauccagagacugaaggcccccgcccagaugagcauccagcugaucaacaaggccgugaacgcccugaucaacgaccagcugaucaugaagaaccaccugagagacaucaugugcauccccuacugcaacuacagcaaguacugguaccugaaccacaccaucaccggcagaaccagccugcccaagugcuggcuggugagcaacggcagcuaccugaacgagacccacuucagcgacgacaucgagcagcaggccgacaacaugaucaccgagaugcugcagaaggaguaccuggagagacagggcaagaccccccugggccugguggaccuguucguguucagcaccagcuucuaccugaucagcaucuuccugcaccugaucaagauccccacccacagacacaucgugggcaagagcugccccaagccccacagacugaaccacaugggcgugugcagcugcggccuguacaagcagcccggcgugcccgugagauggaagagauga

SEQ ID NO: 5318 - RNA, 1476 nt, Artificial Sequence
  derived and/or modified protein sequence (opt4) from LASV(GUINEA Z-185a;Clade IV)__AMZ00377__GPCstabilized
augggccagaucgugaccuucuuccaggaggugccccacgugaucgaggaggugaugaacaucgugcugaucgcccugagcauccuggccgugcugaagggccuguacaacguggccaccugcggccugaucggccuggugaccuuccuguuccugugcggcagaagcugcagcaccagccuguacaagggcguguacgagcugcagacccuggagcugaacauggagacccugaacaugaccaugccccugagcugcaccaagaacaacagccaccacuacaucauggugggcaacgagaccggccuggagcugacccugaccaacaccagcaucaucaaccacaaguucugcaaccugagcgacgcccacaagaagaaccuguacgaccacacccugaugagcaucaucagcaccuuccaccugagcauccccaacuucaaccaguacgaggccaugagcugcgacuucaacggcggcaagaucagcgugcaguacaaccugagccacagcuacgccguggacgccgccaaccacugcggcaccguggccaacggcgugcugcagaccuucaugagaauggccuggggcggcagcuacaucgcccuggacagcggcugcggcaacugggacugcaucaugaccagcuaccaguaccuggugauccagaacaccaccugggaggaccacugccaguucagcagacccagccccaucggcuaccugggccugcugagccagagaaccagagacaucuacaucagcagaagacgccggggcaccuucaccuggacccugagcgacagcgagggcaaggacacccccggcggcuacugccugaccagauggaugcugaucgaggccgagcugaagugcuucggcaacaccgccguggccaagugcaacgagaagcacgacgaggaguucugcgacaugcugagacuguucgacuucaacaagcaggccauccagagacugaaggcccccgcccagaugagcauccagcugaucaacaaggccgugaacgcccugaucaacgaccagcugaucaugaagaaccaccugagagacaucaugugcauccccuacugcaacuacagcaaguacugguaccugaaccacaccgugaccggcaagaccagccugcccaagugcuggcuggugagcaacggcagcuaccugaacgagacccacuucagcgacgacaucgagcagcaggccgacaaccugaucaccgagaugcugcagaaggaguacauggagagacagggcaagaccccccugggccugguggaccuguucguguucagcaccagcuucuaccugaucagcaucuuccugcaccuggugaagauccccacccacagacacaucgugggcaagcccugccccaagccccacagacugaaccacaugggcaucugcagcugcggcguguacaagcagcccggcgugcccgugagauggaagagauga

SEQ ID NO: 5319 - RNA, 1476 nt, Artificial Sequence
  derived and/or modified protein sequence (opt4) from MOPV/LASV reassortant(IGS-1;Clade IV)__AFY05576__GPCstabilized
augggccagaucgugaccuucuuccaggaggugccccacgugaucgaggaggugaugaacaucgugcugaucgcccugagcgugcuggccgugcugaagggccuguacaacuucgccaccugcggccuggugggccuggugaccuuccugcugcugugcggcagaagcugcaccaccagccuguacaagggcguguacgagcugcagacccuggagcugaacauggagacccugaacaugaccaugccccugagcugcaccaagaacaacagccaccacuacaucauggugggcaacgagaccggccuggagcugacccugaccaacaccagcaucaucaaccacaaguucugcaaccugagcgacgcccacaagaagaaccuguacgaccacgcccugaugagcaucaucagcaccuuccaccugagcauccccaacuucaaccaguacgaggccaugagcugcgacuucaacggcggcaagaucagcgugcaguacaaccugagccacagcuacgccggcgacgccgccaaccacugcggcaccguggccaacggcgugcugcagaccuucaugagaauggccuggggcggcagcuacaucgcccuggacagcggcugcggcaacugggacugcaucaugaccagcuaccaguaccugaucauccagaacaccaccugggaggaccacugccaguucagcagacccagccccaucggcuaccugggccugcugagccagagaaccagagacaucuacaucagcagaagacgccggggcaccuucaccuggacccugagcgacagcgagggcgaggacacccccggcggcuacugccugaccagauggaugcugaucgaggccgagcugaagugcuucggcaacaccgccguggccaagugcaacgagaagcacgacgaggaguucugcgacaugcugagacuguucgacuucaacaagcaggccauccagagacugaaggcccccgcccagaugagcauccagcugaucaacaaggccgugaacgcccugaucaacgaccagcugaucaugaagaaccaccugagagacaucaugugcauccccuacugcaacuacagcaaguacugguaccugaaccacaccaccaccggcagaaccagccugcccaagugcuggcuggugagcaacggcagcuaccugaacgagacccacuucagcgacgacaucgagcagcaggccgacaacaugaucaccgagaugcugcagaaggaguacauggagagacagggcaagaccccccugggccugguggaccuguucguguucagcaccagcuucuaccugaucagcaucuuccugcaccuggugaagauccccacccacagacacaucgugggcaagagcugccccaagccccacagacugaaccacaugggcaucugcagcugcggccuguacaagcagcccggcgugcccgugaaguggaagagauga

SEQ ID NO: 5320 - RNA, 1476 nt, Artificial Sequence
  derived and/or modified protein sequence (opt4) from MOPV/LASV reassortant(IGS-11;Clade IV)__AFY05588__GPCstabilized
augggccagaucgugaccuucuuccaggaggugccccacgugaucgaggaggugaugaacaucgugcugaucgcccugagcgugcuggccgugcugaagggccuguacaacuucgccaccugcggccuggugggccuggugaccuuccugcugcugugcggcagaagcugcaccaccagccuguacaagggcguguacgagcugcagacccuggagcugaacauggagacccugaacaugaccaugccccugagcugcaccaagaacaacagccaccacuacaucauggugggcaacgagaccggccuggagcugacccugaccaacaccagcaucaucaaccacaaguucugcaaccugagcgacgcccacaagaagaaccuguacgaccacgcccugaugagcaucaucagcaccuuccaccugagcauccccaacuucaaccaguacgaggccaugagcugcgacuucaacggcggcaagaucagcgugcaguacaaccugagccacagcuacgccggcgacgccgccaaccacugcggcaccguggccaacggcgugcugcagaccuucaugagaauggccuggggcggcagcuacaucgcccuggacagcggcugcggcaacugggacugcaucaugaccagcuaccaguaccugaucauccagaacaccaccugggaggaccacugccaguucagcagacccagccccaucggcuaccugggccugcugagccagagaaccagagaccuguacaucagcagaagacgccggggcaccuucaccuggacccugagcgacagcgagggcgaggacacccccggcggcuacugccugaccagauggaugcugaucgaggccgagcugaagugcuucggcaacaccgccguggccaagugcaacgagaagcacgacgaggaguucugcgacaugcugagacuguucgacuucaacaagcaggccauccagagacugaaggcccccgcccagaugagcauccagcugaucaacaaggccgugaacgcccugaucaacgaccagcugaucaugaagaaccaccugagagacaucaugugcauccccuacugcaacuacagcaaguacugguaccugaaccacaccaccaccggcagaaccagccugcccaagugcuggcuggugagcaacggcagcuaccugaacgagacccacuucagcgacgacaucgagcagcaggccgacaacaugaucaccgagaugcugcagaaggaguacauggagagacagggcaagaccccccugggccugguggaccuguucguguucagcaccagcuucuaccugaucagcaucuuccugcaccuggugaagauccccacccacagacacaucgugggcaagagcugccccaagccccacagacugaaccacaugggcaucugcagcugcggccuguacaagcagcccggcgugcccgugaaguggaagagauga

SEQ ID NO: 5321 - RNA, 1476 nt, Artificial Sequence
  derived and/or modified protein sequence (opt4) from MOPV/LASV reassortant(IGS-12;Clade IV)__AFY05590__GPCstabilized
augggccagaucgugaccuucuuccaggaggugccccacgugaucgaggaggugaugaacaucgugcugaucgcccugagcgugcuggccgugcugaagggccuguacaacuucgccaccugcggccuggugggccuggugaccuuccugcugcugugcggcagaagcugcaccaccagccuguacaagggcguguacgagcugcagacccuggagcugaacauggagacccugaacaugaccaugccccugagcugcaccaagaacaacagccaccacuacaucauggugggcaacgagaccggccuggagcugacccugaccaacaccagcaucaucaaccacaaguucugcaaccugagcgacgcccacaagaagaaccuguacgaccacgcccugaugagcaucaucagcaccuuccaccugagcauccccaacuucaaccaguacgaggccaugagcugcgacuucaacggcggcaagaucagcgugcaguacaaccugagccacagcuacgccggcgacgccgccaaccacugcggcaccguggccaacggcgugcugcagaccuucaugagaauggccuggggcggcagcuacaucgcccuggacagcggcugcggcaacugggacugcaucaugaccagcuaccaguaccugaucauccagaacaccaccugggaggaccacugccaguucagcagacccagccccaucggcuaccugggccugcugagccagagaaccagagacauguacaucagcagaagacgccggggcaccuucaccuggacccugagcgacagcgagggcgaggacacccccggcggcuacugccugaccagauggaugcugaucgaggccgagcugaagugcuucggcaacaccgccguggccaagugcaacgagaagcacgacgaggaguucugcgacaugcugagacuguucgacuucaacaagcaggccauccagagacugaaggcccccgcccagaugagcauccagcugaucaacaaggccgugaacgcccugaucaacgaccagcugaucaugaagaaccaccugagagacaucaugugcauccccuacugcaacuacagcaaguacugguaccugaaccacaccaccaccggcagaaccagccugcccaagugcuggcuggugagcaacggcagcuaccugaacgagacccacuucagcgacgacaucgagcagcaggccgacaacaugaucaccgagaugcugcagaaggaguacauggagagacagggcaagaccccccugggccugguggaccuguucguguucagcaccagcuucuaccugaucagcaucuuccugcaccuggugaagauccccacccacagacacaucgugggcaagagcugccccaagccccacagacugaaccacaugggcaucugcagcugcggccuguacaagcagcccggcgugcccgugaaguggaagagauga

SEQ ID NO: 5322 - RNA, 1476 nt, Artificial Sequence
  derived and/or modified protein sequence (opt4) from LASV(LM032-SLE-2010;Clade IV)__AIT17802__GPCstabilized
augggccagaucgugaccuucuuccaggaggugccccacgugaucgaggaggugaugaacaucgugcugaucgcccugagcauccuggccgugcugaagggccuguacaaccuggccaccugcggccuggugggccuggugaccuuccugcugcugugcggcagaagcugcaccaccagccuguacaagggcguguacgagcugcagacccuggagcugaacauggagacccugaacaugaccaugccccugagcugcaccaagaacaacagccaccacuacaucauggugggcaacgagaccggccuggagcugacccugaccaacaccagcaucaucaaccacaaguucugcaaccugagcgacgcccacaagaagaaccuguacaaccacgcccugaugagcaucaucagcaccuuccaccugagcauccccaacuucaaccaguacgaggccaugagcugcgacuucaacggcggcaagaucagcgugcaguacaaccugagccacagcuacgccggcgacgccgccaaccacugcggcaccguggccaacggcgugcugcagaccuucaugagaauggccuggggcggcagcuacaucgcccuggacagcggcugcgacagaugggacugcaucaugaccagcuaccaguaccugaucauccagaacaccaccugggaggaccacugccaguucagcagacccagccccaucggcuaccugggccugcugagccagagaaccagagacaucuacaucagcagaagacgccggggcaccuucaccuggacccugagcgacagcgagggcaaggacacccccggcggcuacugccugaccagauggaugcugaucgaggccgagcugaagugcuucggcaacaccgccguggccaagugcaacgagaagcacgacgaggaguucugcgacaugcugagacuguucgacuucaacaagcaggccauccagagacugaaggcccccgcccagaugagcauccagcugaucaacaaggccgugaacgcccugaucaacgaccagcugaucaugaagaaccaccugagagacaucaugugcauccccuacugcaacuacagcaaguacugguaccugaaccacaccaccaccggcaagaccagccugcccaagugcuggcuggugagcaacggcagcuaccugaacgagacccacuucagcgacgacaucgagcagcaggccgacaacaugaucaccgagaugcugcagaaggaguacauggagagacugggcaagaccccccugggccugguggaccuguucguguucagcaccagcuucuaccugaucagcaucuuccugcaccuggugaagauccccacccacagacacaucgugggcagaagcugccccaagccccacagacugaaccacaugggcaucugcagcugcggccuguacaagcagcccggcgugcccgugaaguggaagagauga

SEQ ID NO: 5323 - RNA, 1476 nt, Artificial Sequence
  derived and/or modified protein sequence (opt4) from LASV(LM222-SLE-2010;Clade IV)__AIT17806__GPCstabilized
augggccagaucgugaccuucuuccaggaggugccccacgugaucgaggaggugaugaacaucgugcugaucgcccugagcauccuggccgugcugaagggccuguacaacuucgccaccugcggccugaucggccuggugaccuuccugcugcugugcggcagaagcugcaccaccagccuguacaagggcguguacgagcugcagacccuggagcugaacauggagacccugaacaugaccaugccccugagcugcaccaagaacaacagccaccacuacaucauggugggcaacgagaccggccuggagcugacccugaccaacaccagcaucaucaaccacaaguucugcaaccugagcgacgcccacaagaagaaccuguacgaccacgcccugaugagcaucaucagcaccuuccaccugagcauccccaacuucaaccaguacgaggccaugagcugcgacuucaacggcggcaagaucagcgugcaguacaaccugagccacagcuacgccggcgacgccgccaaccacugcggcaccguggccaacggcgugcugcagaccuucaugagaauggccuggggcggcagcuacaucgcccuggacagcggcugcggcaagugggacugcaucaugaccagcuaccaguaccugaucauccagaacaccaccugggaggaccacugccaguucagcagacccagccccaucggcuaccugggccugcugagccagagaaccagagacaucuacaucagcagaagacgccggggcaccuucaccuggacccugagcgacagcgagggcaaggacacccccggcggcuacugccugaccagauggaugcugaucgaggccgagcugaagugcuucggcaacaccgccguggccaagugcaacgagaagcacgacgaggaguucugcgacaugcugagacuguucgacuucaacaagcaggccauccagagacugaaggcccccgcccagaugagcauccagcugaucaacaaggccgugaacgcccugaucaacgaccagcugaucaugaagaaccaccugagagacaucaugugcauccccuacugcaacuacagcaaguacugguaccugaaccacaccaccaccggcaagaccagccugcccaagugcuggcuggugagcaacggcagcuaccugaacgagacccacuucagcgacgacaucgagcagcaggccgacaacaugaucaccgagaugcugcagaaggaguacauggagagacagggcaagaccccccugggccugguggaccuguucguguucagcaccagcuucuaccugaucagcaucuuccugcaccuggugaagauccccacccacagacacaucgugggcaagagcugccccaagccccacagacugaaccacaugggcaucugcagcugcggccuguacaagcagcccggcgugcccgugaaguggaagagauga

SEQ ID NO: 5324 - RNA, 1476 nt, Artificial Sequence
  derived and/or modified protein sequence (opt4) from LASV(LM395-SLE-2009;Clade IV)__AIT17810__GPCstabilized
augggccagaucgugaccuucuuccaggaggugccccacgugaucgaggaggugaugaacaucgugcugaucgcccugagcauccuggccgugcugaagggccuguacaaccuggccaccugcggccuggugggccuggugaccuuccugcugcugugcggcagaagcugcaccaccagccuguacaagggcguguacgagcugcagacccuggagcugaacauggagacccugaacaugaccaugccccugagcugcaccaaggacaacagccaccacuacaucagagugggcaacgagaccggccuggagcugacccugaccaacaccagcauccugaaccacaaguucugcaaccugagcgacgcccacaagaagaaccuguacgaccacgcccugaugagcaucaucagcaccuuccaccugagcauccccaacuucaaccaguacgaggccaugagcugcgacuucaacggcggcagaaucagcgugcaguacaaccugagccacagcuacgccggcgacgccgccaaccacugcggcaccguggccaacggcgugcugcagaccuucaugagaauggccuggggcggcagcuacaucgcccuggacagcggcugcggcagaugggacugcaucaugaccagcuaccaguaccugaucauccagaacaccaccugggaggaccacugccaguucagcagacccagccccaucggcuaccugggccugcugagccagagaaccagagacaucuacaucagcagaagacgccggggcaccuucaccuggacccugagcgacagcgagggcaaggacacccccggcggcuacugccugaccagauggaugcugaucgaggccgagcugaagugcuucggcaacaccgccguggccaagugcaacgagaagcacgacgaggaguucugcgacaugcugagacuguucgacuucaacaagcaggccauccagagacugaaggcccccgcccagaugagcauccagcugaucaacaaggccgugaacgcccugaucaacgaccagcugaucaugaagaaccaccugagagacaucaugugcauccccuacugcaacuacagcaaguacugguaccugaaccacaccaccaccggcaagaccagccugcccagaugcuggcuggugagcaacggcagcuaccugaacgagacccacuucagcgacgacaucgagcagcaggccgacaacaugaucaccgagaugcugcagaaggaguacauggagagacagggcaagaccccccugggccugguggaccuguucguguucagcaccagcuucuaccugaucagcaucuuccugcaccuggugaagauccccacccacagacacguggugggcaagcccugccccaagccccacagacugaaccacaugggcaucugcagcugcggccuguacaagcagcccggcgugcccgugaaguggaagagauga

SEQ ID NO: 5325 - RNA, 1476 nt, Artificial Sequence
  derived and/or modified protein sequence (opt4) from LASV(LM765-SLE-2012;Clade IV)__AIT17814__GPCstabilized
augggccagaucgugaccuucuuccaggaggugccccacgugaucgaggaggugaugaacaucgugcugaucgcccugagcauccuggccgugcugaagggccuguacaacuucgccaccugcggccuggugggccuggugaccuuccugcugcugugcggcagaagcugcaccaccagccuguacaagggcguguacgagcugcagacccuggagcugaacauggagacccugaacaugaccaugccccugagcugcaccaagaacaacagccaccacuacaucauggugggcaacgagaccggccuggagcugacccugaccaacaccagcaucaucgaccacaaguucugcaaccugagcgacgcccacagaaagaaccuguacgaccacgcccugaugagcaucaucagcaccuuccaccugagcauccccaacuucaaccaguacgaggccaugagcugcgacuucaacggcggcaagaucagcgugcaguacaaccugagccacagcuacgccaaggacgccgccgaccacugcggcaccguggccaacggcgugcugcagaccuucaugagaauggccuggggcggcagcuacaucgcccuggacagcggcugcggcagaugggacugcaucaugaccagcuaccaguaccugaucauccagaacaccaccugggaggaccacugccaguucagcagacccagccccaucggcuaccugggccugcugagccagagaaccagagacaucuacaucagcagaagacgccggggcaccuucaccuggacccugagcgacagcgagggcaaggacacccccggcggcuacugccugaccagauggaugcugaucgaggccgagcugaagugcuucggcaacaccgccguggccaagugcaacgagaagcacgacgaggaguucugcgacaugcugagacuguucgacuucaacaagcaggccauccagagacugaaggcccccgcccagaugagcauccagcugaucaacaaggccgugaacgcccugaucaacgaccagcugaucaugaagaaccaccugagagacaucaugugcauccccuacugcaacuacagcaaguacugguaccugaaccacaccaccaccggcaagaccagccugcccaagugcuggcuggugagcaacggcagcuaccugaacgagacccacuucagcgacgacaucgagcagcaggccgacaacaugaucaccgagaugcugcagaaggaguacauggagagacagggcaagaccccccugggccugguggaccuguucguguucagcaccagcuucuaccugaucagcaucuuccugcaccuggugaagauccccacccacagacacaucgugggcaagcccugccccaagccccacagacugaaccacaugggcaucugcagcugcggccuguacaagcagcccggcgugcccgugaaguggaagagauga

SEQ ID NO: 5326 - RNA, 1476 nt, Artificial Sequence
  derived and/or modified protein sequence (opt4) from LASV(LM774-SLE-2012;Clade IV)__AIT17820__GPCstabilized
augggccagaucgugaccuucuuccaggaggugccccacgugaucgaggaggugaugaacaucgugcugaucgcccugagcauccuggccgugcugaagggccuguacaacuucgccaccugcggccuggugggccuggugaccuuccugcugcugugcggcagaagcugcaccaccagccuguacaagggcguguacgagcugcagacccuggagcugaacauggagacccugaacaugaccaugccccugagcugcaccaagaacaacagccaccacuacaucauggugggcaacgagaccggccuggagcugacccugaccaacaccagcaucaucaaccacaaguucugcaaccugagcgacgcccacaagaagaaccuguacgaccacgcccugaugagcaucaucagcaccuuccaccugagcauccccaacuucaaccaguacgaggccaugagcugcgacuucaacggcggcaagaucagcgugcaguacaaccugagccacagcuacgccgaggacgccgccaaccacugcggcaccguggccaacggcgugcugcagaccuucaugagaauggccuggggcggcagcuacaucgcccuggacagcggcugcggcaacugggacugcaucaugaccagcuaccaguaccugaucauccagaacaccaccugggaggaccacugccaguucagcagacccagccccaucggcuaccugggccugcugagccagagaaccagagacaucuacaucagcagaagacgccggggcaccuucaccuggacccugagcgacagcgagggcaaggacacccccggcggcuacugccugaccagauggaugcugaucgaggccgagcugaagugcuucggcaacaccgccguggccaagugcaacgagaagcacgacgaggaguucugcgacaugcugagacuguucgacuucaacaagcaggccauccagagacugaaggcccccgcccagaugagcauccagcugaucaacaaggccgugaacgcccugaucaacgaccagcugaucaugaagaaccaccugagagacaucaugugcauccccuacugcaacuacagcaaguacugguaccugaaccacaccaccaccggcaagaccagccugcccaagugcuggcuggugagcaacggcagcuaccugaacgagacccacuucagcgacgacaucgagcagcaggccgacaacaugaucaccgagaugcugcagaaggaguacauggagagacagggcaagaccccccugggccugguggaccuguucguguucagcaccagcuucuaccugaucagcaucuuccugcaccuggugaagauccccacccacagacacaucgugggcaagagcugccccaagccccacagacugaaccacaugggcaucugcagcugcggccuguacaagcagcccggcgugcccgugaaguggaagagauga

SEQ ID NO: 5327 - RNA, 1476 nt, Artificial Sequence
  derived and/or modified protein sequence (opt4) from LASV(LM776-SLE-2012;Clade IV)__AIT17824__GPCstabilized
augggccagaucgugaccuucuuccaggaggugccccacgugaucgaggaggugaugaacaucgugcugaucgcccugagcauccuggccgugcugaagggccuguacaacuucgccaccugcggccuggugggccuggugaccuuccugcugcugugcggcagaagcugcaccaccagcguguacaagggcguguacgagcugcagacccuggagcugaacauggagacccugaacaugaccaugccccugagcugcaccaagaacaacagccaccacuacaucauggugggcaacgagaccggccuggagcugacccugaccaacaccagcaucaucaaccacaaguucugcaaccugagcgacgcccacaagaagaaccuguacgaccacgcccugaugagcaucaucagcaccuuccaccugagcauccccaacuucaaccaguacgaggccaugagcugcgacuucaacggcggcaagaucagcgugcaguacaaccugagccacagcuacgccggcgacgccgccaaccacugcggcaccguggccaacggcgugcugcagaccuucaugagaauggccuggggcggcagcuacaucgcccuggacagcggcugcggcaagugggacugcaucaugaccagcuaccaguaccugaucauccagaacaccaccugggaggaccacugccaguucagcagacccagccccaucggcuaccugggccugcugagccagagaaccagagacaucuacaucagcagaagacgccggggcaccuucaccuggacccugagcgacagcgagggcaaggacacccccggcggcuacugccugaccagauggaugcugaucgaggccgagcugaagugcuucggcaacaccgccguggccaagugcaacgagaagcacgacgaggaguucugcgacaugcugagacuguucgacuucaacaagcaggccauccagagacugaaggcccccgcccagaugagcauccagcugaucaacaaggccgugaacgcccugaucaacgaccagcugaucaugaagaaccaccugagagacaucaugugcauccccuacugcaacuacagcaaguacugguaccugaaccacaccaccaccggcaagaccagccugcccaagugcuggcuggugagcaacggcagcuaccugaacgagacccacuucagcgacgacaucgagcagcaggccgacaacaugaucaccgagaugcugcagaaggaguacauggagagacagggcaagaccccccugggccugguggaccuguucguguucagcaccagcuucuaccugaucagcaucuuccugcaccuggugaagauccccacccacagacacaucgugggcaagagcugccccaagccccacagacugaaccacaugggcaucugcagcugcggccuguacaagcagcccggcgugcccgugagauggaagagauga

SEQ ID NO: 5328 - RNA, 1476 nt, Artificial Sequence
  derived and/or modified protein sequence (opt4) from LASV(LM778-SLE-2012;Clade IV)__AIT17828__GPCstabilized
augggccagaucgugaccuucuuccaggaggugccccacgugaucgaggaggugaugaacaucgugcugaucgcccugagcauccuggccgugcugaagggccuguacaacuucgccaccugcggccuggugggccuggugaccuuccugcugcugugcggcagaagcugcaccaccagccuguacaagggcgacuacgagcugcagacccuggagcugaacauggagacccugaacaugaccaugccccugagcugcaccaagaacaacagccaccacuacaucauggugggcaacgagaccggccuggagcugacccugaccaacaccagcaucaucaaccacaaguucugcaaccugagcgacgcccacaagaagaaccuguacgaccacgcccugaugagcaucaucagcaccuuccaccugagcauccccaacuucaaccaguacgaggccaugagcugcgacuucaacggcggcaagaucagcgugcaguacaaccugagccacagcuacgccggcgacgccgccaaccacugcggcaccguggccaacggcgugcugcagaccuucaugagaauggccuggggcggcagcuacaucgcccuggacagcggcugcggcaacugggacugcaucaugaccagcuaccaguaccugaucauccagaacaccaccugggaggaccacugccaguucagcagacccagccccaucggcuaccugggccugcugagccagagaaccagagacaucuacaucagcagaagacgccggggcaccuucaccuggacccugagcgacagcgagggcaaggacacccccggcggcuacugccugaccagauggaugcugaucgaggccgagcugaagugcuucggcaacaccgccguggccaagugcaacgagaagcacgacgaggaguucugcgacaugcugagacuguucgacuucaacaagcaggccauccagagacugaaggcccccgcccagaugagcauccagcugaucaacaaggccgugaacgcccugaucaacgaccagcugaucaugaagaaccaccugagagacaucaugugcauccccuacugcaacuacagcaaguacugguaccugaaccacaccaccaccggcaagaccagccugcccaagugcuggcuggugagcaacggcagcuaccugaacgagacccacuucagcgacgacaucgagcagcaggccgacaacaugaucaccgagaugcugcagaaggaguacauggagagacagggcaagaccccccugggccugguggaccuguucguguucagcaccagcuucuaccugaucagcaucuuccugcaccuggugaagauccccacccacagacacaucgugggcaagagcugccccaagccccacagacugaaccacaugggcaucugcagcugcggccuguacaagcagcccggcgugcccgugaaguggaagagauga

SEQ ID NO: 5329 - RNA, 1476 nt, Artificial Sequence
  derived and/or modified protein sequence (opt4) from LASV(Mad39;Clade IV)__ANH09722__GPCstabilized
augggccagaucgugaccuucuuccaggaggugccccacgugaucgaggaggugaugaacaucgugcugaucgcccugagcauccuggccgugcugaagggccuguacaacguggccaccugcggccugaucggccuggugaccuuccugcugcugugcggcagaagcugcaccaccacccuguacaagggcguguacgagcugcaggcccuggagcugaacauggagacccugaacaugaccaugccccugagcugcaccaagaacaacagccaccacuacaucagagugggcaacgagaccggccuggagcugacccugaccaacaccagccugaucaaccacaaguucugcaaccugagcgacgcccacaagaagaaccuguacgaccacgcccugaugagcaucaucagcaccuuccaccugagcauccccaacuucaaccaguacgaggccaugagcugcgacuucaacgacggcaagaucagcgugcaguacaaccugagccacaccuacgccggcgacaccgccaaccacugcggcaccguggccaacggcgugcugcagaccuucaugagaauggccuggggcggcagcuacaucgcccuggacagcggcugcggcggcugggacugcaucaugaccagcuaccaguaccugaucauccagaacaccaccugggaggaccacugccaguucagcagacccagccccaucggcuaccugggccugcugagccagagaaccagagacaucuacaucagcagaagacgccggggcaccuucaccuggacccugagcgacagcgagggcaaggacacccccggcggcuacugccugaccagauggaugcugaucgaggccgagcugaagugcuucggcaacaccgccguggccaagugcaacgagaagcacgacgaggaguucugcgacaugcugagacuguucgacuucaacaagcaggccauccagagacugaaggcccccgcccagaugagcauccagcugaucaacaaggccgugaacgcccugaucaacgaccagcugaucaugaagaaccaccugagagacaucaugugcauccccuacugcaacuacagcaaguacugguaccugaaccacaccgugaccggcaagaccagccugcccaagugcuggcuggugagcaacggcagcuaccugaacgagacccacuucagcgacgacaucgagcagcaggccgacaacaugaucaccgagaugcugcagaaggaguacauggagagacagggcaagaccccccugggccugguggaccuguucguguucagcaccagcuucuaccugaucagcaucuuccugcaccuggugaagauccccacccacagacacguggugggcaagcccugccccaagccccacagacugaaccacaugggcaucugcagcugcggcuucuacaagcagcccggcgugcccgugagauggaagagauga

SEQ ID NO: 5330 - RNA, 1476 nt, Artificial Sequence
  derived and/or modified protein sequence (opt4) from LASV(Mad41;Clade IV)__ANH09724__GPCstabilized
augggccagaucgugaccuucuuccaggaggugccccacgugaucgaggaggugaugaacaucgugcugaucgcccugagcauccuggccgugcugaagggccuguacaacguggccaccugcggccugaucggccuggugaccuuccugcugcugugcggcagaagcugcaccaccacccuguacaagggcguguacgagcugcaggcccuggagcugaacauggagacccugaacaugaccaugccccugagcugcaccaagaacgacagccaccacuacaucauggugggcaacgagaccggccuggagcugacccugaccaacaccagcaucaucagccacaaguucugcaaccugagcgacgcccacaagcagaaccuguacgaccacgcccugaugagcaucaucagcaccuuccaccugagcauccccaacuucaaccaguacgaggccaugagcugcgacuucaacggcggcaagaucagcgugcaguacaaccugagccacaccuacgccggcgacgccgccaaccacugcggcaccguggccaacggcgugcugcagaccuucaugagaauggccuggggcggcagcuacaucgcccuggacagcggcugcggcggcugggacugcaucaugaccagcuaccaguaccugaucauccagaacaccaccugggaggaccacugccaguucagcagacccagccccaucggcuaccugggccugcugagccagagaaccagagacaucuacaucagcagaagacgccggggcaccuucaccuggacccugagcgacagcgagggcaaggacacccccggcggcuacugccugaccagauggaugcugaucgaggccgagcugaagugcuucggcaacaccgccguggccaagugcaacgagaagcacgacgaggaguucugcgacaugcugagacuguucgacuucaacaagcaggccauccagagacugaaggcccccgcccagaugagcauccagcugaucaacaaggccgugaacgcccugaucaacgaccagcugaucaugaagaaccaccugagagacaucaugugcauccccuacugcaacuacagcaaguacugguaccugaaccacaccgugaccggcaagaccagccugcccaagugcuggcuggugagcaacggcagcuaccugaacgagacccacuucagcgacgacaucgagcagcaggccgacaacaugaucaccgagaugcugcagaaggaguacauggagagacagggcaagaccccccugggccugguggaccuguucguguucagcaccagcuucuaccugaucagcaucuuccugcaccuggugaagauccccacccacagacacguggugggcaagcccugccccaagccccacagacugaaccacaugggcaucugcagcugcggcuucuacggccagcccggcgugcccgugagauggaagagauga

SEQ ID NO: 5331 - RNA, 1476 nt, Artificial Sequence
  derived and/or modified protein sequence (opt4) from LASV(Mad63;Clade IV)__ANH09728__GPCstabilized
augggccagaucgugaccuucuuccaggaggugccccacgugaucgaggaggugaugaacaucgugcugaucgcccugagcgugcuggccgugcugaagggccuguacaacguggccaccugcggccugaucggccuggugaccuuccugcugcugugcggcagaagcugcaccaccacccuguacaagggcguguacgagcugcaggcccuggagcugaacaugggcacccugaacaugaccaugccccugagcugcaccaagaacaacagccaccacuacaucauggugggcaacgagaccggccuggagcugacccugaccaacaccagcaucaucaaccacaaguucugcaaccugagcgacgcccacaagaaggaccuguacgaccacgcccugaugagcaucaucagcaccuuccaccugagcgugcccaacuucaaccaguacgaggccaugagcugcgacuucaacggcggcaagaucagcgugcaguacaaccugagccacgccuacgccggcgacaccgccaaccacugcggcaccguggccaacggcgugcugcagaccuucaugagaauggccuggggcggcagcuacaucgcccuggacagcggcugcggcggcugggacugcaucaugaccagcuaccaguaccugaucauccagaacaccaccugggaggaccacugccaguucagcagacccagccccaucggcuaccugggccugcugagccagagaaccagagacaucuacaucagcagaagacgccggggcaccuucaccuggacccugagcgacagcgagggcgaguacacccccggcggcuacugccugaccagauggaugcugaucgaggccgagcugaagugcuucggcaacaccgccguggccaagugcaacgagaagcacgacgaggaguucugcgacaugcugagacuguucgacuucaacaagcaggccauccagagacugaaggcccccgcccagaugagcauccagcugaucaacaaggccgugaacgcccugaucaacgaccagcugaucaugaagaaccaccugagagacaucaugugcauccccuacugcaacuacagcaaguacugguaccugaaccacaccgugaccggcaagaccagccugcccaagugcuggcuggugagcaacggcagcuaccugaacgagacccacuucagcgacgacaucgagcagcaggccgacaacaugaucaccgagaugcugcagaaggaguacauggagagacagggcaagaccccccugggccugguggaccuguucguguucagcaccagcuucuaccugaucagcaucuuccugcaccuggugaagauccccacccacagacacguggugggcaagcccugccccaagccccacagacugaaccacaugggcaucugcagcugcggcuucuacaagcagcccggcgugcccgugagauggaagagauga

SEQ ID NO: 5332 - RNA, 1476 nt, Artificial Sequence
  derived and/or modified protein sequence (opt4) from LASV(Mad69;Clade IV)__ANH09730__GPCstabilized
augggccagaucgugaccuucuuccaggaggugccccacgugaucgaggaggugaugaacaucgugcugaucgcccugagcgugcuggccgugcugaagggccuguacaacguggccaccugcggccugaucggccuggugaccuuccugcugcugugcggcagaagcugcaccaccacccuguacaagggcguguacgagcugcaggcccuggagcugaacauggagacccugaacaugaccaugccccugagcugcaccaagaacaacagccaccacuacaucauggugggcaacgagaccggccuggagcugacccugaccaacaccagcaucaucaaccacaaguucugcaaccugagcgacgcccacaagaagaaccuguacgaccacgcccugaugagcaucaucagcaccuuccaccugagcauccccaacuucaaccaguacgaggccaugagcugcgacuucaaccagggcaagaucagcgugcaguacaaccugagccacgccuacgccggcgacgccgccaaccacugcggcaccguggccaacggcgugcugcagaccuucaugagaauggccuggggcggcagcuacaucgcccuggacagcggcugcggcggcugggacugcaucaugaccagcuaccaguaccugaucauccagaacaccaccugggagaaccacugccaguucagcagacccagccccaucggcuaccugggccugcugagccagagaaccagagacaucuacaucagcagaagacgccggggcaccuucaccuggacccugagcgacagcgagggcaagggcacccccggcggcuacugccugaccagauggaugcugaucgaggccgagcugaagugcuucggcaacaccgccguggccaagugcaacgagaagcacgacgaggaguucugcgacaugcugagacuguucgacuucaacaagcaggccauccagagauucaaggcccccgcccagaugagcauccagcugaucaacaaggccgugaacgcccugaucaacgaccagcugaucaugaagaaccaccugagagacaucaugugcauccccuacugcaacuacagcaaguacugguaccugaaccacaccgugaccggcaagaccagccugcccaagugcuggcuggugagcaacggcagcuaccugaacgagacccacuucagcgacgacaucgagcagcaggccgacaacaugaucaccgagaugcugcagaaggaguacauggagagacagggcagaaccccccugggccugguggaccuguucguguucagcaccagcuucuaccugaucagcaucuuccugcaccuggugaagauccccacccacagacacguggugggcaagcccugccccaagccccacagacugaaccacaugggcaucugcagcugcggcuucuacaagcagcccggcgugcccgugagauggaagagauga

SEQ ID NO: 5333 - RNA, 1476 nt, Artificial Sequence
  derived and/or modified protein sequence (opt4) from LASV(Mad83;Clade IV)__ANH09732__GPCstabilized
augggccagaucgugaccuucuuccaggaggugccccacgugaucgaggaggugaugaacaucgugcugaucgcccugagcauccuggccgugcugaagggcguguacaacguggccaccugcggccugaucggccuggugaccuuccugcugcugagcggcagaagcugcaccaccaccaucuacaagggcguguacgagcugcaggcccuggagcugaacauggagacccugaacaugaccaugccccugagcugcaccaagaacaacagccaccacuacaucauggugggcaacgagaccggccuggagcugacccugaccaacaccagcaucaucaaccacaaguucugcaaccugagcgacgcccacaagaagaaccuguacgaccacgcccugaugagcaucaucagcaccuuccaccugagcauccccaacuucaaccaguacgaggccaugagcugcgacuucaacggcggcaagaucagcgugcaguacaaccugagccacaccuacgccggcgacgccgccaaccacugcggcaccguggccaacggcgugcugcagaccuucaugagaauggccuggggcggcagcuacaucgcccuggacagcggcugcggcggcugggacugcaucaugaccagcuaccaguaccugaucauccagaacaccaccugggagaaccacugccaguucagcagacccagccccaucggcuaccugggccugcugagccagagaaccagagacaucuacaucagcagaagacgccggggcaccuucaccuggacccugagcgacagcgagggcaaggacacccccggcggcuacugccugaccagauggaugcugaucgaggccgagcugaagugcuucggcaacaccgccguggccaagugcaacgagaagcacgacgaggaguucugcgacaugcugagacuguucgacuucaacaagcaggccauccagagacugaaggcccccgcccagaugagcauccagcugaucaacaaggccgugaacgcccugaucaacgaccagcugaucaugaagaaccaccugagagacaucaugugcauccccuacugcaacuacagcaaguacugguaccugaaccacaccgugaccggcaagaccagccugcccaagugcuggcuggugagcaacggcagcuaccugaacgagacccacuucagcgacgacaucgagcagcaggccgacaacaugaucaccgagaugcugcagaaggaguacauggagagacagggcaagaccccccugggccugguggaccuguucguguucagcaccagcuucuaccugaucagcaucuuccugcaccuggugaagauccccacccacagacacaucgugggcaagcccugccccaagccccacagacugaaccacaugggcaucugcagcugcggcuucuacaagcagcccggcgugcccgugagauggaagagauga

SEQ ID NO: 5334 - RNA, 1476 nt, Artificial Sequence
  derived and/or modified protein sequence (opt4) from LASV(NL;Clade IV)__AAO59512__GPCstabilized
augggccagaucgugaccuucuuccaggaggugccccacgugaucgaggaggugaugaacaucgugcugaucgcccugagcauccuggccgugcugaagggccuguacaacuucgccaccugcggccuggugggccugguggccuuccugcugcugugcggcagaagcugcaccagcagccuguacaagggcguguacgagcugcagacccuggagcugaacauggagacccugaacaugaccaugccccugagcugcaccaagaacaacagccaccacuacaucagagugggcaacgagaccggccuggagcugacccugaccaacaccagcaucaucaaccacaaguucugcaaccugagcgacgcccacaagaagaaccuguacgaccacgcccugaugagcaucaucagcaccuuccaccugagcauccccaacuucaaccaguacgaggccaugagcugcgacuucaacggcggcaagaucagcgugcaguacaaccugagccacagcuacgccguggacgccgccaagcacugcggcaccguggccaacggcgugcugcagaccuucaugagaauggccuggggcggcagcuacaucgcccuggacagcggcugcggcagaugggacugcaucaugaccagcuaccaguaccugaucauccagaacaccaccugggaggaccacugccaguucagcagacccagccccaucggcuaccugggccugcugagccagagaaccagagacaucuacaucagcagaagacgccggggcaccuucaccuggacccugagcgacagcgagggcaaggacacccccggcggcuacugccugaccagauggaugcugaucgaggccgagcugaagugcuucggcaacaccgccguggccaagugcaacgagaagcacgacgaggaguucugcgacaugcugagacuguucgacuucaacaagcaggccauccagagacugaagacccccgcccagaugagcauccagcugaucaacaaggccgugaacgcccugaucaacgaccagcugaucaugaagaaccaccugagagacaucaugugcauccccuacugcaacuacagcagauacugguaccugaaccacaccaccaccggcaagaccagccugcccaagugcuggcuggugagcaacggcagcuaccugaacgagaccagauucagcgacgacaucgagcagcaggccgacaacaugaucaccgagaugcugcagaaggaguacauggagagacagggcaagaccccccugggccugguggaccuguucguguucagcaccagcuucuaccugaucagcaucuuccugcaccuggugaagauccccacccacagacacaucgugggcaagagcugccccaagccccacagacugaaccacaugggcaucugcagcugcggccuguacaagcagcccggcgugcccgugaaguggaagagauga

SEQ ID NO: 5335 - RNA, 1476 nt, Artificial Sequence
  derived and/or modified protein sequence (opt4) from LASV(Z0947-SLE-2011;Clade IV)__AIT17840__GPCstabilized
augggccagaucgugaccuucuuccaggaggugccccacgugaucgaggaggugaugaacaucgugcugaucgcccugagcauccuggccgugcugaagggccuguacaacuucgccaccugcggccuggugggccuggugaccuuccugcugcugugcggcagaagcugcaccaucagccuguacaagggcguguacgagcugcagacccuggagcugaacauggagacccugaacaugaccaugccccugagcugcaccaagaacaacagccaccacuacaucauggugggcaacgagaccggccuggagcugacccugaccaacaccagcaucaucaaccacaaguucugcaaccugagcgacgcccacaagaagaaccuguacgaccacgcccugaugagcaucaucagcaccuuccaccugagcauccccaacuucaaccaguacgaggccaugagcugcgacuucaacggcggcaagaucagcgugcaguacaaccugagccacagcuacgccggcgacgccgccaaccacugcggcaccguggccaacggcgugcugcagaccuucaugagaauggccuggggcggcagcuacaucgcccuggacagcggcugcgacagaugggacugcaucaugaccagcuaccaguaccugaucauccagaacaccaccugggaggaccacugccaguucagcagacccagccccaucggcuaccugggccugcugagccagagaaccagagacaucuacaucagcagaagacgccggggcaccuucaccuggacccugagcgacagcgagggcaaggacacccccggcggcuacugccugaccagauggaugcugaucgaggccgagcugaagugcuucggcaacaccgccguggccaagugcaacgagaagcacgacgaggaguucugcgacaugcugagacuguucgacuucaacaagcaggccauccagagacugaaggcccccgcccagaugagcauccagcugaucaacaaggccgugaacgcccugaucaacgaccagcugaucaugaagaaccaccugagagacaucaugugcauccccuacugcaacuacagcaaguacugguaccugaaccacaccaccaccggcaagaccagccugcccaagugcuggcuggugagcaacggcagcuaccugaacgagacccacuucagcgacgacaucgagcagcaggccgacaacaugaucaccgagaugcugcagaaggaguacauggagagacagggcaagaccccccugggccugguggaccuguucguguucagcaccagcuucuaccugaucagcaucuuccugcaccuggugaagauccccacccacagacacaucgugggcaagcccugccccaagccccacagacugaaccacaugggcaucugcagcugcggccuguacaagcagcccggcgugcccgugaaguggaagagauga

SEQ ID NO: 5336 - RNA, 1476 nt, Artificial Sequence
  derived and/or modified protein sequence (opt4) from LASV(Z0948-SLE-2011;Clade IV)__AIT17844__GPCstabilized
augggccagaucgugaccuucuuccaggaggugccccacgugaucgaggaggugaugaacaucgugcugaucgcccugagcauccuggccgugcugaagggccuguacaacuucgccaccugcggccuggugggccuggugaccuuccugcugcugugcggcagaagcugcaccaucagccuguacaagggcguguacgagcugcagacccuggagcugaacauggagacccugaacaugaccaugccccugagcugcaccaagaacaacagccaccacuacaucauggugggcaacgagaccggccuggagcugacccugaccaacaccagcaucaucaaccacaaguucugcaaccugagcgacgcccacaagaagaaccuguacgaccacgcccugaugagcaucaucagcaccuuccaccugagcauccccaacuucaaccaguacgaggccaugagcugcgacuucaacggcggcaagaucagcgugcaguacaaccugagccacagcuacgccggcgacgccgccaaccacugcggcaccguggccaacggcgugcugcagaccuucaugagaauggccuggggcggcagcuacaucgcccuggacagcggcugcgacagaugggacugcaucaugaccagcuaccaguaccugaucauccagaacaccaccugggaggaccacugccaguucagcagacccagccccaucggcuaccugggccugcugagccagagaaccagagacaucuacaucagcagaagacgccggggcaccuucaccuggacccugagcgacagcgagggcaaggacacccccggcggcuacugccugaccagauggaugcugaucgaggccgagcugaagugcuucggcaacaccgccguggccaagugcaacgagaagcacgacgaggaguucugcgacaugcugagacuguucgacuucaacaagcaggccauccagagacugaaggcccccgcccagaugagcauccagcugaucaacagagccgugaacgcccugaucaacgaccagcugaucaugaagaaccaccugagagacaucaugugcauccccuacugcaacuacagcaaguacugguaccugaaccacaccaccaccggcaagaccagccugcccaagugcuggcuggugagcaacggcagcuaccugaacgagacccacuucagcgacgacaucgagcagcaggccgacaacaugaucaccgagaugcugcagaaggaguacauggagagacagggcaagaccccccugggccugguggaccuguucguguucagcaccagcuucuaccugaucagcaucuuccugcaccuggugaagauccccacccacagacacaucgugggcaagcccugccccaagccccacagacugaaccacaugggcaucugcagcugcggccuguacaagcagcccggcgugcccgugaaguggaagagauga

SEQ ID NO: 5337 - RNA, 1476 nt, Artificial Sequence
  derived and/or modified protein sequence (opt4) from LASV(Z148;Clade IV)__AAT49008__GPCstabilized
augggccagaucgugaccuucuuccaggaggugccccacgugaucgaggaggugaugaacaucgugcugaucgcccugagcauccuggccgugcugaagggccuguacaacguggccaccugcggccugaucggccuggugaccuuccuguuccugugcggcagaagcugcagcaccacccuguacaagggcguguacgagcugcagacccuggagcugaacauggagacccugaacaugaccaugccccugagcugcaccaagaacaacagccaccacuacaucauggugggcaacgagaccggccuggagcugacccugaccaacaccagcaucaucaaccacaaguucugcaaccugagcgacgcccacaagaagaaccuguacgaccacacccugaugagcaucaucagcaccuuccaccugagcauccccaacuucaaccaguacgaggccaugagcugcgacuucaacggcggcaagaucagcgugcaguacaaccugagccacagcuacgccguggacgccgccaaccacugcggcaccguggccaacggcgugcugcagaccuucaugagaauggccuggggcggcagcuacaucgcccuggacagcggcugcggcaacugggacugcaucaugaccagcuaccaguaccugaucauccagaacaccaccugggaggaccacugccaguucagcagacccagccccaucggcuaccugggccugcugagccagagaaccagagacaucuacaucagcagaagacgccggggcaccuucaccuggacccugagcgacagcgagggcaaggacacccccggcggcuacugccugaccagauggaugcugaucgaggccgagcugaagugcuucggcaacaccgccguggccaagugcaacgagaagcacgacgaggaguucugcgacaugcugagacuguucgacuucaacaagcaggccauccagagacugaaggcccccgcccagaugagcauccagcugaucaacaaggccgugaacgcccugaucaacgaccagcugaucaugaagaaccaccugagagacaucaugugcauccccuacugcaacuacagcagauacugguaccugaaccacaccgugaccggcaagaccagccugcccaagugcuggcuggugagcaacggcagcuaccugaacgagacccacuucagcgacgacaucgagcagcaggccgacaaccugaucaccgagaugcugcagaaggaguacauggagagacagggcaagaccccccugggccugguggaccuguucguguucagcaccagcuucuaccugaucagcaucuuccugcaccuggugaagauccccacccacagacacaucgugggcaagcccugccccaagccccacagacugaaccacaugggcaucugcagcugcggcguguacaagcagcccggcgugcccgugagauggaagagauga

SEQ ID NO: 5338 - RNA, 1476 nt, Artificial Sequence
  derived and/or modified protein sequence (opt4) from LASV(Bamba-R114;Clade V)__AHC95555__GPCstabilized
augggccagaucgugaccuucuuccaggaggugccccacgugaucgaggaggugaugaacaucgugcugaucgcccugagcauccuggccgugcugaagggccuguacaacaucgccaccugcggccugaucggccuggugaccuuccugcugcugugcggcagaagcugcagcagcaaccuguacaagggcguguacgagcugcagagccuggaccugaacauggagacccugaacaugaccaugccccugagcugcaccaagaacaacagccaccacuacaucagagccggcaacgagaccggccuggagcugacccugaccaacaccagccugaucaaccacaaguucugcaaccugagcgacgcccacaagaagaaccuguacgaccacacccugaugagcaucaucagcaccuuccaccugagcauccccaacuucaaccaguacgaggccaugagcugcgacuucaacggcggcaagaucagcgugcaguacaaccugagccacgccuacgccaucgacgccgccgagcacugcggcaccguggccaacggcgugcugcagaccuucaugagaauggccuggggcggcagcuacaucgcccuggacagcggcugcggcaacugggacugcaucaugaccagcuaccaguaccugaucauccagaacaccaccugggaggaccacugccaguucagcagacccagccccaucggcuaccugggccugcugagccagagaaccagagacaucuacaucagcagaagacgccggggcaccuucaccuggacccugagcgacagcgagggcaacgccacccccggcggcuacugccugaccagauggaugcugaucgaggccgagcugaagugcuucggcaacaccgccguggccaagugcaacgagaagcacgacgaggaguucugcgacaugcugagacuguucgacuucaacaagcaggccaucagcagacugaagagccccgcccagaugagcauccagcugaucaacaaggccgugaacgcccugaucaacgaccagcugaucaugaagaaccaccugagagacaucaugugcauccccuacugcaacuacagcaaguacugguaccugaaccacaccaucaccggcagaaccagccugcccaagugcuggcuggugagcaacggcagcuaccugaacgagacccacuucagcgacgacaucgagcagcaggccgacaacaugaucaccgagaugcugcagaaggaguacauggagagacagggcaagaccccccugggccugguggaccuguucguguucagcaccagcuucuaccugaucagcaucuuccugcaccuggugaagauccccacccacagacacaucgugggcaagcccugccccaagccccacagacugaaccacaugggcaucugcagcugcggccuguacaagcagcccggcgugccccugaaguggaagagauga

SEQ ID NO: 5339 - RNA, 1476 nt, Artificial Sequence
  derived and/or modified protein sequence (opt4) from LASV(Komina-R16;Clade V)__AHC95557__GPCstabilized
augggccagaucgugaccuucuuccaggaggugccccacgugaucgaggaggugaugaacaucgugcugaucgcccugagcauccuggccgugcugaagggccuguacaacaucgccaccugcggccugaucggccuggugaccuucuuccugcugugcggcagaagcugcagcagcaaccuguacaagggcguguacgagcugcagagccuggaccugaacauggagacccugaacaugaccaugccccugagcugcaccaagaacaacagccaccacuacaucagagugggcaacgagaccggccuggagcugacccugaccaacaccagccugcugaaccacaaguucugcaaccugagcgacgcccacaagagaaaccuguacgaccacgcccugaugagcaucaucagcaccuuccaccugagcauccccaacuucaaccaguacgaggccaugagcugcgacuucaacggcggcaagaucaccgugcaguacaaccugagccacagcuacgccggcgacaccgccaagcacugcggcaccaucgccaacggcgugcugcagaccuucaugagaauggccuggggcggcagcuacaucgcccuggacagcggcugcggcaacugggacugcaucaugaccagcuaccaguaccugaucauccagaacaccaccugggaggaccacugccaguucagcagacccagccccaucggcuaccugggccugcugagccagagaaccagagacaucuacaucagcagaagacgccggggcaccuucaccuggacccugagcgacagcgagggcaacgccacccccggcggcuacugccugaccagauggaugcugaucgaggccgagcugaagugcuucggcaacaccgccguggccaagugcaacgagaagcacgacgaggaguucugcgacaugcugagacuguucgacuucaacaagcaggccaucagcagacugagaagccccgcccagaugagcauccagcugaucaacaaggccgugaacgcccugaucaacgaccagcugaucaugaagaaccaccugagagacaucaugugcauccccuacugcaacuacagcaaguacugguaccugaaccacaccgugaccggcagaaccagccugcccaagugcuggcuggugagcaacggcagcuaccugaacgagacccacuucagcgacgacaucgagcagcaggccgacaacaugaucaccgagaugcugcagaaggaguacauggacagacagggcaagaccccccugggccugguggaccuguucguguucagcaccagcuucuaccugaucagcaucuuccugcaccuggugaagauccccacccacagacacaucgugggcaagcccugccccaagccccacagacugaacagaaugggcaucugcagcugcggccuguacaagcagcccggcgugcccgugaaguggaagagauga

SEQ ID NO: 5340 - RNA, 1476 nt, Artificial Sequence
  derived and/or modified protein sequence (opt4) from LASV(Ouoma-R123;Clade V)__AHC95559__GPCstabilized
augggccagaucaucaccuucuuccaggaggugccccacgugaucgaggaggugaugaacaucgugcugaucgcccugagcauccuggccgugcugaagggccuguacaacaucgccaccugcggccugaucggccuggugaccuuccugcugcugugcggcagaagcugcagcagcagccuguacaagggcguguacgagcugcagagccuggaccugaacauggagacccugaacaugaccaugccccugagcugcaccaagaacaacagccaccacuacaucagagugggcaacgagaccggccuggagcugacccugaccaacaccagccugaucaaccacaaguucugcaaccugagcgacgcccacaagaagaaccuguacgaccacgcccugaugagcaucaucagcaccuuccaccugagcauccccaacuucaaccaguacgaggccaugagcugcgacuucaacggcggcaagaucagcgugcaguacaaccugagccacgccuacgccaucgacgccgccagccacugcggcaccguggccaacggcgugcugcagaccuucaugagaauggccuggggcggcagcuacaucgcccuggacagcggcugcggcaacugggacugcaucaugaccagcuaccaguaccugaucauccagaacaccaccugggaggaccacugccaguucagcagacccagccccaucggcuaccugggccugcugagccagagaaccagagacaucuacaucagcagaagacgccggggcaccuucaccuggacccugagcgacagcgagggcaacgccacccccggcggcuacugccugaccagauggaugcugaucgaggccgagcugaagugcuucggcaacaccgccguggccaagugcaacgagaagcacgacgaggaguucugcgacaugcugagacuguucgacuucaacaagcaggccaucagcagacugaagagccccgcccagaugagcauccagcugaucaacaaggccgugaacgcccugaucaacgaccagcugaucaugaagaaccaccugagagacaucaugugcauccccuacugcaacuacagcaaguacugguaccugaaccacaccgugaccggcaagaccagccugcccaagugcuggcuggugagcaacggcagcuaccugaacgagacccacuucagcgacgacaucgagcagcaggccgacaacaugaucaccgagaugcugcagaaggaguacauggagagacagggcaagaccccccugggccugguggaccuguucguguucagcaccagcuucuaccugaucagcaucuuccugcaccuggugaagauccccacccacagacacaucgugggcaagcccugccccaagccccacagacugaaccacaugggcaucugcagcugcggccuguacaagcagcccggcgugcccgugaaguggaagagauga

SEQ ID NO: 5341 - RNA, 1476 nt, Artificial Sequence
  derived and/or modified protein sequence (opt4) from LASV(Soromba-R;Clade V)__AHC95553__GPCstabilized
augggccagaucgugaccuucuuccaggaggugccccacgugaucgaggaggugaugaacaucgugcugaucgcccugagcauccuggccgugcugaagggccuguacaacaucgccaccugcggccugaucggccuggugaccuucuuccugcugugcggcagaagcugcagcagcaaccuguacaagggcguguacgagcugcagagccuggaccugaacauggagacccugaacaugaccaugccccugagcugcaccaagaacaacagccaccacuacaucagagugggcaacgagaccggccuggagcugacccugaccaacaccagccugcuggaccacaaguucugcaaccugagcgacgcccacaagaagaaccuguacgaccacgcccugaugagcaucaucagcaccuuccaccugagcauccccaacuucaaccaguacgaggccaugagcugcgacuucaacggcggcaagaucaccgugcaguacaaccugagccacagcuacgccggcgacgccgccagacacugcggcaccaucgccaacggcgugcugcagaccuucaugagaauggccuggggcggcagcuacaucgcccuggacagcggcugcggcaacugggacugcaucaugaccagcuaccaguaccugaucauccagaacaccaccugggaggaccacugccaguucagcagacccagccccaucggcuaccugagccugcugagccagagaaccagagacaucuacaucagcagaagacgccggggcaccuucaccuggacccugagcgacagcgagggcaacgccacccccggcggcuacugccugaccagauggaugcugaucgaggccgagcugaagugcuucggcaacaccgccguggccaagugcaacgagaagcacgacgaggaguucugcgacaugcugagacuguucgacuucaacaagcaggccaucagcagacugagaagccccgcccagaugagcauccagcugaucaacaaggccgugaacgcccugaucaacgaccagcugaucaugaagaaccaccugagagacaucaugugcauccccuacugcaacuacagcaaguacugguaccugaaccacaccgugaccggcagaaccagccugcccaagugcuggcuggugagcaacggcagcuaccugaacgagacccacuucagcgacgacaucgagcagcaggccgacaacaugaucaccgagaugcugcagaaggaguacauggacagacagggcaagaccccccugggccugguggaccuguucguguucagcaccagcuucuaccugaucagcaucuuccugcaccuggugaagauccccacccacagacacaucgugggcaagcccugccccaagccccacagacugaacagaaugggcaucugcagcugcggccuguacaagcagcccggcgugcccgugaaguggaagagauga

SEQ ID NO: 5342 - RNA, 1473 nt, Artificial Sequence; identical to SEQ ID NO: 5096
  derived and/or modified protein sequence (opt4) from LASV(Alzey;Clade VI)__SCA79105__GPCstabilized

SEQ ID NO: 5343 - RNA, 1473 nt, Artificial Sequence
  derived and/or modified protein sequence (opt4) from LASV(Lassa/H.sapiens-wt/TGO/2016/201600568;Clade VI)__AVN98153__GPCstabilized
augggccagaucaucaccuucuuccaggaggugccccacgugaucgaggaggugaugaacaucgugcugaucgcccugagccugcuggccauccugaagggcguguacaacguggccaccugcggcaucaucggccuggugaccuuccuguuccugugcggcagaagcugcagccugaucuacaagggcagcuacgagcugcagacccuggagcugaacauggagacccugaacaugaccaugccccugagcugcaccaagaacagcagccaccacuacaucagagugggcaacgagaccggccuggagcugacccugaccaacaccagcaucaucaaccacaaguucugcaaccugagcgacgcccacaagagaaaccuguacgaccacgcccugaugagcauccugagcaccuuccaccugagcauccccaacuucaaccaguacgaggccaugagcugcgacuucaacggcggcaagaucagcgugcaguacaaccugagccacgccuacgccguggacgccgccgagcacugcggcaccguggccaacggcgugcugcagaccuucaugagaauggccuggggcggcagcuacaucgcccuggacagcggcugcggcaacugggacugcaucaugaccagcuaccaguaccugaucauccagaacaccaccugggaggaccacugccaguucagcagacccagccccaucggcuaccugggccugcugagccagagaaccagagacaucuacaucagcagaagacgccggggcaccuucaccuggacccugagcgacagcgagggcaacgagacccccggcggcuacugccugaccagauggaugcugaucgaggccgagcugaagugcuucggcaacaccgccguggccaagugcaacgagaagcacgacgaggaguucugcgacaugcugagacuguucgacuucaacaagcaggccauccagagacugaagagccccgcccagaugagcauccagcugaucaacaaggccgugaacgcccugaucaacgaccagcugaucaugaagaaccaccugagagacaugaugugcauccccuacugcaacuacagcaaguacugguaccugaaccacaccagcagcggcagagccagccugcccaagugcuggcuggugagcaacggcagcuaccugaacgagacccacuucagcgacgacaucgagcagcaggccgacaacaugaucaccgagaugcugcagaaggaguacaucgacagacagggcaagaccccccugggccugguggaccuguucguguucagcaccagcuucuaccugaucagcaucuuccugcaccugaucaagauccccacccacagacacaucgugggcaagcccugccccaagccccacagacugaaccacaugggcaucugcagcugcggccuguacaagcagcccggcgugcccaccagauggaagagauga

SEQ ID NO: 5344 - RNA, 1473 nt, Artificial Sequence
  derived and/or modified protein sequence (opt4) from LASV(NIGERIA IKEJI;Clade II)__AMZ00373__GPCstabilized
augggccagaucaucaccuucuuccaggaggugccccacgugaucgaggaggugaugaacaucgugcugaucgcccugagccugcuggccauccugaagggcaucuacaacguggccaccugcggccuguucggccugaucagcuuccuguuccugugcggcagaagcugcagcaccauguacaagggcguguacgagcugcagacccuggagcuggacauggccaaccugaacaugaccaugccccugagcugcaccaagaacaacagccaccacuacaucauggugggcaacgagaccggccuggagcugacccugaccaaccagagcaucaucaaccacaaguucugcaaccugagcgacgcccacaagaagaaccuguacgaccacacccugaugagcaucaucagcaccuuccaccugagcauccccaacuucaaccaguacgaggccaugagcugcgacuucaacggcggcaagaucagcgugcaguacaaccugagccacagcuacgccguggacgccgccaaccacugcggcaccguggccaacggcgugcugcagaccuucaugagaauggccuggggcggcagcuacaucgcccuggacagcggcugcggcaacugggacugcaucaugaccagcuaccaguaccugaucauccagaacaccaccugggaggaccacugccaguucagcagacccagccccaucggcuaccugggccugcugagccagagaaccagagacaucuacaucagcagaagacgccggggcaccuucaccuggacccugagcgacagcgagggcaacgacgcccccggcggcuacugccugaccagauggaugcugaucgaggccgagcugaagugcuucggcaacaccgccaucgccaagugcaacgagaagcacgacgaggaguucugcgacaugcugagacuguucgacuucaacaagcaggccaucaagagacugaaggcccccgcccagaugagcauccagcugaucaacaaggccgugaacgcccugaucaacgaccagcugaucaugaagaaccaccugagagacaucaugugcauccccuacugcaacuacagcaaguacugguaccugaacaacaccgugaccggcaagagcagccugcccaagugcuggcuggugagcaacggcagcuaccugaacgagacccacuucagcgacgacaucgagcagcaggccgacaacaugaucaccgagaugcugcagaaggaguacauggacagacagggcaagaccccccugggccugguggaccuguucguguucagcaccagcuucuaccugaucagcaucuuccugcaccuggugaagauccccacccacagacacaucaccggcaagcccugccccaagccccacagacugaaccacaugggcaucugcagcugcggccuguacaagcagcccggcgugcccgugaaguggaagagauga

SEQ ID NO: 5345 - RNA, 1476 nt, Artificial Sequence
  derived and/or modified protein sequence (opt5) from LASV(Josiah;Clade IV)__NP_694870__GPCstabilized
augggccagaucgugaccuucuuucaagaggucccccacguuauugaagaggugaugaacaucgugcugauugcccucagcguccuggcugugcuuaaggggcuguacaauuucgccacaugcggacucguuggccuggugacguuucuucugcucugugggagauccugcaccacaucucuguauaaaggagucuacgaacugcagacccucgagcugaacauggaaacacuuaauaugaccaugccucugagcuguacaaagaacaauucccaucacuauaucauggugggcaacgagaccgggcucgagcugacgcuuaccaauacaucuauuaucaaccauaaauucugcaaucugagcgacgcgcacaagaaaaaccucuacgaucaugcucugauguccaucauuucuaccuuucaccugagcaucccgaauuucaaccaguaugaagccauguccugugacuuuaauggaggcaagauuagcguucaguacaaccucucucacuccuaugccggcgaugcugccaaucauugcgggacaguggcuaacggaguccugcaaaccuucaugcggauggccuggggcgggagcuacaucgcgcuugacucuggaugcggcaacugggauuguauuaugacguccuaccaguaucugaucauucagaauacaaccugggaggaccacugccaguuuagcagacccucuccuaucggguaccucggacugcuuucccaacggacacgcgauaucuauauuagcagacggcgccggggcaccuucaccuggacacuguccgacucugaaggcaaggauacgcccgggggauacugucugacccgcuggaugcucaucgaggccgagcugaaaugcuuuggcaacacagcuguggccaaguguaaugaaaaacaugacgaggaguucugcgauaugcuuagacuguuugacuucaacaagcaggcuauucagcggcucaaagcccccgcgcagaugagcauccaacugauuaauaaggccgugaacgcucuuaucaaugaucagcugaucaugaagaaccaccuccgcgacauuaugugcaucccuuauugcaauuacuccaaauauugguaccugaaccacaccacaaccggaagaacgagccugcccaaguguuggcucgucucuaauggcuccuaccugaacgaaacacauuucagcgacgauauugagcagcaagccgacaauaugaucaccgagaugcuucagaaagaauauauggagcggcaggggaagaccccucugggacucguugaucuguuuguguucucuaccagcuuuuaccugauuuccaucuuccuucaccucgugaaaaucccgacacaucgccacauugucggcaagucuugccccaaaccucauagacugaaccacaugggcaucuguagcugcgggcuguauaagcagcccggagugccuguuaaguggaaacgguga

SEQ ID NO: 5346 - RNA, 1473 nt, Artificial Sequence
  derived and/or modified protein sequence (opt5) from LASV(LP;Clade I)__AAF86701__GPCstabilized
augggccagaucauuaccuucuuucaagaggugccccacgucaucgaagagguuaugaacauugugcugaucgcccucagccugcuugcuauucugaaggggcucuacaauaucgccacaugcggaaucauuggccugguggcguuccuuuuucugugugggaaauccugcucucucacgcugaagggaggcuaugaacugcagacccucgagcugaacauggaaacacuuaauaugaccaugccucugagcuguaccaaaaacuccucucaucacuacaucagagucgggaaugagacaggacucgagcugacacuuaccaacacgagcauuaucaaucauaaguucugcaaccuguccgacgcucacaaaaagaaucucuaugaucaugcccugaugucuauuaucagcaccuuucaccuguccauuccgaacuucaaucaguacgaagccaugagcugugacuuuaacggcggcaagaucucugugcaguauaaucucucccacagcuacgcuggggaugccgcugagcauugcggaacaguugccaacggcgugcugcaaaccuucaugcggauggcguggggagggcgcuauaucgcccuugacucuggcugcgggaauugggauuguauuaugacauccuaccaguaccugaucauucagaacaccacgugggaagaccacugccaguuuagcagacccucuccuaucggauaucucggccugcuuucccaacggacacgcgauauuuacaucagcagacggcgccggggcaccuucacauggacccuguccgacucugaggggaacgagacccccggaggcuauugucugacacgcuggaugcucaucgaagcugagcugaagugcuuugggaauacggccgucgcuaaauguaacgaaaagcaugaugaggaguucugcgacaugcuuagacuguuugauuucaauaaacaggccauucggcgccucaaggcgcccgcccagaugagcauccagcugauuaacaaggcugugaaugcccuuaucaacgaccaacugauuaugaaaaaucaccucagagauaucaugugcaucccuuacugcaacuauuccaaguacugguaucugaaucacaccagcucuggccggacaucccugcccaaauguuggcucauuagcaacgggucuuaccugaaugagacccaguucagcgacgacaucgaacagcaagcugauaacaugauuacagagaugcuucagaaggaauacaucgagcgccagggaaaaaccccucugggccucguugacauuuuuaucuucuccacgucuuuuuaucugauuagcaucuuccugcaucuuaucaagauuccgacacacagacauaucgugggcaaacccugcccuaagccccaccggcucaaucauaugggggucuguuccugcggacuguacaagcacccuggcgugcccaccaaauggaagcgcuga

SEQ ID NO: 5347 - RNA, 1473 nt, Artificial Sequence
  derived and/or modified protein sequence (opt5) from LASV(803213;Clade II)__AAF86703__GPCstabilized
augggccagaucauuaccuucuuucaagaggugccccacgucaucgaagagguuaugaacauugugcugaucgcccucagccugcuugcuauucugaaggggaucuacaauguggccacaugcggacucuucggccugaucuccuuucuucugcucugugggagaucuugcagcgucacguauaaaggaguguacgaacugcagacccuggagcucaacauggcgaaucugaacaugacaaugccucuuuccuguaccaagaauaacucucaucacuauauuaugguuggcaaugaaacagggcuggagcucacccugacaaacaccagcaucauuaaucauaaauucugcaaccuuuccgacgcucacaagaaaaaucuguacgaucaugcccucaugucuaucauuagcacguuucaccuguccaucccgaacuucaaucaguaugaggccaugagcugugacuuuaacggaggcaagauuucugugcaguacaaucugucccacagcuucgcugucgaugccgcuaaccauugcggcaccaucgccaacggggugcuccaaacauuuaugcggauggcguggggaggcucuuauaucgcccuggacuccgggugcggaaauugggauuguauuaugaccagcuaccaguaccuuaucauucagaacacaaccugggaagaccacugccaguucucucgccccuccccuaucggcuaucuggggcuccugagccaaagaacgcgggauauuuacaucucccgcagacgccggggaacauuuaccuggacacucucugacagcgagggcaaugaagcucccggcggguauugucugacccgguggaugcugaucgaggccgagcucaaaugcuucggaaacaccgcuguugccaaguguaaugaaaaacaugaugaggaauuuugcgacaugcugcgccuuuucgauuucaacaagcaggcgauuaaaagacugaagacacccgcccagauguccauccagcucauuaauaaggcugugaacgcccugaucaaugaccaacuuauuaugaaaaaccaucugcgggauaucaugugcaucccuuacugcaauuauagccgcuacugguaucucaaccacacggucaccgggaagacaucucugcccagauguuggcugguguccaauggaagcuaccucaacgaaacccacuuuucugacgacauugagcagcaggcugauaauaugaucacagagaugcugcaaaaagaauacauggaccggcagggcaagaccccucuugggcugguggaucucuucgucuuuagcacguccuucuaucugauuucuaucuuucugcaccuuguuaaaauuccgacacaucgccacaucgugggaaagcccugcccuaaaccccauagacucaaccacaugggcauuuguagcugcggccuguacaagcacccuggggugcccgucaaguggaaacgguga

SEQ ID NO: 5348 - RNA, 1473 nt, Artificial Sequence
  derived and/or modified protein sequence (opt5) from LASV(GA391;Clade III)__CAA36645__GPCstabilized
augggccagaucgugaccuucuuucaagaggucccccacguuauugaagaggugaugaacaucgugcugauugcccucagcauccuggcuauucuuaaggggcuguacaaugucgccacaugcggacucaucggccuggugacguuccuucugcucuccgggagaucuuguagccugaucuauaaaggaaccuacgaacugcagacacucgagcugaacauggaaacccuuaauaugacaaugccucuguccugcaccaagaacaauucucaucacuauauucggguuggcaacgagacagggcucgagcugacccuuacgaauaccagcauccugaaccauaaauuuuguaaucucuccgacgcgcacaagcgcaaccuguacgaucauucucugaugagcauuaucuccacauuccaccucagcauuccgaauuuuaaccaguaugaagcuaugucuugcgacuucaauggaggcaaaaucaccgugcaguacaaccugucccacagcuuugccgucgaugccgcuggccauugugggacacuugccaauggagugcugcaaaccuucaugagaauggcuuggggcgggucuuauauugcccucgacuccggaugcggcaacugggauugcaucaugacgagcuaccaguaccugaucauucagaacacaaccugggacgaucacugucaguuuucucgccccuccccuaucggguaucuuggacugcucagccaaagaacacgggacauuuacaucucccgcagacgccggggcaccuucaccuggacacucucugauagcgagggcaaugaaacgcccgggggauauugccugacccgguggaugcuuauugaggcggagcugaaguguuuuggcaacacagccguugcuaagugcaaugaaaaacaugacgaggaguucugugauaugcuccgccuguuugacuucaacaagcaggccaucagacggcuuaaaacccccgcucagauguccauccagcugauuaauaaggccgugaacgcgcucaucaaugaucaacugauuaugaaaaaccaucugcgcgacaucaugugcauuccuuacugcaauuauagcagauacugguaucucaaccacacaucuaccggaaagacgucccugccccggugcuggcuuaucagcaauggcucuuaccugaacgaaacaaaguucagcgacgauaucgagcagcaggccgacaauaugauuaccgagaugcuccaaaaagaauacaucgaucgccaggggaagaccccucugggacuggucgaccuuuuuguguucuccacaucuuuuuaucucauuagcaucuuccugcaccuggugaaaauuccgacccacagacauaucgucggcaagcccuguccuaaaccccaccggcucaaccauaugggcauuugcuccugugggcuguacaagcagccuggaguucccgugagauggaaacgcuga

SEQ ID NO: 5349 - RNA, 1476 nt, Artificial Sequence
  derived and/or modified protein sequence (opt5) from LASV(AV;Clade V)__CCA30314__GPCstabilized
augggccagaucgugaccuucuuucaagaggucccccacguuauugaagaggugaugaacaucgugcugauugcccucagcauccuggcuguccuuaaggggcuguacaauauugccacaugcggacucaucggccugaucacguuccuucugcucugugggagauccugcucuagcaaccuguauaaaggaguguacgaacugcagucccucgaccugaauauggagacccuuaacaugacaaugccucugucuuguaccaagaauaacagccaucacuauauucggguuggcaaugauacagggcucgaacugacccuuacaaacaccuccauccugaaucauaaauuuugcaaccucucugacgcgcacaagaaagaucuguacgaccaugcucugaugagcauuaucuccacguuccaccucagcauuccgaauuuuaaccaguaugaggccaugucuugugauuucaauggaggcaagaucuccgugcaguacaaccugagccacucuuaugccauugacgcugccaaucauugcggcaccgucgcuaacgggauccuucaaacauuuaugcgcauggccuggggaggcuccuacaucgcgcuggauagcgggugcggaaacugggacuguauuaugaccucuuaccaguaucucaucauucagaauacaaccugggagaaccacugccaguucucccggcccagcccuaucggcuaccuggggcuucugucccaacgcacgagagauauuuauaucucucggcgccgccggggaacauuuaccuggacacugagcgacuccgaaggcaaugccacccccggcggguacugucucaccagauggaugcugaucgaggcugaacuuaagugcuucggaaacacagccguggcuaaauguaaugagaagcaugaugaggaauuuugcgacaugcugcgccucuucgauuuuaacaaacaggccauuagccggcugaagucucccgcgcagauguccauccagcuuauuaauaaagccguuaacgcucugaucaaugaccaacucauuaugaagaaccaccugagagacaucaugugcaucccuuauugcaauuacagcaaguauugguaccugaaccacacgauuaccgggaaaacaucucuccccaaguguuggcuggugagcaauggauccuaccuuaacgaaacccauuucucugaugacaucgagcagcaggccgauaauaugauuacagaaaugcugcaaaaagaguauauggagcggcagggcaagaccccucucgggcuggucgaccuguucguguuuagcacguccuucuaccuuaucagcauuuuucuccgccuggugaaaaucccgacacacagacauauugucggaaagcccugcccuaaaccccaccggcugaaccauaugggcaucuguucuugcggccucuauaagcagccugggguucccgugcgcuggaagagauga

SEQ ID NO: 5350 - RNA, 1473 nt, Artificial Sequence
  derived and/or modified protein sequence (opt5) from LASV(Togo/2016/7082;Clade VI)__AMR44577__GPCstabilized
augggccagaucauuaccuucuuucaagaggugccccacgucaucgaagagguuaugaacauugugcugaucgcccucagccugcuugcuauucugaaggggguguacaaugucgccacaugcggaaucaucggccucgugacguuccuguuucuuugugggagauccugcucucugauuuauaaaggaagcuacgaacuccagacccuggagcugaacauggaaacacucaauaugaccaugccucuguccuguacaaagaacucuagccaucacuauauccggguuggcaaugagaccgggcuugagcugacacucaccaacacguccauuaucaaucauaaauucugcaaccugucugacgcgcacaagcgcaaucuuuacgaucaugcucugaugagcauucucuccaccuuucaccugagcaucccgaacuucaaucaguaugaagccaugucuugugacuuuaacggaggcaaaauuuccgugcaguacaaucugagccacgccuaugcugucgaugccgcugagcauugcggcacaguggccaacgggguucuccaaaccuucaugagaauggcguggggaggcucuuacaucgcccuggacuccgggugcggaaauugggauuguaucaugacaagcuaccaguaucuuauuauccagaacaccacgugggaagaccacugccaguuuucucgccccuccccuauuggcuaccuggggcuccugagccaaagaacacgggauaucuauauuucccgcagacgccggggaaccuucacauggacccucucugacagcgagggcaacgagacccccggcggguacugucugacacgguggaugcugaucgaagcugagcucaagugcuuuggaaauacggccguggcuaaguguaacgaaaaacaugaugaggaguucugcgacaugcugcgccuuuuugauuucaauaagcaggccauccagagacugaaaucccccgcgcagaugagcauucaacucaucaacaaggccgucaaugcucugauuaacgaccagcuuaucaugaaaaaucaucugcgggauaugaugugcauuccuuauugcaacuacucuaaguauugguaccucaaucacaccuccagcgggcgcacaucucugcccaaguguuggcuggugagcaacggauccuaccucaaugagacccacuucucugacgacaucgaacagcaagccgauaacaugaucacagagaugcugcagaaagaauauauugacagacagggcaagaccccucuugggcugguggaucucuuugucuucagcacguccuuuuaccugaucagcauuuuccugcaccuuaucaaaauuccgacacaucggcacaucguuggaaagcccugcccuaaaccccaucgccucaaucacaugggcauuuguucuugcggccuguauaagcagccuggggugcccaccagauggaaacgguga

SEQ ID NO: 5351 - RNA, 1473 nt, Artificial Sequence
  derived and/or modified protein sequence (opt5) from LASV(KAK-428;Clade n.d. (VII))__ANH09740__GPCstabilized
augggccagaucgugaccuucuuucaagaggucccccacguuauugaagaggugaugaacaucgugcugauugcccucagccugcuugcuauccugaaggggcucuacaauuucgccacaugcggagucauuggccugaucacguuucuucugcucugugggagauccugcucugcgaccuauaaaggacaguacgaacugcagacacuggagcucaacauggaaagccugaauaugaccaugccucuuuccuguacaaagaacaauucucaucacuauauccgggcuggcaacaauaccgggcuggagcucacacugaccaacacgagcauuaucucccauaaauucugcaaucuuucugacgcccacaagaaaaaccuguacgaucauacccucaugagcauuaucacaaccuuucaccuguccauuccgaauuucaaccaguaugaggccaugagcugugacuuuaauggaggcaagaucucuauucaauacaaccugucccacagcuaugcuggcgaugccgcucagcauugcgggacaguggccaauggaguucuccagaccuucaugcgcauggcguggggcgggucuuaccuggcccuugacuccggaugccggggcugggauuguaucaucagcucuuaccaguaucugauuauccaaaacacgacaugggacgaucacugccaguuuucccgccccagcccuauuggguaccucggauucgugucccagaagaccagagacaucuauauuucucggcgccgccggggcacauuuaccuggacccugagcgauuccgaaggccaugacaugcccgggggauacugucucacaagauggaugcugaucgaggcugaucugaaaugcuucggcaacacggccgucgcuaaguguaaugaaaaacacgacgaggaguuuugcgauauguggcgccucuucgacuucaacaagcaggccauccaacggcugaaagcgcccgcccagaugaauauucagcuuaucaacaaggcugugaaugcccugauuaacgaccaacucaugaugaagaaucaccugagagauaucaugugcauuccuuauugcaacuacagcaaauuuugguaucuuaauaacaccacaaccggacggacaucucugccccgcuguuggcucaucuccaauggcagcuaccugaacgagacccauuucucugacgauaucgaacagcaggcugacaauaugauuacggagaugcugcagaaggaauacauggauagacaagggaaaacaccucucggacugguugaccuuuuuguguucagcaccuccuuuuaucugaucaccauuuuccuccaccuggucaagaucccgacacaucggcacauugugggcaaacccugcccuaagccccaucgccugaaccacaugggcaucuguucuugcgggcuuuacaaacagccuggagugcccgucagauggaagcgguga

SEQ ID NO: 5352 - RNA, 1473 nt, Artificial Sequence
  derived and/or modified protein sequence (opt5) from LASV(Acar 3080;Clade I)__AAT49014__GPCstabilized
augggccagaucauuaccuucuuucaagaggugccccacgucaucgaagagguuaugaacauugugcugaucgcccucagccugcuugcuauucugaaggggcucuacaauaucgccacaugcggaaucauuggccugguggcguuccuuuuucugugugggaaauccugcucucucacgcugaagggaggcuaugaacugcagacccucgagcugaacauggaaacacuuaauaugaccaugccucugagcuguaccaaaaacuccucucaucacuacaucagagucgggaaugagacaggacucgagcugacacuuaccaacacgagcauuaucaaucauaaguucugcaaccuguccgacgcucacaaaaagaaucucuaugaucaugcccugaugucuauuaucagcaccuuucaccuguccauuccgaacuucaaucaguacgaagccaugagcugugacuuuaacggcggcaagaucucugugcaguauaaucucucccacagcuacgcuggggaugccgcugagcauugcggaacaguugccaacggcgugcugcaaaccuucaugcggauggcguggggagggcgcuauaucgcccuugacucuggcugcgggaauugggauuguauuaugacauccuaccaguaccugaucauucagaacaccacgugggaagaccacugccaguuuagcagacccucuccuaucggauaucucggccugcuuucccaacggacacgcgauauuuacaucagcagacggcgccggggcaccuucacauggacccuguccgacucugaggggaacgagacccccggaggcuauugucugacacgcuggaugcucaucgaagcugagcugaagugcuuugggaauacggccgucgcuaaauguaacgaaaagcaugaugaggaguucugcgacaugcuuagacuguuugauuucaauaaacaggccauucggcgccucaaggcgcccgcccagaugagcauccagcugauuaacaaggcugugaaugcccuuaucaacgaccaacugauuaugaaaaaucaccucagagauaucaugugcaucccuuacugcaacuauuccaaguacugguaucugaaucacaccagcucuggccggacaucccugcccaaauguuggcucauuagcaacgggucuuaccugaaugagacccaguucagcgacgacaucgaacagcaagcugaucauaugauuacagagaugcuucagaaggaauacaucgagcgccagggaaaaaccccucugggccucguugacauuuuuaucuucuccacgucuuuuuaucugauuagcaucuuccugcaccuuaucaagauuccgacacauagacacaucgugggcaaacccugcccuaagccccaucggcucaaccacaugggggucuguuccugcggacuguacaagcacccuggcgugcccaccaaauggaagcgcuga

SEQ ID NO: 5353 - RNA, 1473 nt, Artificial Sequence; identical to SEQ ID NO: 5346
  derived and/or modified protein sequence (opt5) from LASV(Pinneo-NIG-1969;Clade I)__AIT17836__GPCstabilized

SEQ ID NO: 5354 - RNA, 1473 nt, Artificial Sequence
  derived and/or modified protein sequence (opt5) from LASV(ISTH0009-NIG-2011;Clade II)__AIT17404__GPCstabilized
augggccagaucauuaccuucuuucaagaggugccccacgucaucgaagagguuaugaacauugugcugaucgcccucagccugcuugcuauucugaaggggaucuacaauguggccacaugcggacucuucggccuggucuccuuucuucugcucugugggagaucuugcagcacgaccuauaaaggaguguacgaacugcagacacuggagcucgacauggcgucccugaacaugaccaugccucuuucuuguacaaagaauaacagccaucacuauaucaugguuggcaaugaaaccgggcuggagcucacacugaccaacacguccauuaucaaucauaaauucugcaaccuuucugaugcucacaagaaaaaucuguacgaccaugcccucaugagcauuaucuccaccuuucaccugagcauuccgaacuucaaucaguaugaggccaugucuugugauuuuaacggaggcaagaucuccgugcaguacaaucugagccacgcuuaugccgucgacgcugccaaccauugcggcacaauugcgaauggggugcuccaaaccuucaugcggauggccuggggaggcucuuacaucgcucuggauuccgggugcggaagcugggacuguaucaugacaucuuaccaguaucuuauuauccagaacaccacgugggaagaucacugccaguuuucccgccccagcccuauuggcuaccuggggcuccugucccaaagaacacgggacaucuauauuucucgcagacgccggggaaccuucacauggacccucagcgauuccgagggcaacgaaacccccggcggguacugucugacacgguggaugcugaucgaggccgagcucaaaugcuuuggaaauacggcuguugccaaguguaacgaaaaacaugacgaggaguucugcgauaugcugcgccuuuuugacuucaauaagcaggcgaucagacggcugaaaacccccgcccagaugagcauucagcucaucaacaaggcugugaaugcccugauuaacgaucaacuuaucaugaagaaucaucugcgcgacauuaugugcaucccuuauugcaacuacucuaaauauugguaccucaaucacacagucaccgggaagacaucccugcccagauguuggcuggugagcaacggaucuuaccucaaugaaacccacuucagcgacgauaucgagcagcaggcugacaacaugauuacggagcugcuucaaaaagaauauauggaucggcagggcaagacaccucuggggcucguggaccuguuugucuucuccaccucuuuuuaccugaucagcauuuuccuucaccucaucaaaauuccgacccaucgccacaucacaggaaagcccugcccuaaaccccauagacugaaucacaugggcauuuguuccugcggccuguauaagcacccugggguucccgugaaguggaaacgguga

SEQ ID NO: 5355 - RNA, 1473 nt, Artificial Sequence
  derived and/or modified protein sequence (opt5) from LASV(ISTH0012-NIG-2011;Clade II)__AIT17408__GPCstabilized
augggccagaucauuaccuucuuucaagaggugccccacgucaucgaagagguuaugaacauugugcugaucgcccucagccugcuugcuauucugaaggggaucuacaauguggccacaugcggacucuucggccuggucuccuuucuucugcucugugggagaucuugcagcacgaccuauaaaggaguguacgaacugcagacacuggagcucgacauggcgucccugaacaugaccaugccucuuucuuguacaaagaauaacagccaucacuauaucaugguuggcaaugaaaccgggcuggagcucacacugaccaacacguccauuaucaaucauaaauucugcaaccuuucugaugcucacaagaaaaaucuguacgaccaugcccucaugagcauuaucuccaccuuucaccugagcauuccgaacuucaaucaguaugaggccaugucuugugauuuuaacggaggcaagaucuccgugcaguacaaucugagccacacauaugcugucgacgccgcuaaccauugcggcaccguggccaaugggguucuccaaacauucaugcggauggcguggggaggcucuuacauugcccuggauuccgggugcggaagcugggacuguaucaugaccucuuaccaguaucuuaucauucagaacacgacaugggaagaucacugccaguuuucccgccccagcccuaucggcuaccuggggcuccugucccaaagaacccgggacauuuauaucucucgcagacgccggggaacauucaccuggacccucagcgauuccgagggcaacgaaacacccggcggguacugucugacgcgguggaugcugauugaggcugagcucaaaugcuuuggaaauaccgccguggcuaaguguaacgaaaaacaugacgaggaguucugcgauaugcugcgccuuuuugacuucaauaagcaggccaucagacggcugaaaacacccgcgcagaugagcauccagcucauuaacaaggccgucaaugcucugaucaacgaucaacuuauuaugaagaaucaucugcgcgacaucaugugcauuccuuauugcaacuacucuaaauauugguaccucaaucacaccgugacagggaagaccucccugcccagauguuggcuggugagcaacggaucuuaccucaaugaaacgcacuucagcgacgauaucgagcagcaggccgacaacaugaucacagagcugcuucaaaaagaauauauggaucggcagggcaagaccccucuggggcucgucgaccuguuuguuuucuccaccucuuuuuaccugauuagcaucuuccuucaccucgugaaaauuccgacacaucgccacgugaucggaaagcccugcccuaaaccccauagacugaaucacaugggcauuuguuccugcggccuguauaagcacccugggguccccgugaaguggaaacgguga

SEQ ID NO: 5356 - RNA, 1473 nt, Artificial Sequence
  derived and/or modified protein sequence (opt5) from LASV(ISTH0047-NIG-2011;Clade II)__AIT17412__GPCstabilized
augggccagaucauuaccuucuuucaagaggugccccacgucaucgaagagguuaugaacauugugcugaucgcccucagccugcuugcuauucugaaggggaucuacaauguggccacaugcggacucuucggccuggucuccuuucuucugcucugugggagaucuugcagcacgaccuauaaaggaguguacgaacugcagacacuggagcucgacauggcgucccugaacaugaccaugccucuuucuuguacaaagaauaacagccaucacuauaucaugguuggcaaugaaaccgggcuggagcucacacugaccaacacguccauuaucaaucauaaauucugcaaccuuucugaugcucacaagaaaaaucuguacgaccaugcccucaugagcauuaucuccaccuuucaccugagcauuccgaacuucaaucaguaugaggccaugucuugugauuuuaacggaggcaagaucuccgugcaguacaaucugagccacgcuuaugccgucgacgcugccaaccauugcggcacaauugcgaauggggugcuccaaaccuucaugcggauggccuggggaggcucuuacaucgcucuggauuccgggugcggaagcugggacuguaucaugacaucuuaccaguaucuuauuauccagaacaccuccugggaagaucacugccaguuuagccgccccuccccuauuggcuaccuggggcuccugucucaaagaacgcgggacaucuauauuagccgcagacgccggggaacauucaccuggacacucuccgauagcgagggcaacgaaacccccggcggguacugucugacccgguggaugcugaucgaggccgagcucaaaugcuuuggaaauacagcuguugccaaguguaacgaaaaacaugacgaggaguucugcgauaugcugcgccuuuuugacuucaauaagcaggcgaucagacggcugaaaacgcccgcccagaugucuauucagcucaucaacaaggcugugaaugcccugauuaacgaucaacuuaucaugaagaaucaucugcgcgacauuaugugcaucccuuauugcaacuacuccaaauauugguaccucaaucacaccgucacagggaagaccagccugcccagauguuggcuggugucuaacggaagcuaccucaaugaaacacacuucuccgacgauaucgagcagcaggcugacaacaugauuaccgagcugcuucaaaaagaauauaucgaucggcagggcaagacgccucuggggcucguggaccuguuugucuucucuaccagcuuuuaccugauuuccaucuuccuucaccucguuaaaauuccgacacaucgccacgugaucggaaagcccugcccuaaaccccauagacugaaucacaugggcauuuguagcugcggccuguauaagcacccuggggugcccgucaaguggaaacgguga

SEQ ID NO: 5357 - RNA, 1473 nt, Artificial Sequence
  derived and/or modified protein sequence (opt5) from LASV(ISTH0073-NIG-2011;Clade II)__AIT17416__GPCstabilized
augggccagaucauuaccuucuuucaagaggugccccacgucaucgaagagguuaugaacauugugcugaucgcccucagccugcuugcuauucugaaggggaucuacaauguggccacaugcggacucuucggccuggucuccuuucuucugcucugugggagaucuugcagcacgaccuauaaaggaguguacgaacugcagacacuggagcucgacauggcgucccugaacaugaccaugccucuuucuuguacaaagaauaacagccaucacuauaucaugguuggcaaugaaaccgggcuggagcucacacugaccaacacguccauuaucaaucauaaauucugcaaccuuucugaugcucaccggaagaaucuguacgaccaugcccucaugagcauuaucuccaccuuucaccugagcauuccgaacuucaaucaguaugaggccaugucuugugauuuuaacggaggcaaaaucuccgugcaguacaaucugagccacgcuuaugccgucgacgcugccaaccauugcggcacaauugcgaauggggugcuccaaaccuucaugcgcauggccuggggaggcucuuacaucgcucuggauuccgggugcggaagcugggacuguaucaugacaucuuaccaguaucuuauuauccagaacaccuccugggaagaucacugccaguuuagcagacccuccccuauuggcuaccuggggcuccugucucaacggacgcgcgacaucuauauuagcagacggcgccggggaacauucaccuggacacucuccgauagcgagggcaacgaaacccccggcggguacugucugacccgcuggaugcugaucgaggccgagcucaagugcuuuggaaauacagcuguugccaaauguaacgaaaagcaugacgaggaguucugcgauaugcugagacuuuuugacuucaauaaacaggcgauccggcgccugaagacgcccgcccagaugucuauucagcucaucaacaaagcugugaaugcccugauuaacgaucaacuuaucaugaagaaucaccugagagacauuaugugcaucccuuauugcaacuacuccaaguauugguaccucaaucacaccgucacagggaaaaccagccugccccgguguuggcuggugucuaacggaagcuaccucaaugaaacacauuucuccgacgauaucgagcagcaggcugacaacaugauuaccgagcugcuucaaaaggaauauaucgaucgccagggcaaaacgccucuggggcucguggaccuguuugucuucucuaccagcuuuuaccugauuuccaucuuccuucaccucguuaagauuccgacacauagacacgugaucggaaaacccugcccuaagccccaucggcugaaucacaugggcauuuguagcugcggccuguauaaacacccuggggugcccgucaaguggaagcgcuga

SEQ ID NO: 5358 - RNA, 1473 nt, Artificial Sequence
  derived and/or modified protein sequence (opt5) from LASV(ISTH0230-NIG-2011;Clade II)__AIT17420__GPCstabilized
augggccagaucauuaccuucuuucaagaggugccccacgucaucgaagagguuaugaacauugugcugaucgcccucagccugcuugcuauucugaaggggaucuacaauguggccacaugcggacucuucggccuggucuccuuucuucugcucugugggagaucuugcagcacgaccuauaaaggaguguacgaacugcagacacuggagcucgacauggcgucccugaacaugaccaugccucuuucuuguacaaagaauaacagccaucacuauaucaugguuggcaaugaaaccgggcuggagcucacacugaccaacacguccauuaucaaucauaaauucugcaaccuuucugaugcucacaagaaaaaucuguacgaccaugcccucaugagcauuaucuccaccuuucaccugagcauuccgaacuucaaucaguaugaggccaugucuugugauuuuaacggaggcaagaucuccgugcaguacaaucugagccacacauaugcugucgacgccgcuaaccauugcggcaccauugccaauggggugcuccaaacauucaugcggauggcguggggaggcucuuacaucgcccuggauuccgggugcggaagcugggacuguaucaugaccucuuaccaguaucuuauuauccagaacacgacaugggaagaucacugccaguuuucccgccccagcccuauuggcuaccuggggcuccugucccaaagaacccgggacaucuauauuucucgcagacgccggggaacauucaccuggacccucagcgauuccgagggcaacgaaacacccggcggguacugucugacgcgguggaugcugaucgaggcugagcucaaaugcuuuggaaauaccgccguugcuaaguguaacgaaaaacaugacgaggaguucugcgauaugcugcgccuuuuugacuucaauaagcaggccaucagacggcugaaaacacccgcgcagaugagcauucagcucaucaacaaggccgugaaugcucugauuaacgaucaacuuaucaugaagaaucaucugcgcgacauuaugugcaucccuuauugcaacuacucuaaauauugguaccucaaucacaccgucacagggaagaccucccugcccagauguuggcuggugagcaacggaucuuaccucaaugaaacgcacuucagcgacgauaucgagcagcaggccgacaacaugauuacagagcugcuucaaaaagaauauauggaucggcagggcaagaccccucuggggcucguggaccuguuugucuucuccaccucuuuuuaccugaucagcauuuuccuucaccucaucaaaauuccgacacaucgccacaucaccggaaagcccugcccuaaaccccauagacugaaucacaugggcauuuguuccugcggccuguauaagcacccugggguucccgugaaguggaaacgguga

SEQ ID NO: 5359 - RNA, 1473 nt, Artificial Sequence
  derived and/or modified protein sequence (opt5) from LASV(ISTH0531-NIG-2011;Clade II)__AIT17424__GPCstabilized
augggccagaucauuaccuucuuucaagaggugccccacgucaucgaagagguuaugaacauugugcugaucgcccucagccugcuugcuauucugaaggggaucuacaauguggccacaugcggacucuucggccuggucuccuuucuucugcucugugggagaucuugcagcacgaccuauaaaggaguguacgaacugcagacacuggagcucgacaugaccaaccugaauaugacaaugccucuuuccuguaccaagaacaauucucaucacuauaucaugguuggcaacgaaacagggcuggagcucacccugacgaauaccagcauuaucaaccauaaauucugcaaucuuuccgaugcgcacaagaaaaaccuguacaaucaugcucucaugucuauuaucagcacauuucaccuguccauuccgaacuucaaucaguaugaggccaugagcugugacuuuaacggaggcaagaucucugugcaguacaaucugucccacgccuaugcugucgaugccgcuaaccauugcggcaccauugccaacggggugcuccaaacauucaugcggauggcguggggaggcagcuacaucgcccuggacucugggugcggauccugggauuguaucaugaccagcuaccaguaucuuauuauccagaauacgacaugggaagaccacugccaguuuucucgccccuccccuauuggcuaccuggggcuccugagccaaagaacccgggauaucuauauuucccgcagacgccggggaacauucaccuggacccucucugacagcgagggcaacgaaacacccggcggguacugucugacgcgguggaugcugaucgaggcugagcucaaaugcuuuggaaauaccgccguugcuaaguguaacgaaaaacaugaugaggaguucugcgacaugcugcgccuuuuugauuucaauaagcaggccaucagacggcugaaaacacccgcgcagaccaacauucagcucaucaauaaggccgugaacgcucugauuaaugaccaacuuaucaugaagaaccaucugcgcgauauuaugugcaucccuuauugcaauuacuccaaauauugguaccucaaccacacagucaccgggaagacgagccugcccagauguuggcuggugucuaauggauccuaccucaacgaaacacacuucagcgacgacaucgagcagcaggccgauaauaugauuaccgagcugcuucaaaaagaauauauggaccggcagggcaagaccccucuggggcucguggaucuguuugucuucucuaccagcuuuuaccugaucuccauuuuccuucaccucguuaaaaucccgacacaucgccacauuaucggaaagcccugcccuaaaccccauagacugaaccacaugggcauuuguucuugcggccuguauaagcacccuggggugcccgugaaguggaaacgguga

SEQ ID NO: 5360 - RNA, 1473 nt, Artificial Sequence
  derived and/or modified protein sequence (opt5) from LASV(ISTH0595-NIG-2011;Clade II)__AIT17428__GPCstabilized
augggccagaucauuaccuucuuucaagaggugccccacgucaucgaagagguuaugaacauugugcugaucgcccucagccugcuugcuauucugaaggggaucuacaauguggccacaugcggacucuucggccuggucuccuuucuucugcucugugggagaucuugcagcacgaccuauaaaggaguguacgaacugcagacacuggagcucgacauggcgucccugaacaugaccaugccucuuucuuguacaaagaauaacagccaucacuauaucaugguuggcaaugaaaccgggcuggagcucacacugaccaacacguccauuaucaaucauaaauucugcaaccuuucugaugcucacaagaaaaaucuguacgaccaugcccucaugagcauuaucuccaccuuucaccugagcauuccgaacuucaaucaguaugaggccaugucuugugauuuuaacggaggcaagaucuccgugcaguacaaucugagccacacauaugcugucgacgccgcuaaccauugcggcaccauugccaauggggugcuccaaacauucaugcggauggcguggggaggcucuuacaucgcccuggauuccgggugcggaagcugggacuguaucaugaccucuuaccaguaucuuauuauccagaacacgacaugggaagaucacugccaguuuucccgccccagcccuauuggcuaccuggggcuccugucccaaagaacccgggacaucuauauuucucgcagacgccggggaacauucaccuggacccucagcgauuccgagggcaacgaaacacccggcggguacugucugacgcgguggaugcugaucgcugccgaccucaaaugcuuuggaaauaccgcuguugccaaguguaacgagaaacaugaugaggaguucugcgacaugcugcgccuuuuugauuucaauaagcaggcgaucgaaagacugaaaacacccgcccagaugagcauucagcucaucaacaaggcugugaaugcccugauuaacgaccaacuuaucaugaagaaucaucugcgggacauuaugugcaucccuuauugcaacuacucuaaauauugguaccucaaucacaccgucacagggcgcaccucccugcccagauguuggcuggugagcaacggaucuuaccucaaugagacgcacuucagcgaugacaucgaacagcaggcugauaacaugauuacagagcugcuucaaaaggaguauauggaccggcagggcaaaaccccucuggggcucguggaucuguuugucuucuccaccucuuuuuaccugaucagcauuuuccuucaccucguucgcaucccgacacauagacacgugauuggaaagcccugcccuaaaccccaucggcugaaucacaugggcaucuguuccugcggccuguauaagcacccuggggugcccgucaaauggaagcgcuga

SEQ ID NO: 5361 - RNA, 1473 nt, Artificial Sequence
  derived and/or modified protein sequence (opt5) from LASV(ISTH0964-NIG-2011;Clade II)__AIT17430__GPCstabilized
augggccagaucauuaccuucuuucaagaggugccccacgucaucgaagagguuaugaacauugugcugaucgcccucagccugcuugcuauucugaaggggaucuacaauguggccacaugcggacucuucggccuggucuccuuucuucugcucugugggagaucuugcagcacgaccuauaaaggaguguacgaacugcagacacuggagcucgacauggcgucccugaacaugaccaugccucuuucuuguacaaagaauaacagccaucacuauaucaugguuggcaaugaaaccgggcuggagcucacacugaccaacacguccauuaucaaucauaaauucugcaaccuuucugaugcucacaagaaaaaucuguacgaccaugcccucaugagcauuaucuccaccuuucaccugagcauuccgaacuucaaucaguaugaggccaugucuugugauuuuaacggaggccggaucuccgugcaguacaaucugagccacacauaugcugucgacgccgcuaagcauugcggcaccauugccaacggggugcuccaaacauucaugcgcauggcguggggaggcucuuacaucgcccuggauuccgggugcggaagcugggacuguaucaugaccucuuaccaguaucuuauuauccagaauacgacaugggaagaucacugccaguuuuccagacccagcccuauuggcuaccuggggcuccugucccaacggacccgcgacaucuauauuucuagacggcgccggggaacauucaccuggacccucagcgauuccgagggcaacgaaacacccggcggguacugucugacgcgcuggaugcugaucgaggcugagcucaaaugcuuuggaaacaccgccguugcuaaguguaaugaaaaacaugacgaggaguucugcgauaugcugagacuuuuugacuucaacaagcaggccauccggcgccugaaaacacccgcgcagaugagcauucagcucaucaauaaggccgugaacgcucugauuaaugaucaacuuaucaugaagaaccaccugagagacauuaugugcaucccuuauugcaauuacucuaaauauugguaccucaaccacaccgucacagggaagaccucccugccccgguguuggcuggugagcaauggaucuuaccucaacgaaacgcauuucagcgacgauaucgagcagcaggccgacaauaugauuacagagcugcuucaaaaagaauauaucgaucgccagggcaagaccccucuggggcucguggaccuguuugucuucuccaccucuuuuuaccugauuagcaucuuccuucaccucguuaaaauuccgacacauagacacgugaucggaaagcccugcccuaaaccccaucggcugaaccacaugggcauuuguuccugcggccuguauaagcacccuggggugcccgucaaguggaaacgcuga

SEQ ID NO: 5362 - RNA, 1473 nt, Artificial Sequence
  derived and/or modified protein sequence (opt5) from LASV(ISTH1038-NIG-2011;Clade II)__AIT17438__GPCstabilized
augggccagaucauuaccuucuuucaagaggugccccacgucaucgaagagguuaugaacauugugcugaucgcccucagccugcuugcuauucugaaggggaucuacaauguggccacaugcggacucuucggccuggucuccuuucuucugcucugugggagaucuugcagcacgaccuauaaaggaguguacgaacugcagacacuggagcucgacauggcgaaccugaauaugaccaugccucuuuccuguacaaagaacaauucucaucacuauauccggguuggcaacgaaaccgggcuggagcucacacugaccaauacgagcauuaucucccauaaauucugcaaccuuucugaugcucacaagaaaaaucuguacgaccaugcccucaugagcauuaucuccaccuuucaccugagcauuccgaacuucaaucaguaugaggccaugucuugugauuuuaacggaggcaagaucuccgugcaguacaaucugagccacacauaugcugucgacgccgcuaaccauugcggcaccauugccaauggggugcuccaaacauucaugcgcauggcguggggaggcucuuacaucgcccuggauuccgggugcggaagcugggacuguaucaugaccucuuaccaguaucuuauuauccagaacacgacaugggaagaucacugccaguuuuccagacccagcccuauuggcuaccuggggcuccugucccaacggacccgcgacaucuauauuucuagacggcgccggggaacauucaccuggacccucagcgauuccgagggcaaagaaacacccggcggguacugucugacgcgcuggaugcugaucgaggcugagcucaagugcuuuggaaacaccgccguugcuaaauguaaugaaaagcaugacgaggaguucugcgauaugcugagacuuuuugacuucaacaaacaggccauccggcgccugaagacacccgcgcagaugaauauucagcucaucaacaaggccgugaaugcucugauuaacgaucaacuuaucaugaaaaaucaccugagagacauuaugugcaucccuuauugcaacuacagcaaguauugguaccucaaucacaccgucacagggaaaaccucucugccccgguguuggcugguguccaacggaagcuaccucaaugaaacgcauuucucugacgauaucgagcagcaggccgacaacaugauuacagagcugcuucaaaaggaauauaucgaucgccagggcaaaaccccucuggggcucguggaccuguuugucuucagcaccuccuuuuaccugauuucuaucuuccuucaccucguuaagauuccgacacauagacacgugaucggaaaacccugcccuaagccccaucggcugaaucagaugggcauuuguagcugcggccuguauaagcagccuggggugcccgucaaauggaagcgcuga

SEQ ID NO: 5363 - RNA, 1473 nt, Artificial Sequence
  derived and/or modified protein sequence (opt5) from LASV(ISTH1048-NIG-2011;Clade II)__AIT17442__GPCstabilized
augggccagaucauuaccuucuuucaagaggugccccacgucaucgaagagguuaugaacauugugcugaucgcccucagccugcuugcuauucugaaggggaucuacaauguggccacaugcggacucuucggccuggucuccuuucuucugcucugugggagaucuugcagcacgaccuauaaaggaguguacgaacugcagacacuggagcucgacauggcgucccugaacaugaccaugccucuuucuuguacaaagaauaacagccaucacuauaucaugguuggcaaugaaaccgggcuggagcucacacugaccaacacguccauuaucaaucauaaauucugcaaccuuucugaugcucaccggaagaaucuguacgaccaugcccucaugagcauuaucuccaccuuucaccugagcauuccgaacuucaaucaguaugaggccaugucuugugauuuuaacggaggcaaaaucuccgugcaguacaaucugagccacgcuuaugccgucgacgcugccaaccauugcggcacaauugcgaauggggugcuccaaaccuucaugcgcauggccuggggaggcucuuacaucgcucuggauuccgggugcggaagcugggacuguaucaugacaucuuaccaguaucuuauuauccagaacaccuccugggaagaucacugccaguuuagcagacccuccccuauuggcuaccuggggcuccugucucaacggacgcgcgacaucuauauuagcagacggcgccggggaacauucaccuggacacucuccgauagcgagggcaacgaaacccccggcggguacugucugacccgcuggaugcugaucgaggccgagcucaagugcuuuggaaauacagcuguugccaaauguaacgaaaagcaugacgaggaguucugcgauaugcugagacuuuuugacuucaauaaacaggcgauccggcgccugaagacgcccgcccagaugucuauucagcucaucaacaaagcugugaaugcccugauuaacgaucaacuuaucaugaagaaucaccugagagacauuaugugcaucccuuauugcaacuacuccaaguauugguaccucaaucacaccgucacagggaaaaccagccugccccgguguuggcuggugucuaacggaagcuaccucaaugaaacacauuucuccgacgauaucgagcagcaggcugacaacaugauuaccgagcugcuucaaaaggaauauaucgaucgccagggcaaaacgccucuggggcucguggaccuguuugucuucucuaccagcuuuuaccugauuuccaucuuccuucaccucguuaagauuccgacacauagacacgugaucggaaaacccugcccuaagccccaucggauuaaucacaugggcaucuguagcugcggccuguauaaacacccuggggugcccgucaaguggaagcgcuga

SEQ ID NO: 5364 - RNA, 1473 nt, Artificial Sequence
  derived and/or modified protein sequence (opt5) from LASV(ISTH1058-NIG-2011;Clade II)__AIT17446__GPCstabilized
augggccagaucauuaccuucuuucaagaggugccccacgucaucgaagagguuaugaacauugugcugaucgcccucagccugcuugcuauucugaaggggaucuacaauguggccacaugcggacucuucggccuggucuccuuucuucugcucugugggagaucuugcagcacgaccuauaaaggaguguacgaacugcagacacuggagcucgacauggcgucccugaacaugaccaugccucuuucuuguacaaagaauaacagccaucacuauaucaugguuggcaaugaaaccgggcuggagcucacacugaccaacacguccauuaucaaucauaaauucugcaaccuuucugaugcucacaagaaaaaucuguacgaccaugcccucaugagcauuaucuccaccuuucaccugagcauuccgaacuucaaucaguaugaggccaugucuugugauuuuaacggaggcaagaucuccgugcaguacaaucugagccacacauaugcugucgacgccgcuucucauugcggcaccguggccaacgggguucuccaaacauucaugcggauggcguggggaggcuccuacauugcccuggauagcgggugcggaucuugggacuguaucaugaccuccuaccaguaucuuaucauucagaauacgacaugggaagaucacugccaguuuagccgccccuccccuaucggcuaccuggggcuccugucucaaagaacccgggacauuuauaucagccgcagacgccggggaacauucaccuggacccucuccgauagcgagggcaacgaaacacccggcggguacugucugacgcgguggaugcugauugaggcugagcucaaaugcuuuggaaacaccgccguggcuaaguguaaugaaaaacaugacgaggaguucugcgauaugcugcgccuuuuugacuucaacaagcaggccaucagacggcugaaaacacccgcgcagaugucuauccagcucauuaauaaggccgucaacgcucugaucaaugaucaacuuauuaugaagaaccaucugcgcgacaucaugugcauuccuuauugcaauuacuccaaauauugguaccucaaccacaccgugacagggaagaccagccugcccagauguuggcuggugucuaauggaagcuaccucaacgaaacgcacuucuccgacgauaucgagcagcaggccgacaauaugaucacagagcugcuucaaaaagaauauauggaucggcagggcaagaccccucuggggcucgucgaccuguuuguuuucucuaccagcuuuuaccugauuuccaucuuccuucaccucgugaaaauuccgacacaucgccacgugaucggaaagcccugcccuaaaccccauagacugaaccacaugggcauuuguagcugcggccuguauaagcacccugggguccccgugaaguggaaacgguga

SEQ ID NO: 5365 - RNA, 1473 nt, Artificial Sequence
  derived and/or modified protein sequence (opt5) from LASV(ISTH1064-NIG-2011;Clade II)__AIT17450__GPCstabilized
augggccagaucauuaccuucuuucaagaggugccccacgucaucgaagagguuaugaacauugugcugaucgcccucagccugcuugcuauucugaaggggaucuacaauguggccacaugcggacucuucggccuggucuccuuucuucugcucugugggagaucuugcagcacgaccuauaaaggaguguacgaacugcagacacuggagcucgacauggcgucccugaacaugaccaugccucuuucuuguacaaagaauaacagccaucacuauaucaugguuggcaaugaaaccgggcuggagcucacacugaccaacacguccauuaucaaucauaaauucugcaaccuuucugaugcucacaagaaaaaucuguacgaccaugcccucaugagcauuaucuccaccuuucaccugagcauuccgaacuucaaucaguaugaggccaugucuugugauuuuaacggaggcaagaucuccgugcaguacaaucugagccacacauaugcugucgacgccgcuaaccauugcggcaccauugccaauggggugcuccaaacauucaugcggauggcguggggaggcucuuacaucgcccuggauuccgggugcggaagcugggacuguaucaugaccucuuaccaguaucuuauuauccagaacacgacaugggaagaucacugccaguuuucccgccccagcccuauuggcuaccuggggcuccugucccaaagaacccgggacaucuauauuucucgcagacgccggggaacauucaccuggacccucagcgauuccgagggcaacgaaacacccggcggguacugucugacgcgguggaugcugaucgaggcugagcucaaaugcuuuggaaauaccgccguugcuaaguguaacgaaaaacaugacgaggaguucugcgauaugcugcgccuuuuugacuucaauaagcaggccaucagacggcugaaaacacccgcgcagaugagcauucagcucaucaacaaggccgugaaugcucugauuaacgaucaacuuaucaugaagaaucaucugcgcgacauuaugugcaucccuuauugcaacuacucuaaauauugguaccucaaucacaccgucacagggaagaccucccugcccagauguuggcuggugagcaacggaucuuaccucaaugaaacgcacuucagcgacgauaucgagcagcaggccgacaacaugauuacagagcugcuucaaaaagaauauaucgaucggcagggcaagaccccucuggggcucguggaccuguuugucuucuccaccucuuuuuaccugauuagcaucuuccuucaccucguuaaaauuccgacacaucgccacaucauuggaaagcccugcccuaaaccccauagacugaaucacaugggcaucuguuccugcggccuguauaagcacccuggggugcccgugaaguggaaacgguga

SEQ ID NO: 5366 - RNA, 1473 nt, Artificial Sequence
  derived and/or modified protein sequence (opt5) from LASV(ISTH1069-NIG-2011;Clade II)__AIT17454__GPCstabilized
augggccagaucauuaccuucuuucaagaggugccccacgucaucgaagagguuaugaacauugugcugaucgccuucagccuccuggcuauucuuaaggggaucuacaauguggccacaugcggacuguuuggccucgucuccuuccugcuucugugugggagaucuugcagcacgaccuauaaaggaguguacgaacuccagacacuggagcuggacauggcgucccucaacaugaccaugccucugucuuguacaaagaauaacagccaucacuauaucaugguuggcaaugaaaccgggcuugagcugacacucaccaacacguccauuaucaaucauaaauuuugcaaccugucugaugcucacaagcggaaucuuuacgaccaugcccugaugagcauuaucuccaccuuccaccucagcauuccgaacuuuaaucaguaugaggccaugucuugugauuucaacggaggcaaaaucuccgugcaguacaaucugagccacacauaugcugucgacgccgcuggccauugcgggaccauugccaacggagugcugcaaacauuuaugcgcauggcguggggcgggucuuacaucgcccucgauuccggaugcggcagcugggacuguaucaugaccucuuaccaguaucugauuauccagaauacgacaugggaagaucacugccaguucuccagacccagcccuauuggguaccuuggacugcucucccaacggacccgcgacaucuauauuucuagacggcgccggggcacauuuaccuggacccugagcgauuccgagggcaacgaaacacccgggggauacugucucacgcgcuggaugcugaucgaggcugagcugaagugcuucggcaacaccgccguugcuaaauguaaugaaaagcaugacgaggaauuuugcgauaugcucagacuguucgacuucaacaaacaggccauccggcgccuuaagacacccgcgcagaugagcauucagcugaucaauaaagccgugaacgcucucauuaaugaucaacugaucaugaagaaccaccuuagagacauuaugugcaucccuuauugcaauuacucuaaguauugguaccugaaccacaccaucacaggaaaaaccucccucccccgguguuggcuggucagcaauggcucuuaccugaacgaaacgcauuuuagcgacgauauugagcagcaggccgacaauaugaucacagagcuccugcaaaaggaauauauggaucgccaggggaaaaccccucuuggacugguggaccucuucguguuuuccaccucuuucuaccugauuagcaucuuucugcaccuugucaagauuccgacacauagacacaucauuggcaaacccugcccuaagccccaucggcucaaccacaugggcaucuguuccugcgggcuguauaaacacccuggaguucccgugcgcuggaagagauga

SEQ ID NO: 5367 - RNA, 1473 nt, Artificial Sequence
  derived and/or modified protein sequence (opt5) from LASV(ISTH1096-NIG-2012;Clade II)__AIT17458__GPCstabilized
augggccagaucauuaccuucuuucaagaggugccccacgucaucgaagagguuaugaacauugugcugaucgcccucagccugcuugcuauucugaaggggaucuacaauguggccacaugcggacucuucggccuggucuccuuucuucugcucugugggagaucuugcagcacgaccuauaaaggaguguacgaacugcagacacuggagcucgacauggcgucccugaacaugaccaugccucuuucuuguacaaagaauaacagccaucacuauaucaugguuggcaaugaaaccgggcuggagcucacacugaccaacacguccauuaucaaucauaaauucugcaaccuuucugaugcucacaagaaaaaucuguacgaccaugcccucaugagcauuaucuccaccuuucaccugagcauuccgaacuucaaucaguaugaggccaugucuugugauuuuaacggaggcaagaucuccgugcaguacaaucugagccacacauaugcuauugacgccgcuaaccauugcggcaccaucgccaaugggguccuccaaacauucaugcggauggcguggggaggcucuuacaucgcccuggauuccgggugcggaagcugggacuguauuaugaccacguaccaguaucuuaucauucagaacacaaccugggaagaucacugccaguuuucucgccccuccccuaucggcuaccuggggcuccugagccaaagaacacgggacauuuauaucucccgcagacgccggggaaccuucaccuggacacucucugauagcgagggcaacgaaacgcccggcggguacugucugacccgguggaugcugaucgaggcugagcucaaaugcuuuggaaauacagccguggcuaaguguaacgaaaaacaugacgaggaguucugcgauaugcugcgccuuuuugacuucaauaagcaggccauuagacggcugaaaacccccgcgcagauguccauccagcucauuaacaaggccguuaaugcucugaucaacgaucaacuuauuaugaagaaucaucugcgcgacaucaugugcaucccuuauugcaacuacagcaaauauugguaccucaaucacacagugaccgggaagacgucucugcccagauguuggcuggucuccaacggaagcuaccucaaugaaacacacuucucugacgauauugagcagcaggccgacaacaugaucaccgagcugcuucaaaaagaauauauggaucggcagggcaagaccccucuggggcucguggaccuguuuguguucagcacauccuuuuaccugauuucuaucuuccuucaccucgucaaaauuccgacccaucgccacguuaucggaaagcccugcccuaaaccccauagacugaaucacaugggcauuuguagcugcggccuguauaagcacccuggggugcccgugaaguggaaacgguga

SEQ ID NO: 5368 - RNA, 1473 nt, Artificial Sequence
  derived and/or modified protein sequence (opt5) from LASV(ISTH1107-NIG-2012;Clade II)__AIT17462__GPCstabilized
augggccagaucauuaccuucuuucaagaggugccccacgucaucgaagagguuaugaacauugugcugaucgcccucagccugcuugcuauucugaaggggaucuacaauguggccacaugcggacucuucggccuggucuccuuucuucugcucugugggagaucuugcagcacgaccuauaaaggaguguacgaacugcagacacuggagcucgacauggcgucccugaacaugaccaugccucuuucuuguacaaagaauaacagccaucacuauaucaugguuggcaaugaaaccgggcuggagcucacacugaccaacacguccauuaucaaucauaaauucugcaaccuuucugaugcucacaagaaaaaucuguacgaccaugcccucaugagcauuaucuccaccuuucaccugagcauuccgaacuucaaucaguaugaggccaugucuugugauuuuaacggaggcaagaucuccgugcaguacaaucugagccacgcuuaugccgucgacgcugccaaccauugcggcacaauugcgaauggggugcuccaaaccuucaugcggauggccuggggaggcucuuacaucgcucuggauuccgggugcggaagcugggacuguaucaugacaucuuaccaguaucuuauuauccagaacaccacgugggaagaucacugccaguuuucccgccccagcccuauuggcuaccuggggcuccugucccaaagaacacgggacaucuauauuucucgcagacgccggggaaccuucacauggacccucagcgauuccgagggcaacgaaacccccggcggguacugucugacacgguggaugcugaucgaggccgagcucaaaugcuuuggaaauacggcuguugccaaguguaacgaaaaacaugacgaggaguucugcgauaugcugcgccuuuuugacuucaauaagcaggcgaucagacggcugaaaacccccgcccagaugagcauucagcucaucaacaaggcugugaaugcccugauuaacgaucaacuuaucaugaagaaucaucugcgcgacauuaugugcaucccuuauugcaacuacucuaaauauugguaccucaaucacacagucaccgggaagacaucccugcccaaauguuggcuggugagcaacggaucuuaccucaaugaaacccacuucagcgacgauaucgagcagcaggcugacaacaugauuacggagcugcuucaaaaggaauauaucgauagacagggcaaaacaccucuggggcucguggaccuguuugucuucuccaccucuuuuuaccugauuagcaucuuccuucaccucguuaagauuccgacccaucggcacgugaucggaaaacccugcccuaagccccaucgccugaaucacaugggcauuuguuccugcggccuguauaagcacccuggggugcccgucaaauggaagagauga

SEQ ID NO: 5369 - RNA, 1473 nt, Artificial Sequence
  derived and/or modified protein sequence (opt5) from LASV(ISTH1111-NIG-2011;Clade II)__AIT17466__GPCstabilized
augggccagaucauuaccuucuuucaagaggugccccaggucaucgaagagguuaugaacauugugcugaucgcccucagccugcuugcuauucugaaggggaucuacaauguggccacaugcggacucuucggccuggucuccuuucuucugcucugugggagaucuugcagcacgaccuauaaaggaguguacgaacugcagacacuggagcucgacauggcgucccugaacaugaccaugccucuuucuuguacaaagaauaacagccaccauuauaucaugguuggcaaugaaaccgggcuggagcucacacugaccaaccaguccauuaucaaucacaaauucugcaaccuuucugaugcucauaagaaaaaucuguacgaccacgcccucaugagcauuaucuccacguuucaucugagcauuccgaacuucaaucaauaugaggccaugucuugugauuuuaacggaggcaagaucuccgugcaguacaaucugagccacaccuucgcugucgacgccgcuaaccacugcggcacaauugccaauggggugcuccagaccuuuaugcggauggcguggggaggcucuuauaucgcccuggauuccgggugcggaagcugggacuguaucaugacaucuuaccaguaccuuauuauccaaaacaccacgugggaagaucauugccaguucuccagacccagcccuauuggcuaucuggggcuccugucccagcggacacgcgacaucuacauuucuagacggcgccggggaaccuuuacauggacccucagcgauuccgagggcaacgaaacccccggcggguauugucugacacgcuggaugcugaucgaggcugagcucaagugcuucggaaauacggccguugcuaaauguaacgaaaagcacgacgaggaauuuugcgauaugcugagacuuuucgacuucaauaaacaggccauccggcgccugaagacccccgcgcaaaugagcauucagcucaucaacaaagccgugaaugcucugauuaacgaucagcuuaucaugaagaaucaucugagagacauuaugugcaucccuuacugcaacuauucuaaguacugguaucucaaucacacaaucaccgggaaaacaucccugccccgguguuggcuggucagcaacggaucuuaccucaaugaaacccacuuuagcgacgauauugagcaacaggccgacaacaugaucacggagcugcuucagaaggaauacauggaucgccagggcaaaacaccucuggggcucguggaccuguucguguuuuccaccucuuucuaucugauuagcaucuuucuucaucucgucaagauuccgacccacagacauguuaucggaaaacccugcccuaagccccaccggcugaaucauaugggcauuuguuccugcggccuguacaaacacccuggggugcccgugaaguggaagcgcuga

SEQ ID NO: 5370 - RNA, 1473 nt, Artificial Sequence
  derived and/or modified protein sequence (opt5) from LASV(ISTH1121-NIG-2012;Clade II)__AIT17470__GPCstabilized
augggccagaucauuaccuucuuucaagaggugccccacgucaucgaagagguuaugaacauugugcugaucgcccucagccugcuugcuauucugaaggggaucuacaauguggccacaugcggacucuucggccuggucuccuuucuucugcucugugggagaucuugcagcacgaccuauaaaggaguguacgaacugcagacacuggagcucgacauggcgucccugaacaugaccaugccucuuucuuguacaaagaauaacagccaucacuauaucaugguuggcaaugaaaccgggcuggagcucacacugaccaacacguccauuaucaaucauaaauucugcaaccuuucugaugcucaccggaagaaucuguacgaccaugcccucaugagcauuaucuccaccuuucaccugagcauuccgaacuucaaucaguaugaggccaugucuugugauuuuaacggaggcaaaaucuccgugcaguacaaucugagccacacauaugcugucgacgccgcuaaccauugcggcaccauugccaauggggugcuccaaacauucaugcgcauggcguggggaggcucuuacaucgcccuggauuccgggugcggaagcugggacuguaucaugaccucuuaccaguaucuuauuauccagaacacgacaugggaagaucacugccaguuuuccagacccagcccuauuggcuaccuggggcuccugucccaacggacccgcgacaucuauauuucuagacggcgccggggaacauucaccuggacccucagcgauuccgagggcaacgaaacacccggcggguacugucugacgcgcuggaugcugaucgaggcugagcucaagugcuuuggaaauaccgccguugcuaaauguaacgaaaagcaugacgaggaguucugcgauaugcugagacuuuuugacuucaauaaacaggccauccggcgccugaagacacccgcgcagaugagcauucagcucaucaacaaagccgugaaugcucugauuaacgaucaacuuaucaugaagaaucaccugagagacauuaugugcaucccuuauugcaacuacucuaaguauugguaccucaaucacaccgucacagggaaaaccucccugccccgguguuggcuggugagcaacggaucuuaccucaaugaaacgcauuucagcgacgauaucgagcagcaggccgacaacaugauuacagagcugcuucaaaaggaauauaucgaucgccagggcaaaaccccucuggggcucguggaccuguuugucuucuccaccucuuuuuaccugauuagcaucuuccuucaccucguuaagauuccgacacauagacacgugaucggaaaacccugcccuaagccccaucggcugaaucacaugggcauuuguuccugcggccuguauaaacacccuggggugcccgucaaguggaagcgcuga

SEQ ID NO: 5371 - RNA, 1473 nt, Artificial Sequence
  derived and/or modified protein sequence (opt5) from LASV(ISTH1129-NIG-2012;Clade II)__AIT17474__GPCstabilized
augggccagaucauuaccuucuuucaagaggugccccacgucaucgaagagguuaugaacauugugcugaucgcccucagccugcuugcuauucugaaggggaucuacaauguggccacaugcggacucuucggccuggucuccuuucuucugcucugugggagaucuugcagcacgaccuauaaaggaguguacgaacugcagacacuggagcucgacauggcgucccugaacaugaccaugccucuuucuuguacaaagaauaacagccaucacuauaucaugguuggcaaugaaaccgggcuggagcucacacugaccaacacguccauuaucaaucauaaauucugcaaccuuucugaugcucacaagaaaaaucuguacgaccaugcccucaugagcauuaucuccaccuuucaccugagcauuccgaacuucaaucaguaugaggccaugucuugugauuuuaacggaggcaagaucuccauucaguacaaucugagccacacauaugcuguggacgccgcuaaccauugcggcaccaucgccaaugggguccuccaaacauucaugcggauggcguggggaggcucuuacaucgcccuggauuccgggugcggaagcugggacuguauuaugaccucuuaccaguaucuuaucauucagaacacgacaugggaagaucacugccaguuuucccgccccagcccuaucggcuaccuggggcuccugucccaaagaacccgggacauuuauaucucucgcagacgccggggaacauucaccuggacccucagcgauuccgagggcaacgaaacacccggcggguacugucugacgcgguggaugcugaucgaggcugagcucaaaugcuuuggaaauaccgccguggcuaaguguaacgaaaaacaugacgaggaguucugcgauaugcugcgccuuuuugacuucaauaagcaggccauuagacggcugaaaacacccgcgcagaugagcauccagcucauuaacaaggccguuaaugcucugaucaacgaucaacuuauuaugaagaaucaucugcgcgacaucaugugcaucccuuauugcaacuacucuaaauauugguaccucaaucacaccauuacagggaagaccucccugcccagauguuggcuggugagcaacggaucuuaccucaaugaaacgcacuucagcgacgauaucgagcagcaggccgacaacaugauuacagagcugcuucaaaaagaauauaucgaucggcagggcaagaccccucuggggcucgucgaccuguuuguguucuccaccucuuuuuaccugauuagcaucuuccuucaccucgugaaaauuccgacacaucgccacaucaccggaaagcccugcccuaaaccccauagacugaaucacaugggcaucuguuccugcggccuguauaagcacccugggguccccguucgguggaagcgcuga

SEQ ID NO: 5372 - RNA, 1473 nt, Artificial Sequence
  derived and/or modified protein sequence (opt5) from LASV(ISTH1137-NIG-2011;Clade II)__AIT17478__GPCstabilized
augggccagaucauuaccuucuuucaagaggugccccacgucaucgaagagguuaugaacauugugcugaucgcccucagccugcuugcuauucugaaggggaucuacaauguggccacaugcggacucuucggccuggucuccuuucuucugcucugugggagaucuugcagcacgaccuauaaaggaguguacgaacugcagacacuggagcucgacauggcgucccugaacaugaccaugccucuuucuuguacaaagaauaacagccaucacuauaucaugguuggcaaugaaaccgggcuggagcucacacugaccaacacguccauuaucaaucauaaauucugcaaccuuucugaugcucacaagaaaaaucuguacgaccaugcccucaugagcauuaucuccaccuuucaccugagcauuccgaacuucaaucaguaugaggccaugucuugugauuuuaacggaggcaagaucuccgugcaguacaaucugagccacacauaugcugucgacgccgcugaucauugcggcaccauugccaacggggugcuccaaacauucaugcggauggcguggggaggcucuuacaucgcccuggacuccgggugcggaagcugggauuguaucaugaccucuuaccaguaucuuauuauccagaauacgacaugggaagaccacugccaguuuucccgccccagcccuauuggcuaccuggggcuccugucccaaagaacccgggauaucuauauuucucgcagacgccggggaacauucaccuggacccucagcgacuccgagggcaacgaaacacccggcggguacugucugacgcgguggaugcugaucgaggcugagcucaaaugcuuuggaaacaccgccguugcuaaguguaaugaaaaacaugaugaggaguucugcgacaugcugcgccuuuuugauuucaacaagcaggccaucagcagacugaaaacacccgcgcagaugucuauucagcucaucaauaaggccgugaacgcucugauuaaugaccaacuuaucaugaagaaccaucugcgggacauuaugugcaucccuuauugcaauuacuccaaauauugguaccucaaccacaccgucacagggaagaccagccugccccgcuguuggcuggugucuaauggaagcuaccucaacgaaacgcacuucuccgaugacaucgagcagcaggccgauaauaugauuacagagaugcugcaaaaagaauauaucgacagacagggcaagaccccucuugggcugguggaucucuuugucuucucuaccagcuuuuaccugauuuccaucuuccugcaccuuguuaaaauuccgacacaucggcacgugaucggaaagcccugcccuaaaccccaucgccucaaccacaugggcauuuguagcugcggccuguauaagcacccuggggugcccgucaaguggaaaagauga

SEQ ID NO: 5373 - RNA, 1473 nt, Artificial Sequence
  derived and/or modified protein sequence (opt5) from LASV(ISTH2010-NIG-2012;Clade II)__AIT17482__GPCstabilized
augggccagaucauuaccuucuuucaagaggugccccacgucaucgaagagguuaugaacauugugcugaucgcccucagccugcuugcuauucugaaggggaucuacaauguggccacaugcggacucuucggccuggucuccuuucuucugcucugugggagaucuugcagcacgaccuauaaaggaguguacgaacugcagacacuggagcucgacauggcgucccugaacaugaccaugccucuuucuuguacaaagaauaacagccaucacuauaucaugguuggcaaugaaaccgggcuggagcucacacugaccaacacguccauuaucaaucauaaauucugcaaccuuucugaugcucacaagaaaaaucuguacgaccaugcccucaugagcauuaucuccaccuuucaccugagcauuccgaacuucaaucaguaugaggccaugucuugugauuuuaacggaggcaagaucuccgugcaguacaaucugagccacgcuuaugccgucgacgcugccaaccauugcggcacaauugcgaauggggugcuccaaaccuucaugcggauggccuggggaggcucuuacaucgcucuggauuccgggugcggaagcugggacuguaucaugacaucuuaccaguaucuuauuauccagaacauuaccugggaagaucacugccaguuuucccgccccagcccuaucggcuaccuggggcuccugucccaaagaacgcgggacauuuauaucucucgcagacgccggggaacauucaccuggacacucagcgauuccgagggcaacgaaacccccggcggguacugucugacccgguggaugcugaucgaggccgagcucaaaugcuuuggaaauacagcuguugccaaguguaacgaaaaacaugacgaggaguucugcgauaugcugcgccuuuuugacuucaauaagcaggcgauuagacggcugaaaacgcccgcccagaugagcauccagcucauuaacaaggcugugaaugcccugaucaacgaucaacuuauuaugaagaaucaucugcgcgacaucaugugcaucccuuauugcaacuacucuaaauauugguaccucaaucacaccgucacagggaagaccucccugcccagauguuggcuggugagcaacggaucuuaccucaaugaaacacacuucagcgacgauauugagcagcaggcugacaacaugaucaccgagcugcuucaaaaagaauauauugaucggcagggcaagacgccucuggggcucguggaccuguuugucuucuccacaucuuuuuaccugaucagcauuuuccuucaccucguuaaaaucccgacccaucgccacguggugggaaagcccugcccuaaaccccauagacugaaucacaugggcauuuguuccugcggccuguauaagcacccugggguccccgugaaguggaaacgguga

SEQ ID NO: 5374 - RNA, 1473 nt, Artificial Sequence
  derived and/or modified protein sequence (opt5) from LASV(ISTH2016-NIG-2012;Clade II)__AIT17486__GPCstabilized
augggccagaucauuaccuucuuucaagaggugccccacgucaucgaagagguuaugaacauugugcugaucgcccucagccugcuugcuauucugaaggggaucuacaauguggccacaugcggacucuucggccuggucuccuuucuucugcucugugggagaucuugcagcacgaccuauaaaggaguguacgaacugcagacacuggagcucgacauggcgucccugaacaugaccaugccucuuucuuguacaaagaauaacagccaucacuauaucaugguuggcaaugaaaccgggcuggagcucacacugaccaacacguccauuaucaaucauaaauucugcaaccuuucugaugcucacaagaaaaaucuguacgaccaugcccucaugagcauuaucuccaccuuucaccugagcauuccgaacuucaaucaguaugaggccaugucuugugauuuuaacggaggcaagaucuccgugcaguacaaucugagccacacauaugcugucgacgccgcuaaccauugcggcaccauugccaauggggugcuccaaacauucaugcggauggcguggggaggcucuuacaucgcccuggauuccgggugcggaagcugggacuguaucaugaccucuuaccaguaucuuauuauccagaacacgacaugggaagaucacugccaguuuucccgccccagcccuguuggcuaccuggggcuccugucccaaagaacccgggacauuuauaucucucgcagacgccggggaacauucaccuggacccucagcgauuccgagggcaacgaaacacccggcggguacugucugacgcgguggaugcugauugaggcugagcucaaaugcuuuggaaauaccgccguggcuaaguguaacgaaaaacaugacgaggaguucugcgauaugcugcgccuuuuugacuucaauaagcaggccaucagacggcugaaaacacccgcgcagaugagcauccagcucauuaacaaggccgucaaugcucugaucaacgaucaacuuauuaugaagaaucaucugcgcgacaucaugugcauuccuuauugcaacuacucuaaauauugguaccucaaucacaccgugacagggaagaccucccugcccagauguuggcuggugagcaacggaucuuaccucaaugaaacgcacuucagcgacgauaucgagcagcaggccgacaacaugaucacagagcugcuucaaaaagaauauauugaucggcagggcaagaccccucuggggcucgucgaccuguuuguuuucuccaccucuuuuuaccugaucagcauuuuccuucaccucgugaaaaucccgacacaucgccacgugauuggaaagcccugcccuaaaccccauagacugaaucacaugggcaucuguuccugcggccuguauaagcacccugggguccccgugaaguggaaacgguga

SEQ ID NO: 5375 - RNA, 1473 nt, Artificial Sequence
  derived and/or modified protein sequence (opt5) from LASV(ISTH2020-NIG-2012;Clade II)__AIT17490__GPCstabilized
augggccagaucauuaccuucuuucaagaggugccccacgucaucgaagagguuaugaacauugugcugaucacacucagccugcuugccauucugaaggggaucuacaauguggcuacgugcggacucuucggccuggucuccuuucuucugcucugugggagaucuugcagcaccacauauaaaggaguguacgaacugcagacccuggagcucgacauggccaaccugaauaugacaaugccucuuuccuguaccaagaacaauucucaucacuauaucaugguuggcaacgaaacagggcuggagcucacccugacgaauaccagcauuaucaaccauaaauucugcaaucuuuccgaugcgcacaagaaaaaccuguacgaccaugcucucaugucuauuaucagcacauuucaccuguccauuccgaauuucaaccaguaugaggccaugagcugugauuuuaauggaggcaagaucucugugcaguacaaccugucccacaccuucgccgucgacgcugccaaucauugcggcacaauugcuaacggggugcuccaaaccuuuaugcggauggccuggggaggcagcuauaucgcgcuggauucugggugcggauccugggacuguaucaugacgagcuaccaguaccuuauuauccagaacacaaccugggaagaucacugccaguucucucgccccuccccuauuggcuaucuggggcuccugagccaaagaacacgggacaucuacauuucccgcagacgccggggaaccuuuaccuggacacucucugauagcgagggcaaugaaacgcccggcggguauugucugacccgguggaugcugaucgaggccgagcucaaaugcuucggaaacacagcuguugccaaguguaaugaaaaacaugacgaggaauuuugcgauaugcugcgccuuuucgacuucaacaagcaggcuaucagacggcugaaaacccccgcccagauguccauucagcucaucaauaaggcggugaacgcccugauuaaugaucaacuuaucaugaagaaccaucugcgcgacauuaugugcaucccuuacugcaauuauagcaaauacugguaucucaaccacacagucaccgggaagacgucucugcccagauguuggcugguguccaauggaagcuaccucaacgaaacacacuuuucugacgauaucgagcagcaggcugacaauaugauuaccgagcugcuucaaaaagaauacauggaucggcagggcaagaccccucuggggcucguggaccuguucgucuuuagcacauccuucuaucugaucucuauuuuucuucaccucguuaaaaucccgacccaucgccacauuaucggaaagcccugcccuaaaccccauagacugaaccacaugggcauuuguagcugcggccuguacaagcacccuggggugcccgugaaguggaaacgguga

SEQ ID NO: 5376 - RNA, 1473 nt, Artificial Sequence
  derived and/or modified protein sequence (opt5) from LASV(ISTH2025-NIG-2012;Clade II)__AIT17494__GPCstabilized
augggccagaucauuaccuucuuucaagaggugccccacgucaucgaagagguuaugaacauugugcugaucgcccucagccugcuugcuauucugaaggggguguacaaugucgccacaugcggacucuucggccugguguccuuucuucugcucugugggagaucuugcagcacgaucuauaaaggaguuuacgaacugcagacccuggagcucgacauggcgucccugaacaugacaaugccucuuucuuguaccaagaauaacagccaucacuauaucauggugggcaaugaaacagggcuggagcucacccugacaaacaccuccauuaucaaucauaaauucugcaaccuuucugaugcucacaagaaaaaucuguacgaccaugcccucaugagcauuaucuccacguuucaccugagcauuccgaacuucaaucaguaugaggccaugucuugugauuuuaacggaggcaagaucuccguccaguacaaucugagccacaccuaugcuguggacgccgcuaaccauugcggcacaauugccaaugggguucuccaaaccuucaugcggauggcguggggaggcucuuacaucgcccuggauuccgggugcggaagcugggacuguaucaugacaucuuaccaguaucuuauuauccagaacaccuccugggaagaucacugccaguuuagccgccccuccccuauuggcuaccuggggcuccugucucaaagaacgcgggacaucuauauuagccgcagacgccggggaacauucaccuggacacucuccgauagcgagggcaacgaaacccccggcggguacugucugacccgguggaugcugaucgaggcugagcucaaaugcuuuggaaauacagccguggcuaaguguaacgaaaaacaugacgaggaguucugcgauaugcugcgccuuuuugacuucaauaagcaggccaucagacggcugaaaacgcccgcgcagaugucuauucagcucaucaacaaggccgucaaugcucugauuaacgaucaacuuaucaugaagaaucaucugcgcgacauuaugugcaucccuuauugcaacuacuccaaauauugguaccucaaucacaccgugacagggaagaccagccugcccagauguuggcuggugucuaacggaagcuaccucaaugaaacacacuucuccgacgauaucgagcagcaggccgacaacaugauuaccgagcugcuucaaaaagaauauaucgaucggcagggcaagacgccucuggggcucgucgaccuguuuguuuucucuaccagcuuuuaccugauuuccaucuuccuucaccucgugaaaauuccgacacaucgccacgugaucggaaagcccugcccuaaaccccauagacugaaucacaugggcauuuguagcugcggccuguauaagcacccugggguccccgugaaguggaaacgguga

SEQ ID NO: 5377 - RNA, 1473 nt, Artificial Sequence
  derived and/or modified protein sequence (opt5) from LASV(ISTH2031-NIG-2012;Clade II)__AIT17498__GPCstabilized
augggccagaucauuaccuucuuucaagaggugccccacgucaucgaagagguuaugaacauugugcugaucgcccucagccugcuugcuauucugaaggggaucuacaauguggccacaugcggacucuucggccuggucuccuuucuucugcucugugggagaucuugcagcacgaccuauaaaggaguguacgaacugcagacacuggagcucgacauggcgucccugaacaugaccaugccucuuucuuguacaaagaauaacagccaucacuauaucaugguuggcaaugaaaccgggcuggagcucacacugaccaacacguccauuaucaaucauaaauucugcaaccuuucugaugcucacaagaaaaaucuguacgaccaugcccucaugagcauuaucuccaccuuucaccugagcauuccgaacuucaaucaguaugaggccaugucuugugauuuuaacggaggcaagaucuccgugcaguacaaucugagccacacauaugcugucgacgccgcuaaccauugcggcaccauugccaauggggugcuccaaacauucaugcggauggcguggggaggcucuuacaucgcccuggauuccgggugcggaaacugggacuguaucaugaccagcuaccaguaucuuauuauccagaacacgacaugggaagaucacugccaguuuucucgccccuccccuauuggcuaccuggggcuccugagccaaagaacccgggacaucuauauuucccgcagacgccggggaacauucaccuggacccucucugauagcgagggcaaugaaacacccggcggguacugucugacgcgguggaugcugaucgagaccgagcucaaaugcuuuggaaacacagcuguugccaaguguaaugaaaaacaugacgaggaguucugcgauaugcugcgccuuuuugacuucaacaagcaggcuaucuccagacugcggagccccgcccagaugucuauucagcucaucaauaaagcggugaacgcccugauuaaugaucaacuuaucaugaagaaccaucugcgcgacauuaugugcaucccuuauugcaauuacuccaaguauugguaccucaaccacaccgucacagggaaaaccagccugcccaaguguuggcuggugucuaauggaagcuaccucaacgaaacgcacuucuccgacgauaucgagcagcaggcugacaauaugauuacagagaugcugcaaaaagaauauaucgauagacagggcaagaccccucuugggcugguggaccucuuugucuucucuaccagcuuuuaccugauuuccaucuuccugcaccuuguuaaaauuccgacacaucggcacaucaccggaaagcccugcccuaaaccccaucgccucaaccacaugggcauuuguagcugcggccuguauaagcacccuggggugcccgugaaguggaaaagauga

SEQ ID NO: 5378 - RNA, 1473 nt, Artificial Sequence
  derived and/or modified protein sequence (opt5) from LASV(ISTH2037-NIG-2012;Clade II)__AIT17502__GPCstabilized
augggccagaucauuaccuucuuucaagagaucccccacgugauugaagaggucaugaacaucguucugauuacacucagccugcuugccauccugaaggggaucuacaauguggcuacgugcggacucuucggccugguguccuuucuucugcucugugggaaaucuugcagcaccacauauaagggagucuacgaacugcagacccuggagcucgacauggccucccugaacaugacaaugccucuuucuuguaccaaaaauaacagccaucacuauauuauggugggcaaugaaacagggcuggagcucacccugacgaacaccuccaucauuaaucauaaguucugcaaccuuucugaugcgcaccggaaaaaucuguacgaccauacacucaugagcaucauuuccaccuuucaccugagcaucccgaacuucaaucaguaugaggcuaugucuugugauuuuaacggaggcaagauuuccguucaguacaaucugagccacgccuaugccaucgacgcugccacacauugcggcaccaucgcuaacggggugcuccaaacguucaugagaauggccuggggaggcucuuacauugcgcuggauuccgggugcggaggcugggacuguaucaugacaagcuaccaguaucuuauuauccagaauaccacaugggaagaucacugccaguuuucucgccccuccccuauuggguaccugggacuccugagccaaagaacccgggacaucuauaucucccgcagacgccggggcaccuucacauggacgcucucugauagcgagggcaacgaaacccccgggggauacugucugacacgguggaugcugauugaggccgagcucaaaugcuuuggcaacaccgcugucgccaaguguaaugaaaaacaugacgaggaguucugcgauaugcugcgccuuuuugacuucaacaagcaggcuaucagacggcugaaaacacccgcccagauguccauucagcucaucaauaaggcggugaacgcccugauuaaugaucaacuuaucaugcgcaaccaccugagagacaucaugugcauuccuuauugcaauuacagcaaguauugguaccucaaccacaccguuacgggaaaaacaucucugcccaaguguuggcugguguccaauggcagcuaccucaacgaaacccauuucucugacgauaucgagcagcaggcugacaauaugauuaccgagcugcuucaaaaagaauauauggaucggcaggggaagacaccucugggacucgucgaccuguuuguguucagcaccuccuuuuaccugaucucuauuuuccuucaccucgugaaaaucccgacacaucgccacgucauuggcaagcccugcccuaaaccccauagacugaaccacaugggcguuuguagcugcgggcuguauaagcacccuggagugcccgugaaguggaaacgguga

SEQ ID NO: 5379 - RNA, 1473 nt, Artificial Sequence
  derived and/or modified protein sequence (opt5) from LASV(ISTH2042-NIG-2012;Clade II)__AIT17506__GPCstabilized
augggccagaucauuaccuucuuucaagaggugccccacgucaucgaagagguuaugaacauugugcugaucgcccucagccugcuugcuauucugaaggggaucuacaauguggccacaugcggacucuucggccuggucuccuuucuucugcucugugggagaucuugcagcacgaccuauaaaggaguguacgaacugcagacacuggagcucgacauggcgucccugaacaugaccaugccucuuucuuguacaaagaauaacagccaucacuauaucaugguuggcaaugaaaccgggcuggagcucacacugaccaacacguccauuaucaaucauaaauucugcaaccuuucugaugcucacaagaaaaaucuguacgaccaugcccucaugagcauuaucuccaccuuucaccugagcauuccgaacuucaaucaguaugaggccaugucuugugauuuuaacggaggcaagaucuccgugcaguacaaucugagccacgcuuaugccgucgacgcugccgaacauugcggcacaauugcgaacggggugcuccaaaccuucaugcggauggccuggggaggcucuuacaucgcucuggauuccgggugcggaagcugggacuguguuaugacaucuuaccaguaucuuaucauucagaauaccacgugggaggaucacugccaguuuucccgccccagcccuaucggcuaccuggggcuccugucccaaagaacacgggacauuuauaucucucgcagacgccggggaaccuucacauggacccucagcgauuccgaaggcaacgagacccccggcggguacugucugacacgguggaugcugauugaggccgaacucaaaugcuuuggaaacacggcuguggccaaguguaaugagaaacaugacgaagaguucugcgauaugcugcgccuuuuugacuucaacaagcaggcgaucgaaagacugaaaacccccgcccagaugagcauccagcucauuaauaaggcugucaacgcccugaucaaugaucaacuuauuaugaagaaccaucugcgggacaucaugugcauuccuuauugcaauuacucuaaauauugguaccucaaccacacagugaccgggaagacaucccugccccgcuguuggcuggugagcaauggaucuuaccucaacgagacccacuucagcgacgauaucgaacagcaggcugacaauaugaucacggagaugcugcaaaaagaauauauugauagacagggcaagacaccucuugggcuggucgaccucuuuguuuucuccaccucuuuuuaccugaucagcauuuuccugcaccuugugaaaaucccgacccaucggcacgugauuggaaagcccugcccuaaaccccaucgccucaaccacaugggcaucuguuccugcggccuguauaagcacccugggguccccgugaaguggaaaagauga

SEQ ID NO: 5380 - RNA, 1473 nt, Artificial Sequence
  derived and/or modified protein sequence (opt5) from LASV(ISTH2046-NIG-2012;Clade II)__AIT17510__GPCstabilized
augggccagaucauuaccuucuuucaagaggugccccacgucaucgaagagguuaugaacauugugcugaucgcccucagccugcuugcuauucugaaggggaucuacaauguggccacaugcggacucuucggccuggucuccuuucuucugcucugugggagaucuugcagcacgaccuauaaaggaguguacgaacugcagacacuggagcucgacauggcgucccugaacaugaccaugccucuuucuuguacaaagaauaacagccaucacuauaucaugguuggcaaugaaaccgggcuggagcucacacugaccaacacguccauuaucaaucauaaauucugcaaccuuucugaugcucacaagaaaaaucuguacgaccaugcccucaugagcauuaucuccaccuuucaccugagcauuccgaacuucaaucaguaugaggccaugucuugugauuuuaacggaggcaagaucuccgugcaguacaaucugagccacacauaugcugucgacgccgcuaaccauugcggcaccauugccaauggggugcuccaaacauucaugcggauggcguggggaggcucuuacaucgcccuggauuccgggugcggaagcugggacuguaucaugaccucuuaccaguaucuuauuauccagaacacgacaugggaagaucacugccaguuuucccgccccagcccuauuggcuaccuggggcuccugucccaaagaaccaaagacaucuauauuucucggcgccgccggggaacauucaccuggacccucagcgauuccgagggcaacgaaacacccggcggguacugucugacgagauggaugcugaucgaggcugagcucaagugcuuuggaaauaccgccguugcuaaauguaacgaaaagcaugacgaggaguucugcgauaugcugcggcuuuuugacuucaauaaacaggccauccgcagacugaagacacccgcgcagaugagcauucagcucaucaacaaggccgugaaugcucugauuaacgaucaacuuaucaugaaaaaucaucugcgggacauuaugugcaucccuuauugcaacuacucuaaguauugguaccucaaucacaccgucacagggaaaaccucccugccccgcuguuggcuggugagcaacggaucuuaccucaaugaaacgcacuucagcgacgauaucgagcagcaggccgacaacaugauuacagagcugcuucaaaaggaauauaucgauagacagggcaaaaccccucuggggcucguggaccuguuugucuucuccaccucuuuuuaccugauuagcaucuuccuucaccucguuaagauuccgacacaucggcacgugaucggaaaacccugcccuaagccccaucgccugaaucacaugggcauuuguuccugcggccuguauaagcacccuggggugcccgucaaauggaagagauga

SEQ ID NO: 5381 - RNA, 1473 nt, Artificial Sequence
  derived and/or modified protein sequence (opt5) from LASV(ISTH2050-NIG-2012;Clade II)__AIT17514__GPCstabilized
augggccagaucauuaccuucuuucaagaggugccccacgucaucgaagagguuaugaacauugugcugaucgcccucagccugcuugcugugcugaaggggauuuacaaugucgccacaugcggacucuucggccugguguccuuucuucugcucugugggagaucuugcagcacgaccuauaaaggaguuuacgaacugcagacacuggagcucgacauggcgucccugaacaugaccaugccucuuucuuguacaaagaauaacagccaucacuauaucauggugggcaaugaaaccgggcuggagcucacacugaccaacacguccaucauuaaucauaaauucugcaaccuuucugaugcucacaagaaaaaucuguacgaccaugcccucaugagcaucauuuccaccuuucaccugagcaucccgaacuucaaucaguaugaggccaugucuugugauuuuaacggaggcaagauuuccguccaguacaaucugagccacacauaugcuguggacgccgcuaaccauugcggcaccaucgccaaugggguucuccaaacauucaugcggauggcguggggaggcucuuacauugcccuggauuccgggugcggaagcugggacuguaucaugaccucuuaccaguaucuuaucauucagaacacgacaugggaagaucacugccaguuuucccgccccagcccuaucggcuaccuggggcuccugucccaaagaacccgggacauuuauaucucucgcagacgccggggaacauucaccuggacccucagcgauuccgagggcaacgaaacacccggcggguacugucugacgcgguggaugcugauugaggcugagcucaaaugcuuuggaaauaccgccguggcuaaguguaacgaaaaacaugacgaggaguucugcgauaugcugcgccuuuuugacuucaauaagcaggccaucagacggcugaaaacacccgcgcagaugagcauccagcucauuaacaaggccgucaaugcucugaucaacgaucaacuuauuaugaagaaucaucugcgcgacaucaugugcauuccuuauugcaacuacucuaaauauugguaccucaaucacaccgugacagggaagaccucccugcccagauguuggcuggugagcaacggaucuuaccucaaugaaacgcacuucagcgacgauaucgagcagcaggccgacaacaugaucacagagcugcuucaaaaagaauauauugaucggcagggcaagaccccucuggggcucgucgaccuguuuguuuucuccaccucuuuuuaccugaucagcauuuuccuucaccucgugaaaaucccgacacaucgccacgugauuggaaagcccugcccuaaaccccauagacugaaucacaugggcaucuguuccugcggccuguaucggcacccugggguccccgugaaguggaagcgcuga

SEQ ID NO: 5382 - RNA, 1473 nt, Artificial Sequence
  derived and/or modified protein sequence (opt5) from LASV(ISTH2057-NIG-2012;Clade II)__AIT17518__GPCstabilized
augggccagaucauuaccuucuuucaagaggugccccacgucaucgaagagguuaugaacauugugcugaucgcccucagccugcuugcuauucugaaggggaucuacaauguggccacaugcggacucuucggccuggucuccuuucuucugcucugugggagaucuugcagcacgaccuauaaaggaguguacgaacugcagacacuggagcucgacauggcgucccugaacaugaccaugccucuuucuuguacaaagaauaacagccaucacuauaucaugguuggcaaugaaaccgggcuggagcucacacugaccaacacguccauuaucaaucauaaauucugcaaccuuucugaugcucacaagaaaaaucuguacgaccaugcccucaugagcauuaucuccaccuuucaccugagcauuccgaacuucaaucaguaugaggccaugucuugugauuuuaacggaggcaagaucuccgugcaguacaaucugagccacgcuuaugccgucgacgcugccaaccauugcggcacaauugcgaauggggugcuccaaaccuucaugcggauggccuggggaggcucuuacaucgcucuggauuccgggugcggaagcugggacuguaucaugacaucuuaccaguaucuuauuauccagaacaccacgugggaagaucacugccaguuuucccgccccagcccuauuggcuaccuggggcuccugucccaaagaacacgggacaucuauauuucucgcagacgccggggaaccuucacauggacccucagcgauuccgagggcaacgaaacccccggcggguacugucugacacgguggaugcugaucgaggccgagcucaaaugcuuuggaaauacggcuguugccaaguguaacgaaaaacaugacgaggaguucugcgauaugcugcgccuuuuugacuucaauaagcaggcgaucagacggcugaaaacccccgcccagaugagcauucagcucaucaacaaggcugugaaugcccugauuaacgaucaacuuaucaugaagaaucaucugcgcgacauuaugugcaucccuuauugcaacuacucuaaauauugguaccucaaucacacagucaccgggaagacaucccugcccagauguuggcuggugagcaacggaucuuaccucaaugaaacccacuucagcgacgauaucgagcagcaggcugacaacaugauuacggagcugcuucaaaaagaauauauggaucggcagggcaagacaccucuggggcucguggaccuguuugucuucuccaccucuuuuuaccugaucagcauuuuccuucaccucguuaaaaucccgacccaucgccacgugauuggaaagcccugcccuaaaccccauagacugaaucacaugggcaucuguuccugcggccuguauaagcacccuggggugcccgucaaguggaaacgguga

SEQ ID NO: 5383 - RNA, 1473 nt, Artificial Sequence
  derived and/or modified protein sequence (opt5) from LASV(ISTH2064-NIG-2012;Clade II)__AIT17524__GPCstabilized
augggccagaucauuaccuucuuucaagaggugccccacgucaucgaagagguuaugaacauugugcugaucgcccucagccugcuugcuauucugaaggggaucuacaauguggccacaugcggacucuucggccuggucuccuuucuucugcucugugggagaucuugcagcacgaccuauaaaggaguguacgaacugcagacacuggagcucgacauggcgucccugaacaugaccaugccucuuucuuguacaaagaauaacagccaucacuauaucaugguuggcaaugaaaccgggcuggagcucacacugaccaacacguccauuaucaaucauaaauucugcaaccuuucugaugcucacaagaaaaaucuguacgaccaugcccucaugagcauuaucuccaccuuucaccugagcauuccgaacuucaaucaguaugaggccaugucuugugauuuuaacggaggcaagaucuccgugcaguacaaucugagccacacauaugcuauugacgccgcuaaccauugcggcaccaucgccaaugggguccuccaaacauucaugcggauggcguggggaggcucuuacaucgcccuggauuccgggugcggaagcugggacuguauuaugaccucuuaccaguaucuuaucauucagaacacgacaugggaagaucacugccaguuuucccgccccagcccuaucggcuaccuggggcuccugucccaaagaacccgggacauuuauaucucucgcagacgccggggaacauucaccuggacccucagcgauuccgagggcaacgaaacacccggcggguacugucugacgcgguggaugcugaucgaggcugagcucaaaugcuuuggaaauaccgccguggcuaaguguaacgaaaaacaugacgaggaguucugcgauaugcugcgccuuuuugacuucaauaagcaggccauuagacggcugaaaacacccgcgcagaugagcauccagcucauuaacaaggccguuaaugcucugaucaacgaucaacuuauuaugaagaaucaucugcgcgacaucaugugcaucccuuauugcaacuacucuaaauauugguaccucaaucacaccgugacagggaagaccucccugcccagauguuggcuggucagcaacggaucuuaccucaaugaaacgcacuucagcgacgauauugagcagcaggccgacaacaugaucacagagaugcugcaaaaagaauauauggaucggcagggcaagaccccucuugggcugguggaccucuuuguguucuccaccucuuuuuaccugauuagcaucuuccugcaccuugucaaaauuccgacacaucgccacguuaucggaaagcccugcccuaaaccccauagacucaaucacaugggcauuuguuccugcggccuguauaagcacccuggggugcccgugaaguggaaacgguga

SEQ ID NO: 5384 - RNA, 1473 nt, Artificial Sequence
  derived and/or modified protein sequence (opt5) from LASV(ISTH2065-NIG-2012;Clade II)__AIT17528__GPCstabilized
augggacagaucauuaccuucuuucaagaggugccccacgucaucgaagagguuaugaacauugugcugaucgcccucagccugcuugcuaugcugaaggggauuuacaauaucgccacaugcggacucuucggccugaucuccuuucuucugcucugugggagaucuugcagcacgaccuauaaaggaguguacgaacugcaggcgcuggagcucgacauggcuaaccugaauaugacaaugccucuuuccuguaccaagaacaauucucaucacuauauuauggucggcaacgaaacagggcuggagcucacccugacaaauaccagcaucauuaaccauaaauucugcaaucuuuccgaugcccacaagaaaaaccuguacgaccaugcccucaugucuaucauuagcacguuucaccuguccaucccgaauuucaaccaguaugaggcuaugagcugugauuuuaauggaggcaagauuucugugcaguacaaccugucccacaccuaugccggcgacgcugccaagcauugcgggacaaucgcgaauggaguucuccaaaccuucaugcggauggccuggggcgggagcuacaucgcucuggauucuggaugcggcaacugggacuguauuaugacauccuaccaguaucuuaucauucagaacaccacgugggaagaucacugccaguuuagccgccccucuccuaucggguaccugggacuccugucccaaagaacacgggacauuuauaucagccgcagacgccggggcaccuucacauggacccucuccgauucugagggcaaugaaacccccgggggauacugucugacacgguggaugcugaucgaggccgagcucaagugcuuuggcaacacggcuguggccaaauguaaugaaaagcaugacgaggaguucugcgauaugcugcgccuuuuugacuucaacaaacaggcgauuagacggcugaagacccccgcccagaugagcauccagcucauuaauaaggcugucaacgcccugaucaaugaucaacuuauuaugaaaaaccaucugcgcgacaucaugugcaucccuuauugcaauuacuccaaguauugguaccucaaccacagcgugacaggaagaaccucucugccccgguguuggcugguuuccaauggcagcuaccucaacgaaacacaguucucugacgauauugagcagcaagcugacaauaugaucaccgagaugcugcagaaagaauauauugaucgccaggggaagacgccucuuggacugguggaccucuuugucuucagcacauccuuuuaccugaucucuauuuuccugcaccuuaucaaaauuccgacccacagacauaucgugggcaagcccugcccuaaaccccaccggcucaaccauaugggcaucuguagcugcgggcuguauaagcacccuggcauucccgugaaguggaaacgcuga

SEQ ID NO: 5385 - RNA, 1473 nt, Artificial Sequence
  derived and/or modified protein sequence (opt5) from LASV(ISTH2094-NIG-2012;Clade II)__AIT17538__GPCstabilized
augggccagaucauuaccuucuuucaagaggugccccacgucaucgaagagguuaugaacauugugcugaucgcccucagccugcuugcuauucugaaggggaucuacaauaucgccacaugcggacucuucggccugauuuccuuucuucugcucugugggagaucuugcagcacgaccuauaaaggaguguacgaacugcagacacuggagcucgacauggcgaaccugaauaugaccaugccucuuuccuguacaaagaacaauucucaucacuauaucauggucggcaacgaaaccgggcuggagcucacacugaccaauacgagcauuaucaaccauaaauucugcaaucuuuccgaugcucacaagaaaaaccuguacgaccaugcccucaugucuauuaucagcaccuuucaccuguccauuccgaauuucaaccaguaugaggccaugagcugugauuuuaaugaaggaaagaucucugugcaguacaaccugucccacagcuaugcuaucgacgccgcuggccauugcggcacaauugccaaugggguucuccaaaccuucaugcggauggcguggggaggcucuuacaucgcccuggauuccgggugcggaaacugggacuguauuaugacaagcuaccaguaucuuaucauucagaacaccacgugggaggaucacugccaguuuucucgccccuccccuaucggcuaccuggggcuccugagccaaagaacacgggacaucuauauuucccgcagacgccggggaaccuucacauggacccucucugauagcgaaggcaaugaggcucccggcggguacugucugacccgguggaugcugaucgaggccgaacucaaaugcuuuggaaacacagcuauugccaaguguaaugagaaacaugacgaagaguucugcgauaugcugcgccuuuuugacuucaacaagcaggcgaucaaaagacugaaggcccccgcucagauguccauucaccucaucaauaaggccgugaacgcucugaucaaugaucagcuuauuaugaaaaaccaucugcgggacaucaugugcauuccuuauugcaauuacagcaaguauugguaccucaaccacacggucaccgggaaaacaucucugcccaaguguuggcugguguccaauggaagcuaccucaacgagacccacuucucugacgauaucgagcaacaggccgacaauaugauuacagaacugcuucagaaagaguauauggaucgccaaggcaagaccccucuggggcucguugaccuguuuguguucagcacguccuuuuaccugaucucuauuuuccuucaucucgucaaaaucccgacacacagacauaucgugggacggcccugcccuaagccccaccgccugaaccacaugggcauuuguagcugcggccuguauaagcauccuggggugcccgucaaauggaagagauga

SEQ ID NO: 5386 - RNA, 1473 nt, Artificial Sequence
  derived and/or modified protein sequence (opt5) from LASV(ISTH2129-NIG-2012;Clade II)__AIT17544__GPCstabilized
augggccagaucauuaccuucuuucaagaggugccccacgucaucgaagagguuaugaacauugugcugaucgcccucagccugcuugcuauucugaaggggaucuacaauguggccacaugcggacucuucggccuggucuccuuucuucugcucugugggagaucuugcagcacgaccuauaaaggaguguacgaacugcagacacuggagcucgacaugggcucccugaacaugaccaugccucuuucuuguacaaagaauaacagccaucacuauaucaugguugggaaugaaaccggacuggagcucacacugaccaacacguccauuaucaaucauaaauucugcaaccuuucugaugcgcacaagaaaaaucuguacgaccaugcucucaugagcauuaucuccaccuuucaccugagcauuccgaacuucaaucaguaugaggccaugucuugugauuuuaacggcggcaagaucuccgugcaguacaaucugagccacucuuaugccgucgacgcugccaaccauugcgggacaauugcuaauggagugcuccaaaccuucaugcggauggccuggggcggguccuacaucgcgcuggauagcggaugcggcucuugggacuguaucaugacauccuaccaguaucuuauuauccagaacaccacgugggaagaucacugccaguuuagccgccccuccccuauuggguaccugggacuccugucucaaagaacacgggacaucuauauuagccgcagacgccggggcaccuucacauggacccucuccgauagcgagggcaacgaaacccccgggggauacugucugacacgguggaugcugaucgaggccgagcucaaaugcuuuggcaauacggcuguugccaaguguaacgaaaaacaugacgaggaguucugcgauaugcugcgccuuuuugacuucaauaagcaggcuaucagacggcugaaaacccccgcccagaugucuauucagcucaucaacaaggcggugaaugcccugauuaacgaucaacuuaucaugaagaaucaucugcgcgacauuaugugcaucccuuauugcaacuacuccaaauauugguaccucaaucacacagucaccggaaagacaagccugcccagauguuggcuggugucuaacggcagcuaccucaaugaaacccacuucuccgacgauaucgagcagcaggcugacaacaugauuacggagcugcuucaaaaagaauauauggaucggcaggggaagacaccucugggacucguggaccuguuugucuucucuaccagcuuuuaccugaucuccauuuuccuucaccucguuaaaaucccgacccaucgccacauuaucggcaagcccugcccuaaaccccauagacugaaucacaugggcauuuguagcugcgggcuguauaagcacccuggagugcccgugaaguggaaacgguga

SEQ ID NO: 5387 - RNA, 1473 nt, Artificial Sequence
  derived and/or modified protein sequence (opt5) from LASV(ISTH2217-NIG-2012;Clade II)__AIT17548__GPCstabilized
augggccagaucauuaccuucuuucaagaggugccccacgucaucgaagagguuaugaacauugugcugaucgcccucagccugcuugcuauucugaaggggaucuacaauguggccacaugcggacucuucggccuggucuccuuucuuuuccugugugggagaucuugcagcacgaccuauaaaggaguguacgaacuccagacacuggagcuggacauggcgucccucaacaugaccaugccucugucuuguacaaagaauaacagccaucacuauaucaugguuggcaaugaaaccgggcuugagcugacacucaccaacacguccauuaucaaucauaaauuuugcaaccugucugaugcucacaagcggaaucuuuacgaccaugcccugaugagcauuaucuccaccuuccaccucagcauuccgaacuuuaaucaguaugaggccaugucuugugauuucaacggaggcaaaaucuccgugcaguacaaucugagccacgcuuaugccggcgacgcugccaagcauugcgggacaauugcgaacggaguccugcaaaccuuuaugcgcauggccuggggcgggucuuacaucgcucucgauuccggaugcggcagcugggacuguaucaugacaucuuaccaguaucugauuauccagaauaccacgugggaagaucacugccaguucuccagacccagcccuauuggguaccuuggacugcucucccaacggacacgcgacaucuauauuucuagacggcgccggggcaccuuuacauggacccugagcgauuccgagggcaacgaaacccccgggggauacugucucacacgcuggaugcugaucgaggccgagcugaaaugcuucggcaacacggcuguggccaaguguaaugaaaaacaugacgaggaauuuugcgauaugcucagacuguucgacuucaacaagcaggcgauccggcgccuuagaacccccgcccagaugagcauucagcugaucaauaaagcuguuaacgcccucauuaaugaucaacugaucaugaagaaccaccuucgggacauuaugugcaucccuuauugcaauuacucuaaguauugguaccugaaccacacagugaccggaaaaacaucccuccccaaguguuggcuggucagcaauggcucuuaccugaacgaaacccauuuuagcgacgauaucgagcagcaggcugacaauaugauuacggagaugcuccaaaaagaauauaucgaucgccaggggaagacaccucugggacuuguggaccuguucguguuuuccaccucuuucuaccucauuagcaucuuucugcaccuggucaaaauuccgacccauagacacguuaucggcaagcccugcccuaaaccccaucggcuuaaccacaugggcauuuguuccugcgggcucuauaagcacccuggagugcccgugaaguggaaacgcuga

SEQ ID NO: 5388 - RNA, 1473 nt, Artificial Sequence
  derived and/or modified protein sequence (opt5) from LASV(ISTH2271-NIG-2012;Clade II)__AIT17552__GPCstabilized
augggccagaucauuaccuucuuucaagaggugccccacgucaucgaagagguuaugaacauugugcugaucgcccucagccugcuugcuauucugaaggggaucuacaauguggccacaugcggacucuucggccuggucuccuuucuucugcucugugggagaucuugcagcacgaccuauaaaggaguguacgaacugcagacacuggagcucgacauggcgucccugaacaugaccaugccucuuucuuguacaaagaauaacagccaucacuauaucaugguuggcaaugaaaccgggcuggagcucacacugaccaacacguccauuaucaaucauaaauucugcaaccuuucugaugcucacaagaaaaaucuguacgaccaugcccucaugagcauuaucuccaccuuucaccugagcauuccgaacuucaaucaguaugaggccaugucuugugauuuuaacggaggcaagaucuccgugcaguacaaucugagccacgcuuaugccgucaacgcugccaaucauugcggcacaauugcgaacggggugcuccaaaccuucaugcggauggccuggggaggcucuuacaucgcucuggacuccgggugcggaagcugggauuguaucaugacaucuuaccaguaucuuauuauccagaacaccacgugggaagaccacugccaguuuucccgccccagcccuauuggcuaccuggggcuccugucccaaagaacacgggauaucuauauuucucgcagacgccggggaaccuucacauggacccucagcgacuccgagggcaaugaaacccccggcggguacugucugacacgguggaugcugaucgaggccgagcucaaaugcuuuggaaacacggcuguugccaaguguaaugaaaaacaugaugaggaguucugcgacaugcugcgccuuuuugauuucaacaagcaggcgaucagacggcugaaaacccccgcccagaugagcauucagcucaucaauaaggcugugaacgcccugauuaaugaccaacuuaucaugaagaaccaucugcgcgauauuaugugcaucccuuauugcaauuacucuaaauauugguaccucaaccacacagucaccgggaagacaucccugcccagauguuggcuggugagcaauggaucuuaccucaacgaaacccacuucagcgacgacaucgagcagcaggcugauaauaugauuacggagcugcuucaaaaagaauauauggaccggcagggcaagacaccucuggggcucguggaucuguuugucuucuccaccucuuuuuaccugaucagcauuuuccuucaccucguuaaaaucccgacccaucgccacgugauuggaaagcccugcccuaaaccccauagacugaaccacaugggcaucuguuccugcggccuguauaagcacccuggggugcccgucaaguggaaaaaguga

SEQ ID NO: 5389 - RNA, 1473 nt, Artificial Sequence
  derived and/or modified protein sequence (opt5) from LASV(ISTH2304-NIG-2012;Clade II)__AIT17556__GPCstabilized
augggccagaucauuaccuucuuucaagaggugccccacgucaucgaagagguuaugaacauugugcugaucgcccucagccugcuugcuauucugaaggggaucuacaauguggccacaugcggacucuucggccuggucuccuuucuucugcucugugggagaucuugcagcacgaccuauaaaggaguguacgaacugcagacacuggagcucgacauggcgucccugaacaugaccaugccucuuucuuguacaaagaauaacagccaucacuauaucaugguuggcaaugaaaccgggcuggagcucacacugaccaacacguccauuaucaaucauaaauucugcaaccuuucugaugcucacaagaaaaaucuguacgaccaugcccucaugagcauuaucuccaccuuucaccugagcauuccgaacuucaaucaguaugaggccaugucuugugauuuuaacggaggcaagaucuccgugcaguacaaucugagccacacauaugcugucgacgccgcuaaccauugcggcaccauugccaauggggugcuccaaacauucaugcggauggcguggggaggcucuuacaucgcccuggauuccgggugcggaagcugggacuguaucaugaccucuuaccaguaucuuauuauccagaacacgacaugggaagaucacugccaguuuuccagacccagcccuauuggcuaccuggggcuccugucccaacggacccgcgacaucuauauuucuagacggcgccggggaacauucaccuggacccucagcgauuccgagggcaacgaaacacccggcggguacugucugacgcgcuggaugcugaucgaggcugagcucaagugcuuuggaaauaccgccguugcuaaauguaacgaaaagcaugacgaggaguucugcgauaugcugagacuuuuugacuucaauaaacaggccauccggcgccugaagacacccgcgcagaugagcauucagcucaucaacaaagccgugaaugcucugauuaacgaucaacuuaucaugaagaaucaccugagagacauuaugugcaucccuuauugcaacuacucuaaguauugguaccucaaucacaccaucacagggaaaaccucccugccccgguguuggcuggucagcaacggaucuuaccucaaugaaacgcauuucagcgacgauauugagcagcaggccgacaacaugaucacagagcugcuucaaaaggaauauauugaucgccagggcaaaaccccucuggggcucguggaccuguuuguguucuccaccucuuuuuaccugaucagcauuuuccuucaccucgucaagaucccgacacauagacacauuaccggaaaacccugcccuaagccccaucggcugaaucacaugggcaucuguuccugcggccuguauaaacacccugggguucccgugcgcuggaagagauga

SEQ ID NO: 5390 - RNA, 1473 nt, Artificial Sequence
  derived and/or modified protein sequence (opt5) from LASV(ISTH2312-NIG-2012;Clade II)__AIT17560__GPCstabilized
augggccagaucauuaccuucuuucaagaggugccccacgucaucgaagagguuaugaacauugugcugaucgcccucagccugcuugcugugcugaaggggauuuacaaugucgccacaugcggacucuucggccugguguccuuucuucugcucugugggagaucuugcagcacgaccuauaaaggaguuuacgaacugcagacacuggagcucgacauggcgucccugaacaugaccaugccucuuucuuguacaaccaauaacagccaucacuauaucauggugggcaaugaaacagggcuggagcucacccugacgaacaccuccaucauuaaucauaaguucugcaaccuuucugaugcucacaaaaagaaucuguacgaccaugcccucaugagcaucauuuccacauuucaccugagcaucccgaacuucaaucaguaugaggccaugucuugugauuuuaacggaggcaaaauuuccguccaguacaaucugagccacgcuuaugccggcgaagcugccaaccauugcgggaccaucgcgaauggagugcuccaaacauucaugcggauggccuggggcgggucuuacauugcucuggacuccggaugcggcagcugggauuguaucaugaccucuuacaaguaucuuaucauucagaacacgacauggggagaccacugccaguuuucccgccccagcccuaucggauaccugggccuccugucccagagaacccgggauauuuauaucucucgcagacgccggggcacauucaccuggacccucagcgacuccgaggggaacgaaacacccggaggcuacugucugacgcgguggaugcugauugaggccgagcucaaaugcuuugggaauaccgcuguugccaaguguaacgaaaaacaugaugaggaguucugcgacaugcugcgccuuuuugauuucaauaagcaagcgaucagaaaacugaagacacccgcccagaugagcauccagcucauuaacaaggcugugaaugcccugaucaacgaccagcuuauuaugaaaaaucaucugcgggauaucaugugcauuccuuauugcaacuacucucgcuauugguaccucaaucacaccgucacaggcagaaccucccugccccgguguuggcuggugagcaacgggucuuaccucaaugaaacgcacuucagcgacgacaucgagcaacaggcugauaacaugaucacagagcugcuucagaaggaauauauugaccgccaaggaaaaaccccucugggccucguggaucuguuugucuucuccaccucuuuuuaccugaucagcauuuuccuucaccucguuaagaucccgacacauagacacauuaucggcaaacccugcccuaagccccaucggcugaaucacauggggauuuguuccugcggacuguauaaacacccuggcgugcccgugaaguggaagcgcuga

SEQ ID NO: 5391 - RNA, 1473 nt, Artificial Sequence
  derived and/or modified protein sequence (opt5) from LASV(ISTH2316-NIG-2012;Clade II)__AIT17564__GPCstabilized
augggccagaucauuaccuucuuucaagaggugccccacgucaucgaagagguuaugaacauugugcugaucgcccucagccugcuugcuauucugaaggggaucuacaauguggccacaugcggacucuucggccugcuuuccuuucugcuccugugugggagaucuugcagcacgaccuauaaaggagucuacgaacugcagacacucgagcuggacauggcgucccuuaacaugaccaugccucugucuuguacaaagaauaacagccaucacuauaucauggugggcaaugaaaccgggcucgagcugacacuuaccaacacguccauuaucaaucauaaauucugcaaccugucugaugcucacaagaaagaccucuacgaucaugcccugaugagcauuaucuccaccuuucaccugagcauuccgaauuucaaccaguaugaggccaugucuugugacuuuaauggaggcaagaucuccguucaguacaaccucagccacgcuuaugccguggaugcugccaagcauugcggcacaauugcgaaugggguccugcaaaccuucaugcggauggccuggggaggcucuuacaucgcucuugacuccgggugcggaagcugggauuguaucaugacaucuuaccaguaucugauuauccagaacaccuccugggaagaccacugccaguuuagccgccccuccccuauuggcuaccucgggcugcuuucucaaagaacgcgggauaucuauauuagccgcagacgccggggaacauucaccuggacacuguccgacagcgagggcaaugaaacccccggcggguacugucugacccgguggaugcucaucgaggccgagcugaagugcuuuggaaacacagcuguggccaaauguaacgaaaagcaugaugaggaguucugcgacaugcuucgccuguuugauuucaauaaacaggcgaucaagagacucaagacgcccgcccagaugucuauucagcugaucaacaaagcuguuaaugcccuuauuaacgaccaacugaucaugaagaaucaccuccgggacauuaugugcaucccuuauugcaacuacuccaaauauugguaccugaaucacaccgugacagggaagaccagccugccccgcuguuggcucgucucuaacggaagcuaccugaaugaaacacauuucuccgaugacaucgagcagcaggcugauaacaugauuaccgagcuucugcaaaaagaauauaucgacagacagggcaagacgccucucgggcugguggaucuguuuguguucucuaccagcuuuuaccuuauuuccaucuuccuccaccuggucaaaauuccgacacaucggcacguuaucggaaagcccugcccuaagccccaucgccugaaucacaugggcauuuguagcugcggccucuauaaacacccuggggugcccgugaaguggaaaagauga

SEQ ID NO: 5392 - RNA, 1473 nt, Artificial Sequence
  derived and/or modified protein sequence (opt5) from LASV(ISTH2358-NIG-2012;Clade II)__AIT17572__GPCstabilized
augggccagaucauuaccuucuuucaagaggugccccacgucaucgaagagguuaugaacauugugcugaucgcccucagccugcuugcuauucugaaggggaucuacaauguggccacaugcggacucuucggccuggucuccuuucuucugcucugugggagaucuugcagcacgaccuauaaaggaguguacgaacugcagacacuggagcucgacauggcgaaccugaauaugaccaugccucuuuccuguacaaagaacaauucucaucacuauaucaugguuggcaacgaaaccgggcuggagcucacacugaccaauacgagcauuaucaaccauaaauucugcaaucuuuccgaugcucacaagaaaaaccuguacgaccaugcccucaugucuauuaucagcaccuuucaccuguccauuccgaauuucaaccaguaugaggccaugagcugugauuuuaauggaggcaagaucucugugcaguacaaccugucccacaauuaugcugucgacgccgcuaaccauugcggcacaauugccaacggggugcuccaaaccuucaugcggauggcguggggaggcagcuacaucgcccuggauucugggugcggaaauugggacuguaucaugacauccuaccaguaucuuauuauccagaacaccacgugggaagaucacugccaguuuagccgccccucuccuauuggcuaccuggggcuccugucccaaagaacacgggacaucuauauuagccgcagacgccggggaaccuucacauggacccucuccgauucugagggcaaugacaugcccggcggguacugucugacccgguggaugcugaucgaagcugagcucaaaugcuuuggaaacacagccguugcuaaguguaaugagaaacaugaugaagaguucugcgacaugcugcgccuuuuugauuucaacaagcaggccaucagacggcugaaaacgcccgcgcagaugaauauucagcucaucaacaaggccgugaaugcucugauuaacgaccaacuuaucaugaagaaucaucugcgcgacauuaugugcaucccuuauugcaacuacagcaaauauugguaccucaaucacaccgucacagggaagaccucccugcccagauguuggcuggugagcaacggaucuuaccucaaugagacacacuucuccgaugacaucgaacagcaggccgauaacaugauuaccgagcugcuucaaaaagaguauauggaccggcagggcaagacgccucuggggcucguggaucuguuugucuucagcacaucuuuuuaccugaucagcauuuuccuucaccucguuaaaaucccgacccaucgccacauuaucggaaagcccugcccuaaaccccauagacugaaccacaugggcauuuguuccugcggccuguauaagcacccuggggugcccgugaaguggaaacgguga

SEQ ID NO: 5393 - RNA, 1473 nt, Artificial Sequence
  derived and/or modified protein sequence (opt5) from LASV(ISTH2376-NIG-2012;Clade II)__AIT17576__GPCstabilized
augggccagaucauuaccuucuuucaagaggugccccacgucaucgaagagguuaugaacauugugcugaucgcccucagccugcuugcuauucugaaggggaucuacaauguggccacaugcggacucuucggccuggucuccuuucuucugcucugugggagaucuugcagcacgaccuauaaaggaguguacgaacugcagacacuggagcucgacauggcgucccugaacaugaccaugccucuuucuuguacaaagaauaacagccaucacuauaucaugguuggcaaugaaaccgggcuggagcucacacugaccaacacguccauuaucaaucauaaauucugcaaccuuucugaugcucacaagaaaaaucuguacgaccaugcccucaugagcauuaucuccaccuuucaccugagcauuccgaacuucaaucaguaugaggccaugucuugugauuuuaacggaggcaagaucuccgugcaguacaaucugagccacacauaugcugucgacgccgcuaaccauugcggcaccauugccaauggggugcuccaaacauucaugcggauggcguggggaggcucuuacaucgcccuggauuccgggugcggaaacugggacuguaucaugaccagcuaccaguaucuuauuauccagaacacgacaugggaagaucacugccaguuuucucgccccuccccuauuggcuaccuggggcuccugagccaaagaacccgggacaucuauauuucccgcagacgccggggaacauucaccuggacccucucugauagcgagggcaaugaaacacccggcggguacugucugacgcgguggaugcugaucgaggcugagcucaaaugcuuuggaaacaccgccguugcuaaguguaaugaaaaacaugacgaggaguucugcgauaugcugcgccuuuuugacuucaacaagcaggccaucuccagacugaaaacacccgcgcagaugagcauucagcucaucaauaaggccgugaacgcucugauuaaugaucaacuuaucaugaagaaccaucugcgggacauuaugugcaucccuuauugcaauuacucuaaauauugguaccucaaccacaccgucacagggaagaccucccugccccgcuguuggcuggugagcaauggaucuuaccucaacgaaacgcacuucagcgacgauaucgagcagcaggccgacaauaugauuacagagaugcugcaaaaagaauauaucgauagacagggcaagaccccucuugggcugguggaccucuuugucuucuccaccucuuuuuaccugauuagcaucuuccugcaccuuguuaaaauuccgacacaucggcacaucaccggaaagcccugcccuaaaccccaucgccucaaccacaugggcauuuguuccugcggccuguauaagcacccuggggugcccgugaaguggaaaagauga

SEQ ID NO: 5394 - RNA, 1473 nt, Artificial Sequence
  derived and/or modified protein sequence (opt5) from LASV(Lassa virus/H.sapiens-wt/NGA/2015/ISTH_0543;Clade II)__AVO03639__GPCstabilized
augggccagaucauuaccuucuuucaagaggugccccacgucaucgaagagguuaugaacauugugcugaucgcccucagccugcuugcuauucugaaggggaucuacaauguggccacaugcggacucuucggccuggucuccuuucuucugcucugugggagaucuugcagcacgaccuauaaaggaguguacgaacugcagacacuggagcucgacauggcgaaccugaauaugaccaugccucuuuccuguacaaagaacaauucucaucacuauaucaugguuggcaacgaaaccgggcuggagcucacacugaccaauacgagcauuaucaaccauaaauucugcaaucuuuccgaugcucacaagaaaaaccuguacgaccaugcccucaugucuauuaucagcaccuuucaccuguccauuccgaauuucaaccaguaugaggccaugagcugugauuuuaauggaggcaagaucucugugcaguacaaccugucccacacauaugcugucgacgccgcuaaucauugcggcaccauugccaacggggugcuccaaacauucaugcggauggcguggggaggcagcuacaucgcccuggauucugggugcggauccugggacuguaucaugaccagcuaccaguaucuuguuauucagaacacgacaugggaagaucacugccaguuuucucgccccuccccuaucggcuaccuggggcuccugagccaaagaacccgggacauuuauaucucccgcagacgccggggaacauucaccuggacccucucugauagcgagggcaaugaaacacccggcggguacugucugacgcgguggaugcugauugaggcugagcucaaaugcuuuggaaacaccgccguggcuaaguguaaugaaaaacaugacgaggaguucugcgauaugcugcgccuuuuugacuucaacaagcaggccaucagacggcugaaaacacccgcgcagauguccauccagcucauuaauaaggccgucaacgcucugaucaaugaucaacuuauuaugaagaaccaucugcgcgacaucaugugcauuccuuauugcaauuacagcaaauauugguaccucaaccacaccgugacagggaagaccucucugcccagauguuggcugguguccaauggaagcuaccucaacgaaacgcacuucucugacgauaucgagcagcaggccgacaauaugaucacagagcugcuucaaaaagaauauauugaucggcagggcaagaccccucuggggcucgucgaccuguuuguuuucagcaccuccuuuuaccugaucucuauuuuccuucaccucgugaaaaucccgacacaucgccacauuaccggaaagcccugcccuaaaccccauagacugaaccacaugggcaucuguagcugcggccuguauaagcacccuggggugcccgucaaguggaaacgguga

SEQ ID NO: 5395 - RNA, 1473 nt, Artificial Sequence
  derived and/or modified protein sequence (opt5) from LASV(Lassa virus/H.sapiens-wt/NGA/2015/ISTH_0547;Clade II)__AVO03583__GPCstabilized
augggccagaucauuaccuucuuucaagaggugccccacgucaucgaagagguuaugaacauugugcugaucgcccucagccugcuugcuauucugaaggggaucuacaauguggccacaugcggacucuucggccuggucuccuuucuucugcucugugggagaucuugcagcacgaccuauaaaggaguguacgaacugcagacacuggagcucgacauggcgucccugaacaugaccaugccucuuucuuguacaaagaauaacagccaucacuauaucaugguuggcaaugaaaccgggcuggagcucacacugaccaacacguccauuaucaaucauaaauucugcaaccuuucugaugcucacaagaaaaaucuguacgaccaugcccucaugagcauuaucuccaccuuucaccugagcauuccgaacuucaaucaguaugaggccaugucuugugauuuuaacggaggcaagaucuccgugcaguacaaucugagccacacauaugcugucgacgccgcuaaccauugcggcaccauugccaauggggugcuccaaacauucaugcggauggcguggggaggcucuuacaucgcccuggauuccgggugcggaagcugggacuguaucaugaccucuuaccaguaucuuauuauccagaacacgacaugggaagaucacugccaguuuucccgccccagcccuauuggcuaccuggggcuccugucccaaagaacccgggacaucuauauuucucgcagacgccggggaacauucaccuggacccucagcgauuccgagggcaacgaaacacccggcggguacugucugacgcgguggaugcugaucgaggcugagcucaaaugcuuuggaaauaccgccguugcuaaguguaacgaaaaacaugacgaggaguucugcgauaugcugcgccuuuuugacuucaauaagcaggccaucagacggcugaaaacacccgcgcagaugagcauucagcucaucaacaaggccgugaaugcucugauuaacgaucaacuuaucaugaagaaucaucugcgcgacauuaugugcaucccuuauugcaacuacucuaaauauugguaccucaaucacaccgucacagggaagaccucccugcccagauguuggcuggugagcaacggaucuuaccucaaugaaacgcacuucagcgacgauaucgagcagcaggccgacaacaugauuacagagcugcuucaaaaagaauauaucgagcggcagggcaagaccccucuggggcucguggaucuguuugucuucuccaccucuuuuuaccugauuagcaucuuccuucaccucguuaaaauuccgacacaucgccacaucaccggaaagcccugcccuaaaccccauagacugaaucacaugggcauuuguuccugcggccuguauaagcacccuggggugcccgugaaguggaaacgguga

SEQ ID NO: 5396 - RNA, 1473 nt, Artificial Sequence
  derived and/or modified protein sequence (opt5) from LASV(Lassa virus/H.sapiens-wt/NGA/2015/ISTH_0574;Clade II)__AVO03657__GPCstabilized
augggccagaucauuaccuucuuucaagaggugccccacgucaucgaagagguuaugaacauugugcugaucgcccucagccugcuugcuauucugaaggggaucuacaauguggccacaugcggacucuucggccuggucgcguuucuucugcucugugggagauccugcucuacgaccuauaaaggaguguacgaacugcagacacuggagcucgacauggcuagccugaacaugaccaugccucuuuccuguacaaagaauaacucucaucacuauaucaugguuggcaaugaaaccgggcuggagcucacacugaccaacacgagcauuaucaaucauaaauucugcaaccuuuccgaugcccacaagaaaaaucuguacgaccaugcccucaugucuauuaucagcaccuuucaccuguccauuccgaacuucaaucaguaugaggcuaugagcugugauuuuaacggaggcaagaucucugugcaguacaaucugucccacacauaugccgucgacgcugccaaccauugcggcaccauuacaaauggggugcuccaaaccuucaugcggauggcguggggaggcagcuacaucgcccuggauucugggugcggauccugggacuguaucaugacgagcuaccaguaucuuauuauccagaacacaaccugggaagaucacugccaguuuucucgccccuccccuauuggcuaccuggggcuccugagccaaagaacacgggacaucuauauuucccgcagacgccggggaaccuucaccuggacacucucugauagcgagggcaacgaaacgcccggcggguacugucugacccgguggaugcugaucgaggcugagcucaaaugcuuuggaaauacagccguugcuaaguguaacgaaaaacaugacgaggaguucugcgauaugcugcgccuuuuugacuucaauaagcaggccaucagacggcugaaaacccccgcgcagauguccauucagcucaucaacaaggccgugaaugcucugauuaacgaucaacuuaucaugaagaaucaucugcgcgacauuaugugcaucccuuauugcaacuacagcaaauauugguaccucaaucacacagucaccgggagaacgucucugccccgguguuggcugguguccaacggaagcuaccucaaugaaacacacuucucugacgauaucgagcagcaggccgacaacaugauuaccgagcugcuucaaaaggaauauauggaucgccagggcaaaaccccucuggggcucguggaccuguuugucuucagcacauccuuuuaccugaucucuauuuuccuucaccucaucaagauuccgacccauagacacguuaucggaaaacccugcccuaagccccaucggcugaaucacaugggcauuuguagcugcggccuguauaaacacccuggggugcccgugaaguggaagcgcuga

SEQ ID NO: 5397 - RNA, 1473 nt, Artificial Sequence
  derived and/or modified protein sequence (opt5) from LASV(Lassa virus/H.sapiens-wt/NGA/2015/ISTH_0681;Clade II)__AVO03617__GPCstabilized
augggccagaucauuaccuucuuucaagaggugccccacgucaucgaagagguuaugaacauugugcugaucgcccucagccugcuugcuauucugaaggggaucuacaauguggccacaugcggacucuucggccuggucuccuuucuucugcucugugggagaucuugcagcacgaccuauaaaggaguguacgaacugcagacacuggagcucgacauggcgucccugaacaugaccaugccucuuucuuguacaaagaauaacagccaucacuauaucaugguuggcaaugaaaccgggcuggagcucacacugaccaacacguccauuaucaaucauaaauucugcaaccuuucugaugcucacaagaaaaaucuguacgaccaugcccucaugagcauuaucuccaccuuucaccugagcauuccgaacuucaaucaguaugaggccaugucuugugauuuuaacggaggcaagaucuccgugcaguacaaucugagccacacauaugcugaaggcgccgcuaaccauugcgggaccauugccaauggaguccuccaaacauucaugcggauggcguggggcgggucuuacaucgcccuggacuccggaugcggcagcugggauuguaucaugaccucuuaccaguaucuuauuauccagaacacgacaugggaggaccacugccaguuuucccgccccagcccuauuggguaccugggacuccugucccaaagaacccgggauaucuauauuucucgcagacgccggggcacauucaccuggacccucagcgacuccgaaggcaacgagacacccgggggauacugucugacgcgguggaugcugaucgaggcugaacucaaaugcuuuggcaauaccgccguggcuaaguguaacgagaaacaugaugaagaguucugcgacaugcugcgccuuuuugauuucaauaagcaggccaucaugagacugaaaacacccgcgcagaugagcauucagcucaucaacaaggccguuaaugcucugauuaacgaccaacuuaucaugaagaaucaucugcgggauauuaugugcaucccuuauugcaacuacucuaaauauugguaccucaaucacaccgugacaggaaagaccucccugccccgcuguuggcuggucagcaacggcucuuaccucaaugagacgcacuucagcgacgacaucgagcagcaggccgauaacaugauuacagaaaugcugcaaaaagaguauauggacagacaggggaagaccccucuuggacugguggaucucuuuguguucuccaccucuuuuuaccugaucagcauuuuccugcaccuugucaaaaucccgacacaucggcacguuauuggcaagcccugcccuaaaccccaucgccucaaucacaugggcaucuguuccugcgggcuguauaagcacccuggagugcccgugaaguggaaaagauga

SEQ ID NO: 5398 - RNA, 1473 nt, Artificial Sequence
  derived and/or modified protein sequence (opt5) from LASV(Lassa virus/H.sapiens-wt/NGA/2015/ISTH_0682;Clade II)__AVO03625__GPCstabilized
augggccagaucauuaccuucuuucaagaggugccccacgucaucgaagagguuaugaacauugugcugaucgcccucagccugcuugcuauucugaaggggaucuacaauguggccacaugcggacucuucggccuggucuccuuucuucugcucugugggagaucuugcagcacgaccuauaaaggaguguacgaacugcagacacuggagcucgacauggcgucccugaacaugaccaugccucuuucuuguacaaagaauaacagccaucacuauaucaugguuggcaaugaaaccgggcuggagcucacacugaccaacacguccauuaucaaucauaaauucugcaaccuuucugaugcucacaagaaaaaucuguacgaccaugcccucaugagcauuaucuccaccuuucaccugagcauuccgaacuucaaucaguaugaggccaugucuugugauuuuaacggaggcaagaucuccgugcaguacaaucugagccacgcuuaugccgucgacgcugccaaccauugcggcacaauugcgaauggggugcuccaaaccuucaugcggauggccuggggaggcucuuacaucgcucuggauuccgggugcggaagcugggacuguaucaugacaucuuaccacuaucuuauuauccagaacaccacgugggaagaucauugccaguuuucccgccccagcccuauuggcuaccuggggcuccugucccagagaacacgggacaucuauauuucucgcagacgccggggaaccuucacauggacccucagcgauuccgagggcaacgaaacccccggcggguacugucugacacgguggaugcugaucgaggccgagcucaaaugcuuuggaaauacggcuguugccaaguguaacgaaaaacacgacgaggaguucugcgauaugcugcgccuuuuugacuucaauaagcaagcgaucagacggcugaaaacccccgcccagaugagcauucagcucaucaacaaggcugugaaugcccugauuaacgaucagcuuaucaugaagaaucaucugcgcgacauuaugugcaucccuuauugcaacuacucuaaauauugguaccucaaucacacagucaccgggaagacaucccugcccagauguuggcuggugagcaacggaucuuaccucaaugaaacccacuucagcgacgauaucgagcaacaggcugacaacaugauuacggagcugcuucagaaagaauauaucgaucggcaaggcaagacaccucuggggcucguggaccuguuugucuucuccaccucuuuuuaccugauuagcaucuuccuucaucucguuaaaauuccgacccaccgccaugugaucggaaagcccugcccuaaaccccacagacugaaucacaugggcauuuguuccugcggccuguauaagcauccuggggugcccgucaaguggaaacgguga

SEQ ID NO: 5399 - RNA, 1473 nt, Artificial Sequence
  derived and/or modified protein sequence (opt5) from LASV(Lassa virus/H.sapiens-wt/NGA/2015/ISTH_0687;Clade II)__AVO03581__GPCstabilized
augggccagaucauuaccuucuuucaagaggugccccacgucaucgaagagguuaugaacauugugcugaucgcccucagccugcuugcuauucugaaggggaucuacaauguggccacaugcggacucuucggccuggucuccuuucuucugcucugugggagaucuugcagcacgaccuauaaaggaguguacgaacugcagacacuggagcucgacaugaccaaccugaauaugacaaugccucuuuccuguaccaagaacaauucucaucacuauaucaugguuggcaacgaaacagggcuggagcucacccugacgaauaccagcauuaucaaccauaaauucugcaaucuuuccgaugcgcacaagaaaaaccuguacaaucaugcucucaugucuauuaucagcacauuucaccuguccauuccgaacuucaaucaguaugaggccaugagcugugacuuuaacggaggcaagaucucugugcaguacaaucugucccacaccuaugccgucgaugcugccaaccauugcggcacaguggcuaacgggguucuccaaaccuucaugcggauggccuggggaggcagcuacauugcgcuggacucugggugcggaggcugggauuguaucaugacguccuaccaguaucuuaucauucagaauacaaccugggaagaccacugccaguuuagccgccccucuccuaucggguaccugggacuccugucccaaagaacacgggauauuuauaucagccgcagacgccggggcaccuucaccuggacacucuccgacucugagggcaacgaaacgcccgggggauacugucugacccgguggaugcugauugaggccgagcucaaaugcuuuggcaauacagcuguggccaaguguaacgaaaaacaugaugaggaguucugcgacaugcugcgccuuuuugauuucaauaagcaggcuaucagaaaacugaaggcccccgcgcagaugagcauccagcucauuaacaaggccgucaaugcucugaucaacgaccaacuuauuaugaaaaaucaucugcgggauaucaugugcauuccuuauugcaacuacuccaaguauugguaccucaaucacaccgugacaggaaaaaccagccugcccaaguguuggcuggugucuaacggcuccuaccucaaugaaacgcacuucagcgacgacaucgagcagcaggccgauaacaugaucacagagcugcuucaaaaagaauauauggaccgccaggggaagaccccucugggacucgucgaucuguuuguuuucucuaccagcuuuuaccugauuuccaucuuccuucaccucgugaaaauuccgacacauagacacaucauuggcaagcccugcccuaagccccaucggcugaaucacaugggcaucuguucuugcgggcuguauaaacacccuggagugcccgucaaguggaaacgcuga

SEQ ID NO: 5400 - RNA, 1473 nt, Artificial Sequence
  derived and/or modified protein sequence (opt5) from LASV(Lassa virus/H.sapiens-wt/NGA/2015/ISTH_0736;Clade II)__AVO03573__GPCstabilized
augggccagaucauuaccuucuuucaagaggugccccacgucaucgaagagguuaugaacauugugcugaucgcccucagccugcuugcugugcugaaggggauuuacaaugucgccacaugcggacucuucggccugguguccuuucuucugcucugugggagaucuugcagcacgaccuauaaaggaguuuacgaacugcagacacuggagcucgacauggcgucccugaacaugaccaugccucuuucuuguacaaagaauaacagccaucacuauaucauggugggcaaugaaaccgggcuggagcucacacugaccaacacguccaucauuaaucauaaauucugcaaccuuucugaugcucacaagaaaaaucuguacgaccaugcccucaugagcaucauuuccaccuuucaccugagcaucccgaacuucaaucaguaugaggccaugucuugugauuuuaacggaggcaagauuuccguccaguacaaucugagccacacacaugcuguggacgccgcuaaccacugcggcaccaucgccaaugggguucuccaaacauucaugcggauggcguggggaggcucuuauauugcccuggauuccgggugcggaagcugggacuguaucaugaccucuuaccaguaccuuaucauucagaacacgacaugggaagaucauugccaguuuucccgccccagcccuaucggcuaucuggggcuccugucccaaagaacccgggacauuuacaucucucgcagacgccggggaacauucaccuggacccucagcgauuccgagggcaacgaaacacccggcggguauugucugacgcgguggaugcugauugaggcugagcucaaaugcuuuggaaauaccgccguggcuaaguguaacgaaaaacacgacgaggaguucugcgauaugcugcgccuuuuugacuucaauaagcaggccaucagacggcugaaaacacccgcgcagaugagcauccagcucauuaacaaggccgucaaugcucugaucaacgaucaacuuauuaugaagaaucaucugcgcgacaucaugugcauuccuuacugcaacuauucuagauacugguaucucaaucacaccgugacagggaaaaccucccugccccgguguuggcuggugagcaacggaucuuaccucaaugaaacgcacuucagcgacgauaucgagcagcaggccgacaacaugaucacagagcugcuucaaaaggaauacauugaucgccagggcagaaccccucuggggcucgucgaccuguuuguuuucuccaccucuuuuuaucugaucagcauuuuccuucaucucgugaaaaucccgacacaccggcaugugauuggaaagcccugcccuaaaccccaccgccugaaucacaugggcaucuguuccugcggccuguacaagcauccugggguccccgugaaauggaagagauga

SEQ ID NO: 5401 - RNA, 1473 nt, Artificial Sequence
  derived and/or modified protein sequence (opt5) from LASV(Lassa virus/H.sapiens-wt/NGA/2015/ISTH_0789;Clade II)__AVO03551__GPCstabilized
augggccagaucgugaccuucuuucaagaggucccccacguuauugaagagaucaugaacauugugcugaucacacucagccugcuugccauucugaaggggguguacaaucucgcuacgugcggacugaucggccuuaucaccuuccuguuucucugugggagauccugcucuacaauuuauaaaggaagcuaccaguuccagacccuggaacugaacauggagacacucaauaugaccaugccucuguccuguacaaagaacucuagccaucacuauauccgggucuccaaugaaaccggccuugagcugacgcucaccaacacaucuauuaucaaucauaaauuuugcaaccugagcgacgcccacaagaaaaaucuuuacgaucauacccugauguccauuaucagcacauuccaccucucuauuccgaacuuuaaucaguaugaggcgauguccugugacuucaacgggggaaagaucagcgugcaauacaaucugucucacuccuaugcuguugaugccgccaaccauugcggcaccguggcuaauggcguccugcagacguuuaugcgcauggccuggggagggagcuacaucgcucucgacucuggcugcgggaacugggauuguauuaugacauccuaccaguaucugaucauucagaacaccacaugggaagaccacugccaauucagccggcccuccccuaucggauaccuuggccugcucucucagcgcaccagagauauuuauaucagccggcgccgccgggggaccuuuacauggacgcuguccgacagcgagggaaaggaaacccccggcggcuacugucucacaagauggaugcugaucgaggccgagcugaaaugcuucgggaauaccgcgguggccaaguguaacgaaaaacaugaugaggaauuuugcgacaugcuccggcuguucgauuucaauaagcaggcuauucagcgccuuaaagcccccgcucaaaugucuauccagcugauuaacaaggccguuaaugcgcucaucaacgaccagcugauuaugaagaaucaccuuagagauaucaugugcaucccuuauugcaacuacuccaaauauugguaccugaaucacacaagcaccggccggacgucucuccccaaguguuggcuggugagcaacggguccuaccugaaugaaacacauuuuucugacgacauugagcaacaggccgauaacaugaucaccgagaugcuccagaaagaauauauugaccgccagggaaagaccccucugggccuugucgaucuguucguguuuagcacauccuucuaccucaucagcauuuuucugcaccuggugaaaaucccgacccauagacacauugucgggaagucuugccccaaaccucaucggcuuaaucacaugggaaucuguuccugcggccucuauaagcgccccggcguuccugugaaguggaaaagauga

SEQ ID NO: 5402 - RNA, 1473 nt, Artificial Sequence
  derived and/or modified protein sequence (opt5) from LASV(Lassa virus/H.sapiens-wt/NGA/2015/ISTH_0821;Clade II)__AVO03641__GPCstabilized
augggccagaucauuaccuucuuucaagaggugccccacgucaucgaagagguuaugaacauugugcugaucgcccucagccugcuugcuauucugaaggggaucuacaauguggccacaugcggacucuucggccuggucuccuuucuucugcucugugggagaucuugcagcacgaccuauaaaggaguguacgaacugcagacacuggagcucgacauggcgucccugaacaugaccaugccucuuucuuguacaaagaauaacagccaucacuauaucaugguuggcaaugaaaccgggcuggagcucacacugaccaacacguccauuaucaaucauaaauucugcaaccuuucugaugcucacaagaaaaaucuguacgaccauacccucaugagcauuaucuccacauuucaccugagcauuccgaacuucaaucaguaugaggccaugucuugugauuuuaacggaggcaagaucuccgugcaguacaaucugagccacaccuaugccgucgacgcugccaaccauugcggcacaauugcuaauggggugcuccaaaccuucaugcggauggccuggggaggcucuuacaucgcgcuggauuccgggugcggaaacugggacuguaucaugacgagcuaccaguaucuuauuauccagaacacaaccugggaagaucacugccaguuuucucgccccuccccuauuggcuaccuggggcuccugagccaaagaacacgggacaucuauauuucccgcagacgccggggaaccuucaccuggacacucucugauagcgagggcaaugaaacgcccggcggguacugucugacccgguggaugcugaucgaggccgagcucaaaugcuuuggaaacacagcuguugccaaguguaaugaaaaacaugacgaggaguucugcgauaugcugcgccuuuuugacuucaacaagcaggcuaucuccagacugaaaacccccgcccagaugagcauucagcucaucaauaaggcggugaacgcccugauuaaugaucaacuuaucaugaagaaccaucugcgggacauuaugugcaucccuuauugcaauuacucuaaauauugguaccucaaccacacagucaccgggaagacgucccugccccgcuguuggcuggugagcaauggaucuuaccucaacgaaacacacuucagcgacgauaucgagcagcaggcugacaauaugauuaccgagaugcugcaaaaagaauauaucgauagacagggcaagaccccucuugggcugguggaccucuuugucuucuccacaucuuuuuaccugauuagcaucuuccugcaccuuguuaaaauuccgacccaucggcacgugaucggaaagcccugcccuaaaccccaucgccucaaccacaugggcauuuguuccugcggccuguauaagcacccuggggugcccgucaaguggaaaagauga

SEQ ID NO: 5403 - RNA, 1473 nt, Artificial Sequence
  derived and/or modified protein sequence (opt5) from LASV(Lassa virus/H.sapiens-wt/NGA/2015/ISTH_0831;Clade II)__AVO03545__GPCstabilized
augggccagaucgugaccuucuuucaagaggucccccacguuauugaagagaucaugaacauugugcugaucacacucagccugcuugccauucugaaggggguguacaaucucgcuacgugcggacugaucggccuuaucaccuuccuguuucucugugggagauccugcucuaugacauauaaaggaagcuaccagcuggaaacccuggagcucaacauggaaacacugaauaugaccaugccucuuuccuguacaaagaacaccucucaucacuauauucgggucggcaaugagacggggcuggagcucacccugacaaacaccagcaucauuaaucauaaauucugcaaccuuuccgacgcccacaagaaaaaucuguacgaucauucucucaugagcaucguguccacauuucaccugagcauuccgaacuucaaucaguaugaagcgaugucuugugacuuuaacggaggcaagaucuccauucaguacaaucugagccacgcuuaugccggcgaugccgcuaagcauugcgggacccucgccaacggaguucugcaaacguucaugcgcauggcuuggggcgggucuuacaucgcccuugacuccggaugcggcaauugggauuguaucaugacaagcuaccaguaucugauuauccagaacaccacaugggacgaucacugccaguuuucucggcccuccccuauuggguaccucggacugcuuagccaacgcaccagagagaucuauauuucccggcgccgccggggcaccuucacauggacgcugucugacagcgaaggcaacgaggcgcccgggggauacugucugaccagauggaugcucaucgaggccgaacugaaaugcuuuggcaauacagcuguggccaaguguaacgagaaacaugaugaagaguucugcgacaugcuucggcuguuugauuucaauaagcaggcuauccagcgccucaaaacccccgcccagauguccauucaacugaucaacaaggcggucaaugcccuuauuaacgaccagcugaucaugaagaaucaccucagagauauuaugugcaucccuuauugcaacuacagcaaauauugguaccugaaucacacaaccacgggacggacaucucugccccgcuguuggcucguguccaacggcagcuaccugaaugagacccauuucucugacgacaucgagcagcaagcugauaacaugauuaccgaaaugcuucagaaggaguauaucgacagacaggggaaaacaccucugggacucguugaucuguuuguguucagcaccuccuuuuaccugauuucuaucuuccuucaccucgucaagauuccgacacaucggcacaucgugggcaaaagcugccccaagccucaucgccugaaucacaugggcauuuguuccugcgggcuguauaaacagcccggagugccugucagauggaagcgguga

SEQ ID NO: 5404 - RNA, 1473 nt, Artificial Sequence
  derived and/or modified protein sequence (opt5) from LASV(Lassa virus/H.sapiens-wt/NGA/2016/ISTH_0009;Clade II)__AVO03571__GPCstabilized
augggccagaucauuaccuucuuucaagaggugccccacgucaucgaagagguuaugaacauugugcugaucgcccucagccugcuugcuauucugaaggggaucuacaauguggccacaugcggacuccugggccuugucuccuuccugcuccugugugggagaucuugcagcacgaccuauaaaggaguguacgaacugcagacacucgagcuggacauggcgucccuuaacaugaccaugccucugucuuguacaaagaauaacagccaucacuauaucaugguuggcaaugaaaccgggcucgagcugacacuuaccaacacguccauuaucaaucauaaauuuugcaaccugucugaugcucacaagaaaaaucucuacgaccaugcccugaugagcauuaucuccaccuuccaccugagcauuccgaacuuuaaucaguaugaggccaugucuugugauuucaacggaggccggaucuccgugcaguacaaucucagccacucuuaugcugucgacgccgcuaaccauugcggcacaauugccaauggggugcugcaaaccuuuaugcgcauggcguggggaggcuccuacaucgcccuugauagcgggugcggaucuugggacuguaucaugacauccuaccaguaucugauuauccagaacaccacgugggaagaucacugccaguucagcagacccuccccuauuggcuaccucgggcugcuuucucaacggacacgcgacaucuauauuagcagacggcgccggggaaccuuuacauggacccuguccgauagcgagggcaacgaaacccccggcggguacugucugacacgcuggaugcucaucgaggcugagcugaagugcuucggaaauacggccguugcuaaauguaacgaaaagcaugacgaggaauuuugcgauaugcuuagacuguucgacuuuaauaaacaggccauccggcgccucaagacccccgcgcagaugucuauucagcugaucaacaaagccgugaaugcucuuauuaacgaucaacugaucaugaagaaucaccucagagacauuaugugcaucccuuauugcaacuacuccaaguauugguaccugaaucacacagucaccgggaaaacaagccugccccgguguuggcucgugucuaacggaagcuaccugaaugaaacccauuucuccgacgauaucgagcagcaggccgacaacaugauuacggagcuucugcaaaaggaauauaucgaucgccagggcaaaacaccucucgggcugguggaccuguucgucuuuucuaccagcuucuaccuuauuuccaucuuucuccaccugguuaagauuccgacccauagacacaucacaggaaaacccugcccuaagccccaucggcugaaucacaugggcauuuguagcugcggccucuauaaccacccuggggugcccgugaaauggaagcgcuga

SEQ ID NO: 5405 - RNA, 1473 nt, Artificial Sequence
  derived and/or modified protein sequence (opt5) from LASV(Lassa virus/H.sapiens-wt/NGA/2016/ISTH_0017;Clade II)__AVO03567__GPCstabilized
augggccagaucauuaccuucuuucaagaggugccccacgucaucgaagagguuaugaacauugugcugaucgcccucagccugcuugcuauucugaaggggaucuacaauguggccacaugcggacucuucggccuggucuccuuucuucugcucugugggagaucuugcagcacgaccuauaaaggaguguacgaacugcagacacuggagcucgacauggcgucccugaacaugaccaugccucuuucuuguacaaagaauaacagccaucacuauaucaugguuggcaaugaaaccgggcuggagcucacacugaccaacacguccauuaucaaucauaaauucugcaaccuuucugaugcucacaagaaaaaucuguacgaccaugcccucaugagcauuaucuccaccuuucaccugagcauuccgaacuucaaucaguaugaggccaugucuugugauuuuaacggaggcaagaucuccgugcaguacaaucugagccacacauaugcuauugacgccgcuaaccauugcggcaccaucgccaaugggguccuccaaacauucaugcggauggcguggggaggcucuuacaucgcccuggauuccgggugcggaagcugggacuguauuaugaccucuuaccaguaucuuaucauucagaacacgacaugggaagaucacugccaguuuucccgccccagcccuaucggcuaccuggggcuccugucccaaagaacccgggacauuuauaucucucgcagacgccggggaacauucaccuggacccucagcgauuccgagggcaacgaaacacccggcggguacugucugacgcgguggaugcugaucgaggcugagcucaaaugcuuuggaaauaccgccguggcuaaguguaacgaaaaacaugacgaggaguucugcgauaugcugcgccuuuuugacuucaauaagcaggccauuagacggcugaaaacacccgcgcagaugagcauccagcucauuaacaaggccguuaaugcucugaucaacgaucaacuuauuaugaagaaucaucugcgcgacaucaugugcaucccuuauugcaacuacucuaaauauugguaccucaaucacaccgugacagggaagaccucccugcccagauguuggcuggucagcaacggaucuuaccucaaugaaacgcacuucagcgacgauauugagcagcaggccgacaacaugaucacagagcugcuucaaaaagaauauauggaucggcagggcaagaccccucuggggcucguggaccuguuuguguucuccaccucuuuuuaccugauuagcaucuuccuucaccucguccgcauuccgacacauagacacguuaucggaaaacccugcccuaagccccaucggcugaaucacaugggcauuuguuccugcggccuguauaaacacccuggggugcccgugaaguggaagcgcuga

SEQ ID NO: 5406 - RNA, 1473 nt, Artificial Sequence
  derived and/or modified protein sequence (opt5) from LASV(Lassa virus/H.sapiens-wt/NGA/2016/ISTH_0035;Clade II)__AVO03619__GPCstabilized
augggccagaucauuaccuucuuucaagaggugccccacgucaucgaagagguuaugaacauugugcugaucgcccucagccugcuugcuauucugaaggggaucuacaauguggccacaugcggacucuucggccuggucuccuuucuucugcucugugggagaucuugcagcaugacguauaaaggaguguacgaacugcagacccuggagcucgacauggcgucccugaacaugacaaugccucuuucuuguaccaagaauaacagccaucacuauaucaugguuggcaaugaaacagggcuggagcucacccugacaaacaccuccauuaucaaucauaaauucugcaaccuuucugaugcucacaagaaaaaucuguacgaccaugcccucaugagcauuaucuccacguuucaccugagcauuccgaacuucaaucaguaugaggccaugucuugugauuuuaacggaggcaagaucuccgugcaguacaaucugagccacaccuaugcugucgacgccgcuaaccauugcggcacaauugccaauggggugcuccaaaccuucaugcggauggcguggggaggcucuuacaucgcccuggauuccgggugcggaagcugggacuguaucaugacaucuuaccaguaucuuauuauccagaacaccacgugggaagaucacugccaguuuucccgccccagcccuauuggcuaccuggggcuccugucccaaagaacacgggacaucuauauuucucgcagacgccggggaaccuucacauggacccucagcgauuccgagggcaacgaaacccccggcggguacugucugacacgguggaugcugaucgaggcugagcucaaaugcuuuggaaauacggccguugcuaaguguaacgaaaaacaugacgaggaguucugcgauaugcugcgccuuuuugacuucaauaagcaggccaucagacggcugaaaacccccgcgcagaugagcauucagcucaucaacaaggccgugaaugcucugauuaacgaucaacuuaucaugaagaaucaucugcgcgacauuaugugcaucccuuauugcaacuacucuaaauauugguaccucaaucacacaaucaccgggaagacaucccugcccagauguuggcuggucagcaacggaucuuaccucaaugaaacccacuucagcgacgauauugagcagcaggccgacaacaugaucacggagcugcuucaaaaagaauauauggaucggcagggcaagacaccucuggggcucguggaccuguuuguguucuccaccucuuuuuaccugauuagcaucuuccuucaccucgucaaaauuccgacccaucgccacguuaucggaaagcccugcccuaaaccccauagacugaaucacaugggcauuuguuccugcggccuguauaagcacccuggggugcccgugaaguggaaacgguga

SEQ ID NO: 5407 - RNA, 1473 nt, Artificial Sequence
  derived and/or modified protein sequence (opt5) from LASV(Lassa virus/H.sapiens-wt/NGA/2016/ISTH_0104;Clade II)__AVO03631__GPCstabilized
augggccaggugaucaccuucuuucaagaggucccccacguuauugaagaggugaugaacaucgugcugauugcccucagccugcuugcuauccugaaggggauuuacaaugucgccacaugcggacucuucggccugaucuccuuucuucugcucugugggagaucuugcagcacgaccuauaaaggaguguacgaacugcagacacuggagcucaacaugcagaaucugaacaugaccaugccucuuuccuguacaaagaacucuagccaucacuauaucaugguuggcaaugaaaccgggcuggagcucacacugaccaauacguccauuaucaaccauaaauucugcaaucuuucugacgcgcacaagaaaaaccuguacgaucaugcucucaugagcauuaucuccaccuuucaccugagcauuccgaauuucaaccaguaugaggccaugucuugugacuuuaauggaggcaagaucuccgugcaauacaaccugagccacacauaugccauugaugcugccaaucauugcggcaccgucgcuaacggggugcuccagacauucaugcggauggccuggggaggcucuuacaucgcgcuggacuccgggugcggaaacugggauuguaucaugaccagcuaccaguaucuuauuauccagaauacgacaugggaagaccacugccaauuuucuagacccuccccuauuggcuaccuggggcuccugagccagcggacccgcgauaucuauauuuccagacggcgccggggaacauucaccuggacccucucugacagcgagggcaacgaagcccccggcggguacugucugacacgcuggaugcugaucgaggcugagcucaagugcuuuggaaauacggccguugcuaaauguaacgaaaagcaugaugaggaguucugcgacaugcugagacuuuuugauuucaauaaacaggccaucaagcggcugaaaacccccgcgcagauguccauucaacucaucaacaaggccgugaaugcucugauuaacgaccagcuuaucaugaagaaucaucugcgcgauauuaugugcaucccuuauugcaacuacagcaaauauugguaccucaaucacacagucaccgggagaacaucucugccccgguguuggcugguguccaacggaagcuaccucaaugacacccaguucucugacgauaucgaacaacaggccgacaacaugauuacggagaugcugcagaaggaguauauggaucgccagggcaaaacaccucuugggcugguggaccucuuugucuucagcaccuccuuuuaccugaucucuauuuuccugcaccuuguuaagaucccgacccacagacauauugugggacggcccugcccuaaaccccaccgccucaaucauaugggcaucuguagcugcggccuguauaagcacccuggggugcccgucaaauggaagagauga

SEQ ID NO: 5408 - RNA, 1476 nt, Artificial Sequence
  derived and/or modified protein sequence (opt5) from LASV(Lassa virus/H.sapiens-wt/NGA/2016/ISTH_0133;Clade II)__AVO03635__GPCstabilized
augggccagaucauuaccuucuuucaagaggugccccacgucaucgaagagguuaugaacauugugcugaucgcccucagccugcuugcugugcugaaggccauuuacaaugucgcgacaugcgggguguucggacucaucuccuuucugcuucuguguggcagaucuugcagcacgaccuauaaagggguuuacgaacuccagacacuggagcuggacauggcuaaccucaauaugaccaugccucuguccuguacaaagaacaauucucaucacuauaucauggugggaaacgaaaccggccuugagcugacacucaccaauacgagcauuaucaaccauaaauucugcaaucuguccgaugcccacaagaaaaaccuuuacgaccauucucugaugagcauuaucuccaccuuucaccucagcauuccgaauuucaaccaguaugaggccaugucuugugauuuuaaugggggaaagaucuccguccaguacaaccugagccacucuuaugcuguggacgccgcuaagcauugcggcacaauugccaauggcguucugcaaaccuucaugcggauggcguggggaggguccuacaucgcccucgauagcggcaaaugcggaugggacuguaucaugacaucuuaccaguaucugauuauccagaacaccacgugggaagaucacugccaguuuucccgccccagcccuauuggcuaccuugggcugcucucccaaagaacacgggacaucuauauuucucgcagacugcgccggaccuucacauggacccugagcgauuccgagggcaacgacgcucccggcggguacugucucacccgguggaugcugaucgaagccgagcugaagugcuuuggaaauacagcuaucgccaaauguaacgagaagcaugaugaagaguucugcgacaugcuccgccuguuugauuucaauagacaggcgauuaaacggcuuaagacggaaccccagaugagcauccagcugauuaacaaggcugugaaugcccucaucaacgaccaacugauuaugaaaaaucaccuucgcgacaucaugggcugcccuuauugcaacuacucuaaguauugguaccugaaucacaccauuacagggaaaaccucccuccccagauguuggcuggucagcaacggaucuuaccugaaugagacacauuucagcgaugacaucgaacagcaggcugauaacaugauuaccgagcuccugcaaaaggaguauauggaccggcagggcaaaacgccucuugggcugguggaucucuuuguguucuccacaucuuuuuaccugaucagcauuuuccugcaccuugucaagaucccgacccaucgccacauuguuggaaaacccugcccuaagccccauagacucaaucacaugggcaucuguuccugcggccuguauaagcacccuggggugcccgugaaauggaagcggcaguga

SEQ ID NO: 5409 - RNA, 1473 nt, Artificial Sequence
  derived and/or modified protein sequence (opt5) from LASV(Lassa virus/H.sapiens-wt/NGA/2016/ISTH_0141;Clade II)__AVO03649__GPCstabilized
augggccagaucauuaccuucuuucaagaggugccccacgucaucgaagagguuaugaacauugugcugaucacacucagccugcuugccauucugaaggggaucuacaauguggcuacgugcggacucuucggccuggucuccuuucuucugcucugugggagaucuugcagcaccaucuauaaaggaguguacgaacugcagacacuggagcucgacauggccucccugaacaugaccaugccucuuucuuguacaaagaauaacagccaucacuauauuaugguuggcaaugaaaccgggcuggagcucacacugaccaacacguccaucauuaaucauaaauucugcaaccuuucugaugcgcacaagaaaaaucuguacgaccaugcucucaugagcaucauuuccaccuuucaccugagcaucccgaacuucaaucaguaugaggccaugucuugugauuuuaacggaggcaagauuuccgugcaguacaaucugagccacacauaugccgucgacgcugccgaacauugcggcaccaucgcuaacggggugcuccaaacauucaugcggauggccuggggaggcucuuacaucgcgcuggauuccgggugcggaagcugggacuguauuaugaccucuuaccaguaucuuaucauucagaauacgacaugggaggaucacugccaguuuucccgccccagcccuaucggcuaccuggggcuccugucccaaagaacccgggacauuuauaucucucgcagacgccggggaacauucaccuggacccucagcgauuccgaaggcaacgagacacccggcggguacugucugacgcgguggaugcugaucgaggccgaacucaaaugcuuuggaaacaccgcuguugccaaguguaaugagaaacaugacgaagaguucugcgauaugcugcgccuuuuugacuucaacaagcaggcuauuagacggcugaaaacacccgcccagaugagcauccagcucauuaauaaggcggugaacgcccugaucaaugaucaacuuauuaugaagaaccaucugcgcgacaucaugugcaucccuuauugcaauuacucuaaauauugguaccucaaccacaccgucacagggaagaccucccugcccagauguuggcuggugagcaauggaucuuaccucaacgagacgcgguucagcgacgauauugagcagcaggcugacaauaugaucacagaacugcuucaaaaagaguauauugaucgccagggcaagaccccucuggggcucguggaccuguuugucuucuccaccucuuuuuaccugaucagcauuuuccuucaccucguuaaaaucccgacacacagacauauuaucggaaagcccugcccuaaaccccaccggcugaaccauaugggcaucuguuccugcggccuguauaagcacccugggauucccgugaaguggaaacgcuga

SEQ ID NO: 5410 - RNA, 1473 nt, Artificial Sequence
  derived and/or modified protein sequence (opt5) from LASV(Lassa virus/H.sapiens-wt/NGA/2016/ISTH_0146;Clade II)__AVO03633__GPCstabilized
augggccagaucauuaccuucuuucaagaggugccccacgucaucgaagagguuaugaacauugugcugaucgcccucagccugcuugcuauucugaaggggaucuacaauguggccacaugcggacucuucggccuggucuccuuucuucugcucugugggagaucuugcagcacgaccuauaaaggaguguacgaacugcagacacuggagcucgacauggcgucccugaacaugaccaugccucuuucuuguacaaagaauaacagccaucacuauaucaugguuggcaaugaaaccgggcuggagcucacacugaccaacacguccauuaucaaucauaaauucugcaaccuuucugaugcucacaagaaaaaucuguacgaccaugcccucaugagcauuaucuccaccuuucaccugagcauuccgaacuucaaucaguaugaggccaugucuugugauuuuaacggaggcaagaucuccgugcaguacaaucugagccacacauaugcugucgacgccgcuaaccauugcggcaccauugccaauggggugcuccaaacauucaugcggauggcguggggaggcucuuacaucgcccuggauuccgggugcggaagcugggacuguaucaugaccucuuaccaguaucuuauuauccagaacacgacaugggaagaucacugccaguuuucccgccccagcccuauuggcuaccuggggcuccugucccaaagaacccgggacaucuauauuucucgcagacgccggggaacauucaccuggacccucagcgauuccgagggcaacgaaacacccggcggguacugucugacgcgguggaugcugaucgaggcugagcucaaaugcuuuggaaauaccgccguugcuaaguguaacgaaaaacaugacgaggaguucugcgauaugcugcgccuuuuugacuucaauaagcaggccaucagacggcugaaaacacccgcgcagaugagcauucagcucaucaacaaggccgugaaugcucugauuaacgaucaacuuaucaugaagaaucaucugcgcgacauuaugugcaucccuuauugcaacuacucuaaauauugguaccucaaucacaccgucacagggaagaccucccugcccagauguuggcuggugagcaacggaucuuaccucaaugaaacgcacuucagcgacgauaucgagcagcaggccgacaacaugauuacagagcugcuucaaaaagaauauauggaucggcagggcaagaccccucuggggcucguggaccuguuugucuucuccaccucuuuuuaccugaucagcauuuuccuucaccucguuaaaaucccgacacaucgccacgugauuggaaagcccugcccuaaaccccauagacugaaucacaugggcaucuguuccugcggccuguauaagcacccuggggugcccgucaaguggaaacgguga

SEQ ID NO: 5411 - RNA, 1473 nt, Artificial Sequence
  derived and/or modified protein sequence (opt5) from LASV(Lassa virus/H.sapiens-wt/NGA/2016/ISTH_0187;Clade II)__AVO03549__GPCstabilized
augggccagaucgugaccuucuuucaagaggucccccacguuauugaagaggugaugaacaucgugcugauugcccucagcguccuggcuauccuuaaggggcuguacaauuucgccacaugcggacucauuggccuggugacguuucuucugcucuccgggagaucuuguagcaugguuuauaaaggaguguacgaacugcagacccuggagcucaacauggaaacacugaauaugaccaugccucuuuccugcacaaagaacaauucucaucacuauauccgggucggcaacgacaccgggcuggagcucacacugaccaauaacacgcuucugaaucauaaauucuguaaccucagcgaugcgcacaagaaaaaucuguacgaccaugcucugauguccaucauuucuaccuuucaccucagcaucccgaacuucaaucaguaugaggccauguccugcgauuuuaacggaggccgcauuacagugcaguacaaucugagccacucuuaugccguugacgcugccaaccauuguggcaccguggcuaacgggguccuucaaacauucaugagaauggccuggggaggcuccuacaucgcgcuggauagccggugcgggaauugggacugcauuaugaccucuuaccaguaucucaucauucagaacacgacaugggaagaucauugucaguuuucccgccccagcccuaucggauaccugggccuucugucucaaagaacccgggacaucuauauuucccgcagacgccgggggacauucaccuggacccugagcgauuccgagggaaaugaaacacccggcggcuacugccucacgcgguggaugcugaucgaggccgagcuuaaguguuuugggaacaccgcuguggccaagugcaaugaaaaacacgacgaggaguucugugauaugcugcgccucuuugacuucaacaagcaggcuauuagacggcugaaagcccccgcgcagaugucuauccagcuuauuaauaaggccgugaacgcucugaucaaugaucaacucaucaugaaaaaccaucugcgcgacauuaugugcaucccuuauugcaauuacagcaaguauugguaccugaaccacacauccaccggcaagacaagccuccccagaugcuggcuggucucuaauggguccuaccuuaacgaaacccacuucagcgacgauauugagcagcaggccgacaauaugaucacggagaugcugcaaaaagaauaucucgaucggcagggaaagacaccucugggccugguugacauuuuuguguucucuaccagcuuuuaccuuaucuccaucuuccuccaucugauuaaaaucccgacccaccgccauauuguggggaagcccuguccuaaaccccacagacugaaccacaugggaaucugcucuuguggccucuauaagcagccuggcguccccgugcgguggaaaagauga

SEQ ID NO: 5412 - RNA, 1473 nt, Artificial Sequence
  derived and/or modified protein sequence (opt5) from LASV(Lassa virus/H.sapiens-wt/NGA/2016/ISTH_0199;Clade II)__AVO03653__GPCstabilized
augggccagaucauuaccuucuuucaagaggugccccacgucaucgaagagguuaugaacauugugcugaucgcccucagccugcuugcuauucugaaggggaucuacaauguggccacaugcggacucuucggccuggucuccuuucuucugcucugugggagaucuugcagcacgaccuauaaaggaguguacgaacugcagacacuggagcucgacauggcgucccugaacaugaccaugccucuuucuuguacaaagaauaacagccaucacuauaucaugguuggcaaugaaaccgggcuggagcucacacugaccaacacguccauuaucaaucauaaauucugcaaccuuucugaugcucacaagaaaaaucuguacgaccaugcccucaugagcauuaucuccaccuuucaccugagcauuccgaacuucaaucaguaugaggccaugucuugugauuuuaacggaggcaagaucuccgugcaguacaaucugagccacacauaugcugucgacgccgcuaaccauugcggcaccauugccaauggggugcuccaaacauucaugcggauggcguggggaggcucuuacaucgcccuggauuccgggugcggaaacugggacuguaucaugaccagcuaccaguaucuuauuauccagaacacgacaugggaagaucacugccaguuuucucgccccuccccuauuggcuaccuggggcuccugagccaaagaacccgggacaucuauauuucccgcagacgccggggaacauucaccuggacccucucugauagcgagggcaaugaaacacccggcggguacugucugacgcgguggaugcugaucgaggcugagcucaaaugcuuuggaaacaccgccguugcuaaguguaaugaaaaacaugacgaggaguucugcgauaugcugcgccuuuuugacuucaacaagcaggccaucuccagacugaaaacacccgcgcagaugagcauucagcucaucaauaaggccgugaacgcucugauuaaugaucaacuuaucaugaagaaccaucugcgggacauuaugugcaucccuuauugcaauuacucuaaauauugguaccucaaccacaccgucacagggaagaccucccugccccgcuguuggcuggugagcaauggaucuuaccucaacgaaacgcacuucagcgacgauaucgagcagcaggccgacaauaugauuacagagaugcugcaaaaagaauauaucgauagacagggcaagaccccucuugggcugguggaccucuuugucuucuccaccucuuuuuaccugauuagcaucuuccugcaccuuguuaaaauuccgacacaucggcacgugaucggaaagcccugcccuaaaccccaucgccucaaccacaugggcauuuguuccugcggccuguauaagcacccuggggugcccgucaaguggaaaagauga

SEQ ID NO: 5413 - RNA, 1473 nt, Artificial Sequence
  derived and/or modified protein sequence (opt5) from LASV(Lassa virus/H.sapiens-wt/NGA/2016/ISTH_0419;Clade II)__AVO03539__GPCstabilized
augggccagaucgugaccuucuuucaagaggucccccacguuauugaagaggugaugaacaucgugcugauugcccucagccugcuugcuauccugaaggggauuuacaauuucgccacaugcggacucaucggccugaucacguuucuuuuccugugugggagauccugcucugcgauuuauaaaggaagcuaccagcuccagaccaucgaacugaacauggagacacugaauaugaccaugccucucuccuguacaaagaacucuagccaucacuauauucgggucggcaaugaaaccgggcuggagcuuacacugaccaacaucuccauuaucgaccauaaauuuugcaaucucucugaugcucacaagaaaaaccuguacgaccaugcccuuaugagcauuaucuccacguuccaccugagcaucccgaauuuuaaccaguaugaggccaugucuugugauuucaauggaggcaagauuuccgugcaauacaaccucagccacaccuaugcuguugacgccgcuaaucauugcggcacaguggccaacgggguccugcagaccuuuaugcgcauggcguggggaggcucuuacaucgcccuggauuccgggugcggaaauugggacuguauuaugacaagcuaccaguaucucaucauucagaacaccacgugggaagaucacugccaauucucucggcccuccccuaucggcuaccuggggcuucugagccagcgcacaagagacaucuauauuucccggcgccgccggggaaccuuuacauggacccuuucugauagcgagggcaaggaaacccccggcggguacugucugacaagauggaugcucaucgaggcugagcugaaaugcuucggaaacacggccguggcuaaguguaaugaaaaacaugacgaggaauuuugcgauaugcugcgccucuucgacuucaacaagcaggccauucagcggcugaaagcgcccgcccaaauguccauccagcuuauuaauaaggcuguuaacgcccugaucaaugaucagcucaucaugaagaaccaccugagagacauuaugugcaucccuuauugcaauuacagcaaauauugguaccuuaaccacaccucuacagggcggaccucccugccccgcuguuggcucgugagcaauggaucuuaccugaacgaaacacauuuuagcgacgauauugagcaacaggcugacaauaugaucaccgagaugcugcagaaggaauauauugauagacagggcaaaacgccucucgggcuggucgaccuuuucguguuuuccacaucuuucuaccugaucagcauuuuucuccaccugaucaagaucccgacccaucggcacauugugggaaaauccugccccaagccucaucgccugaaccacaugggcaucuguagcugcggccuuuauaaacaacccggggucccuguuaaguggaagagauga

SEQ ID NO: 5414 - RNA, 1473 nt, Artificial Sequence
  derived and/or modified protein sequence (opt5) from LASV(Lassa virus/H.sapiens-wt/NGA/2016/ISTH_0447;Clade II)__AVO03559__GPCstabilized
augggccagaucauuaccuucuuucaagaggugccccacgucaucgaagagguuaugaacauugugcugaucgcccucagccugcuugcuauucugaaggggaucuacaauaucgccacaugcggacucuucggccugguguccuuucuucugcucugugggagaucuugcagcacgaccuauaaaggagucuacgaacugcagacacuggagcucgacauggcgucccugaacaugaccaugccucuuucuuguacaaagaauaacagccaucacuauauuauggugggcaaugaaaccgggcuggagcucacacugaccaacacguccaucauuaaucauaaauucugcaaccuuucugaugcucacaagaaaaaucuguacgaccauacccucaugagcaucauuuccacauuucaccugagcaucccgaacuucaaucaguaugaggccaugucuugugauuuuaacggaggcaagauuuccguucaguacaaucugagccacgccuaugcuguggacgccgcuaaccauugcggcaccaucgccaaugggguccuccaaacauucaugcggauggcguggggaggcucuuacaucgcccuggauuccgggugcggaaacugggacuguauuaugaccagcuaccaguaucuuaucauucagaacacgacaugggaagaucacugccaguuuucucgccccuccccuaucggcuaccuggggcuccugagccaaagaacccgggacauuuauaucucccgcagacgccggggaacauucaccuggacccucucugauagcgagggcaaugaaacacccggcggguacugucugacgcgguggaugcugaucgaggcugagcucaaaugcuuuggaaacaccgccguggcuaaguguaaugaaaaacaugacgaggaguucugcgauaugcugcgccuuuuugacuucaacaagcaggccauuagacggcugaaaacacccgcgcagauguccauccagcucauuaauaaggccguuaacgcucugaucaaugaucaacuuauuaugaagaaccaucugcgcgacaucaugugcaucccuuauugcaauuacagcaaauauugguaccucaaccacaccgugacagggaagaccucucugcccagauguuggcuggucuccaauggaagcuaccucaacgaaacgcacuucucugacgauauugagcagcaggccgacaauaugaucacagagcugcuucaaaaagaauauauugaucggcagggcaagaccccucuggggcucguggaccuguuuguguucagcaccuccuuuuaccugaucucuauuuuccuucaccucgucaaaaucccgacacaucgccacguugugggaaagcccugcccuaaaccccauagacugaaccacaugggcauuuguagcugcggccuguauaagcacccuggggugcccgucaaguggaaacgguga

SEQ ID NO: 5415 - RNA, 1473 nt, Artificial Sequence
  derived and/or modified protein sequence (opt5) from LASV(Lassa virus/H.sapiens-wt/NGA/2016/ISTH_0543;Clade II)__AVO03595__GPCstabilized
augggccagaucauuaccuucuuucaagaggugccccacgucaucgaagagguuaugaacauugugcugaucgcccucagccugcuugcuauucugaaggggaucuacaauaucgccacaugcggacucuucggccugauuuccuuucuucugcucugugggagaucuugcagcacgaccuauaaaggaguguacgaacugcagacacuggagcucgacauggcgaaccugaauaugaccaugccucuuuccuguacaaagaacaauucucaucacuauaucauggucggcaacgaaaccgggcuggagcucacacugaccaauacgagcauuaucaaccauaaauucugcaaucuuuccgaugcucacaagaaaaaccuguacgaccaugcccucaugucuauuaucagcaccuuucaccuguccauuccgaauuucaaccaguaugaggccaugagcugugauuuuaauggaggcaagaucucugugcaguacaaccugucccacagcuaugcuguugacgccgcuggccauugcgggacaaucgccaauggagugcuccaaaccuucaugcggauggcguggggcgggucuuacauugcccuggauuccggaugcggcaacugggacuguaucaugacaagcuaccaguaucuugucauucagaacaccacgugggaagaucacugccaguuuucucgccccuccccuaucggguaccugggacuccugagccaaagaacacgggacauuuauaucucccgcagacgccggggcaccuucacauggacccucucugauagcgagggcaaugaagcucccgggggauacugucugacccgguggaugcugaucgaggccgagcucaaaugcuuuggcaacacagcuauugccaaguguaaugaaaaacaugacgaggaguucugcgauaugcugcgccuuuuugacuucaacaagcaggcgaucagacggcugaaagcccccgcucagauguccauucagcucaucaauaaggccgugaacgcucugauuaaugaucaacuuaucaugaagaaccaucugcgcgacaucaugugcauuccuuauugcaauuacagcaaauauugguaccucaaccacacgguuaccggaaagacaucucugcccaaauguuggcugguguccaauggcagcuaccucaacgaaacccacuucucugacgauaucgagcagcaggccgacaauaugauuacagagcugcuucaaaaggaauauauggauagacaggggaaaaccccucugggacucgucgaccuguuuguguucagcacguccuuuuaccugaucucuauuuuccuucaccucgugaagaucccgacacaucggcacauugucggccgccccugcccuaaaccccauagacugaaccacaugggcaucuguagcugcgggcuguauaagcacccuggaguucccgugaaguggaaacgguga

SEQ ID NO: 5416 - RNA, 1473 nt, Artificial Sequence
  derived and/or modified protein sequence (opt5) from LASV(Lassa virus/H.sapiens-wt/NGA/2016/ISTH_0565;Clade II)__AVO03637__GPCstabilized
augggccagaucgugaccuucuuucaagaggucccccacguuauugaagaggugaugaacaucgugcugauugcccucagccugcuugcuauccugaaggggauuuacaaugucgccacaugcggacucuucggccugaucuccuuucuucugcucugugggagaucuugcagcacgaccuauaaaggaguguacgaacugcagacacuggagcucgacauggcgaaccugaauaugaccaugccucuuuccuguacaaagaacucuagccaucacuauaucaugguuggcaaugaaaccgggcuggagcucacacugaccaacacguccauuaucaaucauaaauucugcaaccuuucugaugcucacaagaaaaaucuguacgaccaugcccucaugagcauuaucuccaccuuucaccugagcauuccgaacuucaaucaguaugaggccaugucuugugauuuuaacggaggcaagaucuccgugcaguacaaucugagccacacauaugcugucgacgccgcuaaccauugcggcaccauugccaauggggugcuccaaacauucaugcggauggcguggggaggcucuuacaucgcccuggauuccgggugcggaaacugggacuguaucaugaccagcuaccaguaucuuauuauccagaacacgacaugggaagaucacugccaguuuucucgccccuccccuauuggcuaccuggggcuccugagccaaagaacccgggacaucuauauuucccgcagacgccggggaacauucaccuggacccucucugauagcgagggcaaugaagcucccggcggguacugucugacacgguggaugcugaucgaggccgagcucaaaugcuuuggaaacacggcuaucgccaaguguaaugaaaaacaugacgaggaguucugcgauaugcugcgccuuuuugacuucaacaagcaggcgauuaaaagacugaagucccccgcccagaugagcauccagcucauuaauaaggcuguuaacgcccugaucaaugaucaacuuauuaugaaaaaccaucugcgggacaucaugugcaucccuuauugcaauuacucucgcuauugguaccucaaccacaccgugacagggaagaccucccugcccagauguuggcugauuagcaauggaucuuaccucaacgaaacacacuucagcgacgauaucgagcagcaggcugacaauaugauuaccgagcugcuucaaaaagaauauauggaucggcagggcaagacgccucuggggcucgucgaccuguuuguguucuccacaucuuuuuaccugaucagcauuuuccuucaccucgugaaaaucccgacccaucgccacauugucggaagacccugcccuaagccccaucggcugaaccacaugggcaucuguuccugcggccuguauaaacacccugggguucccgugaaguggaagcgcuga

SEQ ID NO: 5417 - RNA, 1473 nt, Artificial Sequence
  derived and/or modified protein sequence (opt5) from LASV(Lassa virus/H.sapiens-wt/NGA/2016/ISTH_0572;Clade II)__AVO03611__GPCstabilized
augggccagaucauuaccuucuuucaagaggugccccacgucaucgaagagguuaugaacauugugcugaucgcccucagccugcuugcuauucugaaggggaucuacaauguggccacaugcggacucuucggccuggucgcguuucuucugcucugugggagauccugcucuacgaccuauaaaggaguguacgaacugcagacacuggagcucgacauggcuagccugaacaugaccaugccucuuuccuguacaaagaauaacucucaucacuauaucaugguuggcaaugaaaccgggcuggagcucacacugaccaacacgagcauuaucaaucauaaauucugcaaccuuuccgaugcccacaagaaaaaucuguacgaccaugcccucaugucuauuaucagcaccuuucaccuguccauuccgaacuucaaucagcacgaggcuaugagcugugauuuuaacggaggcaagaucucugugcaguauaaucugucccauacauacgccgucgacgcugccaaccacugcggcaccauugcgaauggggugcuccaaacauucaugcggauggccuggggaggcagcuauaucgcucuggauucugggugcggauccugggacuguaucaugaccagcuaccaguaccuuauuauccagaacacgacaugggaagaucauugccaguuuucucgccccuccccuauuggcuaucuggggcuccugagccaaagaacccgggacaucuacauuucccgcagacgccggggaacauucaccuggacccucucugauagcgagggcaacgaaacacccggcggguauugucugacgcgguggaugcugaucgaggccgagcucaaaugcuuuggaaauaccgcuguugccaaguguaacgaaaaacacgacgaggaguucugcgauaugcugcgccuuuuugacuucaauaagcaggcgaucagacggcugaaaacacccgcccagauguccauucagcucaucaacaaggcugugaaugcccugauuaacgaucaacuuaucaugaagaaucaucugcgcgacauuaugugcaucccuuacugcaacuauagcaaauacugguaucucaaucacaccgucacagggagaaccucucugccccgguguuggcugguguccaacggaagcuaccucaaugaaacgcacuucucugacgauaucgagcagcaggcugacaacaugauuacagagcugcuucaaaaggaauacauggaucgccagggcaaaaccccucuggggcucguggaccuguuugucuucagcaccuccuuuuaucugaucucuauuuuccuucaucucaucaagauuccgacacacagacauguuaucggaaaacccugcccuaagccccaccggcugaaucacaugggcauuuguagcugcggccuguacaaacauccuggggugcccgugaaguggaagcgcuga

SEQ ID NO: 5418 - RNA, 1473 nt, Artificial Sequence
  derived and/or modified protein sequence (opt5) from LASV(Lassa virus/H.sapiens-wt/NGA/2016/ISTH_0610;Clade II)__AVO03585__GPCstabilized
augggccagaucauuaccuucuuucaagaggugccccacgucaucgaagagguuaugaacauugugcugaucgcccucagccugcuugcuauucugaaggggguguacaaugucgccacaugcggacucuucggccugguguccuuucuucugcucugugggagaucuugcagcacgaccuauaaaggaguuuacgaacugcagacacuggagcucgacauggcgucccugaacaugaccaugccucuuucuuguacaaagaauaacagccaucacuauaucauggugggcaaugaaaccgggcuggagcucacacugaccaacacguccaucauuaaucauaaauucugcaaccuuucugaugcucacaagaaaaaucuguacgaccaugcccucaugagcaucauuuccaccuuucaccugagcaucccgaacuucaaucaguaugaggccaugucuugugauuuuaacggaggcaagauuuccguccaguacaaucugagccacacauaugcuguggacgccgcuaaccauugcggcaccaucgccaaugggguucuccaaacauucaugcggauggcguggggaggcucuuacauugcccuggauuccgggugcggaagcugggacuguaucaugaccucuuaccaguaucuuaucauucagaacacgacaugggaagaucacugccaguuuuccagacccagcccuaucggcuaccuggggcuccugucccaacggacccgcgacauuuauaucucuagacggcgccggggaacauucaccuggacccucagcgauuccgagggcaacgaaacacccggcggguacugucugacgcgcuggaugcugauugaggcugagcucaagugcuuuggaaauaccgccguggcuaaauguaacgaaaagcaugacgaggaguucugcgauaugcugagacuuuuugacuucaauaaacaggccauccggcgccugaaggcgcccgcccagaugagcauccagcucauuaacaaagcugucaaugcccugaucaacgaucaacuuauuaugaagaaucaccugagagacaucaugugcauuccuuauugcaacuacucuaaguauugguaccucaaucacacagugaccgggcggacaucccugccccgcuguuggcuggugagcaacggaucuuaccucaaugaaacccauuucagcgacgauaucgagcagcaggcugacaacaugaucacggagcugcuucaaaaagaauauauugauagacagggcaagacaccucuggggcucgucgaccuguuuguuuucuccaccucuuuuuaccugaucagcauuuuccuucaccucgugaaaaucccgacccaucggcacauuaucggaaagcccugcccuaaaccccaucgccugaaucacaugggcauuuguuccugcggccuguauaagcacccuggggugcccgucaaauggaagagauga

SEQ ID NO: 5419 - RNA, 1473 nt, Artificial Sequence
  derived and/or modified protein sequence (opt5) from LASV(Lassa virus/H.sapiens-wt/NGA/2016/ISTH_0621;Clade II)__AVO03543__GPCstabilized
augggccagaucgugaccuucuuucaagagauuccccacgucguugaagagaucaugaacauugugcugaucacacucagccugcuugccauucugaaggggcucuacaauuucgcuacgugcggacugaucggccuuaucaccuuucuguuccucugugggagauccugcucuacaauuuauaaaggaagcuaccagcugcaggcccuggaacucaacauggagacccugaauaugacaaugccucuuuccuguaccaagaacaauucucaucacuauauccgggugggcaacgaaacagggcuggagcucacccugacgaauaccagcauuaucgaccauaaauuuugcaaccuuuccgaugcgcacaagcgcaaucuguacgaccauacacucaugucuauuaucagcaccuuccaccuguccauuccgaacuuuaaucaguaugaggcuaugagcugugauuucaacggaggcaaaaucucuguccaauacaaucugucccacagcuaugccggcgacgccgcuagacauugcgggacaguggccaacggaguucuccagaccuuuaugcggauggcuuggggcgggucuuacaucgcccuggauuccggaugcggcaauugggacuguauuaugacgagcuaccaguaucuuaucauucagaacacaaccugggaaaaccacugccaauucucucgccccuccccuaucggguaccugggacuccugagccagagaacacgggauauuuauaucucccgcagacgccggggcaccuuuaccuggacacucucugacagcgagggcaaggaaacgcccgggggauacugucugacccgguggaugcugaucgaggcggagcucaaaugcuucggcaauacagccguggcuaaguguaacgaaaaacaugaugaggaauuuugcgacaugcugcgccuuuucgauuucaauaagcaggccauucagagacugaaaacccccgcucaaauguccauccagcucauuaacaaggccgucaaugcgcugaucaacgaccagcuuauuaugaagaaucaucugcgggauaucaugugcaucccuuauugcaacuacagcaaauauugguaccucaaucacacaaccacgggaaagacaucucugcccaaauguuggcugguguccaacggcagcuaccucaaugaaacccacuuuucugacgacauugagcaacaggccgauaacaugaucaccgagaugcugcagaaggaauauauugaccgccaggggaaaacaccucuuggacugguugaucucuucguguuuagcaccuccuucuaccugaucucuauuuuucugcaccuuaucaagauuccgacacauagacacaucgucggcaaaagcugccccaagccucaucggcucaaucacaugggcaucuguuccugcgggcuguauaagcaacccggagugcuggugaaauggaagcgcuga

SEQ ID NO: 5420 - RNA, 1473 nt, Artificial Sequence
  derived and/or modified protein sequence (opt5) from LASV(Lassa virus/H.sapiens-wt/NGA/2016/ISTH_0701;Clade II)__AVO03629__GPCstabilized
augggccagaucauuaccuucuuucaagaggugccccacgucaucgaagagguuaugaacauugugcugaucgcccucagccugcuugcuauucugaaggggaucuacaauguggccacaugcggacucuucggccuggucuccuuucuucugcucugugggagaucuugcagcacgaccuauaaaggaguguacgaacugcagacacuggagcucgacauggcgucccugaacaugaccaugccucuuucuuguacaaagaauaacagccaucacuauaucaugguuggcaaugaaaccgggcuggagcucacacugaccaacacguccauuaucggacauaaauucugcaaucuuucugaugcucacaagaaaaaccuguacgaccaugcccucaugagcauuaucuccaccuuucaccugagcauuccgaauuucaaccaguaugaggccaugucuugugauuuuaauggcggcaagaucuccgugcaguacaaccugagccacgcuuaugccgucgacgcugccaaucauugcgggacaauugcgaacggagugcuccaaaccuucaugcggauggccuggggcgggucuuacaucgcucuggauuccggaugcggcagcugggacuguaucaugacaucuuaccaguaucuuauuauccagaauaccacgugggaagaucacugccaguuuucccgccccagcccuauuggguaccugggacuccugucccaaagaacacgggacaucuauauuucucgcagacgccggggcaccuucacauggacccucagcgauuccgagggcaacgaaacccccgggggauacugucugacacgguggaugcugaucgaggccgagcucaaaugcuuuggcaacacggcuguugccaaguguaaugaaaaacaugacgaggaguucugcgauaugcugcgccuuuuugacuucaacaagcaggcgaucagacggcugaaaacccccgcccagaugagcauucagcucaucaauaaggcugugaacgcccugauuaaugaucaacuuaucaugaagaaccaucugcgcgacauuaugugcaucccuuauugcaauuacucuaaauauugguaccucaaccacacagucaccggaaagacaucccugcccagauguuggcuggugagcaauggcucuuaccucaacgaaacccacuucagcgacgauaucgagcagcaggcugacaauaugauuacggagcugcuucaaaaagaauauaucgaucggcaggggaagacaccucugggacucguggaccuguuugucuucuccaccucuuuuuaccugauuagcaucuuccuucaccucguuaaaauuccgacccaucgccacgugaucggcaagcccugcccuaaaccccauagacugaaccacaugggcauuuguuccugcgggcuguauaagcacccuggagugcccgucaaguggaaacgguga

SEQ ID NO: 5421 - RNA, 1473 nt, Artificial Sequence
  derived and/or modified protein sequence (opt5) from LASV(Lassa virus/H.sapiens-wt/NGA/2016/ISTH_0702;Clade II)__AVO03557__GPCstabilized
augggccagaucauuaccuucuuucaagaggugccccacgucaucgaagagguuaugaacauugugcugaucgcccucagccugcuugcugugcugaaggggauuuacaaugucgccacaugcggacucuucggccugguggcguuucuucugcucugugggagauccugcucuacgaccuauaaaggaguuuacgaacugcagacacuggagcucgacauggcuaaccugaauaugaccaugccucuuagcuguacaaagaacaauucccaucacuauaucauggugggcaacgaaaccgggcuggagcucacacugaccaauacgucuaucauuaaccauaaauucugcaaucuuagcgaugcccacaagaaaaaccuguacgaccaugcccucauguccaucauuucuaccuuucaccugagcaucccgaauuucaaccaguaugaggcuauguccugugauuuuaauggaggcaagauuagcguccaguacaaccugucucacacauaugccguggacgcugccaaucauugcggcaccaucgcgaacgggguucuccaaacauucaugcggauggccuggggaggcuccuacauugcucuggauagcgggugcggaucuugggacuguaucaugaccuccuaccaguaucuuaucauucagaacacgacaugggaagaucacugccaguuuagccgccccucuccuaucggcuaccuggggcuccugucccaaagaacccgggacauuuauaucagccgcagacgccggggaacauucaccuggacccucuccgauucugagggcaaugaaacacccggcggguacugucugacgcgguggaugcugauugaggccgagcucaaaugcuuuggaaacaccgcuguggccaaguguaaugaaaaacaugacgaggaguucugcgauaugcugcgccuuuuugacuucaacaagcaggcgaucagacggcugaaaacacccgcccagaugagcauccagcucauuaauaaggcugucaacgcccugaucaaugaucaacuuauuaugaagaaccaucugcgcgacaucaugugcauuccuuauugcaauuacuccaaauauugguaccucaaccacaccgugacagggagaaccagccugccccgguguuggcuggugucuaauggauccuaccucaacgaaacgcacuucagcgacgauaucgagcagcaggcugacaauaugaucacagagcugcuucaaaaggaauauauggaucgccagggcaaaaccccucuggggcucgucgaccuguuuguuuucucuaccagcuuuuaccugauuuccaucuuccuucaccucauuaagaucccgacacauagacacgugauuggaaaacccugcccuaagccccaucggcugaaccacaugggcaucuguucuugcggccuguauaaacacccuggggugcccgucaaguggaagcgcuga

SEQ ID NO: 5422 - RNA, 1473 nt, Artificial Sequence
  derived and/or modified protein sequence (opt5) from LASV(Lassa virus/H.sapiens-wt/NGA/2016/ISTH_0703;Clade II)__AVO03597__GPCstabilized
augggccagaucauuaccuucuuucaagaggugccccacgucaucgaagagguuaugaacauugugcugaucgcccucagccugcuugcuauucugaaggggaucuacaauguggccacaugcggacucuucggccuggucuccuuucuucugcucugugggagaucuugcagcacgaccuauaaaggaguguacgaacugcagacacuggagcucgacauggcgucccugaacaugaccaugccucuuucuuguacaaagaauaacagccaucacuauaucaugguuggcaaugaaaccgggcuggagcucacacugaccaacacguccauuaucaaucauaaauucugcaaccuuucugaugcucacaagaaaaaucuguacgaccaugcccucaugagcauuaucuccaccuuucaccugagcauuccgaacuucaaucaguaugaggccaugucuugugauuuuaacggaggcaagaucuccgugcaguacaaucugagccacacauaugcugucgacgccgcuucucauugcggcaccauugccaacggggugcuccaaacauucaugcggauggcguggggaggcuccuacaucgcccuggauagcgggugcggaucuugggacuguaucaugaccuccuaccaguaucuuauuauccagaauacgacaugggaagaucacugccaguuuagccgccccuccccuauuggcuaccuggggcuccugucucaaagaacccgggacaucuauauuagccgcagacgccggggaacauucaccuggacccucuccgauagcgagggcaacgaaacacccggcggguacugucugacgcgguggaugcugaucgaggcugagcucaaaugcuuuggaaacaccgccguugcuaaguguaaugaaaaacaugacgaggaguucugcgauaugcugcgccuuuuugacuucaacaagcaggccaucagacggcugaaaacacccgcgcagaugucuauucagcucaucaauaaggccgugaacgcucugauuaaugaucaacuuaucaugaagaaccaucugcgcgacauuaugugcaucccuuauugcaauuacuccaaauauugguaccucaaccacaccgucacagggagaaccagccugccccgguguuggcuggugucuaauggaagcuaccucaacgaaacgcacuucuccgacgauaucgagcagcaggccgacaauaugauuacagagcugcuucaaaaggaauauaucgagcgccagggcaaaaccccucuggggcucguggaucuguuugucuucucuaccagcuuuuaccugauuuccaucuuccuucaccucauuaagaucccgacacauagacacguuauuggaaaacccugcccuaagccccaucggcugaaccacaugggcaucuguagcugcggccuguauaaacacccuggggugcccgugaaguggaagcgcuga

SEQ ID NO: 5423 - RNA, 1473 nt, Artificial Sequence
  derived and/or modified protein sequence (opt5) from LASV(Lassa virus/H.sapiens-wt/NGA/2016/ISTH_0717;Clade II)__AVO03547__GPCstabilized
augggccagaucgugaccuucuuucaagaggucccccacguuauugaagaggugaugaacaucgugcugauugcccucagcauccuggcuauucuuaaggggcuguacaaugucgccacaugcggacucaucggccuggugacguuccuucugcucuccgggagaucuuguagcaugaucuauaaaggaguuuacgaacugcagacccuggagcucaacauggaaacacugaauaugaccaugccucuuuccugcacaaagaacaauucucaucacuauauuauggugggcaacgagaccgggcuggagcucacacugaccaauacgagccuucugaaccauaaauuuuguaaucucuccgacgcgcacaagaaaaaccuguacgaucauacccugaugucuaucauuagcacauuccaccucuccaucccgaauuuuaaccaguaugaagcuaugagcugcgacuucaauggaggcaagauuaccguccaguacaaccugucucacacauaugccguggaugccguuaaucauuguggcacccuugcuaacgggauccugcaaacguuuaugcggauggccuggggaggcuccuacauugcucucgacagccgcugcgggucuugggauugcaucaugacauccuaccaguaucugaucauucagaacaccacaugggaggaccauugucaguucagcagacccucuccuaucggauaccuuggccugcucucccaacggacccgcgauauuuauaucagcagacggcgccgggggaccuuuacauggacgcucuccgacucugaaggaaaugagacccccggcggcuacugccugacacgcuggaugcuuauugaggccgaacugaaguguuucgggaacaccgcgguggccaaaugcaaugagaagcacgaugaagaguuuugugacaugcucagacuguucgauuuuaacaaacaggcuauccggcgccuuaaggcccccgcucagaugagcauccagcugauuaauaaagccgucaacgcgcucaucaaugaccaacugauuaugaagaaccaccugagagauaucaugugcauuccuuauugcaauuacuccaaguauugguaccucaaccauacaagcaccggacggacgucucugccccgcugcuggcuuguguccaaugggagcuaccugaacgagacacacuucucugacgacaucgagcagcaggccgauaauaugaucaccgaaaugcuccaaaaagaguaucuggacagacagggaaagaccccucugggccuuguggaucucuucgucuuuagcacauccuucuaccugauuucuaucuuucugcaucucauuaaaaucccgacccaccggcauauuguugggaagcccuguccuaaaccccaccgccugaaccacaugggaaucugcagcuguggccuuuauaagcagccuggcgugcccgugagauggaaacgguga

SEQ ID NO: 5424 - RNA, 1473 nt, Artificial Sequence
  derived and/or modified protein sequence (opt5) from LASV(Lassa virus/H.sapiens-wt/NGA/2016/ISTH_0753;Clade II)__AVO03609__GPCstabilized
augggccagaucauuaccuucuuucaagaggugccccacgucaucgaagagguuaugaacauugugcugaucgcccucagccugcuugcuauucugaaggggaucuacaauguggccacaugcggacucuucggccuggucuccuuucuucugcucugugggagaucuugcagcacgaccuauaaaggaguguacgaacugcagacacuggagcucgacauggcgucccugaacaugaccaugccucuuucuuguacaaagaauaacagccaucacuauaucaugguuggcaaugaaaccgggcuggagcucacacugaccaacacguccauuaucaaucauaaauucugcaaccuuucugaugcucacaagaaaaaucuguacgaccaugcccucaugagcauuaucuccaccuuucaccugagcauuccgaacuucaaucaguaugaggccaugucuugugauuuuaacggaggcaagaucuccgugcaguacaaucugagccacacauaugcugucgacgccgcuaaccauugcggcaccauugccaauggggugcuccaaacauucaugcggauggcguggggaggcucuuacaucgcccuggauuccgggugcggaaacugggacuguaucaugaccagcuaccaguaucuuauuauccagaacacgacaugggaagaucacugccaguuuucucgccccuccccuauuggcuaccuggggcuccugagccaaagaacccgggacaucuauauuucccgcagacgccggggaacauucaccuggacccucucugauagcgagggcaaugaaacacccggcggguacugucugacgcgguggaugcugaucgaggcugagcucaaaugcuuuggaaacaccgccguugcuaaguguaaugaaaaacaugacgaggaguucugcgauaugcugcgccuuuuugacuucaacaagcaggccaucuccagacugaaaacacccgcgcagaugagcauucagcucaucaauaaggccgugaacgcucugauuaaugaucaacuuaucaugaagaaccaucugcgggacauuaugugcaucccuuauugcaauuacucuaaauauugguaccucaaccacaccgucacagggcgcaccucccugcccagauguuggcuggugagcaauggaucuuaccucaacgaaacgcacuucagcgacgauaucgagcagcaggccgacaauaugauuacagagcugcuucaaaaggaauauauggaucggcagggcaaaaccccucuggggcucguggaccuguuugucuucuccaccucuuuuuaccugaucagcauuuuccuucaccucguuaagaucccgacacaucgccacgugauuggaaaacccugcccuaagccccauagacugaaccacaugggcaucuguuccugcggccuguauaaacacccuggggugcccgucaaguggaagcgguga

SEQ ID NO: 5425 - RNA, 1473 nt, Artificial Sequence
  derived and/or modified protein sequence (opt5) from LASV(Lassa virus/H.sapiens-wt/NGA/2016/ISTH_0759;Clade II)__AVO03593__GPCstabilized
augggccagaucauuaccuucuuucaagaggugccccacgucaucgaagagguuaugaacauugugcugaucgcccucagccugcuugcuauucugaaggggaucuacaauguggccacaugcggacucuucggccuggucuccuuucuucugcucugugggagaucuugcagcacgaccuauaaaggaguguacgaacugcagacacuggagcucgacauggcgucccugaacaugaccaugccucuuucuuguacaaagaauaacagccaucacuauaucaugguuggcaaugaaaccgggcuggagcucacacugaccaacacguccauuaucaaucauaaauucugcaaccuuucugaugcucacaagaaaaaucuguacgaccauacccucaugagcauuaucuccacauuucaccugagcauuccgaacuucaaucaguaugaggccaugucuugugauuuuaacggaggcaagaucuccgugcaguacaaucugagccacaccuaugccgucgacgcugccaaccauugcggcacaauugcuaauggggugcuccaaaccuucaugcggauggccuggggaggcucuuacaucgcgcuggauuccgggugcggaagcugggacuguaucaugacgucuuaccaguaucuuauuauccagaacacauccugggaagaucacugccaguuuagccgccccuccccuauuggcuaccuggggcuccugucucaaagaacccgggacaucuauauuagccgcagacgccggggaacauucaccuggacccucuccgauagcgagggcaacgaaacacccggcggguacugucugacgcgguggaugcugaucgaggccgagcucaaaugcuuuggaaauaccgcuguugccaaguguaacgaaaaacaugacgaggaguucugcgauaugcugcgccuuuuugacuucaauaagcaggcuaucagacggcugaaaacacccgcccagaugucuauucagcucaucaacaaggcggugaaugcccugauuaacgaucaacuuaucaugaagaaucaucugcgcgacauuaugugcaucccuuauugcaacuacuccaaauauugguaccucaaucacaccgucacagggaagaccagccugcccagauguuggcuggugucuaacggaagcuaccucaaugaaacgcacuucuccgacgauaucgagcagcaggcugacaacaugauuacagagcugcuucaaaaagaauauaucgaucggcagggcaagaccccucuggggcucguggaccuguuugucuucucuaccagcuuuuaccugauuuccaucuuccuucaccucguuaaaauuccgacacaucgccacgugaucggaaagcccugcccuaaaccccauagacugaaucacaugggcauuuguagcugcggccuguauaagcacccuggggugcccgucaaguggaaacgguga

SEQ ID NO: 5426 - RNA, 1473 nt, Artificial Sequence
  derived and/or modified protein sequence (opt5) from LASV(Lassa virus/H.sapiens-wt/NGA/2016/ISTH_0777;Clade II)__AVO03615__GPCstabilized
augggccagaucauuaccuucuuucaagaggugccccacgucaucgaagagguuaugaacauugugcugaucgcccucagccugcuugcuauucugaaggggaucuacaauguggccacaugcggacuccugggccuuaucuccuuccugcuccugugugggagaucuugcagcacgaccuauaaaggagucuacgaacugcagacacucgagcuggacauggcgaaccuuaauaugaccaugccucuguccuguacaaagaacucuagccaucacuauauuauggugggcaaugaaaccgggcucgagcugacacuuaccaacacguccaucauuaaucauaaauuuugcaaccugucugaugcucacaagaaaaaucucuacgaccaugcccugaugagcaucauuuccaccuuccaccugagcaucccgaacuuuaaucaguaugaggccaugucuugugauuucaacggaggcaagauuuccguucaguacaaucucagccacgcuuaugccguggacgcugccaaccauugcggcacaaucgcgaaugggguccugcaaaccuuuaugcggauggccuggggaggcucuuacaucgcucuugauuccgggugcggaaacugggacuguauuaugacaagcuaccaguaucugaucauucagaacaccacgugggaagaucacugccaguucucucgccccuccccuaucggcuaccucgggcugcuuagccaaagaacacgggacauuuauaucucccgcagacgccggggaaccuuuacauggacccugucugauagcgagggcaaugaagcccccggcggguacugucugacccgguggaugcucaucgaggcugagcugaaaugcuucggaaacacagccauugcgaaguguaaugaaaaacaugacgaggaauuuugcgauaugcuucgccuguucgacuuuaacaagcaggccaucagacggcucaaaacgcccgcucagauguccauucagcugaucaauaaggccgugaacgcucuuauuaaugaucaacugaucaugaagaaccaccuccgcgacaucaugugcauuccuuauugcaauuacagcaaauauugguaccugaaccacaccguuacagggaagaccucucugcccagauguuggcucaucuccaauggaagcuaccugaacgaaacacauuucucugacgauauugagcagcaggccgacaauaugaucaccgagcuucugcaaaaagaauauauggaucggcagggcaagacgccucucgggcugguggaccuguucgucuuuagcacauccuucuaccuuauuucuaucuuucuccaccuggugaaaauuccgacccaucgccacaucgugggaaagcccugcccuaaaccccauagacugaaccacaugggcaucuguagcugcggccucuauaagcacccugggguccccguuaaguggaaacgguga

SEQ ID NO: 5427 - RNA, 1473 nt, Artificial Sequence
  derived and/or modified protein sequence (opt5) from LASV(Lassa virus/H.sapiens-wt/NGA/2016/ISTH_0779;Clade II)__AVO03655__GPCstabilized
augggccagaucauuaccuucuuucaagaggugccccacgucguugaagaggugaugaacgugguccugaucgcccucagccugcuugcuauucugaaggggaucuacaauauugccacaugcggacucuucggccugaucuccuuucuucugcucugugggagaucuugcagcacgaccuauaaaggaguguacgaacugcagacacuggagcucgacauggcgaaccugaauaugaccaugccucuuuccuguacaaagaacaauucucaucacuauaucaugguuggcaacgaaaccgggcuggagcucacacugaccaauacgagcauuaucaaccauaaauucugcaaucuuuccgaugcucacaagaaaaaccuguacgaccauacccucaugucuauuaucagcacauuucaccuguccauuccgaauuucaaccaguaugaggccaugagcugugauuuuaauggaggcaagaucucugugcaguacaaccugucccacggcuaugccgucgacgcugccaaucauugcgggaccauugcuaacggagugcuccaaacauucaugcggauggccuggggcgggagcuacaucgcgcuggauucuggaugcggcaacugggacuguaucaugaccuccuaccaguaucuuguuauucagaauacgacaugggaagaucacugccaguuuagccgccccucuccuaucggguaccugggacuccugucccaaagaacccgggacauuuauaucagccgcagacgccggggcacauucaccuggacccucuccgauucugagggcaacgacgcccccgggggauacugucugacacgguggaugcugauugaagcugagcucaaaugcuuuggcaauacggccaucgcuaaguguaacgagaaacaugaugaagaguucugcgacaugcugcgccuuuuugauuucaauagacaggccaucaagcggcugaaaacccccgcgcagaugagcauucagcucaucaacaaggccgugaaugcucugauuaacgaccaacuuaucaugaagaaucaucugcgcgacauuaugugcaucccuuauugcaacuacuccaaauauugguaccucaauaacacagucaccggaaagagcucucugcccaaauguuggcugguguccaauggcagcuaccucaacgagacacacuucucugaugacaucgaacagcaggccgauaauaugauuaccgagaugcugcaaaaggaguauaucgacagacaggggaaaacgccucuuggacugguggaucucuuugucuucagcacauccuuuuaccugauuucuaucuuccugcaccuuguucggauuccgacccaccgccauaucaccggcaagcccugcccuaaaccccacagacucaaccauaugggcauuuguagcugcgggcuguauaagcagccuggagugcccgugaaguggaaacgguga

SEQ ID NO: 5428 - RNA, 1473 nt, Artificial Sequence
  derived and/or modified protein sequence (opt5) from LASV(Lassa virus/H.sapiens-wt/NGA/2016/ISTH_0917;Clade II)__AVO03535__GPCstabilized
augggccagaucgugaccuucuuucaagaggucccccacguuauugaagagaucaugaacauugugcugaucacacucagccugcuugccauucugaaggggguguacaaucucgcuacgugcggacugaucggccuuaucaccuuccuguuucucugugggagauccugcucuaugacauauaaaggaaacuaccagcuggaaacccuggagcucaauauggaaaugcugaacaugacaaugccucuuagcuguaccaagaauaacucccaucacuauauucgggucggcaaugagacagggcuggagcucacccugacgaacaccucuaucauucagcauaaauucugcaaucuuagcgacgcccacaagcgcaaccuguacgaucauucccucaugucuaucgugagcacauuucaccuguccauuccgaauuucaaccaguaugaagcgaugagcugugacuuuaauggaggcaaaaucucuauucaauacaaccugucccacaccuaugcuggcgaugccgccaagcauugcgggacacucgcuaauggaauccugcagaccuucaugagaauggccuggggcgggagcuacaucgcucuugacucuggaugcggcgggugggauuguauuaugacgaacuaccaguaucugaucauucagaacguuacaugggaggaccacugccaauuuucccgccccagcccuaucggauaccucggccugcuuucucagagaacccgggaaguguauauuucccgcagacgccggggcacauucaccuggacccugagcgauuccgaggggaaugaggcccccggaggcuacugucugacacgguggaugcucaucgaagcggagcugaagugcuuugggaacacggccgucgcuaaauguaaugaaaagcaugacgaggaguucugcgauaugcuucgccuguuugacuucaacaaacaggccaucagacggcucaaggcucccacccagaugucuauucaacugaucaauaaagccgugaacgcgcuuauuaaugaucagcugaucaugaagaaccaccuccgcgacauuaugugcaucccuuauugcaauuacagcaaguauugguaccugaaccacacaaucaccggcagaacaucccugccccgguguuggcucguuagcaaugggucuuaccugaacgagacccauuucuccgaugacauugaacagcaagccgacaauaugaucacggagaugcuucagaaagaauauauugaucgccagggaaagacaccucugggccucguggaccuguuugucuucagcaccucuuuuuaccugaucagcauuuuccuucaccucgugaaaaucccgacccauagacacauugugggcaaguccugccccaaaccucaucggcugaaccacauggggaucuguucuugcggacuguauaagagacccggcgucagcguucgcuggaaacgguga

SEQ ID NO: 5429 - RNA, 1473 nt, Artificial Sequence
  derived and/or modified protein sequence (opt5) from LASV(Lassa virus/H.sapiens-wt/NGA/2016/ISTH_1006;Clade II)__AVO03643__GPCstabilized
augggccagaucauuaccuucuuucaagaggugccccacgucaucgaagagguuaugaacauugugcugaucgcccucagccugcuugcuauucugaaggggaucuacaauguggccacaugcggacucuucggccuggucgcguuucuucugcucugugggagauccugcucuacgaccuauaaaggaguguacgaacugcagacacuggagcucgacauggcuagccugaacaugaccaugccucuuuccuguacaaagaauaacucucaucacuauaucaugguuggcaaugaaaccgggcuggagcucacacugaccaacacgagcauuaucaaucauaaauucugcaaccuuuccgaugcccacaagaaaaaucuguacgaccaugcccucaugucuauuaucagcaccuuucaccuguccauuccgaacuucaaucaguaugaggcuaugggaugugauuuuaacggcggcaagaucagcgugcaguacaaucugucucacuccuaugccgucgacgcugccaaccauugcgggacaauugcgaauggagugcuccaaaccuucaugcggauggccuggggcgggagcuacaucgcucuggauucuggaugcggcuccugggacuguaucaugacaagcuaccaguaucuuauuauccagaacaccacgugggaagaucacugccaguuuucucgccccuccccuauuggguaccugggacuccugagccaaagaacacgggacaucuauauuucccgcagacgccggggcaccuucacauggacccucucugauagcgagggcaacgaaacccccgggggauacugucugacacgguggaugcugaucgaggccgagcucaaaugcuuuggcaauacggcuguugccaaguguaacgaaaaacaugacgaggaguucugcgauaugcugcgccuuuuugacuucaauaagcaggcgaucagacggcugaaaacccccgcccagauguccauucagcucaucaacaaggcugugaaugcccugauuaacgaucaacuuaucaugaagaaucaucugcgcgacauuaugugcaucccuuauugcaacuacagcaaauauugguaccucaaucacacagucaccggaagaacaucucugccccgguguuggcugguguccaacggcagcuaccucaaugaaacccacuucucugacgauaucgagcagcaggcugacaacaugauuacggagcugcuucaaaaggaauauauggaucgccaggggaaaacaccucugggacucguggaccuguuugucuucagcaccuccuuuuaccugaucucuauuuuccuucaccucaucaagauuccgacccauagacacguuaucggcaaacccugcccuaagccccaucggcugaaucacaugggcauuuguagcugcgggcuguauaaacacccuggagugcccgugaaguggaagcgcuga

SEQ ID NO: 5430 - RNA, 1473 nt, Artificial Sequence
  derived and/or modified protein sequence (opt5) from LASV(Lassa virus/H.sapiens-wt/NGA/2016/ISTH_1026;Clade II)__AVO03589__GPCstabilized
augggccagaucauuaccuucuuucaagaggugccccacgucaucgaagagguuaugaacauugugcugaucgcccucagccugcuugcuauucugaaggggaucuacaauguggccacaugcggacucuucggccuggucuccuuucuucugcucugugggagaucuugcagcacgaccuauaaaggaguguacgaacugcagacacuggagcucgacauggcgucccugaacaugaccaugccucuuucuuguacaaagaauaacagccaucacuauaucaugguuggcaaugaaaccgggcuggagcucacacugaccaacacguccauuaucaaucauaaauucugcaaccuuucugaugcucacaagaaaaaucuguacgaccaugcccucaugagcauuaucuccaccuuucaccugagcauuccgaacuucaaucaguaugaggccaugucuugugauuuuaacggaggcaagaucuccgugcaguacaaucugagccacgcuuaugccauugacgcugccucucauugcggcacaaucgcgaacgggguccuccaaaccuucaugcggauggccuggggaggcuccuacaucgcucuggauagcgggugcggaucuugggacuguauuaugacauccuaccaguaucuuaucauucagaauaccacgugggaagaucacugccaguuuagccgccccuccccuaucggcuaccuggggcuccugucucaaagaacacgggacauuuauaucagccgcagacgccggggaaccuucacauggacccucuccgauagcgagggcaacgaaacccccggcggguacugucugacacgguggaugcugaucgaggccgagcucaaaugcuuuggaaacacggcuguggccaaguguaaugaaaaacaugacgaggaguucugcgauaugcugcgccuuuuugacuucaacaagcaggcgauuagacggcugaaaacccccgcccagaugucuauccagcucauuaauaaggcuguuaacgcccugaucaaugaucaacuuauuaugaagaaccaucugcgcgacaucaugugcaucccuuauugcaauuacuccaaauauugguaccucaaccacacagugaccgggaagacaagccugcccagauguuggcuggucucuaauggaagcuaccucaacgaaacccacuucuccgacgauauugagcagcaggcugacaauaugaucacggagcugcuucaaaaagaauaucuggaucggcagggcaagacaccucucgggcugguggaccuguuuguguucucuaccagcuuuuaccuuauuuccaucuuccuccaccuggucaaaauuccgacccaucgccacguuaucggaagacccugcccuaagccccaucggcugaaccacaugggcauuuguagcugcggccucuauaaacacccuggggugcccgugaaguggaagcgcuga

SEQ ID NO: 5431 - RNA, 1473 nt, Artificial Sequence
  derived and/or modified protein sequence (opt5) from LASV(Lassa virus/H.sapiens-wt/NGA/2016/ISTH_1070;Clade II)__AVO03651__GPCstabilized
augggccagaucauuaccuucuuucaagaggugccccacgucaucgaagagguuaugaacauugugcugaucgcccucagccugcuugcuauucugaaggggaucuacaauguggccacaugcggacucuucggccuggucuccuuucuucugcucugugggagaucuugcagcacgaccuauaaaggaguguacgaacugcagacacuggagcucgacauggcgucccugaacaugaccaugccucuuucuuguacaaagaauaacagccaucacuauaucaugguuggcaaugaaaccgggcuggagcucacacugaccaacacguccauuaucaaucauaaauucugcaaccuuucugaugcucacaagaaaaaucuguacgaccaugcccucaugagcauuaucuccaccuuucaccugagcauuccgaacuucaaucaguaugaggccaugucuugugauuuuaacggaggcaagaucuccgugcaguacaaucugagccacacauucgcugucgacgccgcuaaccauugcggcaccauugccaauggggugcuccaaacauuuaugcggauggcguggggaggcucuuauaucgcccuggauuccgggugcggaagcugggacuguaucaugaccucuuaccaguaccuuauuauccagaacacgacaugggaagaucacugccaguucucccgccccagcccuauuggcuaucuggggcuccugucccaaagaacccgggacaucuacauuucucgcagacgccggggaacauuuaccuggacccucagcgauuccgagggcaacgaaacacccggcggguauugucugacgcgguggaugcugaucgaggcugagcucaaaugcuucggaaauaccgccguugcuaaguguaacgaaaaacaugacgaggaauuuugcgauaugcugcgccuuuucgacuucaauaagcaggccaucagacggcugaaaacacccgcgcagaugagcauucagcucaucaacaaggccgugaaugcucugauuaacgaucaacuuaucaugaagaaucaucugcgcgacauuaugugcaucccuuacugcaacuauucuaaauacugguaucucaaucacaccgucacagggaagaccucccugcccagauguuggcuggugagcaacggaucuuaccucaaugaaacgcacuuuagcgacgauaucgagcagcaggccgacaacaugauuacagagcugcuucaaaaagaauacauggaucggcagggcaagaccccucuggggcucguggaccuguucgucuuuuccaccucuuucuaucugaucagcauuuuucuucaccucguuaaaaucccgacacaucgccacauuaucggaaagcccugcccuaaaccccauagacugaaucacaugggcauuuguuccugcggccuguacaagcacccuggggugcccgugaaguggaaacgguga

SEQ ID NO: 5432 - RNA, 1473 nt, Artificial Sequence
  derived and/or modified protein sequence (opt5) from LASV(Lassa virus/H.sapiens-wt/NGA/2016/ISTH_1123;Clade II)__AVO03645__GPCstabilized
augggccagaucauuaccuucuuucaagaggugccccacgucaucgaagagguuaugaacauugugcugaucgcccucagccugcuugcuauucugaaggggaucuacaauguggccacaugcggacucuucggccuggucuccuuucuucugcucugugggagaucuugcagcacgaccuauaaaggaguguacgaacugcagacacuggagcucgacaugggcucccugaacaugaccaugccucuuucuuguacaaagaauaacagccaucacuauaucaugguugggaaugaaaccggacuggagcucacacugaccaacacguccauuaucaaucauaaauucugcaaccuuucugaugcgcacaagaaaaaucuguacgaccaugcucucaugagcauuaucuccaccuuucaccugagcauuccgaacuucaaucaguaugaggccaugucuugugauuuuaacggcggcaagaucuccgugcaguacaaucugagccacgccuaugcugucgacgccgcuaaccauugcgggacaauugccaauggagugcuccaaaccuucaugcggauggcguggggcgggucuuacaucgcccuggauuccggaugcggcagcugggacuguaucaugacaucuuaccaguaucuuauuauccagaacaccuccugggaagaucacugccaguuuagccgccccuccccuauuggguaccugggacuccugucucaaagaacgcgggacaucuauauuagccgcagacgccggggcacauucaccuggacacucuccgauagcgagggcaacgaaacccccgggggauacugucugacccgguggaugcugaucgaggcugagcucaaaugcuuuggcaauacagccguugcuaaguguaacgaaaaacaugacgaggaguucugcgauaugcugcgccuuuuugacuucaauaagcaggccaucagacggcugaaaacgcccgcgcagaugucuauucagcucaucaacaaggccgugaaugcucugauuaacgaucaacuuaucaugaagaaucaucugcgcgacauuaugugcaucccuuauugcaacuacuccaaauauugguaccucaaucacaccgucacaggaaagaccagccugcccagauguuggcuggugucuaacggcagcuaccucaaugaaacacacuucuccgacgauaucgagcagcaggccgacaacaugauuaccgagcugcuucaaaaagaauauaucgaucggcaggggaagacgccucugggacucguggaccuguuugucuucucuaccagcuuuuaccugauuuccaucuuccuucaccucguuaaaauuccgacacaucgccacgugaucggcaagcccugcccuaaaccccauagacugaaucacaugggcauuuguagcugcgggcuguauaagcacccuggagugcccgucaaguggaaacgguga

SEQ ID NO: 5433 - RNA, 1473 nt, Artificial Sequence
  derived and/or modified protein sequence (opt5) from LASV(Lassa virus/H.sapiens-wt/NGA/2016/ISTH_1150;Clade II)__AVO03627__GPCstabilized
augggccaggugaucaccuucuuucaagagauuccccacgucaucgaagagguuaugaacauugugcugaucacacucagccugcuugccauucugaaggggaucuacaauguggcuacgugcggacucuucggccugaucuccuuucuucugcucugugggagaucuugcagcaccacauauaaaggagucuacgaacugcagacccuggagcucgacauggccaaccugaauaugacaaugccucuuuccuguaccaagaacucuagccaucacuauauuauggugggcaaugaaacagggcuggagcucacccugacgaacaccuccaucauuaaucauaaauucugcaaccuuucugaugcgcacaagaaaaaucuguacgaccaugcucucaugagcaucauuuccacauuucaccugagcaucccgaacuucaaucaguaugaggccaugucuugugauuuuaacggaggcaagauuuccguucaguacaaucugagccacgccuaugcuguggacgccgcuaaccauugcggcaccaucgccaaugggguccuccaaacauucaugcggauggcguggggaggcucuuacaucgcccuggauuccgggugcggaaacugggacuguauuaugaccagcuaccaguaucuuaucauucagaacacgacaugggaagaucacugccaguuuucucgccccuccccuaucggcuaccuggggcuccugagccaaagaacccgggacauuuauaucucccgcagacgccggggaacauucaccuggacccucucugauagcgagggcaaugaagcucccggcggguacugucugacacgguggaugcugaucgaggccgagcucaaaugcuuuggaaacacggcuauugccaaguguaaugaaaaacaugacgaggaguucugcgauaugcugcgccuuuuugacuucaacaagcaggcgaucagacggcugaaaacccccgcccagaaguccauucagcucaucaauaaggcugugaacgcccugauuaaugaucaacuuaucaugaaaaaccaucugcgcgacaucaugugcauuccuuauugcaauuacagcaaguauugguaccucaaccacacaguuaccgggaaaacaucucugcccaaguguuggcugaucuccaauggaagcuaccucaacgaaacccacuucucugacgauauugagcagcaggcugacaauaugaucacggagcugcuucaaaaagaauauauggauagacagggcaagacaccucuggggcucguggaccuguuugucuucagcaccuccuuuuaccugauuucuaucuuccuucaccucgugaaaauuccgacccaucggcacaucgugggacgccccugcccuaagccccauagacugaaccacaugggcaucuguagcugcggccuguauaagcacccugggguccccguuaaauggaagcgguga

SEQ ID NO: 5434 - RNA, 1473 nt, Artificial Sequence
  derived and/or modified protein sequence (opt5) from LASV(Lassa virus/H.sapiens-wt/NGA/2016/ISTH_1174;Clade II)__AVO03555__GPCstabilized
augggccagaucauuaccuucuuucaagaggugccccacgucaucgaagagguuaugaacauugugcugaucgcccucagccugcuugcuauucugaaggggaucuacaauguggccacaugcggauucuuuggccucgucuccuuccugcuucugugugggagaucuugcagcacgaucuauaaaggaguguacgaacuccagacccuggagcuggacauggcgucccucaacaugacaaugccucugucuuguaccaagaauaacagccaucacuauauuaugguuggcaaugaaacagggcuugagcugacccucacaaacaccuccaucauuaaucauaaauuuugcaaccugucugaugcucacaagaaaaaucuuuacgaccaugcccugaugagcaucauuuccacguuccaccucagcaucccgcacuuuaaccaguaugaggccaugucuugugauuucaauggaggcaagauuuccgugcaguacaaccugagccauaccuaugcugucgacgccgcuaaucacugcggcacaaucgccaacggggugcugcaaaccuuuaugcggauggcguggggaggcucuuacaucgcccucgauuccgggugcggaagcugggacuguauuaugacaucuuaccaguaucugaucauucagaauaccacgugggaagaucauugccaguucucccgccccagcccuaucggcuaccuugggcugcucucccaaagaacacgggacauuuauaucucucgcagacgccggggaaccuuuacauggacccugagcgauuccgagggcaacgaaacccccggcggguacugucucacacgguggaugcugaucgaggcugagcugaaaugcuucggaaacacggccguugcuaaguguaaugaaaaacacgacgaggaauuuugcgauaugcuccgccuguucgacuucaacaagcaggccauuagaaaacuuaagacccccgcgcagaugagcauccagcugauuaauaaggccgugaacgcucucaucaaugaucaacugauuaugaaaaaccaccuucgggacaucaugugcaucccuuauugcaauuacucuaaguauugguaccugaaccauacagucaccgggaaaacaucccucccccgcuguuggcuggugagcaauggaucuuaccugaacgaaacccacuuuagcgacgauauugagcagcaggccgacaauaugaucacggagcuccugcaaaaggaauauauggauagacagggcaaaacaccucuugggcugguggaccucuucgucuuuuccaccucuuucuaccugauuagcaucuuucugcaucuuguuaagauuccgacccaccggcaugugaucggaaaacccugcccuaagccccaccgccucaaccacaugggcauuuguuccugcggccuguauaagcauccuggggugcccgucaaauggaagagauga

SEQ ID NO: 5435 - RNA, 1473 nt, Artificial Sequence
  derived and/or modified protein sequence (opt5) from LASV(Lassa virus/H.sapiens-wt/NGA/2016/ISTH_1207;Clade II)__AVO03599__GPCstabilized
augggccagaucauuaccuucuuucaagaggugccccacgucaucgaagagguuaugaacauugugcugaucgcccucagccugcuugcuauucugaaggggaucuacaauguggccacaugcggacucuucggccuggucuccuuucuucugcucugugggagaucuugcagcacgaccuauaaaggaguguacgaacugcagacacuggagcucgacaugaccucccugaacaugacaaugccucuuucuuguaccaagaauaacagccaucacuauaucaugguuggcaaugaaacagggcuggagcucacccugacgaacaccuccauuaucaaucauaaauucugcaaccuuucugaugcgcacaagaaaaaucuguacgaccaugcucucaugagcauuaucuccacauuucaccugagcauuccgaacuucaaucaguaugaggccaugucuugugauuuuaacggaggcaagaucuccgugcaguacaaucugagccacaccuaugccgucgacgcugccaaccauugcggcacaauugcuaauggggugcuccaaaccuucaugcggauggccuggggaggcucuuacaucgcgcuggauuccgggugcggaagcugggacuguaucaugacgucuuaccaguaucuuauuauccagaacacaaccugggaagaucacugccaguuuucccgccccagcccuauuggcuaccuggggcuccugucccaaagaacacgggacaucuauauuucucgcagacgccggggaaccuucaccuggacacucagcgauuccgagggcaacgacacgcccggcggguacugucugacccgguggaugcugaucgaagccgagcucaaaugcuuuggaaauacagcuguugccaaguguaacgagaaacaugaugaagaguucugcgacaugcugcgccuuuuugauuucaauaagcaggcuaucagacggcugaaaacccccgcccagaugagcauucagcucaucaacaaggcggugaaugcccugauuaacgaccaacuuaucaugaagaaucaucugcgcgacauuaugugcaucccuuauugcaacuacucuaaauauugguaccucaaucacacagucaccgggaagacgucccugcccagauguuggcuggugagcaacggaucuuaccucaaugagacacacuucagcgaugacaucgaacagcaggcugauaacaugauuaccgagcugcuucaaaaagaguauaucgaccggcagggcaagaccccucuggggcucguggaucuguuugucuucuccacaucuuuuuaccugauuagcaucuuccuucaccucguuaaaauuccgacccaucgccacgugaucggaaagcccugcccuaaaccccauagacugaaucacaugggcauuuguuccugcggccuguauaagcacccuggggugcccgucaaguggaaacgguga

SEQ ID NO: 5436 - RNA, 1473 nt, Artificial Sequence
  derived and/or modified protein sequence (opt5) from LASV(Lassa virus/H.sapiens-wt/NGA/2016/ISTH_1306;Clade II)__AVO03623__GPCstabilized
augggccagaucauuaccuucuuucaagaggugccccacgucaucgaagagguuaugaacauugugcugaucgcccucagccugcuugcuauucugaaggggaucuacaauguggccacaugcggacucuucggccuggucuccuuucuucugcucugugggagaucuugcagcacgaccuauaaaggaguguacgaacugcagacacuggagcucgacauggcgucccugaacaugaccaugccucuuucuuguacaaagaauaacagccaucacuauaucaugguuggcaaugaaaccgggcuggagcucacacugaccaacacguccauuaucaaucauaaauucugcaaccuuucugaugcucacaagaaaaaucuguacgaccaugcccucaugagcauuaucuccaccuuucaccugagcauuccgaacuucaaucaguaugaggccaugucuugugauuuuaacggaggcaagaucuccgugcaguacaaucugagccacacauaugcugucgacgccgcuaaccauugcggcaccguggccaaugggguucuccaaacauucaugcggauggcguggggaggcucuuacauugcccuggauuccgggugcggaagcugggacuguaucaugaccucuuaccaguaucuuaucauucagaacacgacaugggaagaucacugccaguuuucccgccccagcccuaucggcuaccuggggcuccugucccaaagaacccgggacauuuauaucucucgcagacgccggggaacauucaccuggacccucagcgauuccgagggcaacgaaacacccggcggguacugucugacgcgguggaugcugauugaggcugagcucaaaugcuuuggaaauaccgccguggcuaaguguaacgaaaaacaugacgaggaguucugcgauaugcugcgccuuuuugacuucaauaagcaggccaucagacggcugaaaacacccgcgcagaugagcauccagcucauuaacaaggccgucaaugcucugaucaacgaucaacuuauuaugaagaaucaucugcgcgacaucaugugcauuccuuauugcaacuacucuaaauauugguaccucaaucacaccgugacagggagaaccucccugccccgguguuggcuggugagcaacggaucuuaccucaaugaaacgcacuucagcgacgauaucgagcagcaggccgacaacaugaucacagagcugcuucaaaaggaauauauugaucgccagggcaaaaccccucuggggcucgucgaccuguuuguuuucuccaccucuuuuuaccugaucagcauuuuccuucaccucgugaagaucccgacacauagacacgugauuggaaaacccugcccuaagccccaucggcugaaucacaugggcaucuguuccugcggccuguauaaacacccugggguccccgugaaguggaagcgcuga

SEQ ID NO: 5437 - RNA, 1473 nt, Artificial Sequence
  derived and/or modified protein sequence (opt5) from LASV(Lassa virus/H.sapiens-wt/NGA/2016/ISTH_1311;Clade II)__AVO03575__GPCstabilized
augggccagaucgugaccuucuuucaagaggucccccacguuauugaagaggugaugaacaucgugcugauugcccucagccugcuugcuauccugaaggggauuuacaaugucgccacaugcggacucuucggccugaucuccuuucuucugcucugugggagaucuugcagcacgaccuauaaaggaguguacgaacugcagacacuggagcucgacauggcgaaccugaauaugaccaugccucuuuccuguacaaagaacaauucucaucacuauaucaugguuggcaacgaaaccgggcuggagcucacacugaccaauacgagcauuaucaaccauaaauucugcaaucuuuccgaugcucacaagaaaaaccuguacgaccaugcccucaugucuauuaucagcaccuuucaccuguccauuccgaauuucaaccaguaugaggccaugagcugugauuuuaauggaggcaagaucucugugcaguacaaccugucccacgcuuaugccggcgacgcugccagccauugcgggacaauugcgaauggaguccuccaaaccuucaugcggauggccuggggcgggucuuacaucgcucuggauuccggaugcggcaacugggacuguaucaugacaagcuaccaguaucuuauuauccagaacaccacgugggaagaucacugccaguuuucucgccccuccccuauuggguaccugggacuccugagccaaagaacacgggacaucuauauuucccgcagacgccggggcaccuucacauggacccucucugauagcgagggcaaugacgcccccgggggauacugucugacccgguggaugcugaucgaagcugagcucaaaugcuuuggcaacacagccaucgcgaaguguaaugagaaacaugaugaagaguucugcgacaugcugcgccuuuuugauuucaacaagcaggccauuaaaagacugaagacgcccgcucagauguccauccagcucauuaauaaggccgugaacgcucugaucaaugaccaacuuauuaugaaaaaccaucugcgggacaucaugugcaucccuuauugcaauuacagcaaguauugguaccucaaccacaccacaaccggaaaaacaucucugcccaaguguuggcugauuuccaauggcagcuaccucaacgagacccacuucucugaugacaucgaacagcaggccgauaauaugauuacggagcugcuucaaaaagaguaucuggaccgccaggggaagacaccucucggacugguugaucuguuuguguucagcaccuccuuuuaccuuaucucuauuuuccuccaccugaucaaaauuccgacccauagacacaucgucggccggcccugcccuaagccccaucgccugaaccacaugggcaucuguagcugcgggcucuauaagcacccuggagugcccgugaaauggaagagauga

SEQ ID NO: 5438 - RNA, 1473 nt, Artificial Sequence
  derived and/or modified protein sequence (opt5) from LASV(Lassa virus/H.sapiens-wt/NGA/2016/ISTH_1423;Clade II)__AVO03577__GPCstabilized
augggccagaucgugaccuucuuucaagaggucccccacguuauugaagaggugaugaacaucgugcugauugcccucagccugcuugcuauccugaaggggauuuacaaugucgccacaugcggacucuucggccugguguccuuucuucugcucugugggagaucuugcagcacgaccuauaaaggaguuuacgaacugcagacacuggagcucgacauggcgaaccugaauaugaccaugccucuuuccuguacaaagaacaauucucaucacuauaucauggugggcaacgaaaccgggcuggagcucacacugaccaauacgagcaucauuaaccauaaauucugcaaucuuuccgaugcucacaagaaaaaccuguacgaccaugcccucaugucuaucauuagcaccuuucaccuguccaucccgaauuucaaccaguaugaggccaugagcugugauuuuaauggaggcaagauuucuguccaguacaaccugucccacagcuaugcuguggacgccgcuaaucauugcggcacaguugccaacggggugcuccaaaccuucaugcggauggcguggggaggcucuuacaucgcccuggauuccgggugcggaagcugggacuguauuaugacaucuuaccaguaucuuaucauccagaacauuaccugggaagaucacugccaguuuucccgccccagcccuaucggcuaccuggggcuccugucccaaagaacgcgggacauuuauaucucucgcagacgccggggaacauucaccuggacacucagcgauuccgagggcaaagaaacccccggcggguacugucugacccgguggaugcugauugaggcugagcucaagugcuuuggaaauacagccgucgcuaaauguaacgaaaagcaugacgaggaguucugcgauaugcugcgccuuuuugacuucaauaaacaggccaucagacggcugaagacgcccgcgcagaugagcauccagcucauuaacaaggccgugaaugcucugaucaacgaucaacuuauuaugaaaaaucaucugcgcgacaucaugugcauuccuuauugcaacuacucuaaguauugguaccucaaucacaccgugacagggaaaaccucccugcccagauguuggcuggucagcaacggaucuuaccucaaugaaacacacuucagcgacgauaucgagcagcaggccgacaacaugaucaccgagcugcuucaaaaggaauauauugaucggcagggcaaaacgccucuggggcucguugaccuguuuguguucuccacaucuuuuuaccugaucagcauuuuccuucaccucgugaagaucccgacccaucgccacauucugggaaaacccugcccuaagccccauagacugaaucacaugggcaucuguuccugcggccucuauaagcacccugggguccccgugaaauggaagcgguga

SEQ ID NO: 5439 - RNA, 1473 nt, Artificial Sequence
  derived and/or modified protein sequence (opt5) from LASV(Lassa virus/H.sapiens-wt/NGA/2016/ISTH_1462;Clade II)__AVO03587__GPCstabilized
augggccagaucauuaccuucuuucaagaggugccccacgucaucgaagagguuaugaacauugugcugaucgcccucagccugcuugcuauucugaaggggaucuacaauguggccacaugcggacucuucggccuggucuccuuucuucugcucugugggagaucuugcagcacgaccuauaaaggaguguacgaacugcagacacuggagcucgacauggcgucccugaacaugaccaugccucuuucuuguacaaagaauaacagccaucacuauaucaugguuggcaaugaaaccgggcuggagcucacacugaccaacacguccauuaucaaucauaaauucugcaaccuuucugaugcucacaagaaaaaucuguacgaccaugcccucaugagcauuaucuccaccuuucaccugagcauuccgaacuucaaucaguaugaggccaugucuugugauuuuaacggaggcaagaucuccgugcaguacaaucugagccacacauaugcugucgacgccgcuaaccauugcggcaccauugccaauggggugcuccaaacauucaugcggauggcguggggaggcucuuacaucgcccuggauuccgggugcggaagcugggacuguaucaugaccucuuaccaguaucuuauuauccagaacacgacaugggaagaucacugccaguuuucccgccccagcccuauuggcuaccuggggcuccugucccaaagaacccgggacaucuauauuucucgcagacgccggggaacauucaccuggacccucagcgauuccgagggcaacgaaacacccggcggguacugucugacgcgguggaugcugaucgaggcugagcucaaaugcuuuggaaauaccgccguugcuaaguguaacgaaaaacaugacgaggaguucugcgauaugcugcgccuuuuugacuucaauaagcaggccaucagacggcugaaaacacccgcgcagaugagcauucagcucaucaacaaggccgugaaugcucugauuaacgaucaacuuaucaugaagaaucaucugcgcgacauuaugugcaucccuuauugcaacuacucuaaauauugguaccucaaucacaccgucacagggagaaccucccugccccgguguuggcuggugagcaacggaucuuaccucaaugaaacgcacuucagcgacgauaucgagcagcaggccgacaacaugauuacagagcugcuucaaaaggaauauaucgagcgccagggcaaaaccccucuggggcucguggaucuguuugucuucuccaccucuuuuuaccugauuagcaucuuccuucaccucauuaagaucccgacacauagacacguuauuggaaaacccugcccuaagccccaucggcugaaucacaugggcaucuguuccugcggccuguauaaacacccuggggugcccgugaaguggaagcgcuga

SEQ ID NO: 5440 - RNA, 1473 nt, Artificial Sequence
  derived and/or modified protein sequence (opt5) from LASV(Lassa virus/H.sapiens-wt/NGA/2016/ISTH_1472;Clade II)__AVO03605__GPCstabilized
augggccagaucauuaccuucuuucaagaggugccccacgucaucgaagagguuaugaacauugugcugaucgcccucagccugcuugcuauucugaaggggaucuacaauguggccacaugcggacucuucggccuggucuccuuucuucugcucugugggagaucuugcagcacgaccuauaaaggaguguacgaacugcagacacuggagcucgacauggcgucccugaacaugaccaugccucuuucuuguacaaagaauaacagccaucacuauaucaugguuggcaaugaaaccgggcuggagcucacacugaccaacacguccauuaucaaucauaaauucugcaaccuuucugaugcucacaagaaaaaucuguacgaccaugcccucaugagcauuaucuccaccuuucaccugagcauuccgaacuucaaucaguaugaggccaugucuugugauuuuaacggaggcaagaucuccgugcaguacaaucugagccacacauaugcugucgacgccgcuaaccauugcggcaccauugccaauggggugcuccaaacauucaugcggauggcguggggaggcucuuacaucgcccuggauuccgggugcggaagcugggacuguaucaugaccucuuaccaguaucuuauuauccagaacacgacaugggaagaucacugccaguuuucccgccccagcccuauuggcuaccuggggcuccugucccaaagaacccgggacaucuauauuucucgcagacgccggggaacauucaccuggacccucagcgauuccgagggcaacgaaacacccggcggguacugucugacgcgguggaugcugaucgaggcugagcucaaaugcuuuggaaauaccgccguugcuaaguguaacgaaaaacaugacgaggaguucugcgauaugcugcgccuuuuugacuucaauaagcaggccaucagacggcugaaaacacccgcgcagaugagcauucagcucaucaacaaggccgugaaugcucugauuaacgaucaacuuaucaugaagaaucaucugcgcgacauuaugugcaucccuuauugcaacuacucuaaauauugguaccucaaucacaccgucacagggagaaccucccugccccgguguuggcuggugagcaacggaucuuaccucaaugaaacgcacuucagcgacgauaucgagcagcaggccgacaacaugauuacagagcugcuucaaaaggaauauaucgaucgccagggcaaaaccccucuggggcucguggaccuguuugucuucuccaccucuuuuuaccugauuagcaucuuccuucaccucauuaagaucccgacacauagacacguuauuggaaaacccugcccuaagccccaucggcugaaucacaugggcaucuguuccugcggccuguauaaacacccuggggugcccgugaaguggaagcgcuga

SEQ ID NO: 5441 - RNA, 1473 nt, Artificial Sequence
  derived and/or modified protein sequence (opt5) from LASV(Lassa virus/H.sapiens-wt/NGA/2016/ISTH_1474;Clade II)__AVO03613__GPCstabilized
augggccagaucauuaccuucuuucaagaggugccccacgucaucgaagagguuaugaacauugugcugaucgcccucagccugcuugcuauucugaaggggaucuacaauguggccacaugcggacucuucggccuggucuccuuucuucugcucugugggagaucuugcagcacgaccuauaaaggaguguacgaacugcagacacuggagcucgacauggcgucccugaacaugaccaugccucuuucuuguacaaagaauaacagccaucacuauaucaugguuggcaaugaaaccgggcuggagcucacacugaccaacacguccauuauccaucacaaauucugcaaucuuucugaugcucauaagaaaaaccuguacgaccacgcccucaugagcauuaucuccaccuuucaccugagcauuccgaauuucaaccaguaugaggccaugucuugugauuuuaauggaggcaagaucuccgugcaguacaaccugagccauacauaugcugucgacgccgcuaaucacugcggcaccauugccaacggggugcuccaaacauucaugcggauggcguggggaggcucuuacaucgcccuggauuccgggugcggaagcugggacuguaucaugaccucuuaccaguaucuuauuauccagaauacgacaugggaagaucauugccaguuuucccgccccagcccuauuggcuaccuggggcuccugucccaaagaacccgggacaucuauauuucucgcagacgccggggaacauucaccuggacccucagcgauuccgagggcaacgaaacacccggcggguacugucugacgcgguggaugcugaucgaggcugagcucaaaugcuuuggaaacaccgccguugcuaaguguaaugaaaaacacgacgaggaguucugcgauaugcugcgccuuuuugacuucaacaagcaggccaucagacggcugaaaacacccgcgcagaugagcauucagcucaucaauaaggccgugaacgcucugauuaaugaucaacuuaucaugaagaaccaucugcgcgacauuaugugcaucccuuauugcaauuacucuaaauauugguaccucaaccacaccgucacagggagaaccucccugccccgguguuggcuggugagcaauggaucuuaccucaacgaaacgcacuucagcgacgauaucgagcagcaggccgacaauaugauuacagagcugcuucaaaaggaauauaucgaucgccagggcaaaaccccucuggggcucguggaccuguuugucuucuccaccucuuuuuaccugauuagcaucuuccuucaucucauuaagaucccgacacacagacauguuauuggaaaacccugcccuaagccccaccggcugaaccacaugggcaucuguuccugcggccuguauaaacauccuggggugcccgugaaguggaagcgcuga

SEQ ID NO: 5442 - RNA, 1476 nt, Artificial Sequence
  derived and/or modified protein sequence (opt5) from LASV(Lassa virus/H.sapiens-wt/NGA/2016/ISTH_1496;Clade II)__AVO03579__GPCstabilized
augggccagaucauuaccuucuuucaagaggugccccacgucaucgaagagguuaugaacauugugcugaucgcccucagccugcuugcuauucugaaggggguguacaaugucgccacaugcggacucuucggccugguguccuuucuucugcucugugggagaucuugcagcacgaccaucuauaaaggaguuuacgaacugcagacacuggagcucgacauggcgucccugaacaugaccaugccucuuucuuguacaaagaauaacagccaucacuauaucauggugggcaaugaaaccgggcuggagcucacacugaccaacacguccauuaucaaucauaaauucugcaaccuuucugaugcucacaagaaaaaucuguacgaccaugcccucaugagcauuaucuccaccuuucaccugagcauuccgaacuucaaucaguaugaggccaugucuugugauuuuaacggaggcaagaucuccguccaguacaaucugagccacgcuuaugccguggacgcugccaaccauugcggcacaauugcgaaugggguucuccaaaccuucaugcggauggccuggggaggcucuuacaucgcucuggauuccgggugccgcagcugggacuguaucaugacaucuuaccaguaucuuauuauccagaacaccacgugggaagaucacugccaguuuuccagacccagcccuauuggauaccugggccuccugucccaacggacacgcgacaucuauauuucuagacggcgccgggggaccuucacauggacccucagcgauuccgagggaaacgaaacccccggcggcuacugucugacacgcuggaugcugaucgaggccgagcucaaaugcuuugggaauacggcuguggccaaguguaacgaaaaacaugacgaggaguucugcgauaugcugagacuuuuugacuucaauaagcaggcgauccggcgccugaaaacccccgcccagaugagcauucagcucaucaacaaggcugucaaugcccugauuaacgaucaacuuaucaugaagaaucaccugagagacauuaugugcaucccuuauugcaacuacucuaaauauugguaccucaaucacacagugaccggcaagacaucccugccccgguguuggcuggugagcaacgggucuuaccucaaugaaacccauuucagcgacgauaucgagcagcaggcugacaacaugauuacggagcugcuucaaaaagaauauaucgaucgccagggaaagacaccucugggccucgucgaccuguuuguuuucuccaccucuuuuuaccugauuagcaucuuccuucaccucgugaaaauuccgacccauagacacgugaucgggaagcccugcccuaaaccccaucggcugaaucacaugggaauuuguuccugcggccuguauaagcacccuggcguccccgugaaguggaaacgcuga

SEQ ID NO: 5443 - RNA, 1473 nt, Artificial Sequence
  derived and/or modified protein sequence (opt5) from LASV(Lassa virus/H.sapiens-wt/NGA/2016/ISTH_1541;Clade II)__AVO03553__GPCstabilized
augggccagaucgugacauucuuucaagaggucccccacguuauugaagagaucaugaacauugugcugaucacacucagccugcuugccgugcugaaggggauuuacaauuucgcuacgugcggacucaucggccugaucaccuuucuuuuccugugugggagauccugcucuacaauuuauaaaggaaacuaccagcuccagacccuggaacugaauauggagacacucaacaugaccaugccucugagcuguacaaagaauaacucccaucacuauauccgggucggcaaugaaaccgggcuugagcugacgcucaccaacgugucuauuaucaaucaucgcuuuugcaaccugagcgacgcccacaaaagaaaucuuuacgaucauacacugauguccauuaucucuaccuuccaccucagcauuccgaacuuuaaucaguaugaggcgauguccugugacuucaacggaggcaagaucagcguucaauacaaucugucucacggcuaugcuguggaugccgccaaacauugcgggacagucgcuaacggagugcugcagaccuuuaugcggauggccuggggcggguccuacaucgcucucgacagcggaugcggcaacugggauuguauuaugacgucuuaccaguaucugaucauucagaauacaaccugggaagaccacugccaauucucccgccccagcccuaucggguaccuuggacugcucucucagagaacacgggauauuuauaucucccgcagacgccggggcaccuuuaccuggacacugagcgacuccgagggccgggaaacgcccgggggauacugucucacccgcuggaugcugaucgaggccgagcugaagugcuucggcaacacagcgguugccaaauguaaugaaaagcaugaugaggaauuuugcgacaugcucagacuguucgauuucaacaaacaggcuauucagcggcuuaagacccccgcccaaaugucuauccagcugauuaauaaagcugugaacgcccucaucaaugaccagcugauuaugaagaaccaccuucgcgauaucaugugcaucccuuauugcaauuacagcaaguauugguaccugaaccacacaaccacgggaaaaacaucccuccccaaguguuggcuggucaccaauggcagcuaccugaacgaaacccauuuuucugacgacauugagcaacaggcggauaauaugaucacagagaugcuccagaaagaauauauugacagacaggggaagaccccucugggacuuguggaucuguucguguuuuccaccagcuucuaccucaucucuauuuuucugcaccugaucaaaauuccgaaccaucggcacaucgucggcaagcccugcccuaaaccccaucgccuuaaucacaugggcaucuguagcugcggguucuauaagcaaccuggaguucccgugagauggaagcgguga

SEQ ID NO: 5444 - RNA, 1473 nt, Artificial Sequence
  derived and/or modified protein sequence (opt5) from LASV(Lassa virus/H.sapiens-wt/NGA/2016/ISTH_1546;Clade II)__AVO03537__GPCstabilized
augggccagaucgugaccuucuuucaagagauuccccacgucguugaagagaucaugaacauugugcugaucacacucagccugcuugccauucugaaggggcucuacaauuucgcuacgugcggacugaucggccuuaucaccuuucuguuccucugugggagauccugcucuacaauuuauaaaggaagcuaccagcugcaggcccuggaacucaacauggagacccugaauaugacaaugccucuuuccuguaccaagaacaauucucaucacuauauccgggugggcaacgaaacagggcuggagcucacccugacgaauaccagcauuaucaaccauaaauuuugcaaucuuuccgacgcgcacaagaaaaaccuguacgaucauacacucaugucuauuaucagcaccuuccaccuguccauuccgaauuuuaaccaguaugaggcuaugagcugugacuucaauggaggcaagaucucuguccaauacaaccugucccacagcuaugccggcgaugccgcucgccauugcgggacaguggccaauggaguucuccagaccuuuaugagaauggcuuggggcgggucuuacaucgcccuggacuccggaugcggcaacugggauuguauuaugacgagcuaccaguaucuuaucauucagaacacaaccugggaagaccacugccaauucucucggcccuccccuaucggguaccugggacuccugagccagcgcacaagagauauuuauaucucccggcgccgccggggcaccuuuaccuggacacucucugacagcgagggcaaagaaacgcccgggggauacugucugaccagauggaugcugaucgaggcggagcucaagugcuucggcaauacagccguggcuaaauguaacgaaaagcaugaugaggaauuuugcgacaugcugcggcuuuucgauuucaauaaacaggccauucagcgccugaagacccccgcucaaauguccauccagcucauuaacaaggccgucaaugcgcugaucaacgaccagcuuauuaugaaaaaucaccugagagauaucaugugcaucccuuauugcaacuacagcaaguauugguaccucaaucacacaaccacgggaaaaacaucucugccccgguguuggcugguguccaacggcagcuaccucaaugaaacccauuuuucugacgacauugagcaacaggccgauaacaugaucaccgagaugcugcagaaggaauauauugaccgccaggggaaaacaccucuuggacugguugaucucuucguguuuagcaccuccuucuaccugaucucuauuuuucugcaccuuaucaagauuccgacacauagacacaucgucggcaaaagcugccccaagccucaucggcucaaucacaugggcaucuguuccugcgggcuguauaagcaacccggagugccugugaaauggaagcgcuga

SEQ ID NO: 5445 - RNA, 1473 nt, Artificial Sequence
  derived and/or modified protein sequence (opt5) from LASV(Lassa virus/H.sapiens-wt/NGA/2016/ISTH_1591;Clade II)__AVO03647__GPCstabilized
augggccagaucauuaccuucuuucaagaggugccccacgucaucgaagagguuaugaacauugugcugaucgcccucagccugcuugcuauucugaaggggaucuacaauguggccacaugcggacucuucggccuggucuccuuucuucugcucugugggagaucuugcagcacgaccuauaaaggaguguacgaacugcagacacuggagcucgacauggcgucccugaacaugaccaugccucuuucuuguacaaagaauaacagccaucacuauaucaugguuggcaaugaaaccgggcuggagcucacacugaccaacacguccauuauccagcauaaauucugcaaucuuucugaugcucacaagaaaaaccuguacgaccaugcccucaugagcauuguguccaccuuucaccugagcaucccgaauuucaaccaguaugaggccaugucuugugauuuuaauggaggcaagauuacaguccaauacaaccugucccacagcuaugcuaucgacgccgcuaaucauugcggcaccguggccaacgggguucuccagacauucaugcggauggcguggggaggcucuuacauugcccuggauuccgggugcggaagcugggacuguaucaugaccucuuaccaguaucuuaucauucagaauacgacaugggaagaucacugccaauuuuccagacccagcccuaucggcuaccuggggcuccugucccagcggacccgcgacauuuauaucucuagacggcgccggggaacauucaccuggacccucagcgauuccgagggcaacgaaacacccggcggguacugucugacgcgcuggaugcugauugaggcugagcucaagugcuuuggaaacaccgccguggcuaaauguaaugaaaagcaugacgaggaguucugcgauaugcugagacuuuuugacuucaacaaacaggccauccggcgccugaaggcgcccgcccagaugagcauccaacucauuaauaaagcugucaacgcccugaucaaugaucagcuuauuaugaagaaccaccugagagacaucaugugcauuccuuauugcaauuacucuaaguauugguaccucaaccacacagugaccgggcggacaucccugccccgcuguuggcuggugagcaauggaucuuaccucaacgaaacccauuucagcgacgauaucgagcagcaagcugacaauaugaucacggagcugcuucagaaagaauauauggauagacagggcaagacaccucuggggcucgucgaccuguuuguuuucuccaccucuuuuuaccugauuagcaucuuccuucaccucgugaaaauuccgacccaucggcacaucauuggaaagcccugcccuaaaccccaucgccugaaccacaugggcguguguuccugcggccuguauaagcacccugggguccccgugaaauggaagagauga

SEQ ID NO: 5446 - RNA, 1473 nt, Artificial Sequence
  derived and/or modified protein sequence (opt5) from LASV(Lassa virus/H.sapiens-wt/NGA/2016/ISTH_1604;Clade II)__AVO03541__GPCstabilized
augggccagaucgugaccuucuuucaagaggucccccacguuauugaagagaucaugaacauugugcugaucacacucagccugcuugccauucugaaggggguguacaaucucgcuacgugcggacugaucggccuuaucaccuuccuguuucucugugggagauccugcucuaugacauauaaaggaagcuaccagcuggaaacccuggagcucaacauggaaacacugaauaugaccaugccucuuuccuguacaaagaacaccucucaucacuauauucgggucggcaaugagacggggcuggagcucacccugacaaacaccagcaucauuaaucauaaauucugcaaccuuuccgacgcccacaagaaaaaucuguacgaucauucucucaugagcaucguguccacauuucaccugagcauuccgaacuucaaucaguaugaagcgaugucuugugacuuuaacggaggcaagaucuccauucaguacaaucugagccacgcuuaugccggcgaugccgcuaagcauugcgggacccucgccaacggaguucugcaaacguucaugcgcauggcuuggggcgggucuuacaucgcccuugacuccggaugcggcaauugggauuguaucaugacaagcuaccaguaucugauuauccagaacaccacaugggaggaccacugccaguuuucucggcccuccccuauuggguaccucggacugcuuagccaacgcaccagagaaaucuauauuucccggcgccgccggggcaccuucacauggacgcugucugauagcgagggcaacgaggcgcccgggggauacugucugaccagauggaugcucaucgaagccgagcugaaaugcuuuggcaaugcugccguggcuaaguguaacgaaaaacaugacgaggaguucugcgauaugcuucggcuguuugacuucaauaagcaggccauccagcgccucaaaacacccgcgcagauguccauucaacugaucaacaaggccgucaaugcucuuauuaacgaucagcugaucaugaagaaucaccucagagacauuaugugcaucccuuauugcaacuacagcaaauauugguaccugaaucacaccacaaccggacggacgucucugccccgcuguuggcucguguccaacggcagcuaccugaaugagacacauuucucugaugacaucgaacagcaagccgacaacaugauuaccgagaugcuucagaaggaauauaucgauagacaggggaaaaccccucugggacucguugaccuguuuguguucagcacauccuuuuaccugauuucuaucuuccuucaccucgucaagauuccgacccaucggcacaucgugggcaaaagcugccccaagccucaucgccugaaucacaugggcauuuguuccugcgggcuguauaaacagcccggagugccugucagauggaagcgguga

SEQ ID NO: 5447 - RNA, 1473 nt, Artificial Sequence
  derived and/or modified protein sequence (opt5) from LASV(Lassa virus/H.sapiens-wt/NGA/2016/ISTH_1609;Clade II)__AVO03661__GPCstabilized
augggccagaucgugaccuucuuucaagagauuccccacgucaucgaagagguuaugaacauugugcugaucacacucagccugcuugccgugcugaaggggauuuacaauuucgcuacgugcggacucaucggccugaucaccuuucuuuuccugugugggagauccugcucuacaauuuauaaaggaagcuaccagcuccagaagcuggaacugaacauggagacccucaauaugacaaugccucuguccuguaccaaaaacucuagccaucacuauauccgggucggcaaugaaacagggcuugagcugacccucacgaacaccuccauuaucucucauaaguuuugcaaucugagcgacgcccacaaaaagaaccuuuacgaucaugcgcugauguccauuaucagcacauuccaccucucuauuccgaauuuuaaccaguaugaggcuauguccugugacuucaauggaggcaagaucagcgugcaauacaaccugucucacuccuaugccggcgaugccgcucgccauugcgggacccuggccaauggaguucuccagacauuuaugagaauggcuuggggcgggagcuacaucgcccuggacucuggaugcggcaacugggauuguauuaugaccuccuaccaguuccuuaucauucagaauacgacaugggaagaccacugccaauuuagccggcccuccccuaugggguaucugggacuccugucucagcgcaccagagauaucuacauuagccggcgccgccggggcacauucaccuggacccucuccgacagcgagggcaaggaaacacccgggggauauugucugacgagauggaugcugaucgaggcggagcucaaaugcuuuggcaacaccgccguggcuaaguguaacgaaaaacaugaugaggaguucugcgacaugcugcggcuuuucgauuuuaauaagcaggccauccagcgccugaagacacccgcucaaaugucuauucagcucaucaacaaagccgucaaugcgcugauuaacgaccagcuuaucaugaagaaucaccugagagauauuaugugcaucccuuacugcaacuauucccaauacugguaucucaaucacaccaucacaggaaaaaccagccugcccaaguguuggcuggugucuaacggcagcuaccucaaugaaacgcauuucuccgacgacauugagcagcaggccgauaacaugaucacagagaugcugcagaaagaauacauugaccggcaagggaagaccccucuuggacugguugaucucuuuguguucucuaccagcuuuuaucugaucuccauuuuccugcaccuuaucaaaauuccgacacaucgccacaucgucggcaagagcugccccaagccucauagacucaaucggaugggcaucuguucuugcgggcuguacaaacagcccggagugccugugaaguggaaacgcuga

SEQ ID NO: 5448 - RNA, 1473 nt, Artificial Sequence
  derived and/or modified protein sequence (opt5) from LASV(Lassa virus/H.sapiens-wt/NGA/2016/ISTH_1610;Clade II)__AVO03603__GPCstabilized
augggccagaucauuaccuucuuucaagaggugccccacgucaucgaagagguuaugaacauugugcugaucgcccucagccugcuugcuauucugaaggggaucuacaauguggccacaugcggacucuucggccuggucuccuuucuuuuccugugugggagaucuugcagcacgaccuauaaaggaguguacgaacuccagacacuggagcuggacauggcgucccucaacaugaccaugccucugucuuguacaaagaauaacagccaucacuauaucaugguuggcaaugaaaccgggcuugagcugacacucaccaacacguccauuaucaaucauaaauuuugcaaccugucugaugcucacaagaaaaaucuuuacgaccaugcccugaugagcauuaucuccaccuuccaccucagcauuccgaacuuuaaucaguaugaggccaugucuugugauuucaacggaggcaagaucuccgugcaguacaaucugagccacacauaugcuauugacgccgcuaaccauugcggcaccaucgccaaugggguccugcaaacauuuaugcggauggcguggggaggcucuuacaucgcccucgauuccgggugcggaagcugggacuguauuaugaccucuuaccaguaucugaucauucagaacacgacaugggaagaucacugccaguucuccagacccagcccuaucggcuaccuugggcugcucucccaacggacccgcgacauuuauaucucuagacggcgccggggaacauuuaccuggacccugagcgauuccgagggcaacgaaacacccggcggguacugucucacgcgcuggaugcugaucgaggcugagcugaagugcuucggaaauaccgccguggcuaaauguaacgaaaagcaugacgaggaauuuugcgauaugcucagacuguucgacuucaauaaacaggccauucggcgccuuaaggcgcccgcccagaugaacauccagcugauuaauaaagcuguuaacgcccucaucaaugaucaacugauuaugaagaaccaccuuagagacaucaugugcaucccuuauugcaauuacagcaaguauugguaccugaaccacacagugaccgggcggacaucucucccccgcuguuggcuggucuccaauggaagcuaccugaacgaaacccauuuuucugacgauauugagcagcaggcugacaauaugaucacggagcuccugcaaaaagaauauauggauagacagggcaagacaccucuugggcugguggaccucuucguguuuagcaccuccuucuaccugauuucuaucuuucugcaccuuauuaaaaucccgacccaucggcacauugucggaaagcccugcccuaaaccccaucgccucaaccacaugggcaucuguagcugcggccuguauaagcacccugggguucccgugaaauggaagagauga

SEQ ID NO: 5449 - RNA, 1473 nt, Artificial Sequence
  derived and/or modified protein sequence (opt5) from LASV(Lassa virus/H.sapiens-wt/NGA/2018/ISTH_0959;Clade II)__AVV65099__GPCstabilized
augggccagaucauuaccuucuuucaagaggugccccacgucaucgaagagguuaugaacauugugcugaucgcccucagccugcuugcuauucugaaggggaucuacaauguggucacaugcggacucuucggccugguguccuuucuucugcucugugggagaucuugcagcacgaccuauaaaggaguuuacgaacugcagacacuggagcucgacauggccucccugaacaugaccaugccucuuucuuguacaaagaauaacagccaucacuauaucauggugggcaaugaaaccgggcuggagcucacacugaccaacacguccauuaucaaucauaaauucugcaaccuuucugaugcgcacaagaaaaaucuguacgaccaugcucucaugagcauuaucuccaccuuucaccugagcauuccgaacuucaaucaguaugaggccaugucuugugauuuuaacggaggcaagaucuccguccaguacaaucugagccacgccuaugcuauugacgccgcuaaccauugcggcacaaucgccaauggggugcuccaaaccuucaugcggauggcguggggaggcucuuacaucgcccuggauuccgggugcggaagcugggacuguauuaugacaucuuaccaguaucuuaucauucagaacaccacgugggaagaucacugccaguuuucccgccccagcccuaucggcuaccuggggcuccugucccaaagaacacgggacauuuauaucucucgcagacgccggggaaccuucacauggacccucagcgauuccgagggcaacgaaacccccggcggguacugucugacacgguggaugcugaucgaggcugagcucaaaugcuuuggaaauacggccguugcuaaguguaacgaaaaacaugacgaggaguucugcgauaugcugcgccuuuuugacuucaauaagcaggccauuagacggcugaaaacccccgcgcagaugagcauccagcucauuaacaaggccgugaaugcucugaucaacgaucaacuuauuaugaagaaucaucugcgcgacaucaugugcaucccuuauugcaacuacucuaaauauugguaccucaaucacacagucaccgggaagacaucccugcccagauguuggcuggugagcaacggaucuuaccucaaugaaacccacuucagcgacgauauugagcagcaggccgacaacaugaucacggagcugcuucaaaaagaauauauugaucggcagggcaagacaccucuggggcucguggaccuguuugucuucuccaccucuuuuuaccugaucagcauuuuccuucaccucguuaaaaucccgacccaucgccacgugauuggaaagcccugcccuaaaccccauagacugaaucacaugggcaucuguuccugcggccuguauaagcacccuggggugcccgucaaguggaaacgguga

SEQ ID NO: 5450 - RNA, 1473 nt, Artificial Sequence
  derived and/or modified protein sequence (opt5) from LASV(Lassa virus/H.sapiens-wt/NGA/2018/ISTH_1024;Clade II)__AVV65105__GPCstabilized
augggccagaucauuaccuucuuucaagaggugccccacgucaucgaagagguuaugaacauugugcugaucgcccucagccugcuugcuauucugaaggggguguacaaugucgccacaugcggacucuucggccugguguccuuucuucugcucugugggagaucuugcagcacgaccuauaaaggaguuuacgaacugcagacacuggagcucgacauggcgaaccugaauaugaccaugccucuuuccuguacaaagaacaauucucaucacuauauccgggugggcaacgaaaccgggcuggagcucacacugaccaauacgagcaucauuaaccauaaauucugcaaucuuuccgaugcucacaagaacaaucuguacgaccaugcccucaugucuaucauuagcaccuuucaccuguccaucccgaacuucaaucaguaugaggccaugagcugugauuuuaacggaggcaaaauuucuguccaguacaaucugucccacgcuuaugccguggacgcugccaaccauugcggcacaaucgcgaacgggguucuccaaaccuucaugcgcauggccuggggaggcagcuacauugcucuggauucugggugcggauccugggacuguaucaugacaagcuaccaguaucuuaucauucagaauaccacgugggaagaucacugccaguuuucucggcccuccccuaucggcuaccuggggcuccugagccaacgcacaagagacauuuauaucucccggcgccgccggggaaccuucacauggacccucucugauagcgagggcaacgaaacccccggcggguacugucugacaagauggaugcugauugaggccgagcucaagugcuuuggaaauacggcuguggccaaguguaacgaaaaacaugacgaggaguucugcgauaugcugcggcuuuuugacuucaauaagcaggcgauccgcagacugaaaacccccgcccagauguccauccagcucauuaacaaggcugucaaugcccugaucaacgaucaacuuauuaugaaaaaucaucugcgggacaucaugugcauuccuuauugcaacuacagcaaguauugguaccucaaucacacagugaccgggaagacaucucugccccgcuguuggcugguguccaacggaaccuaccucaaugaaacgcacuucagcgacgauaucgagcagcaggcugacaacaugaucacagagcugcuucaaaaagaauauauggauagacagggcaagaccccucuggggcucgucgaccuguuuguuuucucuaccagcuuuuaccugauuuccaucuuccuucaccucgugaaaauuccgacacaucggcacgugaucggaaagcccugcccuaaaccccaucgccugaaucacaugggcauuuguucuugcggccuguauaagcacccugggguccccgugaaauggaagagauga

SEQ ID NO: 5451 - RNA, 1473 nt, Artificial Sequence
  derived and/or modified protein sequence (opt5) from LASV(Lassa virus/H.sapiens-wt/NGA/2018/ISTH_1079;Clade II)__AVV65107__GPCstabilized
augggccagaucauuaccuucuuucaagaggugccccacgucaucgaagagguuaugaacauugugcugaucgcccucagccugcuugcuauucugaaggggaucuacaauguggccacaugcggacucuucggccuggucgcguuucuucugcucugugggagauccugcucuacgaccuauaaaggaguguacgaacugcagacacuggagcucgacauggcuagccugaacaugaccaugccucuuuccuguacaaagaauaacucucaucacuauaucaugguuggcaaugaaaccgggcuggagcucacacugaccaacacgagcauuaucaaucauaaauucugcaaccuuuccgaugcccacaagaaaaaucuguacgaccaugcccucaugucuauuaucagcaccuuucaccuguccauuccgaacuucaaucaguaugaggcuaugagcugugauuuuaacggaggcaagaucucugugcaguacaaucugucccacacauaugccgucgacgcugccaaccauugcggcaccauugcgaauggggugcuccaaacauucaugcggauggccuggggaggcagcuacaucgcucuggauucugggugcggauccugggacuguaucaugaccagcuaccaguaucuuauuauccagaacacgacaugggaagaucacugccaguuuucucgccccuccccuauuggcuaccuggggcuccugagccaaagaacccgggacaucuauauuucccgcagacgccggggaacauucaccuggacccucucugauagcgagggcaacgaaacacccggcggguacugucugacgcgguggaugcugaucgaggccgagcucaaaugcuuuggaaauaccgcuguugccaaguguaacgaaaaacaugacgaggaguucugcgauaugcugcgccuuuuugacuucaauaagcaggcgaucagacggcugaaaacacccgcccagauguccauucagcucaucaacaaggcugugaaugcccugauuaacgaucaacuuaucaugaagaaucaucugcgcgacauuaugugcaucccuuauugcaacuacagcaaauauugguaccucaaucacaccgucacagggagaaccucucugccccgguguuggcugguguccaacggaagcuaccucaaugaaacgcacuucucugacgauaucgagcagcaggcugacaacaugauuacagagcugcuucaaaaggaauauauggaucgccagggcaaaaccccucuggggcucguggaccuguuugucuucagcaccuccuuuuaccugaucucuauuuuccuucaccucaucaagauuccgacacauagacacguuaucggaaaacccugcccuaagccccaucggcugaaucacaugggcauuuguagcugcggccuguauaaacacccuggggugcccgugaaguggaagcgcuga

SEQ ID NO: 5452 - RNA, 1473 nt, Artificial Sequence
  derived and/or modified protein sequence (opt5) from LASV(Lassa virus/H.sapiens-wt/NGA/2018/ISTH_1177;Clade II)__AVV65101__GPCstabilized
augggccagaucauuaccuucuuucaagaggugccccacgucaucgaagagguuaugaacauugugcugaucgcccucagccugcuugcuauucugaaggggaucuacaauguggccacaugcggacucuucggccuggucuccuuucuucugcucugugggagaucuugcagcacgaccuauaaaggaguguacgaacugcagacacuggagcucgacauggcgucccugaacaugaccaugccucuuucuuguacaaagaauaacagccaucacuauauccggguuggcaaugaaaccgggcuggagcucacacugaccaacacguccauuaucgaucauaaauucugcaaucuuucugacgcucacaagaaaaaccuguacgaucaugcccucaugagcauuaucuccaccuuucaccugagcauuccgaauuucaaccaguaugaggccaugucuugugacuuuaauggaggcaagaucuccgugcaguacaaccugagccacacauaugcugucgaugccgcuaaucauugcggcaccauugccaacggggugcuccaaacauucaugcgcauggcguggggaggcucuuacaucgcccuggacuccgggugcggaagcugggauuguaucaugaccucuuaccaguaucuuauuauccagaauacgacaugggaagaccacugccaguuuuccagacccagcccuauuggcuaccuggggcuccugucccaacggacccgcgauaucuauauuucuagacggcgccggggaacauucaccuggacccucagcgacuccgagggcaacgaaacacccggcggguacugucugacgcgcuggaugcugaucgaggcugagcucaaaugcuuuggaaacaccgccguugcuaaguguaaugaaaaacaugaugaggaguucugcgacaugcugagacuuuuugauuucaacaagcaggccauccggcgccugaaaacacccgcgcagaugagcauucagcucaucaauaaggccgugaacgcucugauuaaugaccaacuuaucaugaagaaccaccugagagacauuaugugcaucccuuauugcaauuacucuaaauauugguaccucaaccacaccaucacagggcggaccucccugccccgcuguuggcuggucagcaauggaucuuaccucaacgaaacgcauuucagcgaugacauugagcagcaggccgauaauaugaucacagagcugcuucaaaaggaauauauggacagacagggcaaaaccccucuggggcucguggaucuguuuguguucuccaccucuuuuuaccugauuagcaucuuccuucaccucgucaagauuccgacacaucggcacguuaucggaaaacccugcccuaagccccaucgccugaaccacaugggcauuuguuccugcggccuguauaaacacccuggggugcccgugaaguggaagagauga

SEQ ID NO: 5453 - RNA, 1473 nt, Artificial Sequence
  derived and/or modified protein sequence (opt5) from LASV(Lassa virus/H.sapiens-wt/NGA/2018/ISTH_1375;Clade II)__AVV65115__GPCstabilized
augggccagaucauuaccuucuuucaagaggugccccacgucaucgaagagguuaugaacauugugcugaucgcccucagccugcuugcuauucugaaggggaucuacaauaucgccacaugcggacucuucggccugguguccuuucuucugcucugugggagaucuugcagcacgaccuauaaaggagucuacgaacugcagacacuggagcucgacauggcgucccugaacaugaccaugccucuuucuuguacaaagaauaacagccaucacuauauuauggugggcaaugaaaccgggcuggagcucacacugaccaacacguccaucauuaaucaucgguucugcaaccuuucugaugcucacaaaaagaaucuguacgaccaugcccucaugagcaucauuuccaccuuucaccugagcaucccgaacuucaaucaguaugaggccaugucuugugauuuuaacggaggcaaaauuuccguucaguacaaucugagccacgcuuaugccguggacgcugccaaccauugcggcacaaucgcgaaugggguccuccaaaccuucaugcgcauggccuggggaggcucuuacaucgcucuggauuccgggugcggaagcugggacuguauuaugacaucuuaccaguaucuuaucauucagaacaccacgugggaagaucacugccaguuuuccagacccagcccuaucggcuaccuggggcuccugucccaacggacacgcgacauuuauaucucuagacggcgccggggaaccuucacauggacccucagcgauuccgagggcaacgaaacccccggcggguacugucugacacgcuggaugcugaucgaggccgagcucaagugcuuuggaaauacggcuguggccaaauguaacgaaaagcaugacgaggaguucugcgauaugcugagacuuuuugacuucaauaaacaggcgauucggcgccugaagacccccgcccagaugagcauccagcucauuaacaaagcuguuaaugcccugaucaacgaucaacuuauuaugaagaaucaccugagagacaucaugugcaucccuuauugcaacuacucuaaguauugguaccucaaucacacagugaccgggaaaacaucccugccccgguguuggcuggucagcaacggaucuuaccucaaugaaacccauuucagcgacgauauugagcagcaggcugacaacaugaucacggagcugcuucaaaaggaauauauugaucgccagggcaaaacaccucuggggcucguggaccuguuuguguucuccaccucuuuuuaccugaucagcauuuuccuucaccucgucaagaucccgacccauagacacguuauuggaaaacccugcccuaagccccaucggcugaaucacaugggcaucuguuccugcggccuguauaaacacccuggggugcccgugaaguggaagcgcuga

SEQ ID NO: 5454 - RNA, 1473 nt, Artificial Sequence
  derived and/or modified protein sequence (opt5) from LASV(Lassa virus/H.sapiens-wt/NGA/2018/ISTH_1381;Clade II)__AVV65111__GPCstabilized
augggccagaucgugaccuucuuucaagaggucccccacguuauugaagaggugaugaacaucgugcugauugcccucagccugcuugcuauccugaaggggauuuacaaugucgccacaugcggacucuucggccugguguccuuucuucugcucugugggagaucuugcagcacgaccuauaaaggaguuuacgaacugcagacacuggagcucgacauggcgucccugaacaugaccaugccucuuucuuguacaaagaauaacagccaucacuauaucauggugggcaaugaaaccgggcuggagcucacacugaccaacacguccaucauuaaucauaaauucugcaaccuuucugaugcucacaagaaaaaucuguacgaccaugcccucaugagcaucauuuccaccuuucaccugagcaucccgaacuucaaucaguaugaggccaugucuugugauuuuaacggaggcaagauuuccguccaguacaaucugagccacacauaugcuguggacgccgcuaaccauugcggcaccaucgccaaugggguucuccaaacauucaugcggauggcguggggaggcucuuacauugcccuggauuccgggugcggaagcugggacuguaucaugaccucuuaccaguaucuuaucauucagaacacgacaugggaagaucacugccaguuuucccgccccagcccuaucggcuaccuggggcuccugucccaaagaacccgggacauuuauaucucucgcagacgccggggaacauucaccuggacccucagcgauuccgagggcaacgaaacacccggcggguacugucugacgcgguggaugcugauugaggcugagcucaaaugcuuuggaaauaccgccguggcuaaguguaacgaaaaacaugacgaggaguucugcgauaugcugcgccuuuuugacuucaauaagcaggccaucagacggcugaaaacacccgcgcagaugagcauccagcucauuaacaaggccgucaaugcucugaucaacgaucaacuuauuaugaagaaucaucugcgcgacaucaugugcauuccuuauugcaacuacucuaaauauugguaccucaaucacaccgugacagggaagaccucccugcccagauguuggcuggugagcaacggaucuuaccucaaugaaacgcacuucagcgacgauaucgagcagcaggccgacaacaugaucacagagcugcuucaaaaagaauauauggaucggcagggcaagaccccucuggggcucgucgaccuguuuguuuucuccaccucuuuuuaccugauuagcaucuuccuucaccucgugaaaauuccgacacaucgccacguggucggaaagcccugcccuaaaccccauagacugaaucacaugggcaucuguuccugcggccuguauaagcacccuggggugcccguucgguggaagcgcuga

SEQ ID NO: 5455 - RNA, 1473 nt, Artificial Sequence
  derived and/or modified protein sequence (opt5) from LASV(Lassa virus/H.sapiens-wt/NGA/2018/ISTH_1643;Clade II)__AVV65119__GPCstabilized
augggccagaucauuaccuucuuucaagaggugccccacgucaucgaagagguuaugaacauugugcugaucgcccucagccugcuugcuauucugaaggggaucuacaauguggccacaugcggacucuucggccuggucuccuuucuucugcucugugggagaucuugcagcacgaccuauaaaggaguguacgaacugcagacacuggagcucgacauggcgucccugaacaugaccaugccucuuucuuguacaaagaauaacagccaucacuauaucaugguuggcaaugaaaccgggcuggagcucacacugaccaacacguccauuaucaaucauaaauucugcaaccuuucugaugcucacaagaaaaaucuguacgaccaugcccucaugagcauuaucuccaccuuucaccugagcauuccgaacuucaaucaguaugaggccaugucuugugauuuuaacggaggcaagaucuccgugcaguacaaucugagccacacauaugcugucgacgccgcuaaccauugcggcaccauugccaauggggugcuccaaacauucaugcggauggcguggggaggcucuuacaucgcccuggauuccgggugcggaagcugggacuguaucaugaccucuuaccaguaucuuauuauccagaacacguccugggaagaucacugccaguuuagccgccccuccccuauuggcuaccuggggcuccugucucaaagaacacgggacaucuauauuagccgcagacgccggggaaccuucacauggacccucuccgauagcgagggcaacgaaacccccggcggguacugucugacacgguggaugcugaucgaggcugagcucaaaugcuuuggaaauacggccguugcuaaguguaacgaaaaacaugacgaggaguucugcgauaugcugcgccuuuuugacuucaauaagcaggccaucagacggcugaaaacccccgcgcagaugucuauucagcucaucaacaaggccgugaaugcucugauuaacgaucaacuuaucaugaagaaucaucugcgcgacauuaugugcaucccuuauugcaacuacuccaaauauugguaccucaaucacacagucaccgggaagacaagccugcccagauguuggcuggugucuaacggaaccuaccucaaugaaacgcacuucagcgacgauaucgagcagcaggccgacaacaugauuacagagcugcuucaaaaagaauauaucgaucggcagggcaagaccccucuggggcucguggaccuguuugucuucuccaccucuuuuuaccugauuagcaucuuccuucaccucguuaaaauuccgacacaucgccacgugaucggaaagcccugcccuaaaccccauagacugaaucacaugggcauuuguuccugcggccuguauaagcacccuggggugcccgucaaguggaaacgguga

SEQ ID NO: 5456 - RNA, 1473 nt, Artificial Sequence
  derived and/or modified protein sequence (opt5) from LASV(LASV003-NIG-2008;Clade II)__AIT17580__GPCstabilized
augggccagaucauuaccuucuuucaagaggugccccacgucaucgaagagguuaugaacauugugcugaucgcccucagccugcuugcuauucugaaggggaucuacaauguggccacaugcggacucuucggccuggucuccuuucuucugcucugugggagaucuugcagcacgaccuauaaaggaguguacgaacugcagacacuggagcucgacauggcgucccugaacaugaccaugccucuuucuuguacaaagaauaacagccaucacuauaucaugguuggcaaugaaaccgggcuggagcucacacugaccaacacguccauuaucaaucauaaauucugcaaccuuucugaugcucacaagaaaaaucuguacgaccaugcccucaugagcauuaucuccaccuuucaccugagcauuccgaacuucaaucaguaugaggccaugucuugugauuuuaacggaggcaagaucuccgugcaguacaaucugagccacacauaugcugucgacgccgcuaaccauugcggcaccauugccaauggggugcuccaaacauucaugcggauggcguggggaggcucuuacaucgcccuggauuccgggugcggaagcugggacuguaucaugaccucuuaccaguaucuuauuauccagaacacgacaugggaagaucacugccaguuuucccgccccagcccuauuggcuaccuggggcuccugucccaaagaacccgggacaucuauauuucucgcagacgccggggaacauucaccuggacccucagcgauuccgagagcaacgaaacacccggcggcuacugucugacgcgguggaugcugaucgaggcugagcucaaaugcuuugggaauaccgccguugcuaaguguaacgaaaaacaugacgaggaguucugcgauaugcugcgccuuuuugacuucaauaagcaggccaucagacggcugaaagcgcccgcccagaugucuauucagcucaucaacaaggcugugaaugcccugauuaacgaucaacuuaucaugaagaaucaucugcgcgacauuaugugcaucccuuauugcaacuacuccaaauauugguaccucaaucacacagucaccggcagaacaagccugccccgguguuggcuggugucuaacgggagcuaccucaaugaaacccacuucuccgacgauaucgagcagcaggcugacaacaugauuacggagcugcuucaaaaggaauauauggaucgccagggaaaaacaccucugggccucguggaccuguuugucuucucuaccagcuuuuaccugaucuccauuuuccuucaccucguuaagaucccgacccauagacacgugauugggaaacccugcccuaagccccaucggcugaaucacaugggaaucuguagcugcggccuguauaaacacccuggcgugcccgucaaguggaagcgcuga

SEQ ID NO: 5457 - RNA, 1473 nt, Artificial Sequence
  derived and/or modified protein sequence (opt5) from LASV(LASV006-NIG-2008;Clade II)__AIT17584__GPCstabilized
augggccagaucauuaccuucuuucaagaggugccccaggucaucgaagagguuaugaacauugugcugaucgcccucagccugcuugcuauucugaaggggaucuacaauguggccacaugcggacucuucggccuggucuccuuucuucugcucugugggagaucuugcagcacgaccuauaaaggaguguacgaacugcagacacuggagcucgacauggcgucccugaacaugaccaugccucuuucuuguacaaagaauaacagccaccauuauaucaugguuggcaaugaaaccgggcuggagcucacacugaccaaccaguccauuaucaaucacaaauucugcaaccuuucugaugcucauaagaaaaaucuguacgaccacgcccucaugagcauuaucuccacguuucaucugagcauuccgaacuucaaucaauaugaggccaugucuugugauuuuaacggaggcaagaucuccgugcaguacaaucugagccacucuuucgcugucgacgccgcuaaccacugcggcaccauugccaauggggugcuccagacauuuaugcggauggcguggggaggcuccuauaucgcccuggauagcgggugcggaucuugggacuguaucaugaccuccuaccaguaccuuauuauccaaaacacaaccugggaagaucauugccaguucagccgccccuccccuauuggcuaucuggggcuccugucucagagaacgcgggacaucuacauuagccgcagacgccggggaacauuuaccuggacacucuccgauagcgagggcaacgaaacccccggcggguauugucugacccgguggaugcugaucgaggcugagcucaaaugcuucggaaauacagccguugcuaaguguaacgaaaaacacgacgaggaauuuugcgauaugcugcgccuuuucgacuucaauaagcaggccaucagacggcugaaaacgcccgcgcaaaugucuauucagcucaucaacaaggccgugaaugcucugauuaacgaucagcuuaucaugaagaaucaucugcgcgacauuaugugcaucccuuacugcaacuauuccaaauacugguaucucaaucacaccaagacagggaaaaccagccugcccagauguuggcuggucucuaacggaagcuaccucaaugaaacacacuuuuccgacgauaucgagcaacaggccgacaacaugauuaccgagcugcuucagaaggaauacauggaucggcagggcaaaacgccucuggggcucguggaccuguucguguuuucuaccagcuucuaucugaucuccauuuuucuucaucucgucaagaucccgacacaccgccauguuauuggaaaacccugcccuaagccccacagacugaaucauaugggcaucuguagcugcggccuguacaagcacccuggggugcccgugaaauggaagcgguga

SEQ ID NO: 5458 - RNA, 1473 nt, Artificial Sequence
  derived and/or modified protein sequence (opt5) from LASV(LASV035-NIG-2009;Clade II)__AIT17588__GPCstabilized
augggccagaucauuaccuucuuucaagaggugccccacgucaucgaagagguuaugaacauugugcugaucgcccucagccugcuugcuauucugaaggggaucuacaauguggccacaugcggacucuucggccuggucuccuuucuucugcucugugggagaucuugcagcacgaccuauaaaggaguguacgaacugcagacacuggagcucgacauggcgucccugaacaugaccaugccucuuucuuguacaaagaauaacagccaucacuauaucaugguuggcaaugaaaccgggcuggagcucacacugaccaacacguccauuaucaaucauaaauucugcaaccuuucugaugcucacaagaaaaaucuguacgaccaugcccucaugagcauuaucuccaccuuucaccugagcauuccgaacuucaaucaguaugaggccaugucuugugauuuuaacggaggcaagaucuccgugcaguacaaucugagccacgcuuaugccgucgacgcugccaaccauugcggcacaauugcgaauggggugcuccaaaccuucaugcggauggccuggggaggcucuuacaucgcucuggauuccgggugcggaagcugggacuguaucaugacaucuuaccaguaucuuauuauccagaacaccacgugggaagaucacugccaguuuucccgccccagcccuauuggcuaccuggggcuccugucccaaagaacacgggacaucuauauuucucgcagacgccggggaaccuucacauggacccucagcgauuccgagggcaacgaaacccccggcggguacugucugacacgguggaugcugaucgaggccgagcucaaaugcuuuggaaauacggcuguugccaaguguaacgaaaaacaugacgaggaguucugcgauaugcugcgccuuuuugacuucaauaagcaggcgaucagacggcugaaagcccccgcucagaugagcauucagcucaucaacaaggccgugaaugcucugauuaacgaucaacuuaucaugaagaaucaucugcgcgacauuaugugcaucccuuauugcaacuacucuaaauauugguaccucaaucacaccgucacagggaagaccucccugcccagauguuggcuggugagcaacggaucuuaccucaaugaaacacacuucagcgacgauaucgagcagcaggccgacaacaugauuaccgagcugcuucaaaaagaauauaucgaucggcagggcaagacgccucuggggcucguggaccuguuugucuucuccacaucuuuuuaccugauuagcaucuuccuucaccucguuaaaauuccgacccaucgccacgugaucggaaagcccugcccuaaaccccauagacugaaucacaugggcauuuguuccugcggccuguauaagcacccuggggugcccgucaaguggaaacgguga

SEQ ID NO: 5459 - RNA, 1473 nt, Artificial Sequence
  derived and/or modified protein sequence (opt5) from LASV(LASV042-NIG-2009;Clade II)__AIT17592__GPCstabilized
augggccagaucauuaccuucuuucaagaggugccccacgucaucgaagagguuaugaacauugugcugaucgcccucagccugcuugcuauucugaaggggaucuacaauguggccacaugcggacucuucggccuggucuccuuucuucugcucugugggagaucuugcagcacgaccuauaaaggaguguacgaacugcagacacuggagcucgacauggcgucccugaacaugaccaugccucuuucuuguacaaagaauaacagccaucacuauaucaugguuggcaaugaaaccgggcuggagcucacacugaccaacacguccauuaucaaucauaaauucugcaaccuuucugaugcucacaagaaaaaucuguacgaccauacccucaugagcauuaucuccacauuucaccugagcauuccgaacuucaaucaguaugaggccaugucuugugauuuuaacggaggccggaucuccgugcaguacaaucugagccacgccuaugcugucgacgccgcuaaccauugcggcaccauugccaauggggugcuccaaacauucaugcgcauggcguggggaggcucuuacaucgcccuggauuccgggugcggaagcugggacuguaucaugaccucuuaccaguaucuuauuauccagaacacgacaugggaagaucacugccaguuuuccagacccagcccuauuggcuaccuggggcuccugucccaacggacccgcgacaucuauauuucuagacggcgccggggaacauucaccuggacccucagcgauuccgagggcaacgaaacacccggcggguacugucugacgcgcuggaugcugaucgaggcugagcucaagugcuuuggaaauaccgccguugcuaaauguaacgaaaagcaugacgaggaguucugcgauaugcugagacuuuuugacuucaauaaacaggccauccggcgccugaagacacccgcgcagaugagcauucagcucaucaacaaagccgugaaugcucugauuaacgaucaacuuaucaugaagaaucaccugagagacauuaugugcaucccuuauugcaacuacucuaaguauugguaccucaaucacaccaucacagggaaaaccucccugccccgguguuggcuggucagcaacggaucuuaccucaaugaaacgcauuucagcgacgauauugagcagcaggccgacaacaugaucacagagcugcuucaaaaggaauauauugaucgccagggcaaaaccccucuggggcucguggaccuguuuguguucuccaccucuuuuuaccugaucagcauuuuccuucaccucgucaagaucccgacacauagacacguugugggaaaacccugcccuaagccccaucggcugaaucacaugggcauuuguuccugcggccuguauaaacacccuggggugcccgucaaguggaagcgcuga

SEQ ID NO: 5460 - RNA, 1473 nt, Artificial Sequence
  derived and/or modified protein sequence (opt5) from LASV(LASV045-NIG-2009;Clade II)__AIT17596__GPCstabilized
augggccagaucauuaccuucuuucaagaggugccccacgucaucgaagagguuaugaacauugugcugaucgcccucagccugcuugcuauucugaaggggaucuacaauguggccacaugcggacucuucggccuggucuccuuucuucugcucugugggagaucuugcagcacgaccuauaaaggaguguacgaacugcagacacuggagcucgacauggcgucccugaacaugaccaugccucuuucuuguacaaagaauaacagccaucacuauaucaugguuggcaaugaaaccgggcuggagcucacacugaccaacacguccauuaucaaucauaaauucugcaaccuuucugaugcucacaagaaaaaucuguacgaccaugcccucaugagcauuaucuccaccuuucaccugagcauuccgaacuucaaucaguaugaggccaugucuugugauuuuaacggaggcaagaucuccgugcaguacaaucugagccacacauaugcugucgacgccgcuaaccauugcggcaccauugccaauggggugcuccaaacauucaugcggauggcguggggaggcucuuacaucgcccuggauuccgggugcggaagcugggacuguaucaugaccucuuaccaguaucuuauuauccagaacacguccugggaagaucacugccaguuuagccgccccuccccuauuggcuaccuggggcuccugucucaaagaacacgggacaucuauauuagccgcagacgccggggaaccuucacauggacccucuccgauagcgagggcaacgaaacccccggcggguacugucugacacgguggaugcugaucgaggcugagcucaaaugcuuuggaaauacggccguugcuaaguguaacgaaaaacaugacgaggaguucugcgauaugcugcgccuuuuugacuucaauaagcaggccaucagacggcugaaaacccccgcgcagaugucuauucagcucaucaacaaggccgugaaugcucugauuaacgaucaacuuaucaugaagaaucaucugcgcgacauuaugugcaucccuuauugcaacuacuccaaauauugguaccucaaucacacagucaccgggaagacaagccugcccagauguuggcuggugucuaacggaagcuaccucaaugaaacccacuucuccgacgauaucgagcagcaggccgacaacaugauuacggagcugcuucaaaaagaauauaucgaucggcagggcaagacaccucuggggcucguggaccuguuugucuucucuaccagcuuuuaccugauuuccaucuuccuucaccucguuaaaauuccgacccaucgccacgugaucggaaagcccugcccuaaaccccauagacugaaucacaugggcauuuguagcugcggccuguauaagcacccuggggugcccgucaaguggaaacgguga

SEQ ID NO: 5461 - RNA, 1473 nt, Artificial Sequence
  derived and/or modified protein sequence (opt5) from LASV(LASV046-NIG-2009;Clade II)__AIT17600__GPCstabilized
augggccagaucauuaccuucuuucaagaggugccccacgucaucgaagagguuaugaacauugugcugaucgcccucagccugcuugcuauucugaaggggaucuacaauguggccacaugcggacucuucggccuggucuccuuucuucugcucugugggagaucuugcagcacgaccuauaaaggaguguacgaacugcagacacuggagcucgacauggcgucccugaacaugaccaugccucuuucuuguacaaagaauaacagccaucacuauaucaugguuggcaaugaaaccgggcuggagcucacacugaccaacacguccauuaucaaucauaaauucugcaaccuuucugaugcucacaagaaaaaucuguacgaccaugcccucaugagcauuaucuccaccuuucaccugagcauuccgaacuucaaucaguaugaggccaugucuugugauuuuaacggaggcaagaucuccgugcaguacaaucugagccacgcuuaugccggcgacgcugccaaccauugcgggacaauugcgaauggaguccuccaaaccuucaugcggauggccuggggcgggucuuacaucgcucuggauuccggaugcggcagcugggacuguaucaugacaucuuaccaguaucuuauuauccagaacaccacgugggaagaucacugccaguuuucccgccccagcccuauuggguaccugggacuccugucccaaagaacacgggacaucuauauuucucgcagacgccggggcaccuucacauggacccucagcgauuccgagggcaacgaaacccccgggggauacugucugacacgguggaugcugaucgaggccgagcucaaaugcuuuggcaauacggcuguggccaaguguaacgaaaaacaugacgaggaguucugcgauaugcugcgccuuuuugacuucaauaagcaggcgaucagacggcugaaaacccccgcccagaugagcauucagcucaucaacaaggcuguuaaugcccugauuaacgaucaacuuaucaugaagaaucaucugcgcgacauuaugugcaucccuuauugcaacuacucuaaauauugguaccucaaucacacagugaccggaaagacaucccugcccagauguuggcuggucagcaacggcucuuaccucaaugaaacccacuucagcgacgauaucgagcagcaggcugacaacaugauuacggagcugcuucaaaaagaauauaucgaucggcaggggaagacaccucugggacucguggaccuguuuguguucuccaccucuuuuuaccugauuagcaucuuccuucaccucgucaaaauuccgacccaucgccacguuaucggcaagcccugcccuaaaccccauagacugaaucacaugggcauuuguuccugcgggcuguauaagcacccuggagugcccgugaaguggaaacgguga

SEQ ID NO: 5462 - RNA, 1473 nt, Artificial Sequence
  derived and/or modified protein sequence (opt5) from LASV(LASV049-NIG-2009;Clade II)__AIT17604__GPCstabilized
augggccagaucauuaccuucuuucaagaggugccccacgucaucgaagagguuaugaacauugugcugaucgcccucagccugcuugcuauucugaaggggaucuacaauguggccacaugcggacucuucggccuggucuccuuucuucugcucugugggagaucuugcagcacgaccuauaaaggaguguacgaacugcagacacuggagcucgacaugaccucccugaacaugacaaugccucuuucuuguaccaagaauaacagccaucacuauaucaugguuggcaaugaaacagggcuggagcucacccugacgaacaccuccauuaucaaucauaaauucugcaaccuuucugaugcgcacaagaaagaccuguacgaucaugcucucaugagcauuaucuccacauuucaccugagcauuccgaauuucaaccaguaugaggccaugucuugugacuuuaauggaggcaagaucuccgugcaguacaaccugagccacaccuaugccgucgaugcugccaagcauugcggcacaauugcuaauggggugcuccaaaccuucaugcggauggccuggggaggcucuuacaucgcgcuggacuccgggugcggaagcugggauuguaucaugacgucuuaccaguaucuuauuauccagaacacaaccugggaagaccacugccaguuuucccgccccagcccuguuggcuaccuggggcuccugucccaaagaacacgggauauuuauaucucucgcagacgccggggaaccuucaccuggacacucagcgacuccgagggcaaugaaacgcccggcggguacugucugacccgguggaugcugauugaggccgagcucaagugcuuuggaaacacagcuguggccaaauguaacgaaaagcaugaugaggaguucugcgacaugcugcgccuuuuugauuucaauaaacaggcuaucagacggcugaagacccccgcccagaugagcauccagcucauuaacaaggcggucaaugcccugaucaacgaccaacuuauuaugaaaaaucaucugcgcgacaucaugugcauuccuuauugcaacuacucuaaguauugguaccucaaucacacagugaccgggaaaacgucccugcccagauguuggcuggugagcaacggaucuuaccucaaugaaacacacuucagcgaugacaucgagcagcaggcugauaacaugaucaccgagcugcuucaaaaggaauaucuggaccggcagggcaaaaccccucucgggcuggucgaucuguuuguuuucuccacaucuuuuuaccuuauuagcaucuuccuccaccuggugaagauuccgacccaucgccacgugaucggaaaacccugcccuaagccccauagacugaaucacaugggcauuuguuccugcggccucuauaagcacccugggguccccgugaaauggaagcgguga

SEQ ID NO: 5463 - RNA, 1473 nt, Artificial Sequence
  derived and/or modified protein sequence (opt5) from LASV(LASV052-NIG-2008;Clade II)__AIT17608__GPCstabilized
augggccagaucauuaccuucuuucaagaggugccccacgucaucgaagagguuaugaacauugugcugaucgcccucagccugcuugcuauucugaaggggaucuacaauguggccacaugcggacucuucggccuggucuccuuucuucugcucugugggagaucuugcagcacgaccuauaaaggaguguacgaacugcagacacuggagcucgacauggcgucccugaacaugaccaugccucuuucuuguacaaagaauaacagccaucacuauaucaugguuggcaaugaaaccgggcuggagcucacacugaccaacacguccauuaucaaucauaaauucugcaaccuuucugaugcucacaagcggaaucuguacaaccaugcccucaugagcauuaucuccaccuuucaccugagcauuccgaauuucaaccaguaugaggccaugucuugugacuuuaauggaggcaaaaucuccgugcaguacaaccugagccacacauaugcugucgaugccgcuaaucauugcggcaccauugccaacggggugcuccaaacauucaugcgcauggcguggggaggcucuuacaucgcccuggacuccgggugcggaagcugggauuguaucaugaccucuuaccaguaucuuauuauccagaacacgacaugggaagaccacugccaguuuuccagacccagcccuauuggcuaccuggggcuccugucccaacggacccgcgauaucuauauuucuagacggcgccggggaacauucaccuggacccucagcgacuccgagggcaaugaaacacccggcggguacugucugacgcgcuggaugcugaucgaggcugagcucaagugcuuuggaaacaccgccguugcuaaauguaaugaaaagcaugaugaggaguucugcgacaugcugagacuuuuugauuucaacaaacaggccauccggcgccugaagacacccgcgcagaugagcauucagcucaucaauaaagccgugaacgcucugauuaaugaccaacuuaucaugaagaaccaccugagagauauuaugugcaucccuuauugcaauuacucuaaguauugguaccucaaccacaccgucacagggaaaaccucccugccccgguguuggcuggugagcaauggaucuuaccucaacgaaacgcauuucagcgacgacaucgagcagcaggccgauaauaugauuacagagcugcuucaaaaggaauauaucgaccgccagggcaaaaccccucuggggcucguggaucuguuugucuucuccaccucuuuuuaccugauuagcaucuuccuucaccucguuaagauuccgacacauagacacaucauuggaaaacccugcccuaagccccaucggcugaaccacaugggcaucuguuccugcggccuguauaaacacccuggggugcccgugaaguggcgcagauga

SEQ ID NO: 5464 - RNA, 1473 nt, Artificial Sequence
  derived and/or modified protein sequence (opt5) from LASV(LASV056-NIG-2008;Clade II)__AIT17612__GPCstabilized
augggccagaucauuaccuucuuucaagaggugccccacgucaucgaagagguuaugaacauugugcugaucgcccucagccugcuugcuauucugaaggggaucuacaauguggccacaugcggacucuucggccuggucuccuuucuucugcucugugggagaucuugcagcacgaccuauaaaggaguguacgaacugcagacacuggagcucgacauggcgucccugaacaugaccaugccucuuucuuguacaaagaauaacagccaucacuauauccggguuggcaaugaaaccgggcuggagcucacacugaccaacacguccauuaucaaucauaaauucugcaaccuuucugaugcucacaagaaaaaucuguacgaccauagccucauguccauuaucagcaccuuucaccugucuauuccgaacuucaaucaguaugaggccauguccugugauuuuaacggaggcaagaucagcgugcaguacaaucugucucacacauaugccgucgacgcugccaaccauugcggcaccauugcuaauggggugcuccaaacauucaugcgcauggccuggggaggcuccuacaucgcgcuggauagcgggugcggaaacugggacuguaucaugaccucuuaccaguaucuuauuauccagaacacgacaugggaagaucacugccaguuuuccagacccagcccuauuggcuaccuggggcuccugucccaacggacccgcgacaucuauauuucuagacggcgccggggaacauucaccuggacccucagcgauuccgagggcaaugaaacacccggcggguacugucugacgcgcuggaugcugaucgaggccgagcucaaaugcuuuggaaacaccgcuguugccaaguguaaugaaaaacaugacgaggaguucugcgauaugcugagacuuuuugacuucaacaagcaggcuauccggcgccugaaaacacccgcccagaugagcauucagcucaucaauaaggcggugaacgcccugauuaaugaucaacuuaucaugaagaaccaccugagagacauuaugugcaucccuuauugcaauuacucuaaauauugguaccucaaccacaccgucacagggaagaccucccugccccgguguuggcuggugagcaauggaucuuaccucaacgaaacgcauuucagcgacgauaucgagcagcaggcugacaauaugauuacagagcugcuucaaaaagaauauaucgaucgccagggcaagaccccucuggggcucguggaccuguuugucuucuccaccucuuuuuaccugauuagcaucuuccuucaccucguuaaaauuccgacacauagacacguggugggaaagcccugcccuaaaccccaucggcugaaccacaugggcaucuguuccugcggccuguauaagcacccugggguccccgugaaguggaaacgcuga

SEQ ID NO: 5465 - RNA, 1473 nt, Artificial Sequence
  derived and/or modified protein sequence (opt5) from LASV(LASV058-NIG-2008;Clade II)__AIT17616__GPCstabilized
augggccagaucauuaccuucuuucaagaggugccccacgucaucgaagagguuaugaacauugugcugaucgcccucagccugcuugcuauucugaaggggaucuacaauguggccacaugcggacucuucggccuggucuccuuucuucugcucugugggagaucuugcagcacgaccuauaaaggaguguacgaacugcagacacuggagcucgacauggcgucccugaacaugaccaugccucuuucuuguacaaagaauaacagccaucacuauaucaugguuggcaaugaaaccgggcuggagcucacacugaccaacacguccauuaucaaucauaaauucugcaaccuuucugaugcucacaagaaaaaucuguacgaccaugcccucaugagcauuaucuccaccuuucaccugagcauuccgaacuucaaucaguaugaggccaugucuugugauuuuaacggaggcaagaucuccgugcaguacaaucugagccacgcuuaugccgucgacgcugccaaccauugcggcacaauugcgaauggggugcuccaaaccuucaugcggauggccuggggaggcucuuacaucgcucuggauuccgggugcggaagcugggacuguaucaugacaucuuaccaguaucuuauuauccagaacaccacgugggaagaucacugccaguuuucccgccccagcccuauuggcuaccuggggcuccugucccaaagaacacgggacaucuauauuucucgcagacgccggggaaccuucacauggacccucagcgauuccgagggcaacgaaacccccggcggguacugucugacacgguggaugcugaucgaggccgagcucaaaugcuuuggaaauacggcuguugccaaguguaacgaaaaacaugacgaggaguucugcgauaugcugcgccuuuuugacuucaauaagcaggcgaucagacggcugaaaacccccgcccagaugagcauucagcucaucaacaaggcugugaaugcccugauuaacgaucaacuuaucaugaagaaucaucugcgcgacauuaugugcaucccuuauugcaacuacucuaaauauugguaccucaaucacacagucaccgggaagacaucccugcccagauguuggcuggugagcaacggaucuuaccucaaugaaacccacuucagcgacgauaucgagcagcaggcugacaacaugauuacggagcugcuucaaaaagaauauaucgaucggcagggcaagacaccucuggggcucguggaccuguuugucuucuccaccucuuuuuaccugauuagcaucuuccuucaccucguuaaaauuccgacccaucgccacgugaucggaaagcccugcccuaaaccccauagacugaaucacaugggcauuuguuccugcggccuguauaagcacccuggggugcccgucaaguggaaacgguga

SEQ ID NO: 5466 - RNA, 1473 nt, Artificial Sequence
  derived and/or modified protein sequence (opt5) from LASV(LASV063-NIG-2009;Clade II)__AIT17620__GPCstabilized
augggccagaucauuaccuucuuucaagaggugccccacgucaucgaagagguuaugaacauugugcugaucgcccucagccugcuugcuauucugaaggggaucuacaauguggccacaugcggacucuucggccuggucuccuuucuucugcucugugggagaucuugcagcacgaccuauaaaggaguguacgaacugcagacacuggagcucgacauggcgucccugaacaugaccaugccucuuucuuguacaaagaauaacagccaucacuauaucaugguuggcaaugaaaccgggcuggagcucacacugaccaacacguccauuaucucucauaaauucugcaaucuuagcgaugcucacaagaaaaaccuguacgaccaugcccucauguccauuaucagcaccuuucaccugucuauuccgaauuucaaccaguaugaggccauguccugugauuuuaauggaggcaagaucagcgugcaguacaaccugucucacgcuuaugccauugacgcugccaaucauugcggcacagucgcgaacggggugcuccaaaccuucaugcggauggccuggggaggcuccuacaucgcucuggauagcgggugcggaucuugggacuguaucaugacauccuaccaguaucuuauuauccagaauaccacgugggaagaucacugccaguuuagccgccccuccccuauuggcuaccuggggcuccugucucaaagaacacgggacaucuauauuagccgcagacgccggggaaccuucacauggacccucuccgauagcgagggcaacgaaacccccggcggguacugucugacacgguggaugcugaucgaggccgagcucaaaugcuuuggaaacacggcuguugccaaguguaaugaaaaacaugacgaggaguucugcgauaugcugcgccuuuuugacuucaacaagcaggcgaucagacggcugaaagcccccgcucagaugucuauucagcucaucaauaaggccgugaacgcucugauuaaugaucaacuuaucaugaagaaccaucugcgcgacauuaugugcaucccuuauugcaauuacuccaaauauugguaccucaaccacaccgucacagggaagaccagccugcccagauguuggcuggugucuaauggaagcuaccucaacgaaacacacuucuccgacgauaucgagcagcaggccgacaauaugauuaccgagcugcuucaaaaagaauauauggaucggcagggcaagacgccucuggggcucguggaccuguuugucuucucuaccagcuuuuaccugaucuccauuuuccuucaccucguuaaaaucccgacacaucgccacgugauuggaaagcccugcccuaaaccccauagacugaaccacaugggcaucuguagcugcggccuguauaagcacccuggggugcccgucaaguggaaacgguga

SEQ ID NO: 5467 - RNA, 1473 nt, Artificial Sequence
  derived and/or modified protein sequence (opt5) from LASV(LASV1000-NIG-2009;Clade II)__AIT17782__GPCstabilized
augggccagaucauuaccuucuuucaagaggugccccacgucaucgaagagguuaugaacauugugcugaucgcccucagccugcuugcuauucugaaggggaucuacaauguggccacaugcggacucuucggccuggucuccuuucuucugcucugugggagaucuugcagcacgaccuauaaaggaguguacgaacugcagacacuggagcucgacauggcgucccugaacaugaccaugccucuuucuuguacaaagaauaacagccaucacuauaucaugguuggcaaugaaaccgggcuggagcucacacugaccaacacguccauuaucaaucauaaauucugcaaccuuucugaugcucacaagaaaaaucuguacgaccaugcccucaugagcauuaucuccaccuuucaccugagcauuccgaacuucaaucaguaugaggccaugucuugugauuuuaacggaggcaagaucuccgugcaguacaaucugagccacacauaugcugucgacgccgcuaaccauugcggcaccauugccaauggggugcuccaaacauucaugcggauggcguggggaggcucuuacaucgcccuggauuccgggugcggaagcugggacuguaucaugaccucuuaccaguaucuuauuauccagaacacgacaugggaagaucacugccaguuuucccgccccagcccuauuggcuaccuggggcuccugucccaaagaacccgggacaucuauauuucucgcagacgccggggaacauucaccuggacccucagcgauuccgagggcaacgaaacacccggcggguacugucugacgcgguggaugcugaucgaggcugagcucaaaugcuuuggaaauaccgccguugcuaaguguaacgaaaaacaugacgaggaguucugcgauaugcugcgccuuuuugacuucaauaagcaggccaucaaaagacugaagacacccgcgcagaugagcauucagcucaucaacaaggccgugaaugcucugauuaacgaucaacuuaucaugaaaaaucaucugcgggacauuaugugcaucccuuauugcaacuacucuaaguauugguaccucaaucacaccgucacagggaaaaccucccugccccgcuguuggcuggugagcaacggaucuuaccucaaugaaacgcacuucagcgacgauaucgagcagcaggccgacaacaugauuacagagcugcuucaaaaggaauauaucgauagacagggcaaaaccccucuggggcucguggaccuguuugucuucuccaccucuuuuuaccugauuagcaucuuccuucaccucguuaagauuccgacacaucggcacguggugggaaaacccugcccuaagccccaucgccugaaucacaugggcaucuguuccugcggccuguauaagcacccugggguccccgugaaauggaagagauga

SEQ ID NO: 5468 - RNA, 1473 nt, Artificial Sequence
  derived and/or modified protein sequence (opt5) from LASV(LASV1008-NIG-2009;Clade II)__AIT17786__GPCstabilized
augggccagaucauuaccuucuuucaagaggugccccacgucaucgaagagguuaugaacauugugcugaucgcccucagccugcuugcuauucugaaggggaucuacaauguggccacaugcggacucuucggccuggucuccuuucuucugcucugugggagaucuugcagcacgaccuauaaaggaguguacgaacugcagacacuggagcucgacauggcgucccugaacaugaccaugccucuuucuuguacaaagaauaacagccaucacuauaucaugguuggcaaugaaaccgggcuggagcucacacugaccaacacguccauuaucaaucauaaauucugcaaccuuucugaugcucacaagaaaaaucuguacgaccaugcccucaugagcauuaucuccaccuuucaccugagcauuccgaacuucaaucaguaugaggccaugucuugugauuuuaacggaggcaagaucuccgugcaguacaaucugagccacgcuuaugccauugacgcugccgaucauugcggcacaaucgcgaacgggguccuccaaaccuucaugcggauggccuggggaggcucuuacaucgcucuggacuccgggugcggaagcugggauuguauuaugacaucuuaccaguaucuuaucauucagaauaccacgugggaagaccacugccaguuuucccgccccagcccuaucggcuaccuggggcuccugucccaaagaacacgggauauuuauaucucucgcagacgccggggaaccuucacauggacccucagcgacuccgagggcaacgaaacccccggcggguacugucugacacgguggaugcugaucgaggccgagcucaaaugcuuuggaaacacggcuguggccaaguguaaugaaaaacaugaugaggaguucugcgacaugcugcgccuuuuugauuucaacaagcaggcgauuagacggcugaaaacccccgcccagaugagcauccagcucauuaauaaggcuguuaacgcccugaucaaugaccaacuuauuaugaagaaccaucugcgcgacaucaugugcaucccuuauugcaauuacucuaaauauugguaccucaaccacacagugaccgggaagacaucccugcccagauguuggcuggucagcaauggaucuuaccucaacgaaacccacuucagcgaugacauugagcagcaggcugauaauaugaucacggagcugcuucaaaaagaauauauggaccggcagggcaagacaccucuggggcucguggaucuguuuguguucuccaccucuuuuuaccugauuagcaucuuccuucaccucgucaaaauuccgacccaucgccacaucacaggaaagcccugcccuaaaccccauagacugaaccacaugggcauuuguuccugcggccuguauaagcacccugggguucccgugaaguggaaacgguga

SEQ ID NO: 5469 - RNA, 1473 nt, Artificial Sequence
  derived and/or modified protein sequence (opt5) from LASV(LASV1011-NIG-2009;Clade II)__AIT17790__GPCstabilized
augggccagaucauuaccuucuuucaagaggugccccacgucaucgaagagguuaugaacauugugcugaucgcccucagccugcuugcuauucugaaggggaucuacaauguggccacaugcggacucuucggccuggucuccuuucuucugcucugugggagaucuugcagcacgaccuauaaaggaguguacgaacugcagacacuggagcucgacauggcgucccugaacaugaccaugccucuuucuuguacaaagaauaacagccaucacuauaucaugguuggcaaugaaaccgggcuggagcucacacugaccaacacguccauuaucaaucauaaauucugcaaccuuucugaugcucacaagaaaaaucuguacgaccaugcccucaugagcauuaucuccaccuuucaccugagcauuccgaacuucaaucaguaugaggccaugucuugugauuuuaacggaggcaagaucuccgugcaguacaaucugagccacacauaugcugucgacgccgcuaaccauugcggcaccauugccaauggggugcuccaaacauucaugcggauggcguggggaggcucuuacaucgcccuggauuccgggugcggaagcugggacuguaucaugaccucuuaccaguaucuuauuauccagaacacgacaugggaagaucacugccaguuuucccgccccagcccuauuggcuaccuggggcuccugucccaaagaacccgggacaucuauauuucucgcagacgccggggaacauucaccuggacccucagcgauuccgagggcaacgaaacacccggcggguacugucugacgcgguggaugcugaucgaggcugagcucaaaugcuuuggaaauaccgccguugcuaaguguaacgaaaaacaugacgaggaguucugcgauaugcugcgccuuuuugacuucaauaagcaggccaucagacggcugaaaacacccgcgcagaugagcauucagcucaucaacaaggccgugaaugcucugauuaacgaucaacuuaucaugaagaaucaucugcgcgacauuaugugcaucccuuauugcaacuacucuaaauauugguaccucaaucacaccgucacagggaagaccucccugcccagauguuggcuggugagcaacggaucuuaccucaaugaaacgcacuucagcgacgauaucgagcagcaggccgacaacaugauuacagagcugcuucaaaaagaauauauggaucggcagggcaagaccccucuggggcucguggaccuguuugucuucuccaccucuuuuuaccugaucagcauuuuccuucaccucguuaaaaucccgacacaucgccacauuaccggaaagcccugcccuaaaccccauagacugaaucacaugggcaucuguuccugcggccuguauaagcacccuggggugcccgugaaguggaaacgguga

SEQ ID NO: 5470 - RNA, 1473 nt, Artificial Sequence
  derived and/or modified protein sequence (opt5) from LASV(LASV1016-NIG-2009;Clade II)__AIT17798__GPCstabilized
augggccagaucauuaccuucuuucaagaggugccccacgucaucgaagagguuaugaacauugugcugaucgcccucagccugcuugcuauucugaaggggaucuacaauguggccacaugcggacucuucggccuggucuccuuucuucugcucugugggagaucuugcagcacgaccuauaaaggaguguacgaacugcagacacuggagcucgacauggcgucccugaacaugaccaugccucuuucuuguacaaagaauaacagccaucacuauaucaugguuggcaaugaaaccgggcuggagcucacacugaccaacacguccauuaucaaucauaaauucugcaaccuuucugaugcucacaagaaaaaucuguacgaccaugcccucaugagcauuaucuccaccuuucaccugagcauuccgaacuucaaucaguaugaggccaugucuugugauuuuaacggaggcaagaucuccgugcaguacaaucugagccacacauaugcugucgacgccgcuaaccauugcggcaccauugccaauggggugcuccaaacauucaugcggauggcguggggaggcucuuacaucgcccuggauuccgggugcggaagcugggacuguaucaugaccucuuaccaguaucuuauuauccagaacacgacaugggaagaucacugccaguuuucccgccccagcccuauuggcuaccuggggcuccugucccaaagaacccgggacaucuauauuucucgcagacgccggggaacauucaccuggacccucagcgauuccgagggcaacgaaacacccggcggguacugucugacgcgguggaugcugaucgaggcugagcucaaaugcuuuggaaauaccgccguugcuaaguguaacgaaaaacaugacgaggaguucugcgauaugcugcgccuuuuugacuucaauaagcaggccaucaugagacugaaaacacccgcgcagaugagcauucagcucaucaacaaggccgugaaugcucugauuaacgaucaacuuaucaugaagaaucaucugcgggacauuaugugcaucccuuauugcaacuacucuaaauauugguaccucaaucacaccgucacagggaagaccucccugccccgcuguuggcuggugagcaacggaucuuaccucaaugaaacgcacuucagcgacgauaucgagcagcaggccgacaacaugauuacagagaugcugcaaaaagaauaucuugauagacagggcaagaccccucuggggcucguggaccuguuugucuucuccaccucuuuuuaccugaucagcauuuuccuucaccucguuaaaaucccgacacaucggcacauuaucggaaagcccugcccuaaaccccaucgccugaaucacaugggcauuuguuccugcggccuguauaagcacccuggggugcccgugaaguggaaaagauga

SEQ ID NO: 5471 - RNA, 1473 nt, Artificial Sequence; identical to SEQ ID NO: 5383
  derived and/or modified protein sequence (opt5) from LASV(LASV221-NIG-2010;Clade II)__AIT17624__GPCstabilized

SEQ ID NO: 5472 - RNA, 1473 nt, Artificial Sequence
  derived and/or modified protein sequence (opt5) from LASV(LASV224-NIG-2010;Clade II)__AIT17626__GPCstabilized
augggccagaucauuaccuucuuucaagaggugccccacgucaucgaagagguuaugaacauugugcugaucgcccucagccugcuugcuauucugaaggggguguacaaugucgccacaugcggacucuucggccugguguccuuucuucugcucugugggagaucuugcagcacgaccuauaaaggaguuuacgaacugcagacacuggagcucgacauggcgucccugaacaugaccaugccucuuucuuguacaaagaauaacagccaucacuauaucauggugggcaaugaaaccgggcuggagcucacacugaccaacacguccaucauucagcauaaauucugcaaucuuucugaugcucacaagaaaaaccuguacgaccaugcccucaugagcaucauuuccaccuuucaccugagcaucccgaauuucaaccaguaugaggccaugucuugugauuuuaauggaggcaagauuacaguccaauacaaccugucccacagcuaugcuaucgacgccgcuaaucauugcggcaccauugccaacggggugcuccagacauucaugcggauggcguggggaggcucuuacaucgcccuggauuccgggugcggaagcugggacuguaucaugaccucuuaccaguaucuuauuauccagaauacgacaugggaagaucacugccaauuuucccgccccagcccuauuggcuaccuggggcuccugucccagagaacccgggacaucuauauuucucgcagacgccggggaacauucaccuggacccucagcgauuccgagggcaacgaaacacccggcggguacugucugacgcgguggaugcugaucgaggcugagcucaaaugcuuuggaaacaccgccguugcuaaguguaaugaaaaacaugacgaggaguucugcgauaugcugcgccuuuuugacuucaacaagcaggccaucagacggcugaaaacacccgcgcagaugagcauucaacucaucaauaaggccgugaacgcucugauuaaugaucagcuuaucaugaagaaccaucugcgcgacauuaugugcaucccuuauugcaauuacucuaaauauugguaccucaaccacaccgucacagggagaaccucccugccccgguguuggcuggugagcaauggaucuuaccucaacgaaacgcacuucagcgacgauaucgagcagcaagccgacaauaugauuacagagcugcuucagaaggaauauauggaucgccagggcaaaaccccucuggggcucguggaccuguuugucuucuccaccucuuuuuaccugaucagcauuuuccuucaccucguuaagaucccgacacauagacacauuaucggaaaacccugcccuaagccccaucggcugaaccacaugggcguguguuccugcggccuguauaaacacccuggggugcccgucaaguggaagcgcuga

SEQ ID NO: 5473 - RNA, 1473 nt, Artificial Sequence
  derived and/or modified protein sequence (opt5) from LASV(LASV225-NIG-2010;Clade II)__AIT17630__GPCstabilized
augggccagaucauuaccuucuuucaagaggugccccacgucaucgaagagguuaugaacauugugcugaucgcccucagccugcuugcuauucugaaggggaucuacaauguggccacaugcggacucuucggccugcuuuccuuucugcuccugugugggagaucuugcagcacgaccuauaaaggagucuacgaacugcagacacucgagcuggacauggcgucccuuaacaugaccaugccucugucuuguacaaagaauaacagccaucacuauaucauggugggcaaugaaaccgggcucgagcugacacuuaccaacacguccauuaucaaucauaaauucugcaaccugucugaugcucacaagaaaaaucucuacgaccaugcccugaugagcauuaucuccaccuuucaccugagcauuccgaacuucaaucaguaugaggccaugucuugugauuuuaacggaggcaagaucuccguucaguacaaucucagccacgcuuaugccguggacgcugccgaacauugcggcacaauugcgaacgggguccugcaaaccuucaugcggauggccuggggaggcucuuacaucgcucuugauuccgggugcggaagcugggacugugugaugacaucuuaccaguaucugaucauucagaauaccuccugggaggaucacugccaguuuagccgccccuccccuaucggcuaccucgggcugcuuucucaaagaacgcgggacauuuauaucagccgcagacgccggggaacauucaccuggacacuguccgauagcgaaggcaacgagacccccggcggguacugucugacccgguggaugcucauugaggccgaacugaaaugcuuuggaaacacagcuguugccaaguguaaugagaaacaugacgaagaguucugcgauaugcuucgccuguuugacuucaacaagcaggcgaucagacggcucaaaacgcccgcccagaugucuauccagcugauuaauaaggcugugaacgcccuuaucaaugaucaacugauuaugaagaaccaccuccgcgacaucaugugcauuccuuauugcaauuacuccaaauauugguaccugaaccacaccgucacagggaagaccagccugcccagauguuggcucgugucuaauggaagcuaccugaacgagacacauuucuccgacgauaucgagcagcaggcugacaauaugaucaccgaacuucugcaaaaagaguauauugaucggcagggcaagacgccucucgggcugguggaccuguuugucuucucuaccagcuuuuaccuuaucuccauuuuccuccaccugguuaaaaucccgacacaucgccacgugauuggaaagcccugcccuaaaccccauagacugaaccacaugggcaucuguagcugcggccucuauaagcacccuggggugcccgucaaguggaaacgguga

SEQ ID NO: 5474 - RNA, 1473 nt, Artificial Sequence
  derived and/or modified protein sequence (opt5) from LASV(LASV229-NIG-2010;Clade II)__AIT17634__GPCstabilized
augggccagaucauuaccuucuuucaagaggugccccacgucaucgaagagguuaugaacauugugcugaucgcccucagccugcuugcuauucugaaggggaucuacaauguggccacaugcggacucuucggccuggucuccuuucuucugcucugugggagaucuugcagcacgaucuauaaagacguguacgaacugcagacccuggagcucgauauggcgucccugaacaugacaaugccucuuucuuguaccaagaauaacagccaucacuauauuaugguuggaaaugaaacaggccuggagcucacccugacaaacaccuccaucauuaaucauaaauucugcaaccuuucugacgcucacaagaaaaaucuguacgaucaugcccucaugagcaucauuuccacguuucaccugagcaucccgaacuucaaucaguaugaggccaugucuugugacuuuaacgggggaaagauuuccgugcaguacaaucugagccacaccuaugcuaucgaugccgcuaaccauugcggcacaaucgccaauggcguccuccaaaccuucaugcggauggcguggggaggaucuuacauugcccuggacuccggcugcgggagcugggauuguaucaugacaucuuaccaguaucuuauuauccagaacaccacgugggaagaccacugccaguuuucccgccccagcccuauuggauaccugggccuccugucccaaagaacacgggauaucuauaucucucgcagacgccgggggaccuucacauggacccucagcgacuccgagggaaacgaaacccccggcggcuacugucugacacgguggaugcugauugaggcugagcucaaaugcuuugggaauacggccguggcuaaguguaacgaaaaacaugaugaggaguucugcgacaugcugcgccuuuuugauuucaauaagcaggccaucagacggcugaaaacccccgcgcagaugagcauucagcucaucaacaaggccguuaaugcucugauuaacgaccaacuuaucaugaagaaucaucugcgcgacaucaugugcauuccuuauugcaacuacucuagauauugguaccucaaucacacagugaccggccggacaucccugccccgcuguuggcuggucagcaacgggucuuaccucaaugaaacccacuucagcgaugacaucgagcagcaggccgauaacaugauuacggagcugcuucaaaaagaauauauggacagacagggaaagacaccucugggccucguggaucuguuuguguucuccaccucuuuuuaccugaucagcauuuuccuucaccucgucaaaaucccgacccaucggcacguuauugggaagcccugcccuaaaccccaucgccugaaucacaugggaaucuguuccugcggccuguauaaccacccuggcgugcccgugaaguggaaaagauga

SEQ ID NO: 5475 - RNA, 1473 nt, Artificial Sequence
  derived and/or modified protein sequence (opt5) from LASV(LASV237-NIG-2010;Clade II)__AIT17638__GPCstabilized
augggccagaucauuaccuucuuucaagaggugccccacgucaucgaagagguuaugaacauugugcugaucgcccucagccugcuugcuauucugaaggggaucuacaauguggccacaugcggacucuucggccuggucuccuuucuucugcucugugggagaucuugcagcacgaccuauaaaggaguguacgaacugcagacacuggagcucgacauggcgucccugaacaugaccaugccucuuucuuguacaaagaauaacagccaucacuauaucaugguuggcaaugaaaccgggcuggagcucacacugaccaacacguccauuaucaaucauaaauucugcaaccuuucugaugcucacaagaaagaccuguacgaucaugcccucaugagcauuaucuccaccuuucaccugagcauuccgaauuucaaccaguaugaggccaugucuugugacuuuaauggaggcaagaucuccgugcaguacaaccugagccacacauaugcugucgaugccgcuaaucauugcggcaccauugccaacggggugcuccaaacauucaugcggauggcguggggaggcucuuacaucgcccuggacuccgggugcggaagcugggauuguaucaugaccucuuaccaguaucuuauuauccagaauacgacaugggaagaccacugccaguuuucccgccccagcccuauuggcuaccuggggcuccugucccaaagaacccgggauaucuauauuucucgcagacgccggggaacauucaccuggacccucagcgacuccgagggcaacgaaacacccggcggguacugucugacgcgguggaugcugaucgaggcugagcucaaaugcuuuggaaacaccgccguugcuaaguguaaugaaaaacaugaugaggaguucugcgacaugcugcgccuuuuugauuucaacaagcaggccaucagacggcugaaaacacccgcgcagaugagcauucagcucaucaauaaggccgugaacgcucugauuaaugaccaacuuaucaugaagaaccaucugcgcgacauuaugugcaucccuuauugcaauuacucuaaauauugguaccucaaccacaccgucacagggaagaccucccugcccagauguuggcuggugagcaauggaucuuaccucaacgaaacgcacuucagcgaugacaucgagcagcaggccgauaauaugauuacagagcugcuucaaaaagaauauauggaccggcagggcaagaccccucuggggcucguggaucuguuugucuucuccaccucuuuuuaccugaucagcauuuuccuucaccucaucaaaauuccgacacaucgccacaucaccggaaagcccugcccuaaaccccauagacugaaccacaugggcauuuguuccugcggccuguauaagcacccugggguucccgugaaguggaaacgguga

SEQ ID NO: 5476 - RNA, 1473 nt, Artificial Sequence
  derived and/or modified protein sequence (opt5) from LASV(LASV239-NIG-2010;Clade II)__AIT17642__GPCstabilized
augggccagaucauuaccuucuuucaagaggugccccacgucaucgaagagguuaugaacauugugcugaucgcccucagccugcuugcuauucugaaggggguguacaaugucgccacaugcggacucuucggccugguguccuuucuucugcucugugggagaucuugcagcacgaccuauaaaggaguuuacgaacugcagacacuggagcucgacauggcgucccugaacaugaccaugccucuuucuuguacaaagaauaacagccaucacuauaucauggugggcaaugauaccgggcuggaacucacacugaccaacacguccaucauuaaucauaaauucugcaaccuuucugacgcucacaagaaaaaucuguacgaucaugcccucaugagcaucauuuccaccuuucaccugagcaucccgaacuucaaucaguaugaggccaugucuugugacuuuaacggaggcaagauuuccguccaguacaaucugagccacgcuuaugccguggaugcugccucucauugcggcacaaucgcgaacgggguucuccaaaccuucaugcggauggccuggggaggcuccuacauugcucuggacagcgggugcggaucuugggauuguaucaugacauccuaccaguaucuuaucauucagaauaccacgugggaggaccacugccaguuuagccgccccuccccuaucggcuaccuggggcuccugucucaaagaacacgggauauuuauaucagccgcagacgccggggaaccuucacauggacccucuccgacagcgaaggcaacgagacccccggcggguacugucugacacgguggaugcugauugaagccgagcucaaaugcuuuggaaacacggcuguggccaaguguaaugagaaacaugaugaagaguucugcgacaugcugcgccuuuuugauuucaacaagcaggcgaucagacggcugaaaacccccgcccagaugucuauccagcucauuaauaaggcugucaacgcccugaucaaugaccaacuuauuaugaagaaccaucugcgcgacaucaugugcauuccuuauugcaauuacuccaaauauugguaccucaaccacacagugaccgggaagacaagccugcccagauguuggcuggugucuaauggaagcuaccucaacgagacccacuucuccgaugacaucgaacagcaggcugauaauaugaucacggagcugcuucaaaaagaguauauggaccggcagggcaagacaccucuggggcucgucgaucuguuuguuuucucuaccagcuuuuaccugauuuccaucuuccuucaccucgugaaaauuccgacccaucgccacaucauuggaaagcccugcccuaaaccccauagacugaaccacaugggcaucuguagcugcggccuguauaagcacccuggggugcccgucaaguggaaacgguga

SEQ ID NO: 5477 - RNA, 1473 nt, Artificial Sequence
  derived and/or modified protein sequence (opt5) from LASV(LASV241-NIG-2011;Clade II)__AIT17646__GPCstabilized
augggccagaucauuaccuucuuucaagaggugccccacgucaucgaagagguuaugaacauugugcugaucgcccucagccugcuugcuauucugaaggggaucuacaauguggccacaugcggacucuucggccuggucuccuuucuucugcucugugggagaucuugcagcacgaccuauaaaggaguguacgaacugcagacacuggagcucgacauggcgucccugaacaugaccaugccucuuucuuguacaaagaauaacagccaucacuauaucaugguuggcaaugaaaccgggcuggagcucacacugaccaacacguccauuaucaaucauaaauucugcaaccuuucugaugcucacaagaaaaaucuguacgaccaugcccucaugagcauuaucuccaccuuucaccugagcauuccgaacuucaaucaguaugaggccaugucuugugauuuuaacggaggcaagaucuccgugcaguacaaucugagccacgcuuaugccgucgacgcugccucucauugcggcacaguggcgaacgggguucuccaaaccuucaugcggauggccuggggaggcuccuacauugcucuggauagcgggugcggaucuugggacuguaucaugacauccuaccaguaucuuaucauucagaauaccacgugggaagaucacugccaguuuagccgccccuccccuaucggcuaccuggggcuccugucucaaagaacacgggacauuuauaucagccgcagacgccggggaaccuucacauggacccucuccgauagcgagggcaacgaaacccccggcggguacugucugacacgguggaugcugauugaggccgagcucaaaugcuuuggaaacacggcuguggccaaguguaaugaaaaacaugacgaggaguucugcgauaugcugcgccuuuuugacuucaacaagcaggcgaucagacggcugaaaacccccgcccagaugucuauccagcucauuaauaaggcugucaacgcccugaucaaugaucaacuuauuaugaagaaccaucugcgcgacaucaugugcauuccuuauugcaauuacuccaaauauugguaccucaaccacacagugaccgggaagacaagccugcccagauguuggcuggugucuaauggaagcuaccucaacgaaacccacuucuccgacgauaucgagcagcaggcugacaauaugaucacggagcugcuucaaaaagaauauauggaucggcagggcaagacaccucuggggcucgucgaccuguuuguuuucucuaccagcuuuuaccugauuuccaucuuccuucaccucgugaaaauuccgacccaucgccacgugaucggaaagcccugcccuaaaccccauagacugaaccacaugggcauuuguagcugcggccuguauaagcacccugggguccccgugaaguggaaacgguga

SEQ ID NO: 5478 - RNA, 1473 nt, Artificial Sequence
  derived and/or modified protein sequence (opt5) from LASV(LASV242-NIG-2010;Clade II)__AIT17650__GPCstabilized
augggccagaucauuaccuucuuucaagaggugccccacgucaucgaagagguuaugaacauugugcugaucgcccucagccugcuugcuauucugaaggggaucuacaauguggccacaugcggacucuucggccuggucuccuuucuucugcucugugggagaucuugcagcacgaccuauaaaggaguguacgaacugcagacacuggagcucgacauggcgucccugaacaugaccaugccucuuucuuguacaaagaauaacagccaucacuauaucaugguuggcaaugaaaccgggcuggagcucacacugaccaacauuuccaucauuaaucauaaauucugcaaccuuucugaugcucacaagaaaaaucuguacgaccaugcccucaugagcaucauuuccacguuucaccugagcaucccgaacuucaaucaguaugaggccaugucuugugauuuuaacggaggcaagauuuccgugcaguacaaucugagccacaccuaugcugucgacgccgcuaaccauugcggcacaaucgccaauggggugcuccaaaccuucaugcggauggcguggggaggcucuuacaucgcccuggauuccgggugcggaagcugggacuguauuaugacaucuuaccaguaucuuaucauucagaacaccacgugggaagaucacugccaguuuucccgccccagcccuaucggcuaccuggggcuccugucccaaagaacacgggacauuuauaucucucgcagacgccggggaaccuucacauggacccucagcgauuccgagggcaacgaaacccccggcggguacugucugacacgguggaugcugaucgaggcugagcucaaaugcuuuggaaauacggccguugcuaaguguaacgaaaaacaugacgaggaguucugcgauaugcugcgccuuuuugacuucaauaagcaggccauuagacggcugaaagcgcccgcccagaugagcauccagcucauuaacaaggcugugaaugcccugaucaacgaucaacuuauuaugaagaaucaucugcgcgacaucaugugcaucccuuauugcaacuacucuaaauauugguaccucaaucacaccgucacagggagaaccucccugccccgguguuggcuggugagcaacggaucuuaccucaaugaaacacacuucagcgacgauauugagcagcaggcugacaacaugaucaccgagcugcuucaaaaggaauauauugaucgccagggcaaaacgccucuggggcucguggaccuguuugucuucuccacaucuuuuuaccugaucagcauuuuccuucaccucguuaagaucccgacccauagacacauuaucggaaaacccugcccuaagccccaucggcugaaucacaugggcaucuguuccugcggccuguauaaacacccuggggugcccgugaaguggaagcgcuga

SEQ ID NO: 5479 - RNA, 1473 nt, Artificial Sequence
  derived and/or modified protein sequence (opt5) from LASV(LASV246-NIG-2010;Clade II)__AIT17658__GPCstabilized
augggccagaucauuaccuucuuucaagaggugccccacgucaucgaagagguuaugaacauugugcugaucgcccucagccugcuugcuauucugaaggggguguacaaugucgccacaugcggacucuucggccugguguccuuucuucugcucugugggagaucuugcagcaucacguauaaaggaguuuacgaacugcagacccuggagcucgacauggcgaaccugaauaugacaaugccucuuuccuguaccaagaacaauucucaucacuauaucauggugggcaacgaaacagggcuggagcucacccugacaaauaccagcauuaucaaccauaaauucugcaaucuuuccgaugcucacaagaaaaaccuguacgaccaugcccucaugucuauuaucagcacguuucaccuguccauuccgaauuucaaccaguaugaggccaugagcugugauuuuaauggaggcaagaucucuguccaguacaaccugucccacaccuaugcuggcgacgccgcugaucauugcgggacaauugccaauggagugcuccaaaccuucaugcggauggcguggggcgggagcuacaucgcccuggacucuggaugcggcuccugggauuguaucaugacaagcuaccaguaucuuauuauccagaacaccacgugggaagaccacugccaguuuucucgccccuccccuaugggguaccugggacuccugagccaaagaacacgggauauuuauaucucccgcagacgccggggcaccuucacauggacccucucugacagcgagggcaacgaaacccccgggggauacugucugacacgguggaugcugauugaggcugagcucaaaugcuuuggcaauacggccguugcuaaguguaacgaaaaacaugaugaggaguucugcgacaugcugcgccuuuuugauuucaauaagcaggccaucagacggcugaaaacccccgcgcagauguccauccagcucauuaacaaggccgugaaugcucugaucaacgaccaacuuauuaugaagaaucaucugcgcgacaucaugugcauuccuuauugcaacuacagcaaauauugguaccucaaucacacaaucaccggaaagacaucucugcccagauguuggcuggucuccaacggcagcuaccucaaugaaacccacuucucugaugacaucgagcagcaggccgauaacaugauuacggagcugcuucaaaaagaauauaucgaccggcaggggaagacaccucugggacucguggaucuguuuguguucagcaccuccuuuuaccugauuucuaucuuccuucaccucgucaaaauuccgacccaucgccacaucacaggcaagcccugcccuaaaccccauagacugaaucacaugggcauuuguagcugcgggcuguauaagcacccuggaguucccgugcgguggaagcgcuga

SEQ ID NO: 5480 - RNA, 1473 nt, Artificial Sequence
  derived and/or modified protein sequence (opt5) from LASV(LASV251-NIG-2010;Clade II)__AIT17666__GPCstabilized
augggccagaucgugaccuucuuucaagaggucccccacguuauugaagaggugaugaacaucgugcugauugcccucagccugcuugcuauccugaaggggauuuacaaugucgccacaugcggacucuucggccugguguccuuucuucugcucugugggagaucuugcagcacgaccuauaaaggaguuuacgaacugcagacacuggagcucgacauggcgucccugaacaugaccaugccucuuucuuguacaaagaauaacagccaucacuauaucauggugggcaaugaaaccgggcuggagcucacacugaccaacacguccaucauuaaucauaaauucugcaaccuuucugaugcucacaagaaaaaucuguacgaccaugcccucaugagcaucauuuccaccuuucaccugagcaucccgaacuucaaucaguaugaggccaugucuugugauuuuaacggaggcaagauuuccguccaguacaaucugagccacacauaugcuguggacgccgcuaaccauugcggcaccaucgccaaugggguucuccaaacauucaugcggauggcguggggaggcucuuacauugcccuggauuccgggugcggaagcugggacuguaucaugaccucuuaccaguaucuuaucauucagaacacgacaugggaagaucacugccaguuuucccgccccagcccuaucggcuaccuggggcuccugucccaaagaacccgggacauuuauaucucucgcagacgccggggaacauucaccuggacccucagcgauuccgagggcaacgaaacacccggcggguacugucugacgcgguggaugcugauugaggcugagcucaaaugcuuuggaaauaccgccguggcuaaguguaacgaaaaacaugacgaggaguucugcgauaugcugcgccuuuuugacuucaauaagcaggccaucagacggcugaaaacacccgcgcagaugagcauccagcucauuaacaaggccgucaaugcucugaucaacgaucaacuuauuaugaagaaucaucugcgcgacaucaugugcauuccuuauugcaacuacucuaaauauugguaccucaaucacaccgugacagggaagaccucccugcccagauguuggcuggugagcaacggaucuuaccucaaugaaacgcacuucagcgacgauaucgagcagcaggccgacaacaugaucacagagcugcuucaaaaagaauauauggaucggcagggcaagaccccucuggggcucgucgaccuguuuguuuucuccaccucuuuuuaccugauuagcaucuuccuucaccucgugaaaauuccgacacaucgccacaucaccggaaagcccugcccuaaaccccauagacugaaucacaugggcauuuguuccugcggccuguauaagcacccuggggugcccgucaaguggaaacgguga

SEQ ID NO: 5481 - RNA, 1473 nt, Artificial Sequence
  derived and/or modified protein sequence (opt5) from LASV(LASV253-NIG-2011;Clade II)__AIT17670__GPCstabilized
augggccagaucauuaccuucuuucaagaggugccccacgucaucgaagagguuaugaacauugugcugaucgcccucagccugcuugcuauucugaaggggaucuacaauguggccacaugcggacucuucggccuggucuccuuucuucugcucugugggagaucuugcagcacgaccuauaaaggaguguacgaacugcagacacuggagcucgacauggcgucccugaacaugaccaugccucuuucuuguacaaagaauaacagccaucacuauaucaugguuggcaaugaaaccgggcuggagcucacacugaccaacacguccauuaucaaucauaaauucugcaaccuuucugaugcucacaagaaaaaucuguacgaccaugcccucaugagcauuaucuccaccuuucaccugagcauuccgaacuucaaucaguaugaggccaugucuugugauuuuaacggaggcaagaucuccgugcaguacaaucugagccacacauaugcugucgacgccgcuaaccauugcggcaccauugccaauggggugcuccaaacauucaugcggauggcguggggaggcucuuacaucgcccuggauuccgggugcggaagcugggacuguaucaugaccucuuaccaguaucuuauuauccagaacacgacaugggaagaucacugccaguuuucccgccccagcccuauuggcuaccuggggcuccugucccaaagaacccgggacaucuauauuucucgcagacgccggggaacauucaccuggacccucagcgauuccgagggcaacgaaacacccggcggguacugucugacgcgguggaugcugaucgaggcugagcucaaaugcuuuggaaauaccgccguugcuaaguguaacgaaaaacaugacgaggaguucugcgauaugcugcgccuuuuugacuucaauaagcaggccaucagacggcugaaagcgcccgcccagaugagcauucagcucaucaacaaggcugugaaugcccugauuaacgaucaacuuaucaugaagaaucaucugcgcgacauuaugugcaucccuuauugcaacuacucuaaauauugguaccucaaucacacagucaccgggagaacaucccugccccgguguuggcuggugagcaacggaucuuaccucaaugaaacccacuucagcgacgauaucgagcagcaggcugacaacaugauuacggagcugcuucaaaaggaauauaucgaucgccagggcaaaacaccucuggggcucguggaccuguuugucuucuccaccucuuuuuaccugauuagcaucuuccuucaccucguuaagauuccgacccauagacacaucauuggaaaacccugcccuaagccccaucggcugaaucacaugggcaucuguuccugcggccuguauaaacacccuggggugcccgugaaguggaagcgcuga

SEQ ID NO: 5482 - RNA, 1473 nt, Artificial Sequence
  derived and/or modified protein sequence (opt5) from LASV(LASV254-NIG-2011;Clade II)__AIT17674__GPCstabilized
augggccagaucauuaccuucuuucaagaggugccccacgucaucgaagagguuaugaacauugugcugaucgcccucagccugcuugcuauucugaaggggaucuacaauguggccacaugcggacucuucggccuggucuccuuucuucugcucugugggagaucuugcagcacgaccuauaaaggaguguacgaacugcagacacuggagcucgacaugaccaaccugaauaugacaaugccucuuuccuguaccaagaacaauucucaucacuauaucaugguuggcaacgaaacagggcuggagcucacccugacgaauaccagcauuaucaaccauaaauucugcaaucuuuccgaugcgcacaagaaaaaccuguacaaucaugcucucaugucuauuaucagcacauuucaccuguccauuccgaacuucaaucaguaugaggccaugagcugugacuuuaacggaggcaagaucucugugcaguacaaucugucccacagcuaugccgucgaugcugccaaccauugcggcaccauugcuaacggggugcuccaaacauucaugcggauggccuggggaggcucuuacaucgcgcuggacuccgggugcggaaauugggauuguaucaugaccagcuaccaguaucuuauuauccagaacacgacaugggaagaccacugccaguuuucucgccccuccccuauuggcuaccuggggcuccugagccaaagaacccgggauaucuauauuucccgcagacgccggggaacauucaccuggacccucucugacagcgagggcaaugaaacacccggcggguacugucugacgcgguggaugcugaucgaggccgagcucaaaugcuuuggaaacaccgcuguugccaaguguaaugaaaaacaugaugaggaguucugcgacaugcugcgccuuuuugauuucaacaagcaggcuaucagacggcugaaaacacccgcccaggcgaauauucagcucaucaacaaggccgugaaugcucugauuaacgaccaacuuaucaugaagaaucaucugcgcgauauuaugugcaucccuuauugcaacuacuccaaauauugguaccucaaucacaccgucacagggaagaccagccugcccagauguuggcuggugucuaacggauccuaccucaaugaaacgcacuucagcgacgacaucgagcagcaggccgauaacaugauuacagagcugcuucaaaaagaauauauggaccggcagggcaagaccccucuggggcucguggaucuguuugucuucucuaccagcuuuuaccugaucuccauuuuccuucaccucguuaaaaucccgacacaucgccacgugauuggaaagcccugcccuaaaccccauagacugaaccacaugggcaucuguucuugcggccuguauaagcacccuggggugcccgucaaguggaaacgguga

SEQ ID NO: 5483 - RNA, 1473 nt, Artificial Sequence
  derived and/or modified protein sequence (opt5) from LASV(LASV256-NIG-2010;Clade II)__AIT17678__GPCstabilized
augggccagaucauuaccuucuuucaagaggugccccacgucaucgaagagguuaugaacauugugcugaucacacucagccugcuugccauucugaaggggaucuacaauaucgcuacgugcggacucuucggccugguguccuuucuucugcucugugggagaucuugcagcaccacauauaaaggagucuacgaacugcagacccuggagcucgacaugacaucccugaacaugaccaugccucuuucuuguacaaagaauaacagccaucacuauauuauggugggcaaugaaaccgggcuggagcucacgcugaccaacacauccaucauuaaucauaaauucugcaaccuuucugaugcccacaagaaaaaucuguacgaccaugcgcucaugagcaucauuuccaccuuucaccugagcaucccgaacuucaaucaguaugaggcuaugucuugugauuuuaacggaggcaagauuuccguucaguacaaucugagccacacauaugccguggacgccgcuaaccauugcggcaccaucgccaaugggguccuccaaacguucaugcggauggcuuggggaggcucuuacaucgcccuggauuccgggugcggaagcugggacuguauuaugacaucuuaccaguaucuuaucauucagaacaccacaugggaagaucacugccaguuuucccgccccagcccuaucggcuaccuggggcuccugucccaaagaacccgggacauuuauaucucucgcagacgccggggaaccuucacauggacgcucagcgauuccgagggcaacgaaacccccggcggguacugucugacacgguggaugcugaucgaggcggagcucaaaugcuuuggaaauaccgccguggcuaaguguaacgaaaaacaugacgaggaguucugcgauaugcugcgccuuuuugacuucaauaagcaggccauuagacggcugaaaacacccgcucagaugagcauccagcucauuaacaaggccguuaaugcgcugaucaacgaucaacuuauuaugaagaaucaucugcgcgacaucaugugcaucccuuauugcaacuacucuaaauauugguaccucaaucacaccgugacggggaagacaucccugcccagauguuggcuggucagcaacggaucuuaccucaaugaaacccacuucagcgacgauauugagcagcaggccgacaacaugaucaccgagcugcuucaaaaagaauauauugaucggcagggcaagacaccucuggggcucguggaccuguuuguguucuccaccucuuuuuaccugaucagcauuuuccuucaccucgucaaaaucccgacacaucgccacauuaucggaaagcccugcccuaaaccccauagacugaaucacaugggcaucuguuccugcggccuguauaagcacccugggauucccguuaaguggaaacgguga

SEQ ID NO: 5484 - RNA, 1473 nt, Artificial Sequence
  derived and/or modified protein sequence (opt5) from LASV(LASV267-NIG-2010;Clade II)__AIT17686__GPCstabilized
augggccagaucauuaccuucuuucaagaggugccccacgucaucgaagagguuaugaacauugugcugaucgcccucagccugcuugcuauucugaaggggaucuacaauguggccacaugcggacucuucggccuggucuccuuucuucugcucugugggagaucuugcagcacgaccuauaaaggaguguacgaacugcagacacuggagcucgacauggcgucccugaacaugaccaugccucuuucuuguacaaagaauaacagccaucacuauaucaugguuggcaaugaaaccgggcuggagcucacacugaccaacacguccauuaucaaucauaaauucugcaaccuuucugaugcucacaagaaaaaucuguacgaccaugcccucaugagcauuaucuccaccuuucaccugagcauuccgaacuucaaucaguaugaggccaugucuugugauuuuaacggaggcaagaucuccgugcaguacaaucugagccacacauaugcugucgacgccgcuaaccauugcggcaccauugccaauggggugcuccaaacauucaugcggauggcguggggaggcucuuacaucgcccuggauucccgcugcgggagcugggacuguaucaugaccucuuaccaguaucuuauuauccagaacacgacaugggaagaucacugccaguuuuccagacccagcccuauuggauaccugggccuccugucccaacggacccgcgacaucuauauuucuagacggcgccgggggacauucaccuggacccucagcgauuccgagggaaacgaaacacccggcggcuacugucugacgcgcuggaugcugaucgaggcugagcucaaaugcuuugggaauaccgccguugcuaaguguaacgaaaaacaugacgaggaguucugcgauaugcugagacuuuuugacuucaauaagcaggccauccggcgccugaaaacacccgcgcagaugagcauucagcucaucaacaaggccgugaaugcucugauuaacgaucaacuuaucaugaagaaucaccugagagacauuaugugcaucccuuauugcaacuacucuaaauauugguaccucaaucacaccgucacaggcaagaccucccugccccgguguuggcuggugagcaacgggucuuaccucaaugaaacgcauuucagcgacgauaucgagcagcaggccgacaacaugauuacagagcugcuucaaaaagaauauauggaucgccagggaaagaccccucugggccucguggaccuguuugucuucuccaccucuuuuuaccugaucagcauuuuccuucaccucaucaaaauuccgacacauagacacguuaucgggaagcccugcccuaaaccccaucggcugaaucacaugggaauuuguuccugcggccuguauaagcacccuggcgugcccgugaaguggaaacgcuga

SEQ ID NO: 5485 - RNA, 1473 nt, Artificial Sequence
  derived and/or modified protein sequence (opt5) from LASV(LASV271-NIG-2010;Clade II)__AIT17690__GPCstabilized
augggccagaucauuaccuucuuucaagaggugccccacgucaucgaagagguuaugaacauugugcugaucgcccucagccugcuugcuauucugaaggggaucuacaauguggccacaugcggacucuucggccuggucuccuuucuucugcucugugggagaucuugcagcacgaccuauaaaggaguguacgaacugcagacacuggagcucgacauggcgucccugaacaugaccaugccucuuucuuguacaaagaauaacagccaucacuauaucaugguuggcaaugaaaccgggcuggagcucacacugaccaacacguccauuaucaaucauaaauucugcaaccuuucugaugcucacaagaaaaaucuguacgaccaugcccucaugagcauuaucuccaccuuucaccugagcauuccgaacuucaaucaguaugaggccaugucuugugauuuuaacggaggcaagaucuccgugcaguacaaucugagccacgcuuaugccgucgacgcugccucucauugcggcacaguggcgaacgggguucuccaaaccuucaugcggauggccuggggaggcuccuacauugcucuggauagcgggugcggaucuugggacuguaucaugacauccuaccaguaucuuaucauucagaauaccacgugggaagaucacugccaguuuagccgccccuccccuaucggcuaccuggggcuccugucucaaagaacacgggacauuuauaucagccgcagacgccggggaaccuucacauggacccucuccgauagcgagggcaacgaaacccccggcggguacugucugacacgguggaugcugauugaggccgagcucaaaugcuuuggaaacacggcuguggccaaguguaaugaaaaacaugacgaggaguucugcgauaugcugcgccuuuuugacuucaacaagcaggcgaucagacggcugaaaacccccgcccagaugucuauccagcucauuaauaaggcugucaacgcccugaucaaugaucaacuuauuaugaagaaccaucugcgcgacaucaugugcauuccuuauugcaauuacuccaaauauugguaccucaaccacacagugaccgggagaacaagccugccccgguguuggcuggugucuaauggaagcuaccucaacgaaacccacuucuccgacgauaucgagcagcaggcugacaauaugaucacggagcugcuucaaaaggaauauauggaucgccagggcaaaacaccucuggggcucgucgaccuguuuguuuucucuaccagcuuuuaccugauuuccaucuuccuucaccucgugaagauuccgacccauagacacgugaucggaaaacccugcccuaagccccaucggcugaaccacaugggcauuuguagcugcggccuguauaaacacccugggguccccgugaaguggaagcgcuga

SEQ ID NO: 5486 - RNA, 1473 nt, Artificial Sequence
  derived and/or modified protein sequence (opt5) from LASV(LASV274-NIG-2010;Clade II)__AIT17694__GPCstabilized
augggccagaucauuaccuucuuucaagaggugccccacgucaucgaagagguuaugaacauugugcugaucgcccucagccugcuugcuauucugaaggggaucuacaauguggccacaugcggacucuucggccuggucuccuuucuucugcucugugggagaucuugcagcacgaucuauaaaggaguguacgaacugcagacccuggagcucgacauggcgucccugaacaugacaaugccucuuucuuguaccaagaauaacagccaucacuauauuaugguuggcaaugaaacagggcuggagcucacccugacaaacaccuccaucauuaaucauaaauucugcaaccuuucugaugcucacaagaaaaaucuguacgaccaugcccucaugagcaucauuuccacguuucaccugagcaucccgaacuucaaucaguaugaggccaugucuugugauuuuaacggaggcaagauuuccgugcaguacaaucugagccacaccuaugcugucgacgccgcuaaccauugcggcacaaucgccaauggggugcuccaaaccuucaugcggauggcguggggaggcucuuacaucgcccuggauuccgggugcggaagcugggacuguauuaugacaucuuaccaguaucuuaucauucagaacaccacgugggaagaucacugccaguuuucccgccccagcccuaucggcuaccuggggcuccugucccaaagaacacgggacauuuauaucucucgcagacgccggggaaccuucacauggacccucagcgauuccgagggcaacgaaacccccggcggguacugucugacacgguggaugcugaucgaggcugagcucaaaugcuuuggaaauacggccguugcuaaguguaacgaaaaacaugacgaggaguucugcgauaugcugcgccuuuuugacuucaauaagcaggccauuagacggcugaaaacccccgcgcagaugagcauccagcucauuaacaaggccgugaaugcucugaucaacgaucaacuuauuaugaagaaucaucugcgcgacaucaugugcaucccuuauugcaacuacucuaaauauugguaccucaaucacacagucaccgggaagacaucccugcccagauguuggcuggugagcaacggaucuuaccucaaugaaacccacuucagcgacgauauugagcagcaggccgacaacaugaucacggagcugcuucaaaaagaauauauugaucggcagggcaagacaccucuggggcucguggaccuguuugucuucuccaccucuuuuuaccugaucagcauuuuccuucaccucguuaaaaucccgacccaucgccacguggugggaaagcccugcccuaaaccccauagacugaaucacaugggcauuuguuccugcggccuguauaagcacccugggguccccgugaaguggaaacgguga

SEQ ID NO: 5487 - RNA, 1473 nt, Artificial Sequence
  derived and/or modified protein sequence (opt5) from LASV(LASV719-NIG-2009;Clade II)__AIT17704__GPCstabilized
augggccagaucauuaccuucuuucaagaggugccccacgucaucgaagagguuaugaacauugugcugaucgcccucagccugcuugcuauucugaaggggaucuacaauguggccacaugcggacucuucggccuggucuccuuucuucugcucugugggagaucuugcagcacgaccuauaaaggaguguacgaacugcagacacuggagcucgacauggcgucccugaacaugaccaugccucuuucuuguacaaagaauaacagccaucacuauaucaugguuggcaaugaaaccgggcuggagcucacacugaccaacacguccauuaucaaucauaaauucugcaaccuuucugaugcucacaagaaaaaucuguacgaccaugcccucaugagcauuaucuccaccuuucaccugagcauuccgaacuucaaucaguaugaggccaugucuugugauuuuaacggaggcaagaucuccgugcaguacaaucugagccacacauaugcugucgacgccgcuaaccauugcggcaccauugccaauggggugcuccaaacauucaugcggauggcguggggaggcucuuacaucgcccuggauuccgggugcggaagcugggacuguaucaugaccucuuaccaguaucuuauuauccagaacacgacaugggaagaucacugccaguuuucccgccccagcccuauuggcuaccuggggcuccugucccaaagaacccgggacaucuauauuucucgcagacgccggggaacauucaccuggacccucagcgauuccgagggcaacgaaacacccggcggguacugucugacgcgguggaugcugaucgaggcugagcucaaaugcuuuggaaauaccgccguugcuaaguguaacgaaaaacaugacgaggaguucugcgauaugcugcgccuuuuugacuucaauaagcaggccaucagacggcugaaaacacccgcgcagaugagcauucagcucaucaacaaggccgugaaugcucugauuaacgaucaacuuaucaugaagaaucaucugcgcgacauuaugugcaucccuuauugcaacuacucuaaauauugguaccucaaucacaccgucacagggaagaccucccugcccagauguuggcuggugagcaacggaucuuaccucaaugaaacgcacuucagcgacgauaucgagcagcaggccgacaacaugauuacagagcugcuucaaaaagaauauaucgaucggcagggcaagaccccucuggggcucguggaccuguuugucuucuccaccucuuuuuaccugauuagcaucuuccuucaccucguuaaaauuccgacacaucgccacgugaucggaaagcccugcccuaaaccccauagacugaaucacaugggcauuuguuccugcggccuguauaagcacccuggggugcccgucaaguggaaacgguga

SEQ ID NO: 5488 - RNA, 1473 nt, Artificial Sequence
  derived and/or modified protein sequence (opt5) from LASV(LASV738-NIG-2009;Clade II)__AIT17712__GPCstabilized
augggccagaucauuaccuucuuucaagaggugccccacgucaucgaagagguuaugaacauugugcugaucgcccucagccugcuugcuauucugaaggggaucuacaauguggccacaugcggacucuucggccuggucuccuuucuucugcucugugggagaucuugcagcacgaccuauaaaggaguguacgaacugcagacacuggagcucgacauggcgucccugaacaugaccaugccucuuucuuguacaaagaauaacagccaucacuauaucaugguuggcaaugaaaccgggcuggagcucacacugaccaacacguccauuaucaaucauaaauucugcaaccuuucugaugcucacaagaaaaaucuguacgaccaugcccucaugagcauuaucuccaccuuucaccugagcauuccgaacuucaaucaguaugaggccaugucuugugauuuuaacggaggcaagaucuccgugcaguacaaucugagccacacauaugcugucgacgccgcuaaccauugcggcaccauugccaauggggugcuccaaacauucaugcggauggcguggggaggcucuuacaucgcccuggauuccgggugcggagcuugggacuguaucaugaccagcuaccaguaucuuauuauccagaacacgacaugggaagaucacugccaguuuucucgccccuccccuauuggcuaccuggggcuccugagccaaagaacccgggacaucuauauuucccgcagacgccggggaacauucaccuggacccucucugauagcgagggcaacgaaacacccggcggguacugucugacgcgguggaugcugaucgaggccgagcucaaaugcuuuggaaauaccgcuguugccaaguguaacgaaaaacaugacgaggaguucugcgauaugcugcgccuuuuugacuucaauaagcaggcgaucaugagacugaaaacacccgcccagauguccauucagcucaucaacaaggcugugaaugcccugauuaacgaucaacuuaucaugaagaaucaucugcgggacauuaugugcaucccuuauugcaacuacagcaaauauugguaccucaaucacaccgucacagggaagaccucucugccccgcuguuggcugguguccaacggaagcuaccucaaugaaacgcacuucucugacgauaucgagcagcaggcugacaacaugauuacagagaugcugcaaaaagaauauaucgauagacagggcaagaccccucuugggcugguggaccucuuugucuucagcaccuccuuuuaccugauuucuaucuuccugcaccuuguuaaaauuccgacacaucggcacgugaucggaaagcccugcccuaaaccccaucgccucaaucacaugggcauuuguagcugcggccuguauaagcacccuggggugcccgucagauggaagcgguga

SEQ ID NO: 5489 - RNA, 1473 nt, Artificial Sequence
  derived and/or modified protein sequence (opt5) from LASV(LASV966-NIG-2009;Clade II)__AIT17718__GPCstabilized
augggccagaucauuaccuucuuucaagaggugccccacgucaucgaagagguuaugaacauugugcugaucgcccucagccugcuugcuauucugaaggggaucuacaauguggccacaugcggacucuucggccuggucuccuuucuucugcucugugggagaucuugcagcacgaccuauaaaggaguguacgaacugcagacacuggagcucgacauggcgucccugaacaugaccaugccucuuucuuguacaaagaauaacagccaucacuauauccggguuggcaaugaaaccgggcuggagcucacacugaccaacgcuuccauuaucaaucauaaauucugcaaccuuucugaugcccacaagaaaaaucuguacgaccaugcccucaugagcauuaucuccacguuucaccugagcauuccgaacuucaaucaguaugaggcuaugucuugugauuuuaacggaggcaagaucuccgugcaguacaaucugagccacgccuaugcuauugacgccgcgaaccauugcggcaccgucgccaauggggugcuccaaacauucaugcgcauggcuuggggaggcucuuacaucgcccuggauuccgggugcggaaacugggacuguaucaugaccagcuaccaguaucuuauuauccagaacacaaccugggaagaucacugccaguuuucucggcccuccccuauuggcuaccuggggcuccugagccaacgcacgagagacaucuauauuucccggcgccgccggggaacauucaccuggacacucucugauagcgagggcaaugaaacccccggcggguacugucugaccagauggaugcugaucgaggcugagcucaagugcuuuggaaacacagccguugcgaaauguaaugaaaagcaugacgaggaguucugcgauaugcugcggcuuuuugacuucaacaaacaggccauccgcagacugaagacgcccgcucagauguccauucagcucaucaauaaagccgugaacgcucugauuaaugaucaacuuaucaugaagaaccaucugcgggacauuaugugcaucccuuauugcaauuacagcaaguauugguaccucaaccacaccgucacagggaaaaccucucugccccgcuguuggcugguguccaauggaagcuaccucaacgaaacacacuucucugacgauaucgagcagcaggccgacaauaugauuaccgagcugcuucaaaaggaauauauggauagacagggcaaaacgccucuggggcucguggaccuguuugucuucagcacauccuuuuaccugaucucuauuuuccuucaccucguuaagaucccgacccaucggcacgugauuggaaaacccugcccuaagccccaucgccugaaccacaugggcaucuguagcugcggcuuuuauaaacacccuggggugcccgucaaguggaagagauga

SEQ ID NO: 5490 - RNA, 1473 nt, Artificial Sequence
  derived and/or modified protein sequence (opt5) from LASV(LASV969-NIG-2009;Clade II)__AIT17724__GPCstabilized
augggccagaucauuaccuucuuucaagaggugccccacgucaucgaagagguuaugaacauugugcugaucgcccucagccugcuugcuauucugaaggggaucuacaauguggccacaugcggacucuucggccuggucuccuuucuucugcucugugggagaucuugcagcacgaccuauaaaggaguguacgaacugcagacacuggagcucgacauggcgaaccugaauaugaccaugccucuuuccuguacaaagaacaauucucaucacuauaucaugguuggcaacgaaaccgggcuggagcucacacugaccaauacgagcauuaucaaccauaaauucugcaaucuuuccgaugcucacaagaaaaaccuguacgaccaugcccucaugucuauuaucagcaccuuucaccuguccauuccgaauuucaaccaguaugaggccaugagcugugauuuuaauggaggcaagaucucugugcaguacaaccugucccacacauaugcugucgacgccgcuaaucauugcggcaccguggccaacgggguucuccaaacauucaugcggauggcguggggaggcagcuacauugcccuggauucugggugcggauccugggacuguaucaugaccagcuaccaguaucuuaucauucagaacacgacaugggaagaucacugccaguuuucucgccccuccccuaucggcuaccuggggcuccugagccaaagaacccgggacauuuauaucucccgcagacgccggggaacauucaccuggacccucucugauagcgagggcaaugaaacacccggcggguacugucugacgcgguggaugcugauugaggcugagcucaaaugcuuuggaaacaccgccguggcuaaguguaaugaaaaacaugacgaggaguucugcgauaugcugcgccuuuuugacuucaacaagcaggccaucagacggcugaaaacacccgcgcagauguccauccagcucauuaauaaggccgucaacgcucugaucaaugaucaacuuauuaugaagaaccaucugcgcgacaucaugugcauuccuuauugcaauuacagcaaauauugguaccucaaccacaccgugacagggaagaccucucugcccagauguuggcugguguccaauggaagcuaccucaacgaaacgcacuucucugacgauaucgagcagcaggccgacaauaugaucacagagcugcuucaaaaagaauauauggaucggcagggcaagaccccucuggggcucgucgaccuguuuguuuucagcaccuccuuuuaccugauuucuaucuuccuucaccucgugaaaauuccgacacaucgccacaucaugggaaagcccugcccuaaaccccauagacugaaccacaugggcauuuguagcugcggccuguauaagcacccuggggugcccgucaaguggaaacgguga

SEQ ID NO: 5491 - RNA, 1473 nt, Artificial Sequence
  derived and/or modified protein sequence (opt5) from LASV(LASV971-NIG-2009;Clade II)__AIT17728__GPCstabilized
augggccagaucauuaccuucuuucaagaggugccccacgucaucgaagagguuaugaacauugugcugaucgcccucagccugcuugcuauucugaaggggaucuacaauguggccacaugcggacucuucggccuggucuccuuucuucugcucugugggagaucuugcagcacgaccuauaaaggaguguacgaacugcagacacuggagcucgacaugggcucccugaacaugaccaugccucuuucuuguacaaagaauaacagccaucacuauaucaugguugggaaugaaaccggacuggagcucacacugaccaacacguccauuaucaaucauaaauucugcaaccuuucugaugcgcacaagaaaaaucuguacgaccaugcucucaugagcauuaucuccaccuuucaccugagcauuccgaacuucaaucaguaugaggccaugucuugugauuuuaacggcggcaagaucuccgugcaguacaaucugagccacacauaugccgucgacgcugccaaccauugcgggaccauugcuaauggagugcuccaaacauucaugcggauggccuggggcgggucuuacaucgcgcuggauuccggaugcggcagcugggacuguaucaugaccucuuaccaguaucuuauuauccagaacacgacaugggaagaucacugccaguuuucccgccccagcccuauuggguaccugggacuccugucccaaagaacccgggacaucuauauuucucgcagacgccggggcacauucaccuggacccucagcgauuccgagggcaacgaaacacccgggggauacugucugacgcgguggaugcugaucgaggccgagcucaaaugcuuuggcaauaccgcuguugccaaguguaacgaaaaacaugacgaggaguucugcgauaugcugcgccuuuuugacuucaauaagcaggcuaucagacggcugaaaacacccgcccagaugagcauucagcucaucaacaaggcggugaaugcccugauuaacgaucaacuuaucaugaagaaucaucugcgcgacauuaugugcaucccuuauugcaacuacucuaaauauugguaccucaaucacaccgucacaggaaagaccucccugcccagauguuggcuggugagcaacggcucuuaccucaaugaaacgcacuucagcgacgauaucgagcagcaggcugacaacaugauuacagagcugcuucaaaaagaauauauggaucggcaggggaagaccccucugggacucguggaccuguuugucuucuccaccucuuuuuaccugaucagcauuuuccuucaccucguuaaaaucccgacacaucgccacgugauuggcaagcccugcccuaaaccccauagacugaaucacaugggcaucuguuccugcgggcuguauaagcacccuggagugcccgucaaguggaaacgguga

SEQ ID NO: 5492 - RNA, 1473 nt, Artificial Sequence
  derived and/or modified protein sequence (opt5) from LASV(LASV975-NIG-2009;Clade II)__AIT17732__GPCstabilized
augggccagaucauuaccuucuuucaagaggugccccacgucaucgaagagguuaugaacauugugcugaucgcccucagccugcuugcuauucugaaggggaucuacaauguggccacaugcggacucuucggccuggucuccuuucuucugcucugugggagaucuugcagcacgaccuauaaaggaguguacgaacugcagacacuggagcucgacauggcgucccugaacaugaccaugccucuuucuuguacaaagaauaacagccaucacuauaucaugguuggcaaugaaaccgggcuggagcucacacugaccaacacguccauuaucaaucauaaauucugcaaccuuucugaugcucacaagaaaaaucuguacgaccaugcccucaugagcauuaucuccaccuuucaccugagcauuccgaacuucaaucaguaugaggccaugucuugugauuuuaacggaggcaagaucuccgugcaguacaaucugagccacacauaugcugucgacgccgcuaaccauugcggcaccauugccaauggggugcuccaaacauucaugcggauggcguggggaggcucuuacaucgcccuggauuccgggugcggaagcugggacuguaucaugaccucuuaccaguaucuuauuauccagaacacgacaugggaagaucacugccaguuuucccgccccagcccuauuggcuaccuggggcuccugucccaaagaacccgggacaucuauauuucucgcagacgccggggaacauucaccuggacccucagcgauuccgagggcaacgaaacacccggcggguacugucugacgcgguggaugcugaucgaggcugagcucaaaugcuuuggaaauaccgccguugcuaaguguaacgaaaaacaugacgaggaguucugcgauaugcugcgccuuuuugacuucaauaagcaggccaucagacggcugaaaacacccgcgcagaugagcauucagcucaucaacaaggccgugaaugcucugauuaacgaucaacuuaucaugaagaaucaucugcgcgacauuaugugcaucccuuauugcaacuacucuaaauauugguaccucaaucacaccgucacagggaagaccucccugcccagauguuggcuggugagcaacggaucuuaccucaaugaaacgcacuucagcgacgauaucgagcagcaggccgacaacaugauuacagagcugcuucaaaaagaauauaucgaucggcagggcaagaccccucuggggcucguggaccuguuugucuucuccaccucuuuuuaccugauuagcaucuuccuucaccucguuaaaauuccgacacaucgccacaucgugggaaagcccugcccuaaaccccauagacugaaucacaugggcauuuguuccugcggccuguauaagcacccuggggugcccgucaaguggaaacgguga

SEQ ID NO: 5493 - RNA, 1473 nt, Artificial Sequence
  derived and/or modified protein sequence (opt5) from LASV(LASV976-NIG-2009;Clade II)__AIT17736__GPCstabilized
augggccagaucgugaccuucuuucaagaggucccccacguuauugaagaggugaugaacaucgugcugauugcccucagccugcuugcuauccugaaggggauuuacaaugucgccacaugcggacucuucggccugguguccuuucuucugcucugugggagaucuugcagcacgaccuauaaaggaguuuacgaacugcagacacuggagcucgacauggcgucccugaacaugaccaugccucuuucuuguacaaagaauaacagccaucacuauaucauggugggcaaugaaaccgggcuggagcucacacugaccaacacguccaucauuaaucauaaauucugcaaccuuucugaugcucacaagaaagaccuguacgaucaugcccucaugagcaucauuuccaccuuucaccugagcaucccgaauuucaaccaguaugaggccaugucuugugacuuuaauggaggcaagauuuccguccaguacaaccugagccacacauaugcuguggaugccgcuaaucauugcggcaccaucgccaacgggguucuccaaacauucaugcggauggcguggggaggcucuuacauugcccuggacuccgggugcggaagcugggauuguaucaugaccucuuaccaguaucuuaucauucagaauacgacaugggaagaccacugccaguuuucccgccccagcccuaucggcuaccuggggcuccugucccaaagaacccgggauauuuauaucucucgcagacgccggggaacauucaccuggacccucagcgacuccgagggcaacgaaacacccggcggguacugucugacgcgguggaugcugauugaggcugagcucaaaugcuuuggaaacaccgccguggcuaaguguaaugaaaaacaugaugaggaguucugcgacaugcugcgccuuuuugauuucaacaagcaggccaucaugagacugaaaacacccgcgcagaugagcauccagcucauuaauaaggccgucaacgcucugaucaaugaccaacuuauuaugaagaaccaucugcgggacaucaugugcauuccuuauugcaauuacucuaaauauugguaccucaaccacaccgugacagggaagaccucccugccccgcuguuggcuggugagcaauggaucuuaccucaacgaaacgagauucagcgaugacaucgagcagcaggccgauaauaugaucacagagaugcugcaaaaagaauaucuugaccggcagggcaagaccccucuggggcucgucgaucuguuuguuuucuccaccucuuuuuaccugauuagcaucuuccuucaccucgugaaaauuccgacacaccgccauaucauuggaaagcccugcccuaaaccccacagacugaaccauaugggcaucuguuccugcggccuguauaagcacccuggggugcccgucaaguggaaacgguga

SEQ ID NO: 5494 - RNA, 1473 nt, Artificial Sequence
  derived and/or modified protein sequence (opt5) from LASV(LASV978-NIG-2009;Clade II)__AIT17744__GPCstabilized
augggccagaucauuaccuucuuucaagaggugccccacgucaucgaagagguuaugaacauugugcugaucgcccucagccugcuugcuauucugaaggggaucuacaauguggccacaugcggacucuucggccugauguccuuucuucugcucugugggagaucuugcagcacgaccuauaaaggagucuacgaacugcagacacuggagcucgacauggcgaaccugaauaugaccaugccucuuuccuguacaaagaacaauucucaucacuauaucauggugggcaacgaaaccgggcuggagcucacacugaccaauacgagcauuaucaaccauaaauucugcaaucuuuccgaugcucacaagaaaaaccuguacgaccaugcccucaugucuauuaucagcaccuuucaccuguccauuccgaauuucaaccaguaugaggccaugagcugugauuuuaauggaggcaagaucucuguucaguacaaccugucccacgcuuaugccguggacgcugccaaucauugcggcacaauugcgaacgggguccuccaaaccuucaugcggauggccuggggaggcagcuacaucgcucuggauucugggugcggauccugggacuguaucaugacaagcuaccaguaucuuauuauccagaacaccucuugggaagaucacugccaguuuucccgccccagcccuauuggcuaccuggggcuccugucccaaagaacgcgggacaucuauauuucucgcagacgccggggaacauucaccuggacacucagcgauuccgagggcaaugaaacccccggcggguacugucugacccgguggaugcugaucgaggccgagcucaaaugcuuuggaaacacagcuguggccaaguguaaugaaaaacaugacgaggaguucugcgauaugcugcgccuuuuugacuucaacaagcaggcgaucagacggcugaaaacgcccgcccagaugagcauucagcucaucaauaaggcuguuaacgcccugauuaaugaucaacuuaucaugaagaaccaucugcgcgacauuaugugcaucccuuauugcaauuacucuaaauauugguaccucaaccacaccgugacagggaagaccucccugcccagauguuggcuggucagcaauggaucuuaccucaacgaaacacacuucagcgacgauaucgagcagcaggcugacaauaugauuaccgagcugcuucaaaaagaauauaucgaucggcagggcaagacgccucuggggcucguggaccuguuuguguucuccacaucuuuuuaccugauuagcaucuuccuucaccucgucaaaauuccgacccaucgccacguuaucggaaagcccugcccuaaaccccauagacugaaccacaugggcauuuguuccugcggccuguauaagcacccuggggugcccgugaaguggaaacgguga

SEQ ID NO: 5495 - RNA, 1473 nt, Artificial Sequence
  derived and/or modified protein sequence (opt5) from LASV(LASV981-NIG-2009;Clade II)__AIT17752__GPCstabilized
augggccagaucauuaccuucuuucacgaggugccccaugucaucgaagagguuaugaacauugugcugaucgcccucagccugcuugcuauucugaaggggaucuacaauguggccacaugcggacucuucggccuggucuccuuucuucugcucugugggagaucuugcagcacgaccuauaaaggaguguacgaacugcaaacacuggagcucgacauggcgucccugaacaugaccaugccucuuucuuguacaaagaauaacagccaccauuauaucaugguuggcaaugaaaccgggcuggagcucacacugaccaacacguccauuaucaaucacaaauucugcaaccuuucugaugcucauaagaaaaaucuguacgaccacgcccucaugagcauuaucuccaccuuucaccugagcauuccgaacuucaaucaguaugaggccaugucuugugauuuuaacggaggcaagaucuccgugcaguacaaucugagccauacauaugcuauugacgccgcuaaccacugcggcaccaucgccaaugggguccuccagacauucaugcggauggcguggggaggcucuuacaucgcccuggauuccgggugcggaagcugggacuguauuaugaccucuuaccaauaucuuaucauucagaacacgacaugggaagaucauugccaguuuuccagacccagcccuaucggcuaccuggggcuccugucccagcggacccgcgacauuuauaucucuagacggcgccggggaacauucaccuggacccucagcgauuccgagggcaacgaaacacccggcggguacugucugacgcgcuggaugcugaucgaggcugagcucaagugcuuuggaaauaccgccguggcuaaauguaacgaaaagcacgacgaggaguucugcgauaugcugagacuuuuugacuucaauaaacaagccauucggcgccugaagacacccgcgcagaugagcauccagcucauuaacaaagccguuaaugcucugaucaacgaucagcuuauuaugaagaaucaccugagagacaucaugugcaucccuuauugcaacuacucuaaguauugguaccucaaucauaccgugacagggaaaaccucccugccccgguguuggcuggucagcaacggaucuuaccucaaugaaacgcacuucagcgacgauauugagcaacaggccgacaacaugaucacagagcugcuucagaaggaauauauugaucgccaaggcaaaaccccucuggggcucguggaccuguuuguguucuccaccucuuuuuaccugaucagcauuuuccuucaucucgucaagaucccgacacacagacauguuauuggaaaacccugcccuaagccccaccggcugaaucacaugggcaucuguuccugcggccuguauaaacauccuggggugcccgugaaguggaagcgcuga

SEQ ID NO: 5496 - RNA, 1473 nt, Artificial Sequence
  derived and/or modified protein sequence (opt5) from LASV(LASV982-NIG-2009;Clade II)__AIT17756__GPCstabilized
augggccagaucauuaccuucuuucaagaggugccccacgucaucgaagagguuaugaacauugugcugaucgcccucagccugcuugcuauucugaaggggaucuacaauguggccacaugcggacucuucggccuggucuccuuucuucugcucugugggagaucuugcagcaucacguauaaaggaguguacgaacugcagacccuggagcucgacauggcgucccugaacaugacaaugccucuuucuuguaccaagaauaacagccaucacuauauuaugguuggcaaugaaacagggcuggagcucacccugacaaacaccuccaucauuaaucauaaauucugcaaccuuucugaugcucacaagaaaaaucuguacgaccaugcccucaugagcaucauuuccacguuucaccugagcaucccgaacuucaaucaguaugaggccaugucuugugauuuuaacggaggcaagauuuccgugcaguacaaucugagccacaccuaugcugucgacgccgcuaaccauugcggcacaaucgccaauggggugcuccaaaccuucaugcggauggcguggggaggcucuuacaucgcccuggauuccgggugcggaagcugggacuguauuaugacaucuuaccaguaucuuaucauucagaacaccacgugggaagaucacugccaguuuuccagacccagcccuaucggcuaccuggggcuccugucccaacggacacgcgacauuuauaucucuagacggcgccggggaaccuucacauggacccucagcgauuccgagggcaacgaaacccccggcggguacugucugacacgcuggaugcugaucgaggcugagcucaagugcuuuggaaauacggccguugcuaaauguaacgaaaagcaugacgaggaguucugcgauaugcugagacuuuuugacuucaauaaacaggccauucggcgccugaaggcgcccgcccagaugagcauccagcucauuaacaaagcugugaaugcccugaucaacgaucaacuuauuaugaagaaucaccugagagacaucaugugcaucccuuauugcaacuacucuaaguauugguaccucaaucacaccgucacagggcggaccucccugccccgcuguuggcuggugagcaacggaucuuaccucaaugaaacacauuucagcgacgauauugagcagcaggcugacaacaugaucaccgagcugcuucaaaaagaauauauugauagacagggcaagacgccucuggggcucguggaccuguuugucuucuccacaucuuuuuaccugaucagcauuuuccuucaccucguuaaaaucccgacccaucggcacauuaucggaaagcccugcccuaaaccccaucgccugaaucacaugggcaucuguuccugcggccuguauaagcacccuggggugcccgugaaauggaagagauga

SEQ ID NO: 5497 - RNA, 1473 nt, Artificial Sequence
  derived and/or modified protein sequence (opt5) from LASV(LASV988-NIG-2009;Clade II)__AIT17758__GPCstabilized
augggccagaucauuaccuucuuucaagaggugccccacgucaucgaagagguuaugaacauugugcugaucgcccucagccugcuugcuauucugaaggggaucuacaauguggccacaugcggacucuucggccuggucuccuuucuucugcucugugggagaucuugcagcacgaccuauaaaggaguguacgaacugcagacacuggagcucaacauggcgucccugaauaugaccaugccucuuucuuguacaaagaacaauagccaucacuauaucaugguuggcaacgaaaccgggcuggagcucacacugaccaauacguccauuaucaaccauaaauucugcaaucuuucugacgcucacaagcggaaccuguacgaucaugcccucaugagcauuaucuccaccuuucaccugagcauuccgaauuucaaccaguaugaggccaugucuugugacuuuaauggaggcaaaaucuccgugcaguacaaccugagccacacauaugcugucgaugccgcuaagcauugcggcaccauugccaauggggugcuccaaacauucaugcgcauggcguggggaggcucuuacaucgcccuggacuccgggugcggaagcugggauuguaucaugaccucuuaccaguaucuuauuauccagaacacgacaugggaagaccacugcgaguuuuccagacccagcccuauuggcuaccuggggcuccugucccagcggacccgcgauaucuauauuucuagacggcgccggggaacauucaccuggacccucagcgacuccgaaggcaacgagacacccggcggguacugucugacgcgcuggaugcugaucgaggcugaacucaaaugcuuuggaaauaccgccguugcuaaguguaacgagaaacaugaugaagaguucugcgacaugcugagacuuuuugauuucaauaagcaagccauccggcgccugaaagcgcccgcccagaugagcauucagcucaucaacaaggcugugaaugcccugauuaacgaccagcuuaucaugaagaaucaccugagagauauuaugugcaucccuuauugcaacuacucuaaauauugguaccucaaucacacagucaccgggaagacaucccugccccgguguuggcuggugagcaacggaucuuaccucaaugagacccauuucagcgacgacaucgagcaacaggcugauaacaugauuacggaacugcuucagaaagaguauaucgaccgccaaggcaagacaccucuggggcucguggaucuguuugucuucuccaccucuuuuuaccugauuagcaucuuccuucaccucguuaaaauuccgacccauagacacgugaucggaaagcccugcccuaaaccccaucggcugaaucacaugggcauuuguuccugcggccuguauaagcacccuggggugcccgucaaguggaaacgcuga

SEQ ID NO: 5498 - RNA, 1473 nt, Artificial Sequence
  derived and/or modified protein sequence (opt5) from LASV(LASV989-NIG-2009;Clade II)__AIT17762__GPCstabilized
augggccagaucauuaccuucuuucaagaggugccccacgucaucgaagagguuaugaacauugugcugaucgcccucagccugcuugcuauucugaaggggaucuacaauguggccacaugcggacucuucggccuggucuccuuucuucugcucugugggagaucuugcagcacgaccuauaaaggaguguacgaacugcagacacuggagcucgacauggcgucccugaacaugaccaugccucuuucuuguacaaagaauaacagccaucacuauaucaugguuggcaaugaaaccgggcuggagcucacacugaccaacacguccauuaucucucauaaauucugcaaucuuagcgaugcucacaagaaaaaccuguacgaccaugcccucauguccauuaucagcaccuuucaccugucuauuccgaauuucaaccaguaugaggccauguccugugauuuuaauggaggcaagaucagcgugcaguacaaccugucucacacauaugcugucgacgccgcuaaucauugcggcaccauugccaacggggugcuccaaacauucaugcggauggcguggggaggcuccuacaucgcccuggauagcgggugcggaucuugggacuguaucaugaccuccuaccaguaucuuauuauccagaauacgacaugggaagaucacugccaguuuagccgccccuccccuauuggcuaccuggggcuccugucucaaagaacccgggacaucuauauuagccgcagacgccggggaacauucaccuggacccucuccgauagcgagggcaacgaagcucccggcggguacugucugacacgguggaugcugaucgaggccgagcucaaaugcuuuggaaacacggcuguugccaaguguaaugaaaaacaugacgaggaguucugcgauaugcugcgccuuuuugacuucaacaagcaggcgaucagacggcugaaaacccccgcccagaugucuauucagcucaucaauaaggcugugaacgcccugauuaaugaucaacuuaucaugaagaaccaucugcgcgacauuaugugcaucccuuauugcaauuacuccagauauugguaccucaaccacacagucaccgggaaaacaagccugccccgguguuggcuggugucuaauggaagcuaccucaacgaaacccacuucuccgacgauaucgagcagcaggcugacaauaugauuacggagcugcuucaaaaggaauauauggaucgccagggcaaaacaccucuggggcucguggaccuguuugucuucucuaccagcuuuuaccugaucuccauuuuccuucaccucguuaagaucccgacccauagacacgugauuggaaaacccugcccuaagccccaucggcugaaccacaugggcaucuguagcugcggccuguauaaacacccuggggugcccgucaaguggaagcgcuga

SEQ ID NO: 5499 - RNA, 1473 nt, Artificial Sequence
  derived and/or modified protein sequence (opt5) from LASV(LASV991-NIG-2009;Clade II)__AIT17770__GPCstabilized
augggccagaucgugaccuucuuucaagaggucccccacguuauugaagaggugaugaacaucgugcugauugcccucagccugcuugcuauccugaaggggauuuacaaugucgccacaugcggacucuucggccugguguccuuucuucugcucugugggagaucuugcagcacgaccuauaaaggaguuuacgaacugcaggcgcuggagcucgacauguccucucugaacaugacaaugccucuuagcuguaccaagaauaacucccaucacuauaucauggugggcaaugaaacagggcuggagcucacccugacaaacaccucuaucauucaucacaaauucugcaaucuuagcgaugcucauaagaaagaccuguacgaucacgcccucauguccaucauuagcacguuucaccugucuaucccgaacuucaaucaguaugaggccauguccugugacuuuaacggaggcaagauuagcguccaguacaaucugucucauaccuaugcuguggaugccgcuaaccacugcggcacaaucgccaaugggguucuccaaaccuucaugcggauggcguggggaggcuccuacauugcccuggacagcgggugcggaggcugggauuguaucaugacaucuuaccaguuucuuaucauucagaacaccacgugggaagaccauugccaguucucccgccccagcccuaucggguaucugggacuccugucccaaagaacacgggauauuuacaucucucgcagacgccggggcaccuuuacauggacccucagcgacuccgagggcaaugaaacccccgggggauauugucugacacgguggaugcugauugaggcugagcucaaaugcuucggcaacacggccguggcuaaguguaacgaaaaacacgaugaggaauuuugcgacaugcugcgccuuuucgauuucaauaagcaggccaucaaaagacugaagacccccgcgcagaugagcauccaccucauuaacaaggccgucaaugcucugaucaacgaccagcuuauuaugaaaaaucaucugcgggacaucaugugcauuccuuacugcaacuauucuaaguacugguaucucaaucacacagugaccggaaaaacaucccugccccgcuguuggcuggugagcaacggcucuuaccucaaugaaacccauuuuagcgaugacaucgagcaacaggccgauaacaugaucacggagcugcuucagaaggaauacauugacagacaagggaaaacaccucugggacucgucgaucuguucguguuuuccaccucuuucuaucugaucagcauuuuucuucaccucguuaagaucccgacccaucggcacgugauuggcaaacccugcccuaagccccaccgccugaaucauaugggcaucuguuccugcgggcuguacaagcacccuggaguccccgugagauggaaacgguga

SEQ ID NO: 5500 - RNA, 1473 nt, Artificial Sequence
  derived and/or modified protein sequence (opt5) from LASV(LASV993-NIG-2009;Clade II)__AIT17778__GPCstabilized
augggccagaucauuaccuucuuucaagaggugccccacgucaucgaagagguuaugaacauugugcugaucgcccucagccugcuugcuauucugaaggggaucuacaauguggccacaugcggacucuucggccuggucuccuuucuucugcucugugggagaucuugcagcacgaccuauaaaggaguguacgaacugcagacacuggagcucgacauggcgaaccugaauaugaccaugccucuuuccuguacaaagaacaauucucaucacuauaucaugguuggcaacgaaaccgggcuggagcucacacugaccaauacgagcauuaucaaccauaaauucugcaaucuuuccgaugcucacaagaaaaaccuguacgaccaugcccucaugucuauuaucagcaccuuucaccuguccauuccgaauuucaaccaguaugaggccaugagcugugauuuuaauggaggcaagaucucugugcaguacaaccugucccacacauaugcucgggacgccgcuaaucauugcggcaccauugccaacgggguccuccaaacauucaugcgcauggcguggggaggcagcuacaucgcccuggauucugggugcggauccugggacuguaucaugaccagcuaccaguaucuuauuauccagaacacgacaugggaagaucacugccaguuuucuagacccuccccuauuggcuaccuggggcuccugagccaacggacccgcgacaucuauauuuccagacggcgccggggaacauucaccuggacccucucugauagcgagggcaaugaaacacccggcggguacugucugacgcgcuggaugcugaucgaggcugagcucaaaugcuuuggaaacaccgccguggcuaaguguaaugaaaaacaugacgaggaguucugcgauaugcugagacuuuuugacuucaacaagcaggccauccggcgccugaaaacacccgcgcagaugaauauucagcucaucaacaaggccguuaaugcucugauuaacgaucaacuuaucaugaagaaucaccugagagacauuaugugcaucccuuauugcaacuacuccaaauauugguaccucaaucacaccgugacagggaagaccagccugccccgguguuggcuggucucuaacggauccuaccucaaugaaacgcauuucagcgacgauaucgagcagcaggccgacaacaugauuacagagcugcuucaaaaagaauauauggaucgccagggcaagaccccucuggggcucguggaccuguuuguguucucuaccagcuuuuaccugaucuccauuuuccuucaccucgucaaaaucccgacacauagacacguuauuggaaagcccugcccuaaaccccaucggcugaaucacaugggcaucuguucuugcggccuguauaagcacccuggggugcccgugaaguggaaacgcuga

SEQ ID NO: 5501 - RNA, 1473 nt, Artificial Sequence
  derived and/or modified protein sequence (opt5) from LASV(Nig08-04;Clade II)__ADU56610__GPCstabilized
augggccagaucgugaccuucuuucaagaggucccccacguuauugaagaggugaugaacaucgugcugauugcccucagccugcuugcuauccugaaggggauuuacaaugucgccacaugcggacucuucggccugaucuccuuucuucugcucugugggagaucuugcagcacgaccuauaaaggaguguacgaacugcagacacuggagcucgacauggcgaaccugaauaugaccaugccucuuuccuguacaaagaacucuagccaucacuauaucaugguuggcaaugaaaccgggcuggagcucacacugaccaacacguccauuaucaaucauaaauucugcaaccuuucugaugcucacaagaaaaaucuguacgaccaugcccucaugagcauuaucuccaccuuucaccugagcauuccgaacuucaaucaguaugaggccaugucuugugauuuuaacggaggcaagaucuccgugcaguacaaucugagccacgcuuaugccgucgacgcugccaaccauugcggcacaauugcgaauggggugcuccaaaccuucaugcggauggccuggggaggcucuuacaucgcucuggauuccgggugcggaaacugggacuguaucaugacaagcuaccaguaucuuauuauccagaacaccacgugggaagaucacugccaguuuucucgccccuccccuauuggcuaccuggggcuccugagccaaagaacacgggacaucuauauuucccgcagacgccggggaaccuucacauggacccucucugauagcgagggcaaugaagcccccggcggguacugucugacccgguggaugcugaucgaggcugagcucaaaugcuuuggaaacacagccaucgcgaaguguaaugaaaaacaugacgaggaguucugcgauaugcugcgccuuuuugacuucaacaagcaggccauuaaaagacugaaggcucccgcccagauguccauccagcucauuaauaaggcuguuaacgcccugaucaaugaucaacuuauuaugaaaaaccaucugcgggacaucaugugcaucccuuauugcaauuacagcaaguauugguaccucaaccacacggugaccgggaaaacaucucugccccgcuguuggcugauuuccaauggaagcuaccucaacgaaacccacuucucugacgauaucgagcagcaggccgacaauaugauuacagagcugcuucaaaaggaauauauggauagacagggcaaaaccccucuggggcucgucgaccuguuuguguucagcacguccuuuuaccugaucucuauuuuccuucaccucgugaagaucccgacacaucggcacauugucggacgccccugcccuaaaccccauagacugaaccacaugggcaucuguagcugcggccuguauaagcacccugggguucccgugaaguggaaacgguga

SEQ ID NO: 5502 - RNA, 1473 nt, Artificial Sequence
  derived and/or modified protein sequence (opt5) from LASV(Nig08-A41;Clade II)__ADU56626__GPCstabilized
augggccagaucauuaccuucuuucaagaggugccccacgucaucgaagagguuaugaacauugugcugaucgcccucagccugcuugcuauucugaaggggaucuacaauguggccacaugcggacucuucggccuggucuccuuucuucugcucugugggagaucuugcagcacgaccuauaaaggaguguacgaacugcagacacuggagcucaacauggcgucccugaauaugaccaugccucuuucuuguacaaagaacaauagccaucacuauaucaugguuggcaacgaaaccgggcuggagcucacacugaccaauacguccauuaucaaccauaaauucugcaaucuuucugacgcucacaagcggaaccuguacgaucaugcccucaugagcauuaucuccaccuuucaccugagcauuccgaauuucaaccaguaugaggccaugucuugugacuuuaauggaggcaaaaucuccgugcaguacaaccugagccacacauaugcugucgaugccgcuaagcauugcggcaccauugccaauggggugcuccaaacauucaugcgcauggcguggggaggcucuuacaucgcccuggacuccgggugcggaagcugggauuguaucaugaccucuuaccaguaucuuauuauccagaacacgacaugggaagaccacugccaguuuuccagacccagcccuauuggcuaccuggggcuccugucccaacggacccgcgauaucuauauuucuagacggcgccggggaacauucaccuggacccucagcgacuccgagggcaacgaaacacccggcggguacugucugacgcgcuggaugcugaucgaggcugagcucaaaugcuuuggaaauaccgccguugcuaaguguaacgaaaaacaugaugaggaguucugcgacaugcugagacuuuuugauuucaauaagcaggccauccggcgccugaaagcgcccgcccagaugagcauucagcucaucaacaaggcugugaaugcccugauuaacgaccaacuuaucaugaagaaucaccugagagauauuaugugcaucccuuauugcaacuacucuaaauauugguaccucaaucacacagucaccgggaagacaucccugccccgguguuggcuggugagcaacggaucuuaccucaaugaaacccauuucagcgacgacaucgagcagcaggcugauaacaugauuacggagcugcuucaaaaagaauauaucgaccgccagggcaagacaccucuggggcucguggaucuguuugucuucuccaccucuuuuuaccugauuagcaucuuccuucaccucguuaaaauuccgacccauagacacgugaucggaaagcccugcccuaaaccccaucggcugaaucacaugggcauuuguuccugcggccuguauaagcacccuggggugcccgucaaguggaaacgcuga

SEQ ID NO: 5503 - RNA, 1473 nt, Artificial Sequence
  derived and/or modified protein sequence (opt5) from LASV(Nig08-A47;Clade II)__ADU56630__GPCstabilized
augggccagaucauuaccuucuuucaagaggugccccacgucaucgaagagguuaugaacauugugcugaucgcccucagccugcuugcuauucugaaggggaucuacaauguggccacaugcggacucuucggccuggucuccuuucuucugcucugugggagaucuugcagcacgaccuauaaaggaguguacgaacugcagacacuggagcucgacauggcgucccugaacaugaccaugccucuuucuuguacaaagaauaacagccaucacuauaucaugguuggcaaugaaaccgggcuggagcucacacugaccaacacguccauuaucaaucauaaauucugcaaccuuucugaugcucacaagaaaaaucuguacgaccaugcccucaugagcauuaucuccaccuuucaccugagcauuccgaacuucaaucaguaugaggccaugucuugugauuuuaacggaggcaagaucuccgugcaguacaaucugagccacgcuuaugccgucgacgcugccaaccauugcggcacaauugcgaauggggugcuccaaaccuucaugcggauggccuggggaggcucuuacaucgcucuggauuccgggugcggaagcugggacuguaucaugacaucuuaccaguaucuuauuauccagaacaccacgugggaagaucacugccaguuuucccgccccagcccuauuggcuaccuggggcuccugucccaaagaacacgggacaucuauauuucucgcagacgccggggaaccuucacauggacccucagcgauuccgagggcaacgaaacccccggcggguacugucugacacgguggaugcugaucgaggccgagcucaaaugcuuuggaaauacggcuguugccaaguguaacgaaaaacaugacgaggaguucugcgauaugcugcgccuuuuugacuucaauaagcaggcgaucagacggcugaaaacccccgcccagaugagcauucagcucaucaacaaggcugugaaugcccugauuaacgaucaacuuaucaugaagaaucaucugcgcgacauuaugugcaucccuuauugcaacuacucuaaauauugguaccucaaucacacagucaccgggaagacaucccugcccagauguuggcuggugagcaacggaucuuaccucaaugaaacccacuucagcgacgauaucgagcagcaggcugacaacaugauuacggagcugcuucaaaaagaauauauggaucggcagggcaagacaccucuggggcucguggaccuguuugucuucuccaccucuuuuuaccugaucagcauuuuccuucaccucguucgcaucccgacccauagacacgugauuggaaaacccugcccuaagccccaucggcugaaucacaugggcaucuguuccugcggccuguauaaacacccuggggugcccgucaaguggaagcgcuga

SEQ ID NO: 5504 - RNA, 1473 nt, Artificial Sequence
  derived and/or modified protein sequence (opt5) from LASV(CSF;Clade III)__AAL13212__GPCstabilized
augggccagaucgugaccuucuuucaagaggucccccacguuauugaagagaucaugaacauugugcugaucacacucagccugcuugccauucugaaggggguguacaaucucgcuacgugcggacugaucggccuuaucaccuuccuguuucucugugggagauccugcucuaugacauauaaaggaagcuaccagcuggaaacccuggagcucaacauggaaacacugaauaugaccaugccucuuuccuguacaaagaacaccucucaucacuauauucgggucggcaaugagacggggcuggagcucacccugacaaacaccagcaucauuaaucauaaauucugcaaccuuuccgacgcccacaagaaaaaucuguacgaucauucucucaugagcaucauuuccacauuucaccugagcaucccgaacuucaaucaguaugaagcgaugucuugugacuuuaacggaggcaagauuuccauccaguacaaucugagccacaccuaugcuggcgaugccgccaagcauugcgggacgcucgcuaacggaauccugcaaacauucaugcgcauggccuggggcgggucuuacauugcucuugacuccggaugcggcaauugggauuguaucaugaccagcuaccaguaucugauuauccagaacacaaccugggaggaccacugccaguuuucucggcccuccccuauuggguaccucggacugcuuagccaacgcaccagagaaaucuauaucucccggcgccgccggggcacauucacguggacccugucugauagcgagggcaacgagaaucccgggggauacugucugacaagauggaugcucauugaagccgagcugaaaugcuuuggcaacaccgcgguggccaaguguaaugaaaaacaugacgaggaguucugcgauaugcuucggcuguuugacuucaacaagcaggcuauccagcgccucaaagcccccgcucagauguccauucaacugaucaauaaggccguuaacgcgcuuauuaaugaucagcugaucaugaagaaccaccucagagacaucaugugcauuccuuauugcaauuacagcaaauauugguaccugaaccacacaaccacgggacggacaucucugccccgcuguuggcucguguccaauggcagcuaccugaacgagaccagauucucugaugacaucgaacagcaagccgacaauaugauuaccgagaugcuucagaaggaauauaucgaucggcaggggaaaacaccucugggacucgucgaccuguuuguguucagcaccuccuuuuaccugauuucuaucuuccuucaucucauuaagaucccgacacaccgccauaucguuggcggccccugcccuaaaccccacagacugaaccauaaggggauuuguagcugcggacuguauaaacggccuggcguguccgucagauggaagcgcuga

SEQ ID NO: 5505 - RNA, 1473 nt, Artificial Sequence
  derived and/or modified protein sequence (opt5) from LASV(ISTH2121-NIG-2012;Clade III)__AIT17540__GPCstabilized
augggccagaucgugaccuucuuucaagaggucccccacguuauugaagagaucaugaacauugugcugaucacacucagccugcuugccauucugaaggggaucuacaauuucgcuacgugcggacucaucggccugauuaccuuucuuuuccugugugggagauccugcucuacaaucuauaaaggaagcuaccagcuccagacccuggaacugaacauggagacacucaauaugaccaugccucuguccuguacaaagaacaauucucaucacuauauucgggugggcaacgaaaccgggcuugagcugacgcucaccaauacaagcaucauuaaccauaaauuuugcaaucuguccgaggcccacaagaaaaaccuuuacgaccaugcgcugaugucuaucauuagcaccuuccaccucuccaucccgaauuuuaaccaguaugaagcuaugagcugugauuucaauggaggcaagaucucuguccaauacaaccugucccacagcuaugccguggacgccgcuaaucauugcggcacaguugccaacggggugcugcagaccuuuaugcgcauggcuuggggaggcucuuacauugcccucgauuccgggugcggaaacugggacuguaucaugacgagcuaccaguaucugauuauccagaauacaaccugggaggaucacugccaauucucucggcccuccccuauuggcuaccuugggcugcucagccagcgcacaagagacaucuauaucucccggcgccgccggggaaccuuuaccuggacacugucugauagcgaaggcaaggagacgcccggcggguacugucucaccagauggaugcugauugaggcggaacugaaaugcuucggaaacacagccgucgcuaaguguaaugagaaacaugacgaagaguuuugcgauaugcuccggcuguucgacuucaacaagcaggccauccagcgccuuaaaacccccgcucaaauguccauucagcugaucaauaaggccgugaacgcgcucauuaaugaucagcugaucaugaagaaccaccuuagagacaucaugugcauuccuuauugcaauuacagcaaauauugguaccugaaccacacaucuaccgggcggacgucccuccccaaguguuggcugguuagcaauggaucuuaccugaacgagacacauuuuagcgaugacaucgagcaacaggccgacaauaugauuaccgaaaugcuccagaaagaguauaucgaucgccagggcaagaccccucuggggcuuguggaccuguucgucuuuuccacaucuuucuaccucauuagcaucuuucugcaccuggugaaaauuccgacccauagacacaucgugggaaaguccugccccaaaccucaucggcuuaaccacaugggcaucuguagcugcggccucuauaagcaacccggggucccuguuaaguggaaacgcuga

SEQ ID NO: 5506 - RNA, 1473 nt, Artificial Sequence
  derived and/or modified protein sequence (opt5) from LASV(Nig08-A19;Clade III)__ADU56618__GPCstabilized
augggccagaucgugaccuucuuucaagaggucccccacguuauugaagaggugaugaacaucgugcugauugcccucagcauccuggcuauucuuaaggggcuguacaauaucgccacaugcggacucaucggccuggucacguuccuucugcucuccgggagaucuuguagcaugaccuauaaaggaguguacgaacugcagacacuggagcucaacaugaauacccugaacaugacaaugccucuuuccugcaccaagaauaacucucaucacuauauuaugguuggcaaugaaacagggcuggagcucacccugacgaacaccagccuucugcaucacaaauuuuguaaucucuccgacgcgcauaagaaaaaccuguacgaucacacacugaugucuaucauuagcaccuuccaccucuccaucccgaauuuuaaccaguaugaggcuaugagcugcgacuucaauggaggcaagauuacagugcaguacaaccugucucauuccuaugccaucgaugccgcuaaucacuguggcaccgucgccaacggggugcuucaaacguuuaugcggauggcuuggggaggcagcuacauugcccuggacucugggugcggaaagugggauugcaucaugacauccuaccaguaucucaucauucagaacaccacaugggaagaccauugucaguucagcagacccucuccuaucggcuaccuggggcuucugucccaacggacccgcgauauuuauaucagcagacggcgccggggaaccuuuacauggacgcuguccgacucugagggcaaugaaacccccggcggguacugccucacacgcuggaugcugauugaggcggagcuuaaauguuucggaaacaccgccguugcuaagugcaaugaaaaacacgaugaggaauuuugugacaugcugagacucuucgauuuuaacaagcaggccauccggcgccugaaagcucccgcccagaugagcauccagcuuauuaauaaggcggugaacgcccugaucaaugaccaacucauuaugaagaaccaccugagagauaucaugugcauuccuuauugcaauuacuccaaauauugguaccugaaccauacaagcaccgggcggacgucucucccccgcugcuggcuggucuccaauggaagcuaccuuaacgaaacacacuucucugacgacaucgagcagcaggcugauaauaugaucaccgagaugcugcaaaaggaauaucucgacagacagggcaaaaccccucuggggcugguggaucuuuucguguuuagcacauccuucuaccucauuucuaucuuucugcaucuggucaagauuccgacccaccggcauaucguuggaaaacccuguccuaagccccaccgccucaaccacaugggcauuugcagcuguggccuguauaaacagccuggggugcccgugagauggaagcgguga

SEQ ID NO: 5507 - RNA, 1473 nt, Artificial Sequence
  derived and/or modified protein sequence (opt5) from LASV(ONM-299;Clade III)__ANH09734__GPCstabilized
augggccagaucgugaccuucuuucaagaggucccccacguuauugaagagaucaugaacauugugcugaucacacucagccugcuugccauucugaaggggcucuacaauuucgcuacgugcggacugaucggccuuaucaccuuucuguuccucugugggagauccugcucuaugauuuauaaaggaagcuaccagcuggaaacacuggagcucaacauggaaacccugaauaugacaaugccucuuuccuguaccaagaacaauucucaucacuauauccgggugggcaacgagacagggcuggagcucacccugacgaauaccagcauuaucggacauaaauuuugcaaccuuuccgacgcccacaagaaaaaucuguacgaucauucucucaugagcauuaucuccacauuccaccugagcauuccgaacuuuaaucaguaugaagcgaugucuugugacuucaacggcggcaagaucuccauccaguacaaucugagccacaccuaugcuggggaugccgccaagcauugcggaacagucgcuaacggcgugcuccaaaccuuuaugcgcauggccuggggaggaucuuacauugcucuggacuccggcugcgggaauugggauuguaucaugacgagcuaccaguaucuuauuauccagaacacaaccugggaggaccacugccaguucucucggcccuccccuauuggauaccugggccuccugagccaacgcacaagagauaucuauaucucccggcgccgccggggcaccuuuaccuggacacucucugacagcgaagggaaagagacgcccggaggcuacugucugaccagauggaugcugauugaggccgaacucaagugcuucgggaacacagcgguugccaaauguaaugagaagcaugaugaagaguuuugcgacaugcugcggcuuuucgauuucaacaaacaggcuauccagcgccugaagacccccgcccagauguccauucaacucaucaauaaggcugugaacgcccugauuaaugaccagcuuaucaugaaaaaccaccugagagauaucaugugcauuccuuauugcaauuacagcaaguauugguaccucaaccacacaucuaccggccggacgucccugcccaaauguuggcuggucagcaaugggucuuaccucaacgagacacauuuuagcgacgacaucgagcagcaagcggauaauaugauuaccgaaaugcugcagaaggaguauaucgaccgccagggaaaaaccccucuuggccugguggauguuuucguguuuuccacaucuuucuaccucauuagcaucuuucugcaccuggucaagauuccgacccauagacacaucgugggcaaauccugccccaagccucaucggcuuaaccacauggggaucuguagcugcggacucuauaagcagcccggcgugccuguccgcuggaaaagauga

SEQ ID NO: 5508 - RNA, 1473 nt, Artificial Sequence
  derived and/or modified protein sequence (opt5) from LASV(ONM-700;Clade III)__ANH09738__GPCstabilized
augggccagaucgugaccuucuuucaagaggucccccacguuauugaagagaucaugaacauugugcugaucacacucagccugcuugccauucugaaggggcucuacaauuucgcuacgugcggacugaucggccuuaucaccuuucuguuccucugugggagauccugcucuaugauuuauaaaggaagcuaccagcuggaaacacuggagcucaacauggaaacccugaauaugacaaugccucuuuccuguaccaagaacaauucucaucacuauauccgggugggcaacgagacagggcuggagcucacccugacgaauaccagcauuaucaaccauaaauuuugcaaucuuuccgacgcccacaagcgcaaccuguacgaucauucucucaugagcauuaucuccacauuccaccugagcauuccgaauuuuaaccaguaugaagcgaugucuugugacuucaauggaggcaaaaucuccauccaguacaaccugagccacaccuaugcuggcgaugccgccaagcauugcgggacagucgcuaauggagugcuccaaaccuuuaugagaauggccuggggcgggucuuacauugcucuggacuccggaugcggcaacugggauuguaucaugacgagcuaccaguaucuuauuauccagaacacaaccugggaggaccacugccaguucucucgccccuccccuauuggguaccugggacuccugagccaaagaacacgggauaucuauaucucccgcagacgccggggcaccuuuaccuggacacucucugacagcgaaggcaaggagacgcccgggggauacugucugacccgguggaugcugauugaggccgaacucaaaugcuucggcaauacagcgguugccaaguguaacgagaaacaugaugaagaguuuugcgacaugcugcgccuuuucgauuucaauaagcaggcuauccagagacugaaaacccccgcccagauguccauucaacucaucaacaaggcugugaaugcccugauuaacgaccagcuuaucaugaagaaucaucugcgggauaucaugugcauuccuuauugcaacuacagcaaauauugguaccucaaucacacaucuaccggacgcacgucccugcccaaguguuggcuggucagcaacggcucuuaccucaaugagacacacuuuagcgacgacaucgagcagcaagcggauaacaugauuaccgaaaugcugcagaaagaguauaucgacagacaggggaagaccccucuuggacugguggauguuuucauguuuuccacaucuuucuaccucauuagcaucuuucugcaccuggugaaaauuccgacccaucggcacaucgucggcaaguccugccccaaaccucaucgccuuaaucacaugggcaucuguagcugcgggcucuauaagcagcccggagugccugugagauggaagcgguga

SEQ ID NO: 5509 - RNA, 1473 nt, Artificial Sequence
  derived and/or modified protein sequence (opt5) from LASV(Weller;Clade III)__AAT49010__GPCstabilized
augggccagaucgugaccuucuuucaagaggucccccacguuauugaagaggugaugaacaucgugcugauugcccucagcguccuggcuauccuuaaggggcuguacaauuucgccacaugcggacucauuggccuggugacguuucuucugcucuccgggagaucuuguagcaugaucuauaaaggaguuuacgaacugcagacccuggagcucaacauggaaacacugaauaugaccaugccucuuuccugcacaaagaacaccucucaucacuauauccgggugggcaaugacacagggcuggagcucacccugacgaacgagacccuucugcaucacaaauucuguaaucucagcgaugcgcauaagcgcaaccuguacgaccacgcucugauguccauuaucucuacauuucaccucagcauuccgaauuucaaccaguaugaagccauguccugcgauuuuaauggaggcaaaaucaccguccaguacaaccugagccauucuuaugccguggacgcugccaagcacuguggcacaguugcuaauggggugcuucaaaccuucaugagaauggccuggggaggcuccuacauugcgcuggauagccggugcgggaacugggacugcaucaugacgucuuaccaguaucucauuauccagaauacaaccugggaggaucacugucaguuuucccgccccagcccuaucggauaccugggccuucugucucaaagaacacgggacauuuauaucucccgcagacgccgggggaccuucaccuggacacugagcgauuccgaaggaaacgagacgcccggcggcuacugccucacccgguggaugcugauugaggccgaacuuaaguguuuugggaacacagcugucgccaaaugcaaugagaagcacgacgaagaguucugugauaugcugcgccucuuugacuucaacaaacaggcuaucagacggcugaagacccccgcccagaugucuauucagcuuaucaauaaagcggugaacgcccugaucaaugaucaacucauuaugaagaaccaucugcgcgacaucaugugcauuccuuauugcaauuacagcaaguauugguaccugaaccacacauccaccggaaaaacgagccuccccagaugcuggcuggugucuaauggguccuaccuuaacgagacacauuucagcgacgauaucgagcagcaggcugacaauaugauuaccgaaaugcugcaaaaggaguaucucgaucggcagggaaaaaccccucugggccuggucgaccuuuuuguuuucucuaccagcuuuuaccucaucuccaucuuccugcaccugauuaagaucccgacacaucgccacauuguggggaaacccuguccuaagccccacagacucaaccauaugggaaucugcucuuguggccuguauaaacagccuggcgugcccguccgguggaagagauga

SEQ ID NO: 5510 - RNA, 1476 nt, Artificial Sequence
  derived and/or modified protein sequence (opt5) from LASV(BA366;Clade IV)__ADI39451__GPCstabilized
augggccagaucgugaccuucuuucaagaggucccccacguuauugaagaggugaugaacaucgugcugauugcccucagcguccuggcugugcuuaaggggcuguacaauguugccacaugcggacucaucggccugauugcguuccuucugcucugugggagauccugcacgaccacacuguauaaaggaguguacgaacugcaggcucucgagcugaacauggaaacccuuaauaugacaaugccucugucuuguaccaagaacaauagccaucacuauaucauggucggcaacgagacagggcucgagcugacccuuacgaauaccuccaucauuaaccauaaauuuugcaaucugucugacgcccacaagaaaaaccucuacgaucaugcccugaugagcaucauuuccacauuccaccugucuaucccgaauuuuaaccaguaugaagcuaugagcugugacuucaauggaggcaagauuuccgugcaguacaaccucagccacaccuaugccguugaugcugccaaucauugcggcacaguggcgaacgggguccugcaaaccuuuaugcggauggccuggggaggcucuuacaucgcucuugacuccgggugcggaagcugggauuguauuaugacgucuuaccaguaucugaucauccagaacacaaccugggaggaccacugccaguucuccagacccagcccuauuggcuaccucgggcugcuuucucaacggacacgcgauaucuauauuuccagacggcgccggggaaccuuuaccuggacacugagcgacuccgaaggcaaggauacgcccggcggguacugucugacccgcuggaugcucaucgaggccgagcugaaaugcuucggaaauacagcuguggccaaguguaacgaaaaacaugacgaggaauuuugcgauaugcuuagacuguucgacuuuaauaagcaggcgauucagcggcucaaagcccccgcucagaugucuauccaacugaucaacaaggccgugaaugcucuuauuaacgaucagcugaucaugaagaaucaccuccgcgacauuaugugcaucccuuauugcaacuacagcaaauauugguaccugaaucacaccauuacagggagaaccucccugcccaaguguuggcucgucagcaacggaucuuaccugaaugaaacgcauuucuccgacgauaucgagcagcaagccgacaacaugaucacagagaugcuucagaaagaauauauugagcggcagggcaagaccccucuggggcucguugaucuguucguguuuagcaccucuuucuaccugaucagcauuuuucuucaccucaucaaaauuccgacacaucgccacaucgugaauaagcccugcccuaaaccccauagacugaaccacaugggagucuguuccugcggccuguauaagcagccuggcgugcccguucgguggaagcgcuga

SEQ ID NO: 5511 - RNA, 1476 nt, Artificial Sequence
  derived and/or modified protein sequence (opt5) from LASV(G1180-SLE-2010;Clade IV)__AIT17168__GPCstabilized
augggccagaucgugaccuucuuucaagaggucccccacguuauugaagaggugaugaacaucgugcugauugcccucagcauccuggcuguccuuaaggggcuguacaauuucgccacaugcggacucgugggccugcuuacguuucugcuccugugugggagauccugcaccgcgucucgguauaaaggaguuuacgaacugcagacacucgagcugaacauggaaacccuuaauaugacaaugccucugagcuguaccaagaacaauucccaucacuauauuauggugggcaacgagacagggcucgagcugacccuuacgaauaccucuaucaucaaccauaaauucugcaaucugagcgacgcucacaagaaaaaccucuacgaucaugcccugauguccauuaucucuacauuucaccugagcauuccgaauuucaaccaguaugaagccauguccugugacuuuaauggaggcaagaucagcguccaguacaaccucucucacuccuaugcuggcgaugccgcuaaucauugcgggaccguggccaacggaguucugcaaacauucaugcgcauggcguggggcgggagcuacauugcccuugacucuggaugcggcuccugggauuguaucaugaccagcuaccaguaucugauuauccagaacacgacaugggaggaccauugccaguuuucuagacccuccccuaucggguaccucggacugcuuagccaacggacccgcgauauuuauaucuccagacggcgccggggcacauucaccuggacccugucugacagcgaaggcaaggauacacccgggggauacugucugacgcgcuggaugcucauugaggcugagcugaaaugcuuuggcaauaccgccguggcuaaguguaacgaaaaacacgacgaggaguucugcgauaugcuuagacuguuugacuucaauaagcaggccauccagcggcucaaagcgcccgcccagauguccauucaacugaucaacaaggcugucaaugcccuuaucaacgaucagcugauuaugaagaaucaccuccgcgacaucaugugcauuccuuauugcaacuacagcaaauauugguaccugaaucauacaaccacaggaaagaccucucugcccaaauguuggcucguguccaacggcagcuaccugaaugaaacgcacuucucugacgauaucgagcagcaagcugacaacaugauuacagagaugcuucagaaggaauauauggagagacaggggaaaaccccucugggacucguggaucuguuugucuucagcaccuccuuuuaccugaucucuaucuuccuucaucucguuaagauuccgacacaccggcauaucgugggcaaaagcugccccaagccucaccgccugaaucacaugggcauuuguuccugcgggcuguauaagcagcccggagugccugucaaauggaagagauga

SEQ ID NO: 5512 - RNA, 1476 nt, Artificial Sequence
  derived and/or modified protein sequence (opt5) from LASV(G1190-SLE-2010;Clade IV)__AIT17172__GPCstabilized
augggccagaucgugaccuucuuucaagaggucccccacguuauugaagaggugaugaacaucgugcugauugcccucagcauccuggcuguccuuaaggggcuguacaauuucgccacaugcggacucgugggccugguuacguuucuucugcucugugggagauccugcaccacaucucuguauaaaggaguguacgaacugcagacccucgagcugaacauggaaacacuuaauaugaccaugccucugagcuguacaaagaacaauucccaucacuauauuauggucggcaacgagaccgggcucgagcugacgcuuaccaauacaucuaucaucaaccauaaauucugcaaucugagcgacgcgcacaagaaaaaccucuacgaucaugcucugauguccauuaucucuaccuuucaccugagcauuccgaauuucaaccaguaugaagccauguccugugacuuuaauggaggcaagaucagcgugcaguacaaccucucucacuccuaugccggcgaugcugccaaucauugcgggacaguugcuaacggagugcugcaaaccuucaugcggauggccuggggcgggagcuacauugcgcuugacucuggaugcggcagaugggauuguaucaugacguccuaccaguaucugauuauccagaacacaaccugggaggaccacugccaguuuagccggcccucuccuaucggguaccucggacugcuuucccaacgcacaagagauauuuauaucagccggcgccgccggggcaccuucaccuggacacuguccgacucugaaggcaaggauacgcccgggggauacugucugaccagauggaugcucauugaggccgagcugaaaugcuuuggcaauacagcugucgccaaguguaacgaaaaacaugacgaggaguucugcgauaugcuucggcuguuugacuucaauaagcaggcuauccagcgccucaaagcccccgcgcagaugagcauucaacugaucaacaaggccgugaaugcucuuaucaacgaucagcugauuaugaagaaucaccucagagacaucaugugcauuccuuauugcaacuacuccaaauauugguaccugaaucacaccacaaccggaaagacgagccugcccaaauguuggcucgugucuaacggcuccuaccugaaugaaacacauuucagcgacgauaucgagcagcaagccgacaacaugauuaccgagaugcuucagaaggaauauauggagcggcaggggaaaaccccucugggacucgucgaucuguuuguuuucucuaccagcuuuuaccugaucuccaucuuccuucaccucgugaagauuccgacacaucgccacaucgugggcaaacccugcccuagaccccaucggcugaaucacaugggcauuuguucuugcgggcuguauaagcagccuggaguccccgugaaguggaaacgcuga

SEQ ID NO: 5513 - RNA, 1476 nt, Artificial Sequence
  derived and/or modified protein sequence (opt5) from LASV(G1200-LIB-2010;Clade IV)__AIT17176__GPCstabilized
augggccagaucgugaccuucuuucaagaggucccccacguuauugaagaggugaugaacaucgugcugauugcccucagccugcuugcuguccugaaggggcucuacaauguggccacaugcggacugaucggccuuauuacguuccugcuccugugugggagauccugcaccacaaaccuguauaaaggaguuuacgaacuccaggcgcuggagcuuaauauggaaacccugaacaugacaaugccucucucuuguaccaagaauaacagccaucacuauaucauggugggcaaugagacagggcuggagcuuacccugacgaacaccuccaucauuaaucauaaauuuugcaaccucucugacgcucacaagaaaaaucuguacgaucaugcccugaugagcaucauuuccacauuccaccucucuaucccgaacuuuaaucaguaugaagccaugagcugugacuucaacggaggccggauuuccguccaguacaaucugagccacucuuaugcuggcgaugccgcuucccauugcgggaccaucgccaacggagugcuucaaacauuuaugcgcauggcguggggcgggagcuacauugcccuggacucuggaugcggcgggugggauuguaucaugaccuccuaccaguaucucaucauucagaacacgacaugggaggaccauugccaguucagcagacccucuccuaucggauaccugggccuucugucccaacggacccgcgauauuuauaucagcagacggcgccggggcacauuuaccuggacccuguccgacucugaagggaaggauacacccggaggcuacugucucacgcgcuggaugcugauugaggcugagcuuaagugcuucgggaauaccgccguugcuaaauguaacgaaaagcacgacgaggaauuuugcgauaugcugagacucuucgacuuuaauaaacaggccauccagcggcugaaggcgcccgcccagaugagcauccaacuuauuaacaaagcugugaaugcccugaucaacgaucagcucauuaugaagaaucaucugcgcgacaucaugugcauuccuuauugcaacuacuccaaguauugguaccugaaucacacagucaccggaaaaacaagccuccccaaguguuggcuggugucuaacggguccuaccuuaaugaaacccacuucagcgacgauaucgagcagcaagcugacaacaugaucacggagaugcugcagaaagaauauauggagagacagggaaagacaccucucggccugguggaucuguucgucuuuucuaccagcuucuaccuuauuuccaucuuucuccaucugguuaaaauuccgacccaccggcauguggugggcaagcccugcccuaaaccccaccgccugaaucacauggggaucuguucuugcggacucuauaagcagccuggcguccccgugagauggaagcgguga

SEQ ID NO: 5514 - RNA, 1476 nt, Artificial Sequence
  derived and/or modified protein sequence (opt5) from LASV(G1442-SLE-2011;Clade IV)__AIT17180__GPCstabilized
augggccagaucgugaccuucuuucaagaggucccccacguuauugaagaggugaugaacaucgugcugauugcccucagcauccuggcuguccuuaaggggcuguacaauguggccacaugcggacucauuggccugguuacguuccuucugcucugugggagauccugcaccacaacccuguauaaaggaguguacgaacugcagacacucgagcugaacauggaaacccuuaauaugacaaugccucugucuuguaccaagaacaauagccaucacuauauccgggucggcaacgagacggggcucgagcugacccuuacaaauaccuccaucauuaaccauaaauuuugcaaucugucugacgcgcacaagaaaaaccucuacgaucaugcucugaugagcaucauuuccacauuccaccugucuaucccgaauuuuaaccaguaugaagccaugagcugugacuucaauggaggcaagauuuccgugcaguacaaccucagccacucuuaugccggcgaugcugccaaucauugcgggaccguugcuaacggagugcugcaaacguuuaugcgcauggccuggggcggguccuacaucgcgcuugacagcggaugcggcaacugggauuguauuaugacaucuuaccaguaucugaucauccagaauaccacaugggacgaucacugccaguucucccggcccagcccuauuggguaccucggacugcuuucucaacgcaccagagacgucuauaucucccggcgccgccggggcaccuuuacauggacgcugagcgauuccgagggcaaggacacccccgggggauacugucugacaagauggaugcucauugaagccgagcugaaaugcuucggcaacaccgcuguggccaaguguaaugagaaacaugaugaagaguuuugcgacaugcuucggcuguucgauuuuaacaagcaggcuauccagcgccucaaagcccccgcgcagaugucuauucaacugaucaauaaggccgugaacgcucuuaucaaugaccagcugauuaugaagaaccaccucagagacaucaugugcauuccuuauugcaauuacagcaaauauugguaccugaacaauacagccaccggaaagacgucccugcccaaauguuggcucaucagcaacggcucuuaccugaaugagacacacuucuccgaugacauugaacaggaggcugauaacaugaucaccgagaugcuucaaaaggaauauauggagcggcaggggaaaaccccucugggacucgucgaccuguucguuuuuagcacaucuuucuaccugaucagcauuuuucuucaucucgugaagaucccgacccaccgccauauugugggcaaauccugccccaagccucacagacugaaucauaugggcaucuguucuugcgggcuguauaagcagcccggagucccugugcgguggaaacgcuga

SEQ ID NO: 5515 - RNA, 1476 nt, Artificial Sequence
  derived and/or modified protein sequence (opt5) from LASV(G1529-SLE-2011;Clade IV)__AIT17184__GPCstabilized
augggccagaucgugaccuucuuucaagaggucccccacguuauugaagaggugaugaacaucgugcugauugcccucagcauccuggcuguccuuaaggggcuguacaauguggccacaugcggacucauuggccugguuacguuccuucugcucugugggagauccugcaccacaacccuguauaaaggaguguacgaacugcaggcgcucgagcugaacauggaaacacuuaauaugaccaugccucugucuuguacaaagaacaauagccaucacuauauccgggucggcaacgagaccgggcucgagcugacgcuuaccaauacauccaucauugaccauaaauuuugcaaccugucugaugcucacaagaaaaaucucuacgaccaugcccugaugagcaucauuuccaccuuccaccugucuaucccgaacuuuaaucaguaugaagccaugagcugugauuucaacggaggcaagauuuccgugcaguacaaucucagccacucuuaugcuggcgacgccgcuaaccauugcgggacaguugccaauggagugcugcaaaccuuuaugcgcauggcguggggcggguccuacaucgcccuugauagcggaugcaacggcugggacuguauuaugacgucuuaccaguaucugaucauccagaacacaaccugggaugaccacugccaguucucccggcccagcccuauuggguaccucggacugcuuucucaacgcacaagagauaucuauauuucccggcgccgccggggcaccuuuaccuggacacugagcgacuccgagggcaaggauacgcccgggggauacugucugaccagauggaugcucaucgaagcugagcugaaaugcuucggcaauacagccgucgcuaaguguaacgagaaacaugacgaagaguuuugcgauaugcuucggcuguucgacuuuaauaagcaggccauucgcagacucaaagcgcccgcccagaugucuauccagcugaucaacaaggcugugaaugcccuuauuaacgaccaacugaucaugaagaaucaccuccgggauauuaugugcaucccuuauugcaacuacagcaaauauugguaccugaauaacaccgcuacaggaaagaccucccugccccgcuguuggcucgugagcaauggcucuuaccugaacgagacgcacuucuccgacgauauugaacagcaggccgacaauaugaucacagagaugcuucaaagagaguauauggaacggcaggggaaaaccccucugggacucgucgaucuguucguuuuuagcaccucuuucuaccugaucagcauuuuucuucaucucgugaagaucccgacacaccgccauauugugggcaaacccugcccuaagccccacagacugaaccauaugggcaucuguuccugcgggcuguauaaacagccuggaguccccgugaaguggaagcgguga

SEQ ID NO: 5516 - RNA, 1476 nt, Artificial Sequence
  derived and/or modified protein sequence (opt5) from LASV(G1618-SLE-2011;Clade IV)__AIT17188__GPCstabilized
augggccagaucgugaccuucuuucaagaggucccccacguuauugaagaggugaugaacaucgugcugauugcccucagcauccuggcuguccuuaaggggcuguacaauuucgccacaugcggauuugugggccucguuuccuuccugcuucugugugggagaucuugcacgaccagccucuauaaaggaguguacgaacugcagacacuggagcucaacauggaaacccugaauaugacaaugccucuuuccuguaccaagaacaauucucaucacuauauuauggucggcaacgagacagggcuggagcucacccugacgaauaccagcaucaucaaccauaaauuuugcaaucuuuccgacgcgcacaagaaaaaccuguacgaucaugcucucaugucuauuaucagcacauuccaccuguccauuccgaauuuuaaccaguaugaagccaugagcugugacuucaauggaggcaagaucucugugcaguacaaccugucccacagcuaugccguugaugcugccaaucauugcggcaccguggcuaacgggguccuccaaacauuuaugcggauggccuggggaggcucuuacauugcgcuggacuccgggugcggaagcugggauuguaucaugaccucuuaccaguaucuuauuauccagaacacgacaugggaggaccauugccaguucucccgccccagcccuaucggcuaccuggggcuccugucccaaagaacccgggauauuuauaucucucgcagacgccggggaacauuuaccuggacccucagcgacuccgaaggcaaggauacacccggcggguacugucugacgcgguggaugcugauugaggccgagcucaaaugcuucggaaauaccgcuguggccaaguguaacgaaaaacacgacgaggaauuuugcgauaugcugcgccuuuucgacuucaauaagcaggcuauccagagacugcgggcccccgcgcagaugagcauucaacucaucaacaaagccgugaaugcucugaucaacgaucagcuuauuaugaagaaucaucugcgcgacaucaugugcauuccuuauugcaacuacucuaaguauugguaccucaaucacacaaccacagggagaaccucccugcccaaauguuggcuggucagcaacggaucuuaccucaaugaaacgcacuuuagcgacgauaucgagcagcaagccgacaacaugauuacagagaugcugcagaaggaauauauggagcggcagggcaaaaccccucuugggcugguugaucucuucguguuuuccaccucuuucuaccugaucagcaucuuucugcaucuugugaagauuccgacacaccgccauaucgucggaaaauccugccccaagccucacagacucaaucacaugggcauuuguagcugcggccuguaugggcagcccggagugccuguuaaauggaagcgguga

SEQ ID NO: 5517 - RNA, 1476 nt, Artificial Sequence
  derived and/or modified protein sequence (opt5) from LASV(G1646-SLE-2011;Clade IV)__AIT17192__GPCstabilized
augggccagaucgugaccuucuuucaagaggucccccacguuauugaagaggugaugaacaucgugcugauugcccucagcauccuggcuguccuuaaggggcuguacaauuucgccacaugcggauuuauuggccucguguccuuccugcuucugugugggagaucuugcacgaccagccucuauaaaggaguuuacgaacugcagacacuggagcucaacauggaaacccugaauaugacaaugccucuuuccuguaccaagaacaauucucaucacuauaucauggugggcaacgagacagggcuggagcucacccugacgaauaccagcaucauuaaccauaaauuuugcaaucuuuccgacgcgcacaagaaaaaccuguacgaucaugcucucaugucuaucauuagcacauuccaccuguccaucccgaauuuuaaccaguucgaagccaugagcugugacuuuaauggaggcaagauuucuguccaguauaaccugucccacagcuacgccguggaugcugccaaucauugcggcaccguugcuaacggggugcuccaaacauucaugcggauggccuggggaggcucuuauaucgcgcuggacuccgggugcggaagcugggauuguauuaugaccucuuaccaguaccuuaucauccagaacacgacaugggaggaccauugccaguuuucccgccccagcccuauuggcuaucuggggcuccugucccaaagaacccgggauaucuacauuucucgcagacgccggggaacauucaccuggacccucagcgacuccgaaggcaaggauacacccggcggguauugucugacgcgguggaugcugaucgaggccgagcucaaaugcuuuggaaauaccgcugucgccaaguguaacgaaaaacacgacgaggaguucugcgauaugcugcgccuuuucgacuuuaauaagcaggcuauucagagacugaaagcccccgcgcagaugagcauccaacucaucaacaaggccgugaaugcucugauuaacgaucagcuuaucaugaagaaucaucugcgggacauuaugugcaucccuuacugcaacuauucuaaauacugguaucucaaucacacaaccacagggcgcaccucccugcccaaguguuggcuggugagcaacggaucuuaccucaaugaaacgcacuucagcgacgauauugagcagcaagccgacaacaugaucacagagaugcugcagaaagaauacauggagagacagggcaagaccccucuugggcuggucgaucucuuuguuuucuccaccucuuuuuaucugaucagcauuuuccugcaucuugugaaaaucccgacacaccggcauauugugggaaaguccugccccaaaccucaccgccucaaucacaugggcaucuguagcugcggccuguacgggcagcccggagucccugugaaguggaagagauga

SEQ ID NO: 5518 - RNA, 1476 nt, Artificial Sequence
  derived and/or modified protein sequence (opt5) from LASV(G1647-SLE-2011;Clade IV)__AIT17196__GPCstabilized
augggccagaucgugaccuucuuucaagaggucccccacguuauugaagaggugaugaacaucgugcugauugcccucagcauccuggcuguccuuaaggggcuguacaaucucgccacaugcggacuggugggccuuguuacguuccugcuccugugugggagauccugcaccacaucucuguauaaaggaguguacgaacuccagacccuggagcuuaacauggaaacacugaauaugaccaugccucucagcuguacaaagaacaauucccaucacuauauuauggucggcaacgagaccgggcuggagcuuacgcugaccaauacaucuaucaucaaccauaaauuuugcaaucucagcgacgcgcacaagaaaaaccuguacgaucaugcucugauguccauuaucucuaccuuccaccucagcauuccgaauuuuaaccaguaugaagccauguccugugacuucaauggaggcaagaucagcgugcaguacaaccugucucacuccuaugccggcgaugcugccaaucauugcgggacaguugcuaacggagugcuucaaaccuuuaugcggauggccuggggcgggagcuacauugcgcuggacucuggaugcggcagaugggauuguaucaugacguccuaccaguaucucauuauccagaacacaaccugggaggaccacugccaguucagccggcccucuccuaucggguaccugggacuucugucccaacgcacaagagauauuuauaucagccggcgccgccggggcaccuuuaccuggacacuguccgacucugaaggcaaggauacgcccgggggauacugucucaccagauggaugcugauugaggccgagcuuaaaugcuucggcaauacagcugucgccaaguguaacgaaaaacaugacgaggaauuuugcgauaugcugcgccucuucgacuuuaauaagcaggcuauccagcggcugaaagcccccgcgcagaugaacauucaacuuaucaauaaggccgugaacgcucugaucaaugaucagcucauuaugaagaaccaccugagagacaucaugugcauuccuuauugcaauuacagcaaauauugguaccugaaccacaccacaaccggaaagacgucccucccccgguguuggcuggugagcaauggcucuuaccuuaacgaaacacauuucuccgacgauaucgagcagcaagccgacaauaugauuaccgagaugcugcagaaagaauauauggagcgccaggggaagaccccucucggacuggucgaucuguucguuuuuagcacaucuuucuaccuuaucagcaucuuucuccaccuggugaaaauuccgacccauagacacaucgugggcaagcccugcccuaaaccccaucggcugaaccacaugggcauuuguuccugcggguucuauaagcagccuggaguccccgugaaguggaaacgcuga

SEQ ID NO: 5519 - RNA, 1476 nt, Artificial Sequence
  derived and/or modified protein sequence (opt5) from LASV(G1774-SLE-2011;Clade IV)__AIT17204__GPCstabilized
augggccagaucgugaccuucuuucaagaggucccccacguuauugaagaggugaugaacaucgugcugauugcccucagcauccuggcuguccuuaaggggcuguacaaucucgccacaugcggacuggugggccuuguuacguuccugcuccugugugggagauccugcaccucuagccuguauaaaggaguguacgaacuccagacacuggagcuuaacauggaaacccugaauaugacaaugccucucuccuguaccaagaacucuagccaucacuauauucgggucggcaaugagacagggcuggagcuuacccugacgaacaccuccaucaucaaucauaaauuuugcaaccucucugacgcgcacaagaaaaaucuguacgaucaugcucugaugagcauuaucuccacauuccaccucagcauuccgaacuuuaaucaguaugaagccaugucuugugacuucaacggaggcaagaucuccgugcaguacaaucugagccacucuuaugccggcgaugcugccaaccauugcgggaccguugcuaauggagugcuucaaacauuuaugcgcauggccuggggcggguccuacauugcgcuggacagcggaugcgauagaugggacuguaucaugaccucuuaccaguaucucauuauccagaacacgacaugggaggaucauugccaguucucccggcccagcccuaucggcuaccuggggcuucugucccaacgcaccagagacauuuauaucucucggcgccgccggggaacauuuaccuggacccugagcgauuccgaaggcaaggacacacccggcggguacugucucacgagauggaugcugauugaggccgagcuuaaaugcuucggaaacaccgcugucgccaaguguaaugaaaaacacgaugaggaauuuugcgacaugcugcggcucuuugauuuuaacaagcaggcuauccagcgccugaaagcccccgcgcagaugagcauucaacuuaucaauaaggccgugaacgcucugaucaaugaccagcucauuaugaagaaccaccugagagacaucaugugcauuccuuauugcaauuacucuaaauauugguaccugaaccauacaaucaccgggaagacaucccuccccaaauguuggcuggugagcaauggaucuuaccuuaacaagacccacuucagcgaugacauugaacagcaagccgauaauaugaucacggagaugcugcagaaagaguauauggaacggcagggcaagacaccucucgggcuggucgaccuguucguuuucuccaccucuuucuaccuuaucagcauuuuucuccaucugaucaaaauuccgacccaccgccauaucgugggaaagcccugcccuaagccccacagacugaaccacaugggcauuuguuccugcggccucuauaaacagccuggggugcccgucaaguggaaacgguga

SEQ ID NO: 5520 - RNA, 1476 nt, Artificial Sequence
  derived and/or modified protein sequence (opt5) from LASV(G1792-SLE-2011;Clade IV)__AIT17208__GPCstabilized
augggccagaucgugaccuucuuucaagaggucccccacguuauugaagaggugaugaacaucgugcugauugcccucagcauccuggcuguccuuaaggggcuguacaauuucgccacaugcggacucauuggccuggugacguuucuucugcucugugggagauccugcaccacaucucuguauaaaggaguuuacgaacugcagacccucgagcugaacauggaaacacuuaauaugaccaugccucugagcuguacaaagaacaauucccaucacuauaucauggugggcaacgagaccgggcucgagcugacgcuuaccaauacaucuaucauuaaccauaaauucugcaaucugagcgacgcgcacaagaaaaaccucuacgaucaugcucugauguccaucauuucuaccuuucaccugagcaucccgaauuucaaccaguaugaagccauguccugugacuuuaauggaggcaagauuagcguccaguacaaccucucucacuccuaugccggcgaugcugccaaucauugcgggacaguggcuaacggaguucugcaaaccuucaugcggauggccuggggcgggagcuacaucgcgcuugacucuggaugcggccagugggauuguauuaugacguccuaccaguaucugaucauccagaacacaaccugggaggaccacugccaauuuagcagacccucuccuauuggguaccucggacugcuuucccagcggacacgcgauaucuauauuagcagacggcgccggggcaccuucaccuggacacuguccgacucugaaggcaaggauacgcccgggggauacugucugacccgcuggaugcucaucgaggccgagcugaaaugcuuuggcaauacagcuguggccaaguguaacgaaaaacaugacgaggaguucugcgauaugcuuagacuguuugacuucaauaagcaggcuauucagcggcucaaagcccccgcgcaaaugagcauccagcugaucaacaaggccgucaaugcucuuauuaacgaucagcugaucaugaagaaucaccuccgcgacauuaugugcaucccuuauugcaacuacuccaaauauugguaccugaaucacaccacaaccggaaagacgagccugcccaaauguuggcucgugucuaacggcuccuaccugaaugaaacacauuucagcgacgauauugagcaacaggccgacaacaugaucaccgagaugcuucagaaggaauauauggagagacaggggaaaaccccucugggacucguggaucuguuugucuucucuaccagcuuuuaccugaucuccauuuuccuucaccucguuaagaucccgacacaucggcacauugugggcaaaucuugccccaagccucaucgccugaaucacaugggcaucuguagcugcgggcuguauaagcaacccggagugccugucaaauggaagagauga

SEQ ID NO: 5521 - RNA, 1476 nt, Artificial Sequence
  derived and/or modified protein sequence (opt5) from LASV(G1897-SLE-2011;Clade IV)__AIT17210__GPCstabilized
augggccagaucgugaccuucuuucaagaggucccccacguuauugaagaggugaugaacaucgugcugauugcccucagcauccuggcuguccuuaaggggcuguacaaucucgccacaugcggacuggugggccuuguuacguuccugcuccugugugggagauccugcaccacaucucuguauaaaggaguguacgaacuccagacccuggagcuuaacauggaaacacugaauaugaccaugccucucagcuguacaaagaacaauucccaucacuauauuauggucggcaacgagaccgggcuggagcuuacgcugaccaauacaucuaucaucaaccauaaauuuugcaaucucagcgacgcgcacaagaaaaaccuguacgaucaugcucugauguccauuaucucuaccuuccaccucagcauuccgaauuuuaaccaguaugaagccauguccugugacuucaauggaggcaagaucagcgugcaguacaaccugucucacuccuaugccggcgaugcugccaaucauugcgggacaguugcuaacggagugcuucaaaccuuuaugcggauggccuggggcgggagcuacauugcgcuggacucuggaugcgauagaugggacuguaucaugacguccuaccaguaucucauuauccagaacacaaccugggaggaucacugccaguucagccggcccucuccuaucggcuaccuggggcuucugucccaacgcacaagagacauuuauaucagccggcgccgccggggaaccuuuaccuggacacuguccgauucugaaggcaaggacacgcccggcggguacugucucaccagauggaugcugauugaggccgagcuuaaaugcuucggaaauacagcugucgccaaguguaacgaaaaacaugaugaggaauuuugcgacaugcugcgccucuucgauuuuaauaagcaggcuauccagcggcugaaagcccccgcgcagaugagcauucaacuuaucaacaaggccgugaaugcucugaucaacgaccagcucauuaugaagaaucaccugagagacaucaugugcauuccuuauugcaacuacuccaaauauugguaccugaaucacaccacaaccgggaagacgagccuccccaaauguuggcuggugucuaacggauccuaccuuaaugaaacacauuucagcgaugacaucgagcagcaagccgauaacaugauuaccgagaugcugcagaaggaauauauggagcggcagggcaaaaccccucucgggcuggucgaccuguucguuuuuagcacaucuuucuaccuuaucuccaucuuucuccgccuggugaagauuccgacccacagacauaucgugggaaaacccugcccuaagccccaccggcugaaucauaugggcauuuguucuugcggccucuauaagcagccugggguccccgugaaauggaagcgcuga

SEQ ID NO: 5522 - RNA, 1476 nt, Artificial Sequence
  derived and/or modified protein sequence (opt5) from LASV(G1932-SLE-2011;Clade IV)__AIT17212__GPCstabilized
augggccagaucgugaccuucuuucaagaggucccccacguuauugaagaggugaugaacaucgugcugauugcccucagcauccuggcuguccuuaaggggcuguacaaucucgccacaugcggacuggugggccuuguuacguuccugcuccugugugggagauccugcaccacaucucuguauaaaggaguguacgaacuccagacccuggagcuuaacauggaaacacugaauaugaccaugccucucagcuguacaaagaacaauucccaucacuauauuauggucggcaacgagaccgggcuggagcuuacgcugaccaauacaucuaucaucaaccauaaauuuugcaaucucagcgacgcgcaccggaagaaccuguacgaucaugcucugauguccauuaucucuaccuuccaccucagcauuccgaauuuuaaccaguaugaagccauguccugugacuucaauggaggcaaaaucagcgugcaguacaaccugucucacuccuaugccggcgaugcugccaaucauugcgggacaguugcuaacggagugcuucaaaccuuuaugcgcauggccuggggcgggagcuacauugcgcuggacucuggaugcggcaagugggauuguaucaugacguccuaccaguaucucauuauccagaacacaaccugggaggaccacugccaguucagccggcccucuccuaucggguaccugggacuucugucccaacgcacaagagauauuuauaucagccggcgccgccggggcaccuuuaccuggacacuguccgacucugaaggcaaggauacgcccgggggauacugucucaccagauggaugcugauugaggccgagcuuaaaugcuucggcaauacagcugucgccaaguguaacgaaaaacaugacgaggaauuuugcgauaugcugcgccucuucgacuuuaauaagcaggcuauccagcggcugaaagcccccgcgcagaugagcauucaacuuaucaacaaggccgugaaugcucugaucaacgaucagcucauuaugaagaaucaccugagagacaucaugugcauuccuuauugcaacuacuccaaauauugguaccugaaucacaccacaaccggaaagacgagccucccccgguguuggcuggugucuaacggcuccuaccuuaaugaaacacauuucagcgacgauaucgagcagcaagccgacaacaugauuaccgagaugcugcagaaagaauauauggagcgccaggggaagaccccucucggacuggucgaucuguucguuuuuagcacaucuuucuaccuuaucuccaucuuucuccaccuggugaaaauuccgacccauagacacaucgugggcaagcccugcccuaaaccccaucggcugaaucacaugggcauuuguucuugcgggcucuauaagcagccuggaguccccgugaaguggaaacgcuga

SEQ ID NO: 5523 - RNA, 1476 nt, Artificial Sequence
  derived and/or modified protein sequence (opt5) from LASV(G1959-SLE-2011;Clade IV)__AIT17216__GPCstabilized
augggccagaucgugaccuucuuucaagaggucccccacguuauugaagaggugaugaacaucgugcugauugcccucagcauccuggcuguccuuaaggggcuguacaauuucgccacaugcggacucgugggccugguuacguuucuucugcucugugggagauccugcaccacaucucuguauaaaggaguguacgaacugcagacccucgagcugaacauggaaacacuuaauaugaccaugccucugagcuguacaaagaacaauucccaucacuauauuauggucggcaacgagaccgggcucgagcugacgcuuaccaauacaucuaucaucaaccauaaauucugcaaucugagcgacgcgcacaagaaaaaccucuacgaucaugcucugauguccauuaucucuaccuuucaccugagcauuccgaauuucaaccaguaugaagccauguccugugacuuuaauggaggcaagaucagcgugcaguacaaccucucucacuccuaugccggcgaugcugccaaucauugcgggacaguugcuaacggagugcugcaaaccuucaugcggauggccuggggcgggagcuacauugcgcuugacucuggaugcggccgcugggauuguaucaugacguccuaccaguaucugauuauccagaacacaaccugggaggaccauugccaguuuagcagacccucuccuaucggguaccucggacugcuuucccaacggacacgcgauauuuauaucagcagacggcgccggggcaccuucaccuggacacuguccgacucugaaggcaaggauacgcccgggggauacugucugacccgcuggaugcucauugaggccgagcugaaaugcuuuggcaauacagcugucgccaaguguaacgaaaaacacgacgaggaguucugcgauaugcuuagacuguuugacuucaauaagcaggcuauccagcggcucaaagcccccgcgcagaugagcauucaacugaucaacaaggccgugaaugcucuuaucaacgaucagcugauuaugaagaaucaccuccgcgacaucaugugcauuccuuauugcaacuacuccaaauauugguaccugaaucauaccacaaccggaaagacgagccugcccaaauguuggcucgugucuaacggcuccuaccugaaugaaacacacuucagcgacgauaucgagcagcaagccgacaacaugauuaccgagaugcuucagaaggaauauauggagagacaggggaaaaccccucugggacucgucgaucuguuuguuuucucuaccagcuuuuaccugaucuccaucuuccuucaucucgugaagauuccgacacaccggcauaucgugggcaaacccugcccuaagccccaccgccugaauuauaugggcauuuguucuugcgggcuguacaagcagccuggaguccccgugagauggaaacgguga

SEQ ID NO: 5524 - RNA, 1476 nt, Artificial Sequence
  derived and/or modified protein sequence (opt5) from LASV(G2141-SLE-2011;Clade IV)__AIT17224__GPCstabilized
augggccagaucgugaccuucuuucaagaggucccccacguuauugaagaggugaugaacaucgugcugauugcccucagcauccuggcuguccuuaaggggcuguacaauguggccacaugcggacucauuggccugguuacguuccuucugcucugugggagauccugcaccacaacccuguauaaaggaguguacgaacugcaggcgcucgagcugaacauggaaacacuuaauaugaccaugccucugucuuguacaaagaacaauagccaucacuauauccgggucggcaacgacaccgggcucgagcugacgcuuaccaauacauccaucauucagcauaaauuuugcaaccugucugaugcucacaagaaaaaucucuacgaccauacccugaugagcaucauuuccacauuccaccugucuaucccgaacuuuaaucaguaugaggccaugagcugugauuucaacggaggcaagauuuccgugcaauacaaucucagccacucuuaugccggcgacgcugccucccauugcgggaccguugcuaacggagugcugcagacguuuaugcgcauggccuggggcgggagcuacaucgcgcuugauucuggaugcggcaauugggacuguauuaugacauccuaccaguaucugaucauccagaacaccacaugggaagaucacugccaauucagccggcccucuccuauuggguaccucggacugcuuucccagcgcaccagagacaucuauauuagccggcgccgccggggcaccuuuacauggacgcuguccgauucugagggcagagacacccccgggggauacugucugacacgguggaugcucaucgaagccgagcugaagugcuucggcaacaccgcugucgccaaauguaaugagaagcaugaugaagaguuuugcgacaugcuucgccuguucgauuuuaacaaacaggcuauucagagacucaagacacccgcccaaaugagcauccagcugaucaauaaagcggugaacgcccuuauuaaugaccagcugaucaugaagaaccaccuccgggacauuaugugcaucccuuauugcaauuacuccaaguauugguaccugaacaauaccauuacgggaaaaagcucucugcccaaguguuggcucguguccaacggcagcuaccugaaugagacacacuucucugaugacaucgaacaagaggcugauaacaugaucaccgagaugcuucagaaagaauauauggagcgccaggggaagaccccucugggacucgucgaccuguucguuuuuagcacauccuucuaccugauuucuaucuuucuucaucucgugaaaauuccgacccacagacauaucgugggcaagcccugcccuaaaccccaccggcugaaucauaugggcgucuguagcugcgggcuguauaagcagccuggagugcccguucgcuggaagagauga

SEQ ID NO: 5525 - RNA, 1476 nt, Artificial Sequence
  derived and/or modified protein sequence (opt5) from LASV(G2147-SLE-2011;Clade IV)__AIT17228__GPCstabilized
augggccagaucgugaccuucuuucaagaggucccccacguuauugaagaggugaugaacaucgugcugauugcccucagcauccuggcuguccuuaaggggcuguacaauuucgccacaugcggacucgugggccugcuuacguuucugcuccugugugggagauccugcaccacaucucuguauaaaggaguuuacgaacuccagacccuggagcuuaacauggaaacacugaauaugaccaugccucucagcuguacaaagaacaauucccaucacuauauuauggugggcaacgagaccgggcuggagcuuacgcugaccaauacaucuaucaucgaccauaaauucugcaaccucagcgaugcgcacaagaaaaaucuguacgaccaugcucugauguccauuaucucuaccuuucaccucagcauuccgaacuucaaucaguaugaagccauguccugugauuuuaacggaggcaagaucagcguccaguacaaucugucucacuccuaugccggcgacgcugccaaccauugcgggacaguggcuaauggaguucuucaaaccuucaugcggauggccuggggcgggagcuacauugcgcuggauucuggaugcggcgggugggacuguaucaugacguccuaccaguaucucauuauccagaacacaaccugggaggaucacugccaguuuagcagacccucuccuaucggauaccugggccuucugucccaacggacacgcgacauuuauaucagcagacggcgccggggcaccuucaccuggacacuguccgauucugaagggaaggacacgcccggaggcuacugucucacccgcuggaugcugauugaggccgagcuuaaaugcuuugggaacacagcuguggccaaguguaaugaaaaacaugaugaggaguucugcgacaugcugagacucuuugauuucaacaagcaggcuauccagcggcugaaagcccccgcgcagaugagcauucaacuuaucaauaaggccgucaacgcucugaucaaugaccagcucauuaugaagaaccaucugcgcgacaucaugugcauuccuuauugcaauuacuccaaauauugguaccugaaccacaccacaaccggaaagacgagccuccccaaauguuggcuggugucuaauggguccuaccuuaacgaaacacacuucagcgaugacaucgagcagcaagccgauaauaugauuaccgagaugcugcagaaggaauauauggagagacagggaaaaaccccucucggccugguggaccuguuugucuucucuaccagcuuuuaccuuaucuccaucuuccuccaccugguuaagauuccgacacaucggcacaucgugggcaaaucuugccccaagccucaucgccugaaccacauggggauuuguagcugcggacucuauaagcagcccggcgugccugucaaauggaagagauga

SEQ ID NO: 5526 - RNA, 1476 nt, Artificial Sequence
  derived and/or modified protein sequence (opt5) from LASV(G2165-SLE-2011;Clade IV)__AIT17232__GPCstabilized
augggccagaucgugaccuucuuucaagaggucccccacguuauugaagaggugaugaacaucgugcugauugcccucagcauccuggcuguccuuaaggggcuguacaauuucgccacaugcggacucgugggccugguuacguuucuucugcucugugggagauccugcaccacaucucuguauaaaggaguguacgaacugcagacccucgagcugaacauggaaacacuuaauaugaccaugccucugagcuguacaaagaacaauucccaucacuauauucgggucggcaacgagaccgggcucgagcugacgcuuaccaauacaucuaucaucaaccauaaauucugcaaucugagcgacgcgcacaagaaaaaccucuacgaucaugcucugauguccauuaucucuaccuuucaccugagcauuccgaauuucaaccaguaugaagccauguccugugacuuuaaugagggaaagaucagcgugcaguacaaccucucucacuccuaugccggcgaugcugccaaucauugcggcacaguugcuaacggggugcugcaaaccuucaugcgcauggccuggggaggcagcuacauugcgcuugacucugggugcggaaagugggauuguaucaugacguccuaccaguaucugauuauccagaacacaaccugggaagaccacugccaguuuagccggcccucuccuaucggcuaccucgggcugcuuucccaacgcacaagagauauuuauaucagccggcgccgccggggaaccuucaccuggacacuguccgacucugagggcaaagauacgcccggcggguacugucugaccagauggaugcucauugaggccgaacugaagugcuuuggaaauacagcugucgccaaauguaacgagaagcaugacgaagaguucugcgauaugcuucggcuguuugacuucaauaaacaggcuaucgaacgccucaaggcccccgcgcagaugagcauucagcugaucaacaaggccgugaaugcucuuaucaacgaucaacugauuaugaaaaaucaccucagagacaucaugugcauuccuuauugcaacuacuccaaguauugguaccugaaucacaccacaaccgggaaaacgagccugcccaaguguuggcucgugucuaacggauccuaccugaaugagacacauuucagcgacgauaucgaacagcaggccgacaacaugauuaccgagaugcuucaaaaagaauauauggagcggcagggcaagaccccucuggggcucgucgaucuguuuguuuucucuaccagcuuuuaccugaucuccaucuuccuucaccucgugaaaauuccgacacaucgccacaucgugggaaagucuugccccaagccucauagacugaaucacaugggcauuuguagcugcggccuguauaaacagcccggggucccugugaaguggaaacgguga

SEQ ID NO: 5527 - RNA, 1476 nt, Artificial Sequence
  derived and/or modified protein sequence (opt5) from LASV(G2184-SLE-2011;Clade IV)__AIT17236__GPCstabilized
augggccagaucgugaccuucuuucaagaggucccccacguuauugaagaggugaugaacaucgugcugauugcccucagcauccuggcuguccuuaaggggcuguacaauuucgccacaugcggacucgugggccugguuacguuucuucugcucugugggagauccugcaccacaucucuguauaaaggaguguacgaacugcagacccucgagcugaacauggaaacacuuaauaugaccaugccucugagcuguacaaagaacaauucccaucacuauauuauggucggcaacgagaccgggcucgagcugacgcuuaccaauacaucuaucaucaaccauaaauucugcaaucugagcgacgcgcacaagaaaaaccucuacgaucaugcucugauguccauuaucucuaccuuucaccugagcauuccgaauuucaaccaguaugaagccauguccugugacuuuaauggaggccggaucagcgugcaguacaaccucucucacuccuaugccggcgaggcugccaaucauugcgggacaguugcuaacggagugcugcaaaccuucaugcgcauggccuggggcgggagcuacauugcgcuugauucuggaugcggcaagugggacuguaucaugacguccuaccaguaucugauuauccagaacacaaccugggaagaucacugccaguuuagccggcccucuccuaucggguaccucggacugcuuucccaacgcacaagagacauuuauaucagccggcgccgccggggcaccuucaccuggacacuguccgauucugagggcaaggacacgcccgggggauacugucugaccagauggaugcucauugaggccgaacugaaaugcuuuggcaauacagcugucgccaaguguaacgagaaacaugaugaagaguucugcgacaugcuucggcuguuugauuucaauaagcaggcuauccagcgccucaaagcccccgcgcagaugagcauucaacugaucaacaaggccgugaaugcucuuaucaacgaccagcugauuaugaagaaucaccucagagauaucaugugcauuccuuauugcaacuacucccgguauugguaccugaaucacaccacaaccggaaaaacgagccugcccaaguguuggcucgugucuaacggcuccuaccugaaugagacacauuucagcgacgacaucgagcagcaagccgauaacaugauuaccgaaaugcuucagaaagaguauauggaacgccaggggaagaccccucugggacucgucgaccuguuuguuuucucuaccagcuuuuaccugaucuccaucuuccuucaccucgugaaaauuccgacacauagacacaucgugggcaagucuugccccaaaccucaucggcugaaucacaugggcauuuguagcugcgggcuguauaagcagcccggagucccugugaaguggaaacgcuga

SEQ ID NO: 5528 - RNA, 1476 nt, Artificial Sequence
  derived and/or modified protein sequence (opt5) from LASV(G2197-SLE-2011;Clade IV)__AIT17240__GPCstabilized
augggccagaucgugaccuucuuucaagaggucccccacguuauugaagaggugaugaacaucgugcugauugcccucagcauccuggcuguccuuaaggggcuguacaaucucgccacaugcggacuggugggccuuguuacguuccugcuccugugugggagauccugcaccacaucucuguauaaaggauuuuacgaacuccagacccuggagcuuaacauggaaacacugaauaugaccaugccucucagcuguacaaagaacaauucccaucacuauauucgggugggcaacgagaccgggcuggagcuuacgcugaccaauacaucuaucaucgaccauaaauucugcaaccucagcgaugcgcacaagaaaaaucuguacgaccaugcucugauguccauuaucucuaccuuucaccucagcauuccgaacuucaaucaguaugaagccauguccugugauuuuaacggaggcaagaucagcguccaguacaaucugucucacuccuaugccggcgacgcugccaaccauugcgggacaguggcuaauggaguucuucaaaccuucaugcgcauggccuggggcgggagcuacauugcgcuggauucuggaugcggccggugggacuguaucaugacguccuaccaguaucucauuauccagaacacaaccugggaggaucacugccaguuuagccgccccucuccuaucggguaccugggacuucugucccaaaagacaagagacauuuauaucagccggcgccgccggggcaccuucaccuggacacuguccgauucugaaggcaaagacacgcccgggggauacugucucaccagauggaugcugauugaggccgagcuuaagugcuuuggcaacacagcuguggccaaauguaaugaaaagcaugaugaggaguucugcgacaugcugcggcucuuugauuucaacaaacaggcuauccagcgccugaaggcccccgcgcagaugagcauucaacuuaucaauaaggccgucaacgcucugaucaaugaccagcucauuaugaaaaaccaccugagagacaucaugugcauuccuuauugcaauuacuccaaguauugguaccugaaccacaccacaaccggaaaaacgagccuccccaaguguuggcuggugucuaauggcuccuaccuuaacgaaacacauuucagcgaugacaucgagcagcaagccgauaauaugauuaccgagaugcugcagaaagaauauauggagcggcaggggaagaccccucucggacugguggaccuguuugucuucucuaccagcuuuuaccuuaucuccaucuuccuccaccugguuaaaauuccgacacaucgccacaucgugggcaagucuugccccaagccucauagacugaaccacaugggcauuuguagcugcgggcucuauaaacagcccggagugccugucaaguggaaacgguga

SEQ ID NO: 5529 - RNA, 1476 nt, Artificial Sequence
  derived and/or modified protein sequence (opt5) from LASV(G2222-SLE-2011;Clade IV)__AIT17244__GPCstabilized
augggccagaucgugaccuucuuucaagaggucccccacguuauugaagaggugaugaacaucgugcugauugcccucagcauccuggcuguccuuaaggggcuguacaaucucgccacaugcggacuggugggccuuguuacguuccugcuccugugugggagauccugcaccacaaaccuguauaaaggaguguacgaacuccagacccuggagcuuaauauggaaacacugaacaugaccaugccucucucuuguacaaagaauagcucccaucacuauauucgggucggcaacgagaccgggcuggagcuuacgcugaccaauacaucuaucaucgaccauaaauuuugcaaccucagcgaugcgcacaagaaaaaucuguacgaccaugcucugauguccauuaucucuaccuuccaccucagcauuccgaacuuuaaucaguaugaagccauguccugugauuucaacggaggcaagaucagcgugcaguacaaucugucucacuccuauguuggcgacgccgcugaucauugcgggacaguggccaacggaguccuucaaaccuuuaugcgcauggcuuggggcgggagcuacauugcccuggacucuggaugcggcaagugggauuguaucauuacguccuaccaguaucucaucauccagaauacaaccugggaggaccacugccaguucagccggcccucuccuauuggguaccugggacuucugucccaacgcacaagagauaucuauauuagccggcgccgccggggcaccuuuaccuggacacuguccgacucugaaggcaaagauacgcccgggggauacugucucaccagauggaugcugaucgaggcggagcuuaagugcuucggcaacacagccguggcuaaauguaacgaaaagcaugacgaggaauuuugcgauaugcugcgccucuucgacuuuaauaaacaggccauucagcggcugaaggcucccgcccagaugagcauccaacuuaucaacaaggcggugaaugcccugauuaacgaccagcucaucaugaaaaaucaccugagagauauuaugugcaucccuuauugcaacuacuccaaguauugguaccugaaucacaccauuacaggaaaaaccagccucccccgguguuggcuggucucuaacggcuccuaccuuaaugaaacgcgcuucagcgacgauaucgagcagcaagcugacaacaugaucacagagaugcugcagaaggaauauauggagagacaggggaaaaccccucucggacugguugaucuguucguguuuucuaccagcuucuaccuuauuuccaucuuucuccaucuggugaagauuccgacacaccggcauaucgucggcaaacccugcccuaagccccaccgccugaaucauaugggcauuuguucuugcgggcucuauaagcagccuggagugcccguuaaauggaagagauga

SEQ ID NO: 5530 - RNA, 1476 nt, Artificial Sequence
  derived and/or modified protein sequence (opt5) from LASV(G2230-SLE-2012;Clade IV)__AIT17246__GPCstabilized
augggccagaucgugaccuucuuucaagaggucccccacguuauugaagaggugaugaacaucgugcugauugcccucagccugcuugcuguccugaaggggcucuacaauguggccacaugcggacugaucggccuuauuacguuccugcuccugugugggagauccugcaccacaaaccuguauaaaggaguuuacgaacuccagacccuggagcuuaauauggaaacacugaacaugaccaugccucucucuuguacaaagaauagcucccaucacuauaucauggugggcaacgagaccgggcuggagcuuacgcugaccaauacaucuaucauuaaccauaaauuuugcaaucucagcgacgcgcacaagaaaaaccuguacgaucauacccugauguccaucauuucuacauuccaccucagcaucccgaauuuuaaccaguaugaagcuauguccugugacuucaauggaggcaagauuagcguccaguacaaccugucucacuccuaugccguggaugccgcuaaucauugcggcaccguugccaacgggauccuucaaacguuuaugcggauggcuuggggaggcagcuacauugcccuggacucugggugcggaaacugggauuguaucaugacauccuaccaguaucucaucauucagaauaccacaugggaggaccacugccaguucagcagacccucuccuaucggcuaccuggggcuucugucccaacggacccgcgauauuuauaucagcagacggcgccggggaaccuuuacauggacgcuguccgacucugaaggcaacgauacccccggcggguacugucucacacgcuggaugcugauugaggcggagcuuaagugcuucggaaauaccgccguggcuaaauguaacgaaaagcaugacgaggaauuuugcgauaugcugagacucuucgacuuuaauaaacaggccauccagcggcugaaggcucccgcccagaugagcauccaacuuauuaacaaagcggucaaugcccugaucaacgaucagcucauuaugaagaaucaucugcgcgacaucaugugcauuccuuauugcaacuacuccaaguauugguaccugaaucacacaaccacggggaaaacaagccuccccaaguguuggcuggugucuaacggauccuaccuuaaugaaacccacuucagcgacgauaucgagcagcaagcugacaacaugaucaccgagaugcugcagaaagaauauauggagagacagggcaagacaccucucgggcugguggaucuguucgucuuuucuaccagcuucuaccuuauuuccaucuuucuccaccugguuaaaauuccgacacaucggcacaucgugggaaagcccugcccuaaaccccaucgccugaaucacaugggcauuuguucuugcggccucuauaagcagccuggggugcccgucagauggaagcgguga

SEQ ID NO: 5531 - RNA, 1476 nt, Artificial Sequence
  derived and/or modified protein sequence (opt5) from LASV(G2259-SLE-2012;Clade IV)__AIT17250__GPCstabilized
augggccagaucgugaccuucuuucaagaggucccccacguuauugaagaggugaugaacaucgugcugauugcccucagccugcuugcuguccugaaggggcucuacaauguggccacaugcggacugaucggccuuguuacguuccugcuccugugugggagauccugcaccacaaaccuguauaaaggaguguacgaacuccagacccuggagcuuaauauggaaacacugaacaugaccaugccucucucuuguacaaagaauaacagccaucacuauauuauggucggcaaugagaccgggcuggagcuuacgcugaccaacacauccaucaucaaucauaaauuuugcaaccucucugacgcgcacaagaaaaaucuguacgaucauacccugaugagcauuaucuccacauuccaccucucuauuccgaacuuuaaucaguaugaagcuaugagcugugacuucaacggaggcaagaucuccgugcaguacaaucugagccacucuuaugccguugaugccgcuaaccauugcggcaccguggccaacgggguccuucaaacguuuaugcggauggcuuggggaggcuccuacauugcccuggacagcgggugcggaaauugggauuguaucaugacaucuuaccaguaucucauuauccagaacaccacaugggaggaccacugccaguucuccagacccagcccuaucggcuaccuggggcuucugucucaacggacccgcgauauuuauaucuccagacggcgccggggaaccuuuacauggacgcugagcgacuccgaaggcaaugauacccccggcggguacugucucacacgcuggaugcugauugaggcggagcuuaagugcuucggaaacaccgccguggcuaaauguaaugaaaagcaugacgaggaauuuugcgauaugcugagacucuucgacuuuaacaaacaggccauccagcggcugaaggcucccgcccagaugucuauucaacuuaucaauaaagcggugaacgcccugaucaaugaucagcucauuaugaagaaccaucugcgcgacaucaugugcauuccuuauugcaauuacagcaaguauugguaccugaaccacacaaccacggggaaaacaucccuccccaaguguuggcuggucagcaauggaucuuaccuuaacgaaacccacuucuccgacgauaucgagcagcaagcugacaauaugauuaccgagaugcugcagaaagaauauauggagagacagggcaagacaccucucgggcugguugaucuguucguguuuagcaccucuuucuaccuuaucagcaucuuucuccaccuggugaaaauuccgacacaucggcacaucgucggaaagcccugcccuaaaccccaucgccugaaccacaugggcauuuguuccugcggccucuauaagcagccuggggugcccguuagauggaagcgguga

SEQ ID NO: 5532 - RNA, 1476 nt, Artificial Sequence
  derived and/or modified protein sequence (opt5) from LASV(G2263-SLE-2012;Clade IV)__AIT17254__GPCstabilized
augggccagaucgugaccuucuuucaagaggucccccacguuauugaagaggugaugaacaucgugcugauugcccucagcauccuggcuguccuuaaggggcuguacaauuucgccacaugcggaauugugggccucguuacguuucugcuucugugugggagauccugcaccacaucucucuauaaaggaguguacgaacugcagacccuggagcucaacauggaaacacugaauaugaccaugccucuuagcuguacaaagaacaauucccaucacuauaucauggucggcaacgagaccgggcuggagcucacgcugaccaauacaucuaucauuaaccauaaauucugcaaucuuagcgacgcgcacaagaaaaaccuguacgaucaugcucucauguccaucauuucuaccuuucaccugagcaucccgaauuucaaccaguaugaagccauguccugugacuuuaauggaggcaagauuagcgugcaguacaaccugucucacuccuaugccggcgaugcugccaaucauugcgggacaguugcuaacggagugcuccaaaccuucaugcggauggccuggggcgggagcuacaucgcgcuggacucuggaugcgauagaugggacuguauuaugacguccuaccaguaucuuaucauccagaacacaaccugggaggaucacugccaguuuagccggcccucuccuauuggcuaccuggggcuccugucccaacgcacaagagacaucuauauuagccggcgccgccggggaaccuucaccuggacacucuccgauucugaaggcaagaauacgcccggcggguacugucugaccagauggaugcugaucgaggccgagcucaaaugcuuuggaaacacagcugucgccaaguguaaugaaaaacaugacgaggaguucugcgauaugcugcggcuuuuugacuucaacaagcaggcuauucagcgccugaaagcccccgcgcagaugagcaucucccucaucaauaaggccgugaacgcucugauuaaugaucaacuuaucaugaagaaccaccugagagacauuaugugcaucccuuauugcaauuacagcaaauauugguaccucaaccacaccacaaccgggaagacgucucugccccgguguuggcugguguccaauggaagcuaccucaacgaaacacauuucucugacgauauugagcagcaggccgacaauaugaucaccgagaugcugcaaaaagaauauauggaucgccagggcaagaccccucuugggcuggucgaccucuuuguuuucagcacauccuuuuaccugaucucuauuuuccugcaccuugugaaaaucccgacccauagacacauugugggaaagacaugccccaaaccucaucggcucaaccacaugggcaucuguagcugcggccuguauaagcagcccggggucccugugaaguggaaacgcuga

SEQ ID NO: 5533 - RNA, 1476 nt, Artificial Sequence
  derived and/or modified protein sequence (opt5) from LASV(G2280-SLE-2012;Clade IV)__AIT17258__GPCstabilized
augggccagaucgugaccuucuuucaagaggucccccacguuauugaagaggugaugaacaucgugcugauugcccucagcauccuggcuguccuuaaggggcuguacaauauugccacaugcggacucgugggccugguuacguuccuucugcucugugggagauccugcaccacaucucuguauaaaggaguguacgaacugcagacccucgagcugaacauggaaacacuuaauaugaccaugccucugagcuguacaaagaacaauucccaucacuauaucauggucggcaacgagaccgggcucgagcugacgcuuaccaauacaucuaucauuaaccauaaauuuugcaaucugagcgacgcgcacaagaaaaaccucuacgaucaugcucugauguccaucgugucuaccuuccaccugagcauuccgaauuuuaaccaguaugaagccauguccugugacuucaauggaggcaagaucagcguucaguacaaccucucucacuccuaugccguggaugcugccaaucauugcggcacagucgcuaacggggugcugcaaaccuuuaugcggauggccuggggaggcagcuacauugcgcuugacucugggugcggaggcugggauuguaucaugacguccuaccaguaucugauuauccagaacgugacaugggaggaccacugccaguucagcagacccucuccuaucggguaccucggacugcuuucccaacggacccgcgaugucuauauuagcagacggcgccggggcacauuuaccuggacccuguccgacucugaaggcaaugauacacccgggggauacugucugacgcgcuggaugcucaucgaggccgagcugaagugcuucggcaacaccgcuguugccaaauguaaugaaaagcaugacgaggaauuuugcgauaugcuuagacuguucgacuuuaacaaacaggcuauucagcggcucaaggcccccgcgcagaugagcauccaacugauuaauaaagccgugaacgcucuuaucaaugaucagcugaucaugaagaaccaccuccgcgacauuaugugcaucccuuauugcaauuacuccaaguauugguaccugaaccacacaaccacaggaaaaaccagccugcccaaguguuggcucgugucuaauggcuccuaccugaacgaaacgcauuucagcgacgauauugagcagcaagccgacaauaugaucacagagaugcuucagaaagaauauauggagagacaggggaagaccccucugggacucgucgaucuguucguguuuucuaccagcuucuaccugauuuccaucuuucuucaccucguuaaaaucccgacacaucggcacauugugggcaagcccugcccuaaaccccaucgccugaaccacaugggcaucuguucuugcgggcuguauaagcagccuggaguccccgugaaguggaaaagauga

SEQ ID NO: 5534 - RNA, 1476 nt, Artificial Sequence
  derived and/or modified protein sequence (opt5) from LASV(G2295-SLE-2012;Clade IV)__AIT17262__GPCstabilized
augggccagaucgugaccuucuuucaagaggucccccacguuauugaagaggugaugaacaucgugcugauugcccucagcauccuggcuguccuuaaggggcuguacaaucucgccacaugcggacuggugggccuuguuacguuccugcuccugugugggagauccugcaccacaucucuguauaaaggaguguacgaacuccagacccuggagcuuaacauggaaacacugaauaugaccaugccucucagcuguacaaagaacaauucccaucacuauauuauggucggcaacgagaccgggcuggagcuuacgcugaccaauacaucuaucaucaaccauaaauuuugcaaucucagcgacgcgcacaagaaaaaccuguacgaucaugcucugauguccauuaucucuaccuuccaccucagcauuccgaauuuuaaccaguaugaagccauguccugugacuucaauggaggcaagaucagcgugcaguacaaccugucucacuccuaugccggcgaugcugccacacauugcgggaccguugcuaauggagugcuucaaacguuuaugcggauggccuggggcgggagcuacauugcgcuggacucuggaugcggcaagugggauuguaucaugacauccuaccaguaucucauuauccagaacaccacaugggaggaccacugccaguucagcagacccucuccuaucggguaccugggacuucugucccaacggacccgcgauauuuauaucagcagacggcgccggggcaccuuuacauggacgcuguccgacucugaaggcaaagauacccccgggggauacugucucacacgcuggaugcugauugaggccgagcuuaagugcuucggcaacaccgcugucgccaaauguaaugaaaagcaugacgaggaauuuugcgauaugcugagacucuucgacuuuaacaaacaggcuauccagcggcugaagacacccgcccagaugagcauucaacuuaucaauaaggcggugaacgcccugaucaaugaucagcucauuaugaaaaaccaucugcgcgacaucaugugcauuccuuauugcaauuacuccaaguauugguaccugaaccacaccacgacaggaaaaaccagccuccccagauguuggcuggugucuaauggcuccuaccuuaacgaaacccacuucagcgacgauaucgagcagcaagcugacaauaugauuacagagaugcugcagaaggaauauauggagcggcaggggaaaaccccucucggacuggucgaucuguucguuuuuagcacaucuuucuaccuuaucuccaucuuucuccaccuggugaagauuccgacgcaucgccacaucgugggcaaacccugcccuaagccccauagacugaaccacaugggcauuuguucuugcgggcucuauaagcagccuggaguccccgugaaauggaagcgguga

SEQ ID NO: 5535 - RNA, 1476 nt, Artificial Sequence
  derived and/or modified protein sequence (opt5) from LASV(G2315-SLE-2012;Clade IV)__AIT17266__GPCstabilized
augggccagaucgugaccuucuuucaagaggucccccacguuauugaagaggugaugaacaucgugcugauugcccucagcauccuggcuguccuuaaggggcuguacaaucucgccacaugcggacuggugggccuuguuacguuccugcuccugugugggagauccugcaccacaucucuguauaaaggaguguacgaacuccagacccuggagcuuaacauggaaacacugaauaugaccaugccucucagcuguacaaagaacaauucccaucacuauauuauggucggcaacgagaccgggcuggagcuuacgcugaccaauacaucucucaucaaccauaaauuuugcaaucugagcgacgcgcacaagaaaaaccuguacgaucaugcucucauguccaucauuucuaccuuccaccugagcaucccgaauuuuaaccaguaugaagccauguccugugacuucaauggaggcaagauuagcgugcaguacaaccuuucucacuccuaugccguugaugcugccaaucauugcggcacaguggcuaacgggguccugcaaaccuuuaugcggauggccuggggaggcagcuacaucgcgcucgacucugggugcggaggcugggauuguauuaugacguccuaccaguaucugaucauucagaacacaaccugggaggaccacugccaguucagcagacccucuccuaucggguaccuuggacugcucucccaacggacacgcgauaucuauauuagcagacggcgccggggcaccuuuaccuggacacucuccgacucugaaggcaaggauacgcccgggggauacugucugacccgcuggaugcuuaucgaggccgagcugaaaugcuucggcaauacagcuguggccaaguguaacgaaaaacaugacgaggaauuuugcgauaugcucagacuguucgacuuuaauaagcaggcuauucagcggcuuaaagcccccgcgcagaugagcauccaacugauuaacaaggccgugaaugcucucaucaacgaucagcugaucaugaagaaucaucugcgcgacauuaugugcaucccuuauugcaacuacuccaaauauugguaccucaaucacaccacaaccggaagaacgagccugccccgguguuggcuugucucuaacggcuccuaccugaaugaaacacacuucagcgacgauauugagcagcaagccgacaacaugaucaccgagaugcuccagaaggaauauauggagcgccaggggaaaaccccucugggacugguugaucuuuucguguuuucuaccagcuucuaccucauuuccaucuuucugcaccuggugaagaucccgacacauagacacauugucggcaaaucuugccccaagccucaucggcucaaucacaugggcaucuguagcugcgggcuguauaaacagcccggagugccuguuaaguggaagcgcuga

SEQ ID NO: 5536 - RNA, 1476 nt, Artificial Sequence
  derived and/or modified protein sequence (opt5) from LASV(G2318-SLE-2012;Clade IV)__AIT17270__GPCstabilized
augggccagaucgugaccuucuuucaagaggucccccacguuauugaagaggugaugaacaucgugcugauugcccucagcguccuggcugugcuuaaggggcuguacaauuucgccacaugcggacucguuggccuggugacguuucuucugcucugugggagauccugcucuaccagcgucuauaaaggaguguacgaacugcagacacuggagcucaacauggaaacccugaauaugacaaugccucuuuccuguaccaagaacaauucucaucacuauaucaugguuggcaacgagacagggcuggagcucacccugacgaauaccagcauuaucaaccauaaauucugcaaucuuuccgacgcgcacaagaaaaaccuguacgaucaugcucucaugucuaucauuagcacauuucaccuguccaucccgaauuucaaccaguaugaagccaugagcugugacuuuaauggaggcaagauuucugugcaguacaaccugucccacagcuaugccgucgaugcugccaaucauugcggcaccguggcuaacggggugcuccaaacauucaugcggauggccuggggaggcucuuacaucgcgcuggacuccgggugcggaggcugggauuguauuaugaccaacuaccaguaucuuaucauucagaauacgacaugggaggaccauugccaguuuagccgccccucuccuaucggguaccugggacuccugucccaaagaacccgggauaucuauauuagccgcagacgccggggcacauucaccuggacccucuccgacucugaaggcaaggauacacccgggggauacugucugacgcgguggaugcugaucgaggccgagcucaaaugcuuuggcaacaccgcugucgccaaguguaaugaaaaacacgacgaggaguucugcgauaugcugcgccuuuuugacuucaacaagcaggcuauucagagacugaaagcccccgcgcagaugagcauccaacucauuaauaaggccguuaacgcucugaucaaugaucagcuuaucaugaagaaccaucugcgggacauuaugugcaucccuuauugcaauuacuccaaauauugguaccucaaccacacaaccacaggacgcaccagccugcccaaguguuggcuggugucuaauggcuccuaccucaacgaaacgcacuucagcgacgauauugagcagcaagccgacaauaugaucacagagaugcugcagagagaauauauggagcggcaggggaaaaccccucuuggacugguggaucucuuugucuucucuaccagcuuuuaccugauuuccaucuuccugcaucuugugaagaucccgacacaccgccauauuguuggcaaaucuugccccaagccucacagacucaaccacaugggcaucuguagcugcgggcuguauaaacagcccggagugccugucaaguggaagcgguga

SEQ ID NO: 5537 - RNA, 1476 nt, Artificial Sequence
  derived and/or modified protein sequence (opt5) from LASV(G2363-SLE-2012;Clade IV)__AIT17274__GPCstabilized
augggccagaucgugaccuucuuucaagaggucccccacguuauugaagaggugaugaacaucgugcugauugcccucagcauccuggcuguccuuaaggggcuguacaauguggccacaugcggacucacgggccugguugcguuccuucugcucugugggagauccugcaccacaacccuguauaaaggaguguacgaacugcaggcucucgagcugaacauggaaacacuuaauaugaccaugccucugucuuguacaaagaacaauagccaucacuauauucgggucggcaacgagaccgggcucgagcugacgcuuaccaauacauccaucaucgaacaucgcuuuugcaaccugucugacgcccacaaaaagaaucucuacgaucaugcccugaugagcauuaucuccaccuuccaccugucuauuccgaacuuuaaucaguaugaggcuaugagcugugacuucaacggaggcaaaaucuccgugcaguacaaucucagccacucuuaugccguugaugcugccaaccauugcggcacaguggcgaaugggguccugcaaaccuuuaugagaauggccuggggaggcuccuacauugcucuugacagcgggugcaacggaugggauuguaucaugacgucuuaccaguaucugauuauccagaacacaaccugggaagaccacugccaguucucccgccccagcccuaucggcuaccucgggcugcuuucucaaagaacacgggauauuuauaucucccgcagacgccggggaaccuuuaccuggacacugagcgacuccgagggcaaggauacgcccggcggguacugucugacccgguggaugcucauugaggccgaacugaagugcuucggaaauacagcuguggccaaauguaacgagaagcaugacgaagaguuuugcgauaugcuucgccuguucgacuuuaauaaacaggcgauccagagacucaaggcccccgcucagaugucuauucaacugaucaacaaagccgugaaugcucuuaucaacgaucagcugauuaugaagaaucaccuccgggacaucaugugcauuccuuauugcaacuacagcaaguauugguaccugaauaacaccgccacagggaaaaccucccugccccgcuguuggcucgucagcaauggaucuuaccugaacgagacgcacuucuccgacgauaucgagcagcaagccgacaauaugauuacagaaaugcuucagaaggaguauauggaaagacagggcaaaaccccucuggggcucguugaucuguucguguuuagcaccucuuucuaccugaucagcaucuuucuucaucucgugaagauuccgacacaccggcauaucgucggaaaacccugcccuaagccccaccgccugaaccauaugggcauuuguuccugcggccuguauaaacagccuggggcucccgugagauggaagcgguga

SEQ ID NO: 5538 - RNA, 1476 nt, Artificial Sequence
  derived and/or modified protein sequence (opt5) from LASV(G2384-SLE-2012;Clade IV)__AIT17276__GPCstabilized
augggccagaucgugaccuucuuucaagaggucccccacguuauugaagaggugaugaacaucgugcugauugcccucagcauccuggcuguccuuaaggggcuguacaauuucgccacaugcggacucgugggccugguuacguuucuucugcucugugggagauccugcaccacaucucuguauaaaggaguguacgaacugcagacccucgagcugaacauggaaacacuuaauaugaccaugccucugagcuguacaaagaacaauucccaucacuauauuauggucggcaacgagaccgggcucgagcugacgcuuaccaauacaucuaucaucaaccauaaauucugcaaucugagcgacgcgcacaagaaaaaccucuacgaucaugcucugauguccauuaucucuaccuuucaccugagcauuccgaauuucaaccaguaugaagccauguccugugacuuuaauggaggcaagaucagcgugcaguacaaccucucucacuccuaugccggcgaugcugccaaucauugcgggacaguugcuaacggagugcugcaaaccuucaugcggauggccuggggcgggagcuacauugcgcuugacucuggaugcggcaagugggauuguaucaugacguccuaccaguaucugauuauccagaacacaaccugggaggaccauugccaguuuagccgccccucuccuaucggguaccucggacugcuuucccaaagaacacgggauauuuauaucagccgcagacgccggggcaccuucaccuggacacuguccgacucugaaggcaaagauacgcccgggggauacugucugacccgguggaugcucauugaggccgagcugaagugcuuuggcaauacagcugucgccaaauguaacgaaaagcacgacgaggaguucugcgauaugcuucgccuguuugacuucaauaaacaggcuauccagagacucaaggcccccgcgcagaugagcauucaacugaucaacaaggccgugaaugcucuuaucaacgaucagcugauuaugaaaaaucaccuccgggacaucaugugcauuccuuauugcaacuacuccaaguauugguaccugaaucauaccacaaccggaaaaacgagccugcccaaguguuggcucgugucuaacggcuccuaccugaaugaaacacacuucagcgacgauaucgagcagcaagccgacaacaugauuaccgagaugcuucagaaagaauauauggagcgccaggggaagaccccucugggacucgucgaucuguuuguuuucucuaccagcuuuuaccugaucuccaucuuccuucaucucgugaaaauuccgacacacagacauaucgugggcaagucuugccccaagccucaccggcugaaucacaugggcauuuguagcugcgggcuguauaaacagcccggagucccugugcgcuggaagagauga

SEQ ID NO: 5539 - RNA, 1473 nt, Artificial Sequence
  derived and/or modified protein sequence (opt5) from LASV(G2392-SLE-2012;Clade IV)__AIT17280__GPCstabilized
augggccagaucgugaccuucuuucaagaggucccccacguuauugaagaggugaugaacaucgugcugauugcccucagcauccuggcuguccuuaaggggcuguacaauuucgccacaugcggacucgugggccugguuacguuucuucugcucugugggagauccugcaccacaucucuguauaaaggaguguacgaacugcagacccucgagcugaacauggaaacacuuaauaugaccaugccucugagcuguacaaagaacaauucccaucacuauauucgggucggcaacgagaccgggcucgagcugacgcuuaccaauacaucuaucaucgaccauaaauucugcaaccugagcgaugcgcacaagaaaaaucucuacgaccaugcucugauguccauuaucucuaccuuucaccugagcauuccgaacuucaaucaguaugaagccauguccugugauuuuaacggaggcaagaucagcgugcaguacaaucucucucacuccuaugccggcgacgcugccaaccauugcgggacaguugcuaauggagugcugcaaaccuucaugcgcauggccuggggcgggagcuacauugcgcuugauucuggaugcgagugggacuguaucaugacguccuaccaguaucugauuauccagaacacaaccugggauaaccauugccaguuuagcagacccucuccuaucggcuaccucgggcugcuuucccaacggacacgcgacauuuauaucagcagacggcgccggggaaccuucaccuggacacuguccgauucugaaggcaaggacacgcccggcggguacugucugacccgcuggaugcucauugaggccgagcugaaaugcuuuggaaauacagcugucgccaaguguaacgaaaaacacgaugaggaguucugcgacaugcuuagacuguuugauuucaauaagcaggcuauccagcggcucaaagugcccgcccagaugagcauucaacugaucaacaaggcggugaaugcccuuaucaacgaccagcugauuaugaagaaucaccuccgcgacaucaugugcauuccuuauugcaacuacuccaaauauugguaccugaaucauaccacaaccgggaagacgagccugcccaaauguuggcucgucucuaacggauccuaccugaaugaaacacacuucagcgaugacaucgagcagcaagcugauaacaugauuaccgagaugcuucagaaggaauauauggagagacagggcaaaaccccucuggggcucguugaccuguuuguguucucuaccagcuuuuaccugaucuccaucuuccuucaucucgugaagauuccgacacaccggcauaucgucggaaaaucuugccccaagccucaccgccugaaucacaugggcauuuguagcugcggcuuuuauaagcagcccggggugccuguuaaauggaagagauga

SEQ ID NO: 5540 - RNA, 1476 nt, Artificial Sequence
  derived and/or modified protein sequence (opt5) from LASV(G2405-SLE-2012;Clade IV)__AIT17284__GPCstabilized
augggccagaucgugaccuucuuucaagaggucccccacguuauugaagaggugaugaacaucgugcugauugcccucagcguccuggcugugcuuaaggggcuguacaauuucgccacaugcggaaucguuggccucgugacguuucugcuucugugugggagauccugcaccacaucucucuauaaaggagucuacgaacugcagacccuggagcucaacauggaaacacugaauaugaccaugccucuuagcuguacaaagaacaauucccaucacuauauuauggugggcaacgacaccgggcuggagcucacgcugaccaauacaucuaucaucaaccauaaauucugcaaucuuagcgaugcgcacaagaaaaaccuguacgaccaugcucucauguccauuaucucuaccuuucaccugagcauuccgaauuucaaccaguaugaggccauguccugugauuuuaauggaggcaagaucagcguucaguacaaccugucucacuccuaugccggcgacgcugccgaucauugcgggacaguggcuaauggaguccuccaaaccuucaugcggauggccuggggcgggagcuacauugcgcuggacucuggaugcggcagaugggauuguaucaugacguccuaccaguaucuuauuauccagaacacaaccugggaagaccacugccaguuuagccggcccucuccuaucggguaccugggacuccugucccaacgcacaagagauauuuauaucagccggcgccgccggggcaccuucaccuggacacucuccgacucugagggcaaggauacgcccgggggauacugucugaccagauggaugcugauugaagccgagcucaaaugcuuuggcaacacagcuguggccaaguguaaugagaaacaugacgaagaguucugcgauaugcugcggcuuuuugacuucaacaagcaggcuauccagcgccugaaagcccccgcgcagaugagcauucaacucaucaauaaggccgugaacgcucugaucaaugaccagcuuauuaugaagaaccaccugagagauaucaugugcauuccuuauugcaauuacuccaaauauugguaccucaaccacaccacaaccggaaagacgagccugcccaaauguuggcuggucucuaauggcuccuaccucaacgagacacauuucagcgacgauaucgaacagcaagccgacaauaugauuaccgagaugcugcagaaggaguauauggaacggcaggggaaaaccccucuuggacugguugaucucuuuguguucucuaccagcuuuuaccugaucuccaucuuccugcaccuugugaagauuccgacacaucgccacaucgucggcaaacccugcccuaagccccauagacucaaccacaugggcauuuguucuugcgggcuguauaagcagccuggagugcccguuaaauggaagcgguga

SEQ ID NO: 5541 - RNA, 1476 nt, Artificial Sequence
  derived and/or modified protein sequence (opt5) from LASV(G2427-SLE-2012;Clade IV)__AIT17288__GPCstabilized
augggccagaucgugaccuucuuucaagaggucccccacguuauugaagaggugaugaacaucgugcugauugcccucagcauccuggcuguccuuaaggggcuguacaauuucgccacaugcggacucgugggccugguuacguuucuucugcucugugggagauccugcaccacaucucuguauaaaggaguguacgaacugcagacccucgagcugaacauggaaacacuuaauaugaccaugccucugagcuguacaaagaacaauucccaucacuauauuauggucggcaacgagaccgggcucgagcugacgcuuaccaauacaucuaucaucaaccauaaauucugcaaucugagcgacgcgcacaagaaaaaccucuacgaucaugcucugauguccauuaucucuaccuuucaccugagcauuccgaauuucaaccaguaugaagccauguccugugacuuuaauggaggcaagaucagcgugcaguacaaccucucucacuccuaugccguugaugcugccaaucauugcggcacaguggcuaacgggguccugcaaaccuucaugcggauggccuggggaggcggguacauugcgcuugacagcggaugcggcaacugggauuguaucaugacgucuuaccaguaucugauuauccagaauacaaccugggaggaccacugccaguuuuccagacccagcccuaucggguaccucggacugcuuucucaacggacacgcgauauuuauaucuccagacggcgccggggcaccuucaccuggacacugagcgacuccgaaggcaaggauacgcccgggggauacugucugacccgcuggaugcucauugaggccgagcugaaaugcuuuggcaacacagcuguggccaaguguaaugaaaaacaugacgaggaguucugcgauaugcuuagacuguuugacuucaacaagcaggcuauccagcggcucaaagcccccgcgcagaugucuauucaacugaucaauaaggccgugaacgcucuuaucaaugaucagcugauuaugaagaaccaccuccgcgacaucaugugcauuccuuauugcaauuacagcaaauauugguaccugaaccacaccgucacaggaaagaccucccugcccaaauguuggcucguuagcaauggcucuuaccugaacgaaacgcauuucuccgacgauaucgagcagcaagccgacaauaugauuacagagaugcuucagaaggaauauauggagagacaggggaaaaccccucugggacucguggaucuguuuguguucagcaccucuuuuuaccugaucagcaucuuccuucaccucgucaagauuccgacacaucggcacaucgugggcaaauccugccccaagccucaucgccugaaccacaugggcauuuguucuugcgggcuguauaagcagcccggaguuccugugagauggaaacgguga

SEQ ID NO: 5542 - RNA, 1476 nt, Artificial Sequence
  derived and/or modified protein sequence (opt5) from LASV(G2431-SLE-2012;Clade IV)__AIT17292__GPCstabilized
augggccagaucgugaccuucuuucaagaggucccccacguuauugaagaggugaugaacaucgugcugauugcccucagcaucauggcuguccugaaggggcuuuacaauauugccacaugcggacuggugggccucguuacguuccugcuucugugugggagauccugcaccacaacccucuauaaaggaguguacgaacugcagacacuggagcucaacauggaaacccugaauaugacaaugccucuuucuuguaccaagaacaauagccaucacuauaucauggucggcaacgagacggggcuggagcucacccugacaaauaccuccaucauuaaccauaaauuuugcaaucuuucugacgcgcacaagaaaaaccuguacgaucaugcucucaugagcaucauuuccacauuccaccugucuaucccgaauuuuaaccaguaugaagccaugagcugugacuucaauggaggcaagauuuccgugcaguacaaccugagccacucuuaugccggcgaugcugccaaucauugcgggaccguugcuaacggagugcuccaaacguuuaugcggauggccuggggcggguccuacaucgcgcuggacagcggaugcggcgggugggauuguauuaugacaucuuaccaguaucuuaucauccagaacaccacaugggaggaccauugccaguucacccgccccuccccuauuggauaccugggccuccugagccaaagaacccgggauaucuauauuucucgcagacgccggggcacauuuacguggacccucuccgacagcgaagggaaugauacacccggaggcuacugucugacccgguggaugcugaucgaggccgagcucaagugcuucgggaacacagcugucgccaaauguaaugaaaagcacgacgaggaauuuugcgauaugcugcgccuuuucgacuuuaacaaacaggcuauucagagacugcgggcccccgcgcagauguccauccaacucaucaauaaggccgugaacgcucugauuaaugaucagcuuaucaugaaaaaccaucugcgcgacauuaugugcaucccuuauugcaauuacucuaaguauugguaccucaaccacaccacgacaggcagaaccagccugccccgguguuggcugguguccaaugggagcuaccucaacgaaacccacuucucugacgauauugagcagcaagccgacaauaugaucacagagaugcugcagaaggaauauauggagcgccagggaaaaaccccucuuggccuggucgaucucuucguuuuuagcacauccuucuaccugaucucuauuuuucugcaucuuaucaagauuccgacgcacagacauaucgugggcaaacccugcccuaagccccaccggcucaaccacauggggguguguagcugcggacuguauaaacagccuggcguccccgugcgcuggaagagauga

SEQ ID NO: 5543 - RNA, 1476 nt, Artificial Sequence
  derived and/or modified protein sequence (opt5) from LASV(G2511-SLE-2012;Clade IV)__AIT17294__GPCstabilized
augggccagaucgugaccuucuuucaagaggucccccacguuauugaagaggugaugaacaucgugcugauugcccucagcauccuggcuguccuuaaggggcuguacaaucucgccacaugcggacuggugggccuuguuacguuccugcuccugugugggagauccugcaccacaucucuguauaaaggaguguacgaacuccagacccuggagcuuaacauggaaacacugaauaugaccaugccucucagcuguacaaagaacaauucccaucacuauauuauggucggcaacgagaccgggcuggagcuuacgcugaccaauacaucuaucaucgaccauaaauuuugcaaccucagcgaugcgcacaagaaaaaucuguacgaccaugcucugauguccauuaucucuaccuuccaccucagcauuccgaacuuuaaucaguaugaagccauguccugugauuucaacggaggcaagaucagcgugcaguacaaucugucucacuccuaugccggcgacgcugccaaccauugcgggacaguugcuaauggagugcuucaaaccuuuaugcggauggccuggggcgggagcuacauugcgcuggauucuggaugcggcgggugggacuguaucaugacguccuaccaguaucucauuauccagaacacaaccugggaggaucacugccaguucagcagacccucuccugucggauaccugggccuucugucccaacggacacgcgacaucuauauuagcagacggcgccggggcaccuuuaccuggacacuguccgauucugaagggaaggacacgcccggaggcuacugucucacccgcuggaugcugaucgaggccgagcuuaaaugcuucgggaacacagcuguggccaaguguaaugaaaaacaugaugaggaauuuugcgacaugcugagacucuucgauuuuaacaagcaggcuauucagcggcugaaaacccccgcccagaugagcauccaacuuauuaauaaggcggugaacgcccugaucaaugaccagcucaucaugaagaaccaucugcgcgacauuaugugcaucccuuauugcaauuacuccaaauauugguaccugaaccacacaaccacgggcaagacaagccuccccagauguuggcuggucucuaauggguccuaccuuaacgaaacccacuucagcgaugacauugagcagcaagcugauaauaugaucaccgagaugcugcagaaagaauauauggagcggcagggaaagacaccucucggccugguugaccuguucguguuuucuaccagcuucuaccuuauuuccaucuuucuccaccuggugaaaaucccgacacaucgccacauugucggcaagcccugcccuaaaccccauagacugaaccacauggggaucuguucuugcggacucuauaagcagccuggcgugcccguuaaguggaaacgguga

SEQ ID NO: 5544 - RNA, 1476 nt, Artificial Sequence
  derived and/or modified protein sequence (opt5) from LASV(G2554-SLE-2012;Clade IV)__AIT17298__GPCstabilized
augggccagaucgugaccuucuuucaagaggucccccacguuauugaagaggugaugaacaucgugcugauugcccucagcauccuggcuguccuuaaggggcuguacaauauugccacaugcggacuccugggccuuguguguuuccugcuccugugcgggagauccuguacgaccucucuguauaaaggaguuuacgaacuccagacacuggagcuuaacauggaaacccugaauaugacaaugccucucagcugcaccaagaacaauucccaucacuauaucauggugggcaacgagacagggcuggagcuuacccugacgaauaccucuaucauuaaccauaaauuuuguaaucucagcgacgcgcacaagaaaaaccuguacgaucaugcucugauguccaucauuucuacauuccaccucagcaucccgaauuuuaaccaguaugaagccauguccugcgacuucaauggaggcaagauuagcguccaguacaaccugucucacuccuaugccguggaugcugccagccauuguggcaccaucgcuaaugggguucuucaaacauuuaugcggauggccuggggaggcucuuacauugcgcuggacuccgggugcggaggcugggauugcaucaugaccagcuaccaguaucucaucauucagaacacgacaugggaggaccauugucaguucucucgccccuccccuaucggguaccugggacuucugagccaaagaacccgggauauuuauaucucccgcagacgccggggcacauuuaccuggacccugucugacagcgaaggcaaggauacacccgggggauacugccucacgcgguggaugcugauugaggccgagcuuaaauguuucggcaacaccgcuguggccaagugcaaugaaaaacacgacgaggaauuuugcgauaugcugcgccucuucgacuuuaacaagcaggcuauccagagacugaaagcccccgcgcagauguccauccaacuuauuaauaaggccgucaacgcucugaucaaugaucagcucauuaugaagaaccaucugcgggacaucaugugcauuccuuauuguaauuacagcaaauauugguaccugaaccacacaaccacaggaaagaccucucuccccaaaugcuggcugguguccaauggcagcuaccuuaacgaaacgcacuucucugacgauaucgagcagcaagccgacaauaugaucacagagaugcugcagaaggaauauauggagcgccaggggaaaaccccucucggacugguggaucuguucgucuuuagcaccuccuucuaccuuauuucuaucuuucuccaucugguuaagauuccgacacacagacauguggugggcaaacccuguccuaagccccaccggcugaaccacaugggcaucugcagcugugggcucuauggacagccuggcguccccgugaaguggaaacgcuga

SEQ ID NO: 5545 - RNA, 1476 nt, Artificial Sequence
  derived and/or modified protein sequence (opt5) from LASV(G2557-SLE-2012;Clade IV)__AIT17302__GPCstabilized
augggccagaucgugaccuucuuucaagaggucccccacguuauugaagaggugaugaacaucgugcugauugcccucagccugcuugcuguccugaaggggcucuacaauguggccacaugcggacugaucggccuuguuacguuccugcuccugugugggagauccugcaccacaaaccuguauaaaggaguguacgaacuccagacccuggagcuuaauauggaaacacugaacaugaccaugccucucucuuguacaaagaauaacagccaucacuauauuauggucggcaaugagaccgggcuggagcuuacgcugaccaacacauccaucaucucucauaaauuuugcaaucucagcgacgcgcacaagaaaaaccuguacgaucauacccugauguccauuaucucuacauuccaccucagcauuccgaauuuuaaccaguaugaagcuauguccugugacuucaauggaggcaagaucagcgugcaguacaaccugucucacuccuaugccguugaugccgcuaaucauugcggcaccguggccaacgggguccuucaaacguuuaugcggauggcuuggggaggcagcuacauugcccuggacucugggugcggaaacugggauuguaucaugacauccuaccaguaucucauuauccagaauaccacaugggaggaccacugccaguucagcagacccucuccuaucggcuaccuggggcuucugucccaacggacccgcgauauuuauaucagcagacggcgccggggaaccuuuacauggacgcuguccgacucugaaggcaacgauacccccggcggguacugucucacacgcuggaugcugauugaggcggagcuuaagugcuucggaaauaccgccguggcuaaauguaacgaaaagcaugacgaggaauuuugcgauaugcugagacucuucgacuuuaauaaacaggccauccagcggcugaaggcucccgcccagaugagcauucaacuuaucaacaaagcggugaaugcccugaucaacgaucagcucauuaugaagaaucaucugcgcgacaucaugugcauuccuuauugcaacuacuccaaguauugguaccugaaucacacaaccacggggaaaacaagccuccccaaguguuggcuggucucuaacggauccuaccuuaaugaaacccacuucagcgacgauaucgagcagcaagcugacaacaugauuaccgagaugcugcagaaagaauauauggagagacagggcaagacaccucucgggcugguugaucuguucguguuuucuaccagcuucuaccuuaucuccaucuuucuccaccuggugaaaauuccgacacaucggcacaucgucggaaagcccugcccuaaaccccaucgccugaaucacaugggcauuuguucuugcggccucuauaagcagccuggggugcccguuagauggaagcgguga

SEQ ID NO: 5546 - RNA, 1476 nt, Artificial Sequence
  derived and/or modified protein sequence (opt5) from LASV(G2587-SLE-2012;Clade IV)__AIT17310__GPCstabilized
augggccagaucgugaccuucuuucaagaggucccccacguuauugaagaggugaugaacaucgugcugauugcccucagcauccuggcuguccuuaaggggcuguacaaucucgccacaugcggacuggugggccuuguuacguuccugcuccugugugggagauccugcaccacaucucuguauaaaggaguguacgaacuccagacccuggagcuuaacauggaaacacugaauaugaccaugccucucagcuguacaaagaacaauucccaucacuauauuauggucggcaacgagaccgggcuggagcuuacgcugaccaauacaucuaucaucaaccauaaauuuugcaaucucagcgacgcgcacaagaaaaaccuguacgaucaugcucugauguccauuaucucuaccuuccaccucagcauuccgaauuuuaaccaguaugaagccauguccugugacuucaauggaggcaagaucagcgugcaguacaaccugucucacuccuaugccggcgaugcugccacacauugcgggaccguugcuaauggagugcuucaaacguuuaugcggauggccuggggcgggagcuacauugcgcuggacucuggaugcggcaagugggauuguaucaugacauccuaccaguaucucauuauccagaacaccacaugggaggaccacugccaguucagcagacccucuccuaucggguaccugggacuucugucccaacggacccgcgauauuuauaucagcagacggcgccggggcaccuuuacauggacgcuguccgacucugaaggcaaagauacccccgggggauacugucucacacgcuggaugcugauugaggccgagcuuaagugcuucggcaacaccgcugucgccaaauguaaugaaaagcaugacgaggaauuuugcgauaugcugagacucuucgacuuuaacaaacaggcuauccagcggcugaagacacccgcccagaugagcauucaacuuaucaauaaggcggugaacgcccugaucaaugaucagcucauuaugaaaaaccaucugcgcgacaucaugugcauuccuuauugcaauuacuccaaguauugguaccugaaccacaccacgacaggaaaaaccagccuccccagauguuggcuggugucuaauggcuccuaccuuaacgaaacccacuucagcgacgauaucgagcagcaagcugacaauaugauuacagagaugcugcagaaggaauauauggagcggcaggggaaaaccccucucggacuggucgaucuguucguuuuuagcacaucuuucuaccuuaucuccaucuuucuccaccuggugaagauuccgacgcaucgccacaucgugggcaaacccugcccuaagccccauagacugaacuauaugggcauuuguucuugcgggcucuacaagcagccuggaguccccgugaaauggaagcgguga

SEQ ID NO: 5547 - RNA, 1476 nt, Artificial Sequence
  derived and/or modified protein sequence (opt5) from LASV(G2612-SLE-2012;Clade IV)__AIT17314__GPCstabilized
augggccagaucgugaccuucuuucaagaggucccccacguuauugaagaggugaugaacaucgugcugauuacacucagcauccuggccguccuuaaggggcuguacaauguggcuacgugcggacucguuggccuggugaccuuccuucugcucugugggagauccugcacaaccucucuguauaaaggagucuacgaacugcagacacucgagcugaacauggaaacccuuaauaugacaaugccucugagcuguaccaagaacaauucccaucacuauauuauggugggcaacgagacggggcucgagcugacccuuacaaauaccucuaucaucaaccauaaauuuugcaaucugagcgacgcccacaagaaagaucucuacgaccaugcgcugauguccauuaucucuacauuccaccugagcauuccgaacuuuaaucaguaugaagcuauguccugugauuucaacggaggcaagaucagcguucaguacaaucucucucacuccuaugccguggacgccgcuaaccauugcggcaccgucgccaauggggugcugcaaacguuuaugcggauggcuuggggaggcagcuacauugcccuugauucugggugcggaggcugggacuguaucaugacauccuaccaguaucugauuauccagaacaccacaugggaggaucacugccaguucagcagacccucuccuaucggguaccucggacugcuuucccaacggacccgcgacauuuauaucagcagacggcgccggggcaccuuuacauggacgcuguccgauucugaaggcaacgacacccccgggggauacugucugacacgcuggaugcucauugaggcggagcugaagugcuucggcaauaccgccguggcuaaauguaacgaaaagcaugaugaggaauuuugcgacaugcuuagacuguucgauuuuaauaaacaggccauccagcggcucaaggcucccgcccagaugagcauucaacugaucaacaaagcggucaaugcccuuaucaacgaccagcugauuaugaagaaucaccuccgcgacaucaugugcauuccuuauugcaacuacuccaaguauugguaccugaaucacacaaccacgggaaaaacaagccugcccaaguguuggcucguuucuaacggcuccuaccugaaugaaacccauuucagcgaugacaucgagcagcaagcugauaacaugauuaccgagaugcuucagaaagaauauauggagagacaggggaagacaccucugggacucguggaccuguucguguuuucuaccagcuucuaccugaucuccaucuuucuucaccucgucaaaauuccgacacaucggcacaucgugggcaagcccugcccuaaaccccaucgccugaaucacaugggcauuuguucuugcgggcuguauaagcagccuggaguucccgugaaguggaaaagauga

SEQ ID NO: 5548 - RNA, 1476 nt, Artificial Sequence
  derived and/or modified protein sequence (opt5) from LASV(G2615-SLE-2012;Clade IV)__AIT17318__GPCstabilized
augggccagaucgugaccuucuuucaagaggucccccacguuauugaagaggugaugaacaucgugcugauugcccucagccugcuugcuguccugaaggggcucuacaauguggccacaugcggacugaucggccuuguuacguuccugcuccugugugggagauccugcaccacaaaccuguauaaaggaguguacgaacuccagacccuggagcuuaauauggaaacacugaacaugaccaugccucucucuuguacaaagaauaacagccaucacuauauuauggucggcaaugagaccgggcuggagcuuacgcugaccaacacauccaucaucaaucauaaauuuugcaaccucucugacgcgcacaagaaaaaucuguacgaucaugcucugaugagcauuaucuccaccuuccaccucucuauuccgaacuuuaaucaguaugaagccaugagcugugacuucaacggaggcaagaucuccgugcaguacaaucugagccacucuuaugccguugaugcugccaaccauugcggcacaguggcuaacgggguccuucaaaccuuuaugcggauggccuggggaggcuccuacauugcgcuggacagcgggugcggaaauugggauuguaucaugacgucuuaccaguaucucauuauccagaacaucacaugggaggaccacugccaguucuccagacccagcccuauuggcuaccuggggcuucugucucaacggacccgcgauaucuauauuuccagacggcgccggggaacauuuaccuggacccugagcgacuccgaaggcaaugauacacccggcggguacugucucacgcgcuggaugcugaucgaggccgagcuuaagugcuucggaaacaccgcuguggccaaauguaaugaaaagcaugacgaggaauuuugcgauaugcugagacucuucgacuuuaacaaacaggcuauucagcggcugaaggcccccgcgcagaugucuauccaacuuaucaauaaagccgugaacgcucugauuaaugaucagcucaucaugaagaaccaucugcgcgacauuaugugcaucccuuauugcaauuacagcaaguauugguaccugaaccacacaaccacagggaaaaccucccuccccaaguguuggcuggucagcaauggaucuuaccuuaacgaaacgcacuucuccgacgauauugagcagcaagccgacaauaugaucacagagaugcugcagaaagaauauauggagagacagggcaagaccccucucgggcugguugaucuguucguguuuagcaccucuuucuaccuuaucagcauuuuucuccaccuggugaaaaucccgacacaucggcacauugucggaaagcccugcccuaaaccccaucgccugaaccacaugggcaucuguuccugcggccucuauaagcagccuggggugcccguuagauggaagcgguga

SEQ ID NO: 5549 - RNA, 1476 nt, Artificial Sequence
  derived and/or modified protein sequence (opt5) from LASV(G2723-SLE-2012;Clade IV)__AIT17322__GPCstabilized
augggccagaucgugaccuucuuucaagaggucccccacguuauugaagaggugaugaacaucgugcugauugcccucagccugcuugcuguccugaaggggcucuacaauguggccacaugcggacugaucggccuuguuacguuccugcuccugugugggagauccugcaccacaaaccuguauaaaggagcguacgaacuccagacccuggagcuuaauauggaaacacugaacaugaccaugccucucucuuguacaaagaauaacagccaucacuauauuauggugggcaaugagaccgggcuggagcuuacgcugaccaacacauccaucaucaaucauaaauuuugcaaccucucugacgcucacaagaaaaaucuguacgaucauacccugaugagcauuaucuccacauuccaccucucuauuccgaacuuuaaucaguaugaagccaugagcugugacuucaacggaggcaagaucuccguccaguacaaucugagccacucuuaugccguggaugcugccaaccauugcggcaccguugcuaacggggugcuucaaacguuuaugcggauggccuggggaggcuccuacauugcgcuggacagcgggugcggaaauugggauuguaucaugacaucuuaccaguaucucauuauccagaacaccacaugggaggaccacugccaguucuccagacccagcccuaucggcuaccuggggcuucugucucaacggacccgcgauauuuauaucuccagacggcgccggggaaccuuuacauggacgcugagcgacuccgaaggcaaugauacccccggcggguacugucucacacgcuggaugcugauugaggccgagcuuaagugcuucggaaacaccgcugucgccaaauguaaugaaaagcaugacgaggaauuuugcgauaugcugagacucuucgacuuuaacaaacaggcuauccagcggcugaaggcccccgcgcagaugucuauucaacuuaucaauaaagccgugaacgcucugaucaaugaucagcucauuaugaagaaccaucugcgcgacaucaugugcauuccuuauugcaauuacagcaaguauugguaccugaaccacacaaccacggggaaaacaucccuccccaaguguuggcuggugagcaauggaucuuaccuuaacgaaacccacuucuccgacgauaucgagcagcaagccgacaauaugauuaccgagaugcugcagaaagaauauauggagagacagggcaagacaccucucgggcuggucgaucuguucguuuuuagcaccucuuucuaccuuaucagcaucuuucuccaccuggugaaaauuccgacacaucggcacaucgugggaaagcccugcccuaaaccccaucgccugaaccacaugggcauuuguuccugcggccucuauaagcagccugggguccccgugagauggaagcgguga

SEQ ID NO: 5550 - RNA, 1476 nt, Artificial Sequence
  derived and/or modified protein sequence (opt5) from LASV(G2868-SLE-2012;Clade IV)__AIT17328__GPCstabilized
augggccagaucgugaccuucuuucaagaggucccccacguuauugaagaggugaugaacaucgugcugauuacacucagcauccuggccguccuuaaggggcuguacaauauugcuacgugcggacucgugggccugguuaccuuccuucugcucugugggaaauccugcacaaccucucuguauaagggaguguacgaacugcagacacucgagcugaacauggaaacccuuaauaugacaaugccucugagcuguaccaaaaacaauucccaucacuauaucagagucggcaacgagacggggcucgagcugacccuuacaaauaccucuaucauuaaccauaaguuuugcaaucugagcgacgcccacaaaaagaaccucuacgaucaugcgcugauguccaucauuucuacauuccaccugagcaucccgaauuuuaaccaguaugaagcuauguccugugacuucaauggaggcaagauuagcgugcaguacaaccucucucacuccuaugccguugaugccgcuaaucauugcggcaccguggccaacgggguccugcaaacguuuaugcggauggcuuggggaggcagcuacaucgcccuugacucugggugcggaaacugggauuguauuaugacauccuaccaguaucugaucauccagaauaccacaugggaggaccauugccaguucagccgccccucuccuauuggcuaccucgggcugcuuucccaaagaacccgggauaucuauauuagccgcagacgccggggaaccuuuacauggacgcuguccgacucugaaggcaacgaugcgcccggcggguacugucugacccgguggaugcucaucgaggccgagcugaaaugcuucggaaauacagcuguggccaaguguaacgaaaaacacgacgaggaauuuugcgauaugcuucgccuguucgacuuuaauaagcaggcuauucagagacucaaagcccccgcgcagaugagcauccaacugaucaacaaggccgugaaugcucuuauuaacgaucagcugaucaugaagaaucaccuccgggacauuaugugcaucccuuauugcaacuacuccaaauauugguaccugaaucauaccacaaccgggaagacgagccugcccaaauguuggcucgucucuaacggauccuaccugaaugaaacacacuucagcgacgauauugagcagcaagccgacaacaugaucaccgagaugcuucagaaggaauauauggagcgccagggcaaaaccccucuggggcucguugaucuguucguguuuucuaccagcuucuaccugaucuccauuuuucuucaucucgugaagaucccgacacacagacaugucgugggaaaaucuugccccaagccucaccggcugaaucacaugggcauuuguagcugcggccuguauaagcagcccgggguuccugugaaauggaagcgcuga

SEQ ID NO: 5551 - RNA, 1476 nt, Artificial Sequence
  derived and/or modified protein sequence (opt5) from LASV(G2903-SLE-2012;Clade IV)__AIT17332__GPCstabilized
augggccagaucgugaccuucuuucaagaggucccccacguuauugaagaggugaugaacaucgugcugauugcccucagcauccuggcuguccuuaaggggcuguacaaucucgccacaugcggacuggugggccuuguuacguuccugcuccugugugggagauccugcaccacaucucuguauaaaggaguguacgaacuccagacccuggagcuuaacauggaaacacugaauaugaccaugccucucagcuguacaaagaacaauucccaucacuauauucgggucggcaacgagaccgggcuggagcuuacgcugaccaauacaucuaucaucaaccauaaauuuugcaaucucagcgacgcgcacaagaaaaaccuguacgaucaugcucugauguccauuaucucuaccuuccaccucagcauuccgaauuuuaaccaguaugaagccauguccugugacuucaauggaggcaagaucagcgugcaguacaaccugucucacuccuaugccguugaugcugccaaucauugcggcacaguggcuaacgggguccuucaaaccuuuaugcgcauggccuggggaggcagcuacauugcgcuggacucugggugcggaagaugggauuguaucaugacguccuaccaguaucucauuauccagaacacaaccugggaggaccauugccuguucagccggcccucuccuaucggcuaccuugggcugcucucccagcgcacaagagauauuuauaucagccggcgccgccggggaaccuuuaccuggacacucuccgacucugaaggcagagauacgcccggcggguacugucugacccgguggaugcuuauugaggccgagcugaagugcuucggaaauacagcuguggccaaauguaacgaaaagcacgacgaggaauuuugcgauaugcuccgccuguucgacuuuaauaaacaagcuauccagagacuuaaggcccccgcgcagaugagcauucagcugaucaacaaagccgugaaugcucucaucaacgaucaacugauuaugaagaaucaucugcgggacaucaugugcauuccuuauugcaacuacuccaaguauugguaccucaaucacaccacaaccgggcgcacgagccugcccagauguuggcuugucucuaacggauccuaccugaaugaaacacacuucagcgacgauaucgagcagcaggccgacaacaugauuaccgagaugcuccaaaaagaauauauggagcggcagggcaagaccccucuggggcugguugaucuuuucguguuuucuaccagcuucuaccucaucuccaucuuucugcaucuggugaaaauuccgacacaccgccauaucgucggaaagucuugccccaaaccucacagacucaaucacaugggcauuuguagcugcggccuguauaagcagcccggggugccuguuaaauggaagcgguga

SEQ ID NO: 5552 - RNA, 1476 nt, Artificial Sequence
  derived and/or modified protein sequence (opt5) from LASV(G2944-SLE-2012;Clade IV)__AIT17340__GPCstabilized
augggccagaucgugaccuucuuucaagaggucccccacguuauugaagaggugaugaacaucgugcugauugcccucagcauccuggcuguccuuaaggggcuguacaauuucgccacaugcggacucgugggccugguuacguuucuucugcucugugggagauccugcaccacaucucuguauaaaggaguguacgaacugcagacccucgagcugaacauggaaacacuuaauaugaccaugccucugagcuguacaaagaacaauucccaucacuauauuauggucggcaacgagaccgggcucgagcugacgcuuaccaauaucucuaucauuaaccauaaauucugcaaucugagcgacgcgcacaagaaaaaccucuacgaucaugcucugauguccaucauuucuacauuucaccugagcaucccgaauuucaaccaguaugaagccauguccugugacuuuaauggaggcaagauuagcgugcaguacaaccucucucacuccuaugccggcgaugcugccaaucauugcgggaccguugcuaacggagugcugcaaacauucaugcggauggccuggggcgggagcuacaucgcgcuugacucuggaugcggcgagugggauuguauuaugaccuccuaccaguaucugaucauccagaacacgacaugggaagaccacugccaguuuagcagacccucuccuauuggguaccucggacugcuuucccaacggacccgcgauaucuauauuagcagacggcgccggggcacauucaccuggacccuguccgacucugagggcaaggauacacccgggggauacugucugacgcgcuggaugcucaucgaggccgaacugaaaugcuuuggcaauaccgcugucgccaaguguaacgagaaacaugacgaagaguucugcgauaugcuuagacuguuugacuucaauaagcaggcuauucagcggcucaaagcccccgcgcagaugagcauccaacugaucaacaaggccgugaaugcucuuauuaacgaucagcugaucaugaagaaucaccuccgcgacauuaugugcaucccuuauugcaacuacuccaaauauugguaccugaaucacacaaccacaggaaagaccagccugcccaaauguuggcucgugucuaacggcuccuaccugaaugagacgcauuucagcgacgauauugagcagcaagccgacaacaugaucacagaaaugcuucagaaggaguauauggaaagacaggggaaaaccccucugggacucgucgaucuguuuguuuucucuaccagcuuuuaccugaucuccauuuuccuucaccucgugaagaucccgacacaucggcacauugugggcaaacccugcccucgcccccauagacugaaucacaugggcaucuguucuugcgggcuguauaagcagccuggaguccccgugaaguggaaacgguga

SEQ ID NO: 5553 - RNA, 1476 nt, Artificial Sequence
  derived and/or modified protein sequence (opt5) from LASV(G3010-SLE-2013;Clade IV)__AIT17344__GPCstabilized
augggccagaucgugaccuucuuucaagaggucccccacguuauugaagaggugaugaacaucgugcugauugcccucagcauccuggcuguccuuaaggggcuguacaauuucgccacaugcggacucgugggccugguuacguuucuucugcucugugggagauccugcaccacaucucuguauaaaggaguguacgaacugcagacccucgagcugaacauggaaacacuuaauaugaccaugccucugagcuguacaaagaacaauucccaucacuauauuauggucggcaacgagaccgggcucgagcugacgcuuaccaauacaucuaucaucaaccauaaauucugcaaucugagcgacgcgcacaagaaaaaccucuacaaucaugcucugauguccauuaucucuaccuuucaccugagcauuccgaacuucaaucaguaugaagccauguccugugauuuuaacggaggcaagaucagcgugcaguacaaucucucucacuccuaugccggcgacgcugccagccauugcgggacaguugcuaacggagugcugcaaaccuucaugcggauggccuggggcgggucuuacauugcgcuugauuccggaugcggcaagugggacuguaucaugacgagcuaucaguaccugauuauccagaacacaaccugggaggaucacugccaguuuucucgccccuccccuaucggguaucucggacugcuuagccaaagaacacgggacauuuacaucucccgcagacgccggggcaccuucaccuggacacugucugauagcgaaggcaaagacacgcccgggggauauugucugacccgguggaugcucauugaggccgagcugaagugcuuuggcaauacagcugucgccaaauguaacgaaaagcaugaugaggaguucugcgacaugcuucgccuguuugauuucaauaaacaggcuauccagagacucaagacccccgcccagauguccauucaacugaucaacaaggcggugaaugcccuuaucaacgaccagcugauuaugaaaaaucaccuccgggauaucaugugcauuccuuacugcaacuauagcaaguacugguaccugaaucacacaaccacgggaaaaacaucucugcccaaguguuggcucguguccaacggcagcuaucugaaugaaacccauuucucugacgacaucgagcagcaagcugauaacaugauuaccgagaugcuucagaaagaauacauggagcgccaggggaagacaccucugggacucgucgaccuguuuguuuucagcaccuccuuuuaucugaucucuaucuuccuucaccucgugaaaauuccgacacauagacacaucgugggcaagagcugccccaagccucaucggcugaaucacaugggcauuuguuccugcgggcuguacaaacagcccggagucccugugcgcuggaagagauga

SEQ ID NO: 5554 - RNA, 1476 nt, Artificial Sequence
  derived and/or modified protein sequence (opt5) from LASV(G3016-SLE-2013;Clade IV)__AIT17348__GPCstabilized
augggccagaucgugaccuucuuucaagaggucccccacguuauugaagaggugaugaacaucgugcugauugcccucagcauccuggcuguccuuaaggggcuguacaauauugccacaugcggacucaucggccuggugacguuccuucugcucugugggagauccugcaccacaucucuguauaaaggaguuuacgaacugcagacccucgagcugaacauggaaacacuuaauaugaccaugccucugagcuguacaaagaacaauucccaucacuauaucauggugggcaacgagaccgggcucgagcugacgcuuaccaauacaucuauuaucaaccauaaauuuugcaaucugagcgacgcgcacaagaaaaaccucuacgaucaugcucugauguccauuaucucuaccuuccaccugagcauuccgaauuuuaaccaguaugaagccauguccugugacuucaauggaggcaagaucagcguccaguacaaccucucucacuccuaugccggcgaugcugccaaucauugcgggacaguggcuaacggaguucugcaaaccuuuaugcggauggccuggggcgggagcuacauugcgcuugacucuggaugcggcagaugggauuguaucaugacguccuaccaguaucugaucauucagaacacaaccugggaggaccacugccaguucagccggcccucuccuaucggguaccucggacugcuuucccaacgcacaagagauauuuauaucagccggcgccgccggggcaccuuuaccuggacacuguccgacucugaaggcaaugauacgcccgggggauacugucugaccagauggaugcucauugaggccgagcugaagugcuucggcaacacagcuguggccaaauguaaugaaaagcaugacgaggaauuuugcgauaugcuucggcuguucgacuuuaacaaacaggcuauccagcgccucaaggcccccgcgcagaugagcauccaacugauuaauaaagccgucaacgcucuuaucaaugaucagcugauuaugaagaaccaccucagagacaucaugugcauuccuuauugcaauuacuccaaguauugguaccugaaccacaccacaaccggaaaaacgagccugcccaaguguuggcucgugucuaauggcuccuaccugaacgaaacacauuucagcgacgauaucgagcagcaagccgacaauaugaucaccgagaugcuucagaaagaauauauggagcggcaggggaagaccccucugggacucguggaucuguucgucuuuucuaccagcuucuaccugauuuccaucuuucuucaccucguuaaaauuccgacacaucgccacaucgugggcaagcccugcccuaaaccccauagacugaaccacaugggcauuuguucuugcgggcuguauaagcagccuggagugcccgucaaguggaaacgguga

SEQ ID NO: 5555 - RNA, 1476 nt, Artificial Sequence
  derived and/or modified protein sequence (opt5) from LASV(G3034-SLE-2013;Clade IV)__AIT17350__GPCstabilized
augggccagaucgugaccuucuuucaagaggucccccacguuauugaagaggugaugaacaucgugcugauugcccucagcauccuggcuguccuuaaggggcuguacaauguggccacaugcggacucauuggccugguuacguuccuucugcucugugggagauccugcaccacaacccuguauaaaggaguguacgaacugcaggcgcucgagcugaacauggaaacacuuaauaugaccaugccucugucuuguacaaagaacaauagccaucacuauaucauggucggcaacgagaccgggcucgagcugacgcuuaccaauacauccaucauugaccauaaauuuugcaaccugucugaugcucacaagaaaaaucucuacgaccaugcccugaugagcaucauuuccaccuuccaccugucuaucccgaacuuuaaucaguaugaagccaugagcugugauuucaacggaggcaagauuuccgugcaguacaaucucagccacucuuaugcuggcgacgccgcuaagcauugcgggacaguugccaacggagugcugcaaaccuuuaugcggauggcguggggcggguccuacaucgcccuugauagcggaugcaauggcugggacugugucaugacgucuuaccaguaucugauuauccagaacacaaccugggaggaucacugccaguucuccagacccagcccuaucggguaccucggacugcuuucucaacggacacgcgacauuuauaucuccagacggcgccggggcaccuuuaccuggacacugagcgauuccgaaggcaaagacacgcccgggggauacugucugacccgcuggaugcucauugaggcugagcugaagugcuucggcaacacagccguggcuaaauguaaugaaaagcaugaugaggaauuuugcgacaugcuuagacuguucgauuuuaacaaacaggccauccagcggcucaagacccccgcgcagaugucuauucaacugaucaauaaggccgugaacgcucuuaucaaugaccagcugauuaugaaaaaccaccuccgcgacaucaugugcauuccuuauugcaauuacagcaaguauugguaccugaaccacacagucaccggaaaaacgucccugcccagauguuggcucguuagcaauggcucuuaccugaacgaaacacauuucuccgaugacaucgagcagcaagccgauaauaugauuaccgagaugcuucagaaggaauauaucgagcggcaggggaaaaccccucugggacucguggaccuguucguguuuagcacaucuuucuaccugaucagcauuuuucuucaccucgucaagaucccgacccaucgccacauuaucggcaaacccugcccuaagccccauagacugaaccacaugggcauuuguuccugcgggcuguauaagcagccuggagugcccguucgguggaaacgcuga

SEQ ID NO: 5556 - RNA, 1476 nt, Artificial Sequence
  derived and/or modified protein sequence (opt5) from LASV(G3101-SLE-2013;Clade IV)__AIT17354__GPCstabilized
augggccagaucgugaccuucuuucaagaggucccccacguuauugaagaggugaugaacaucgugcugauugcccucagcauccuggcuguccuuaaggggcuguacaauuucgccacaugcggacucgugggccugguuacguuucuucugcucugugggagauccugcaccacaucucuguauaaaggaguguacgaacugcagacccucgagcugaacauggaaacacuuaauaugaccaugccucugagcuguacaaagaacaauucccaucacuauauuauggucggcaacgagaccgggcucgagcugacgcuuaccaauaucucuaucauuaaccauaaauucugcaaucugagcgacgcgcacaagaaaaaccucuacgaucaugcucugauguccaucauuucuacauuucaccugagcaucccgaauuucaaccaguaugaagccauguccugugacuuuaauggaggcaagauuagcgugcaguacaaccucucucacuccuaugccggcgaugcugccaaucauugcgggaccguugcuaacggagugcugcaaacauucaugcggauggccuggggcgggagcuacaucgcgcuugacucuggaugcggcgggugggauuguauuaugaccuccuaccaguaucugaucauccagaacacgacaugggaggaccauugccaguuuagccgccccucuccuauuggauaccucggccugcuuucccaaagaacccgggauaucuauauuagccgcagacgccggggcacauucaccuggacccuguccgacucugaagggaaggauacacccggaggcuacugucugacgcgguggaugcucaucgaggccgagcugaaaugcuuugggaauaccgcugucgccaaguguaacgaaaaacacgacgaggaguucugcgauaugcuucgccuguuugacuucaauaagcaggcuauucagagacucaaagcccccgcgcagaugagcauccaacugaucaacaaggccgugaaugcucuuauuaacgaucagcugaucaugaagaaucaccuccgggacauuaugugcaucccuuauugcaacuacuccaaauauugguaccugaaucauacaaccacaggcaagaccagccugcccaaauguuggcucgugucuaacggguccuaccugaaugaaacgcacuucagcgacgauauugagcagcaagccgacaacaugaucacagagaugcuucagaaggaauauauggagcgccagggaaaaaccccucugggccucgucgaucuguuuguuuucucuaccagcuuuuaccugaucuccauuuuccuucaucucgugaagaucccgacacacagacauauugugggcaaacccugcccucggccccaccgccugaaucacauggggaucuguucuugcggacuguauaagcagccuggcguccccgugaaguggaaaagauga

SEQ ID NO: 5557 - RNA, 1476 nt, Artificial Sequence
  derived and/or modified protein sequence (opt5) from LASV(G3110-SLE-2013;Clade IV)__AIT17360__GPCstabilized
augggccagaucgugaccuucuuucaagaggucccccacguuauugaagaggugaugaacaucgugcugauugcccucagcauccuggcuguccuuaaggggcuguacaauuucgccacaugcggacucgugggccugguuacguuucuucugcucugugggagauccugcaccacaucucuguauaaaggaguguacgaacugcagacccucgagcugaacauggaaacacuuaauaugaccaugccucugagcuguacaaagaacaauucccaucacuauauucgggucggcaacgagaccgggcucgagcugacgcuuaccaauacaucuaucaucaaccaucgcuucugcaaucugagcgacgcgcacaaaaagaaccucuacgaucaugcucugauguccauuaucucuaccuuucaccugagcauuccgaauuucaaccaguaugaagccauguccugugacuuuaauggaggcaaaaucagcgugcaguacaaccucucucacuccuaugccggcgaugcugccaaucauugcgggacaguugcuaacggagugcugcaaaccuucaugagaauggccuggggcgggagcuacauugcgcuugacucuggaugcggcaagugggauuguaucaugacguccuaccaguaucugauuauccagaacacaaccugggacgaucauugccaguuuagccggcccucuccuaucggguaccucggacugcuuucccaacgcacaagagacauuuauaucagccggcgccgccggggcaccuucaccuggacacuguccgauucugagggcaaggacacgcccgggggauacugucugaccagauggaugcucauugaagccgagcugaaaugcuuuggcaauacagcugucgccaaguguaacgagaaacacgaugaagaguucugcgacaugcuucggcuguuugauuucaauaagcaggcuauccgcagacucaaagcccccgcgcagaugagcauucagcugaucaacaaggccgugaaugcucuuaucaacgaccaacugauuaugaagaaucaccuccgggacaucaugugcauuccuuauugcaacuacuccaaauauugguaccugaaucauaccacaaccggaaagacgagccugccccgcuguuggcucgugucuaacggcuccuaccugaaugagacacacuucagcgaugacaucgaacagcaggccgauaacaugauuaccgagaugcuucaaaaagaguauauggaaagacaggggaagaccccucugggacucgucgaccuguuuguuuucucuaccagcuuuuaccugaucuccaucuuccuucaucucgugaaaauuccgacacaccggcauaucgugggcaagucuugccccaaaccucaccgccugaaucacaugggcauuuguagcugcggguuuuauaagcagcccggagucccugugaaguggaaaagauga

SEQ ID NO: 5558 - RNA, 1476 nt, Artificial Sequence
  derived and/or modified protein sequence (opt5) from LASV(G3148-SLE-2013;Clade IV)__AIT17364__GPCstabilized
augggccagaucgugaccuucuuucaagaggucccccacguuauugaagaggugaugaacaucgugcugauugcccucagcauccuggcuguccuuaaggggcuguacaauuucgccacaugcggacucgugggccugguuacguuucuucugcucugugggagauccugcaccacaucucuguauaaaggaguguacgaacugcagacccucgagcugaacauggaaacacuuaauaugaccaugccucugagcuguacaaagaacaauucccaucacuauauuauggucggcaacgagaccgggcucgagcugacgcuuaccaauacaucuaucaucaaccauaaauucugcaaucugagcgacgcgcacaagaaaaaccucuacgaucaugcucugauguccauuaucucuaccuuucaccugagcauuccgaauuucaaccaguaugaagccauguccugugacuuuaauggaggcaagaucagcgugcaguacaaccucucucacuccuaugccggcgaugcugccaaucauugcgggacaguugcuaacggagugcugcaaaccuucaugcggauggccuggggcgggagcuacauugcgcuugacucuggaugcgauagaugggacuguaucaugacguccuaccaguaucugauuauccagaacacaaccugggaggaucacugccaguuuagccggcccucuccuaucggcuaccucgggcugcuuucccaacgcacaagagacauuuauaucagccggcgccgccggggaaccuucaccuggacacuguccgauucugaaggcaaggacacgcccggcggguacugucugaccagauggaugcucauugaggccgagcugaaaugcuuuggaaauacagcugucgccaaguguaacgaaaaacaugaugaggaguucugcgacaugcuucggcuguuugauuucaauaagcaggcuauccagcgccucaaagcccccgcgcagaugagcauucaacugaucaacaaggccgugaaugcucuuaucaacgaccagcugauuaugaagaaucaccucagagacaucaugugcauuccuuauugcaacuacuccaaauauugguaccugaaucacaccacaaccgggaagacgagccugcccaaauguuggcucgugucuaacggauccuaccugaaugaaacacauuucagcgaugacaucgagcagcaagccgauaacaugauuaccgagaugcuucagaaggaauauaucgagcggcagggcaaaaccccucuggggcucgucgaccuguuuguuuucucuaccagcuuuuaccugaucuccauuuuccuucaccucgugaagaucccgacacaucgccacauugugggaaaacccugcccuaagccccauagacugaaucacaugggcaucuguucuugcggccuguauaagcagccuggggucagcgugaaauggaagcgguga

SEQ ID NO: 5559 - RNA, 1476 nt, Artificial Sequence
  derived and/or modified protein sequence (opt5) from LASV(G3151-SLE-2013;Clade IV)__AIT17368__GPCstabilized
augggccagaucgugaccuucuuucaagaggucccccacguuauugaagaggugaugaacaucgugcugauugcccucagcauccuggcuguccuuaaggggcuguacaauuucgccacaugcggacucgugggccugguuacguuucuucugcucugugggagauccugcaccacaucucuguauaaaggaguguacgaacugcagacccucgagcugaacauggaaacacuuaauaugaccaugccucugagcuguacaaagaacaauucccaucacuauauuauggucggcaacgagaccgggcucgagcugacgcuuaccaauacaucuaucaucaaccauaaauucugcaaucugagcgacgcgcacaagaaaaaccucuacgaucaugcucugauguccauuaucucuaccuuucaccugagcauuccgaauuucaaccaguuugaagccauguccugugacuucaauggaggcaagaucagcgugcaguauaaccucucucacuccuacgccggcgaugcugccaaucauugcgggacaguugcuaacggagugcugcaaaccuuuaugcggauggccuggggcgggagcuauauugcgcuugacucuggaugcuccaagugggauuguaucaugacgagcuaccaguaccugauuauccagaacacaaccugggacgaucauugccaguucucucgccccuccccuaucggcuaucucgggcugcuuagccaaagaacacgggacauuuacaucucccgcagacgccggggaaccuuuaccuggacacugucugauagcgagggcaaagacacgcccggcggguauugucugacccgguggaugcucauugaagccgagcugaagugcuucggaaauacagcugucgccaaauguaacgagaagcacgaugaagaguuuugcgacaugcuucgccuguucgauuucaauaaacaggcuauccagagacucaaggcccccgcgcagauguccauucaacugaucaacaaggccgugaaugcucuuaucaacgaccagcugauuaugaaaaaucaccuccgggacaucaugugcauuccuuacugcaacuauagcaaguacugguaucugaaucauaccacaaccgggaaaacgucucugcccaaguguuggcucguguccaacggaagcuaccugaaugagacacacuuuucugaugacaucgaacagcaagccgauaacaugauuaccgagaugcuucagaaagaguacauggaacgccagggcaagaccccucuggggcucgucgaccuguucguuuuuagcacauccuucuaucugaucucuaucuuucuucaucucgugaaaauuccgacccacagacauaucgugggaaagagcugccccaagccucaccggcugaauuacaugggcauuuguuccugcggcuucuauaaacagcccggggucccugugaaguggaaacgcuga

SEQ ID NO: 5560 - RNA, 1476 nt, Artificial Sequence
  derived and/or modified protein sequence (opt5) from LASV(G3157-SLE-2013;Clade IV)__AIT17370__GPCstabilized
augggccagaucgugaccuucuuucaagaggucccccacguuauugaagaggugaugaacaucgugcugauugcccucagcauccuggcuguccuuaaggggcuguacaauuucgccacaugcggacucgugggccugguuacguuucuucugcucugugggagauccugcaccacaucucuguauaaaggaguguacgaacugcagacccucgagcugaacauggaaacacuuaauaugaccaugccucugagcuguacaaagaacaauucccaucacuauauuauggucggcaacgagaccgggcucgagcugacgcuuaccaauacaucuaucaucaaccauaaauucugcaaucugagcgacgcgcacaagaaaaaccucuacgaucaugcucugauguccauuaucucuaccuuucaccugagcauuccgaauuucaaccaguaugaagccauguccugugacuuuaauggaggcaagaucagcgugcaguacaaccucucucacuccuaugccggcgaugcugccaaucauugcgggacaguugcuaacggagugcugcaaaccuucaugcggauggccuggggcgggagcuacauugcgcuugacucuggaugcgauagaugggacuguaucaugacguccuaccaguaucugauuauccagaacacaaccugggaggaucacugccaguuuagccggcccucuccuaucggcuaccucgggcugcuuucccaacgcacaagagacauuuauaucagccggcgccgccggggaaccuucaccuggacacuguccgauucugaaggcaaggacacgcccggcggguacugucugaccagauggaugcucauugaggccgagcugaaaugcuuuggaaauacagcugucgccaaguguaacgaaaaacaugaugaggaguucugcgacaugcuucggcuguuugauuucaauaagcaggcuauccagcgccucaaagcccccgcgcagaugagcauucaacugaucaacaaggccgugaaugcucuuaucaacgaccagcugauuaugaagaaucaccucagagacaucaugugcauuccuuauugcaacuacuccaaauauugguaccugaaucacaccacaaccgggaagacgagccugcccaaauguuggcucgugucuaacggauccuaccugaaugaaacacauuucagcgaugacaucgagcagcaagccgauaacaugauuaccgagaugcuucagaaggaauauauggagcggcagggcaaaaccccucuggggcucgucgaccuguuuguuuucucuaccagcuuuuaccugaucuccaucuuccuucaccucgugaagauuccgacacaucgccacaucgugggaaaacccugcccuaagccccauagacugaaucacaugggcauuuguucuugcggccuguauaagcagccuggggucagcgugaaauggaagcgguga

SEQ ID NO: 5561 - RNA, 1476 nt, Artificial Sequence
  derived and/or modified protein sequence (opt5) from LASV(G3206-SLE-2013;Clade IV)__AIT17378__GPCstabilized
augggccagaucgugaccuucuuucaagaggucccccacguuauugaagaggugaugaacaucgugcugauugcccucagcauccuggcuguccuuaaggggcuguacaaucucgccacaugcggacuggugggccuuguuacguuccugcuccugugugggagauccugcaccacaucucuguauaaaggaguguacgaacuccagacccuggagcuuaacauggaaacacugaauaugaccaugccucucagcuguacaaagaacaauucccaucacuauauuauggucggcaacgagaccgggcuggagcuuacgcugaccaauacaucuaucaucaaccauaaauuuugcaaucucagcgacgcgcacaagaaaaaccuguacgaucauacccugauguccauuaucucuacauuccaccucagcauuccgaauuuuaaccaguaugaagcuauguccugugacuucaauggaggcaagaucagcgugcaguacaaccugucucacuccuaugccguugaugccgcuaaucauugcggcaccguggccaacgggguccuucaaacguuuaugcggauggcuuggggaggcagcuacauugcccuggacucugggugcuccggaugggauuguaucaugacaagcuaccaguaucucgugauucagaacaccacaugggaggaccacugccaguucucuagacccuccccuaucggcuaccuggggcuucugagccaacggacccgcgauaucuauauuuccagacggcgccggggaaccuuuacauggacgcugucugacagcgaaggcaagaauacccccggcggguacugucucacacgcuggaugcugaucgaggcggagcuuaaaugcuucggaaacaccgccguggcuaaguguaaugaaaaacaugaugaggaauuuugcgacaugcugagacucuucgauuuuaacaagcaggccauucagcggcugaaagcucccgcccagauguccauccaacuuauuaauaaggcggucaacgcccugaucaaugaccagcucaucaugaagaaccaucugcgcgauauuaugugcaucccuuauugcaauuacagcaaauauugguaccugaaccacacaaccacggggagaacaucucucccccgguguuggcugguuuccaauggaagcuaccuuaacgaaacccacuucucugacgacauugagcagcaagcugauaauaugaucaccgagaugcugcagaaggaauauauggagcgccagggcaaaacaccucucgggcugguggaccuguucguguuuagcaccuccuucuaccuuauuucuaucuuucuccaccuggucaagaucccgacacauagacacauugugggaaaaagcugccccaagccucaucggcugaaccacaugggcaucuguuccugcggcuucuauaaacagcccgggguuccugugaaguggaagcgcuga

SEQ ID NO: 5562 - RNA, 1476 nt, Artificial Sequence
  derived and/or modified protein sequence (opt5) from LASV(G3234-SLE-2013;Clade IV)__AIT17388__GPCstabilized
augggccagaucgugaccuucuuucaagaggucccccacguuauugaagaggugaugaacaucgugcugauugcccucagcauccuggcuguccuuaaggggcuguacaauguggccacaugcggacucauuggccugguuacguuccuucugcucugugggagauccugcaccacaacccuguauaaaggaguguacgaacugcaggcgcucgagcugaacauggaaacacuuaauaugaccaugccucugucuuguacaaagaacaauagccaucacuauauccgggucggcaacgagaccgggcucgagcugacgcuuaccaauacauccaucauuaaccauaaauuuugcaaucugucugacgcucacaagaaaaaccucuacgaucaugcccugaugagcaucauuuccaccuuccaccugucuaucccgaauuuuaaccaguaugaagccaugagcugugacuucaauggaggcauuaucuccgugcaguacaaccucagccacucuuaugcuggcgaugccgcuaaucauugcgggacaguugccaacggagugcugcaaaccuuuaugcgcauggcguggggcggguccuacauugcccuugacagcggaugcaacggcugggauuguaucaugacgucuuaccaguaucugaucauucagaauacaaccugggacgaucacugccaguucucccggcccagcccuaucggguaccucggacugcuuucucaacgcacaagagacauuuauaucucccggcgccgccggggcaccuuuaccuggacacugagcgauuccgagggcaaggacacgcccgggggauacugucugaccagauggaugcucauugaagcugagcugaagugcuucggcaacacagccgucgcuaaauguaaugagaagcaugaugaagaguuuugcgacaugcuucggcuguucgauuuuaacaaacaggccauccagcgccucaagacccccgcgcagaugaauauccaacugauuaacaaagccgugaaugcucuuaucaacgaccagcugauuaugaagaaucaccucagagacaucaugugcauuccuuauugcaacuacucuaaguauugguaccugaauaacacagccaccggaaaaacgagccugccccgguguuggcucguguccaauggcagcuaccugaacgagacacacuucucugaugacaucgaacagcaagcugauaauaugaucaccgagaugcuucagaaggaguauauggaacgccaggggaaaaccccucugggacucgucgaccuguucguuuuuagcacauccuucuaccugauuucuaucuuucuucaucucgugaagauuccgacccacagacauaucgugggcaaacccugcccuaagccccaccggcugaaccauauuggcaucuguagcugcgggcuguauaaacagccuggaguccccgugaaguggaagcgcuga

SEQ ID NO: 5563 - RNA, 1476 nt, Artificial Sequence
  derived and/or modified protein sequence (opt5) from LASV(G502-SLE-2009;Clade IV)__AIT17126__GPCstabilized
augggccagaucgugaccuucuuucaagaggucccccacguuauugaagaggugaugaacaucgugcugauugcccucagcauccuggcuguccuuaaggggcuguacaauuucgccacaugcggacucgugggccugcuuacguuucugcuccugugugggagauccugcaccacaggacuguauaaaggcguuuacgaacuccagacccuggagcuuaacauggaaacacugaauaugaccaugccucucucuuguacaaagaacaauagccaucacuauauuaugguggggaacgagaccggacuggagcuuacgcugaccaauacauccaucaucaaccauaaauucugcaaucucucugacgcgcacaagaaaaaccuguacgaucaugcucugaugagcauuaucuccaccuuucaccucucuauuccgaauuucaaccaguaugaagccaugagcugugacuuuaauggcggcaagaucuccguccaguacaaccugagccacucuuaugccggggaugcugccgaccauugcggaacaguggcuaauggcguucuucaaaccuucaugcggauggccuggggaggguccuacauugcgcuggauagcggcugcgggagaugggacuguaucaugacgucuuaccaguaucucauuauccagaacacaaccugggaggaucacugccaguuuucccggcccagcccuaucggauaccugggccuucugucucaacgcacaagagacauuuauaucucccggcgccgccggggcaccuucaccuggacacugagcgauuccgaagggaaggacacgcccggaggcuacugucucaccagauggaugcugauugaggccgagcuuaaaugcuuugggaacacagcuguggccaaguguaaugaaaaacaugaugaggaguucugcgacaugcugcggcucuuugauuucaacaagcaggcuauccagcgccugaaagcccccgcgcagaugucuauucaacuuaucaauaaggccgucaacgcucugaucaaugaccagcucgugaugaagaaccaccugagagacauuaugugcaucccuuauugcaauuacagccgguauugguaccugaaccacaccacaaccggccgcacgucccuccccaaauguuggcuggugagcaaugggucuuaccuuaacgaaacacauuucuccgaugacauugagcagcaagccgauaauaugaucaccgagaugcugcagaaggaauauauggagagacagggaaaaaccccucucggccuggucgaccuguuuguuuucagcacaucuuuuuaccuuauuagcaucuuccuccaccuggugaagaucccgacccaucggcacauugugggcaaauccugccccaagccucaucgccugaaccacauggggaucuguucuugcggacucuauaaacagcccggcgucccugugaaguggaagagauga

SEQ ID NO: 5564 - RNA, 1476 nt, Artificial Sequence
  derived and/or modified protein sequence (opt5) from LASV(G503-SLE-2009;Clade IV)__AIT17130__GPCstabilized
augggccagaucgugaccuucuuucaagaggucccccacguuauugaagaggugaugaacaucgugcugauugcccucagcauccuggcuguccuuaaggggcuguacaauuucgccacaugcggauuugugggccucguuacguuccugcuucugugugggagauccugcaccacaucucucuauaaaggaguguacgaacugcagacccuggagcucaacauggaaacacugaauaugaccaugccucuuagcuguacaaagaacaauucccaucacuauauucgggucggcaacgacaccgggcuggagcucacgcugaccaauacaucuaucaucaaccauaaauuuugcaaucuuagcgaugcgcacaagaaaaaccuguacgaccaugcucucauguccauuaucucuaccuuccaccugagcauuccgaauuuuaaccaguaugaggccauguccugugauuucaauggaggcaagaucagcgugcaguacaaccugucucacuccuaugccguugacgcugccagccauugcggcacaauugcuaauggggugcuccaaaccuuuaugcgcauggccuggggaggcucuuacaucgcgcuggauuccgggugcgaccggugggauuguauuaugacgagcuaccaguaucuuaucauccagaacacaaccugggaagaccacugccaguucucucgccccuccccuauuggauaccugggccuccugagccaaagaacacgggauaucuauauuucccgcagacgccgggggaccuuuaccuggacacucucugacagcgagggaaaggauacgcccggcggcuacugucugacccgguggaugcugaucgaagccgagcucaaaugcuucgggaacacagcugucgccaaguguaaugagaaacaugacgaagaguuuugcgauaugcugcgccuuuucgacuucaacaagcaggcuauucagagacugaaagcccccgcgcagauguccauccaacucaucaauaaggccgugaacgcucugauuaaugaccagcuuaucaugaagaaccaucugcgggauauuaugugcaucccuuauugcaauuacagcaaauauugguaccucaaccacaccacaaccggcaagacgucucugcccaaauguuggcugguguccaaugggagcuaccucaacgagacacacuuuucugacgauauugaacagcaagccgacaauaugaucaccgagaugcugcagaaggaguauauggaacgccagggaaaaaccccucuuggccuggucgaucucuucguuuuuagcacauccuucuaccugaucucuauuuuucugcaccuugugaagaucccgacccauagacacauuguggggaaaagcugccccaagccucaucggcucaaccacaugggaaucuguuccugcggccuguauaagcagcccggcgucccugugaaauggaagcgcuga

SEQ ID NO: 5565 - RNA, 1476 nt, Artificial Sequence
  derived and/or modified protein sequence (opt5) from LASV(G610-SLE-2009;Clade IV)__AIT17134__GPCstabilized
augggccagaucgugaccuucuuucaagaggucccccacguuauugaagaggugaugaacaucgugcugauugcccucagcauccuggcuguccuuaaggggcuguacaauuucgccacaugcggacucgugggccugguuacguuucuucugcucugugggagauccugcaccacaucucuguauaaaggaguguacgaacugcagacccucgagcugaacauggaaacacuuaauaugaccaugccucugagcuguacaaagaacaauucccaucacuauauuauggucggcaacgagaccgggcucgagcugacgcuuaccaauacaucuaucaucaaccauaaauucugcaaucugagcgacgcgcacaagaaaaaccucuacgaucaugcucugauguccauuaucucuaccuuucaccugagcauuccgaauuucaaccaguaugaagccauguccugugacuuuaauggaggcaagaucagcgugcaguacaaccucucucacuccuaugccggcgaugcugccaaucauugcgggacaguugcuaacggagugcugcaaaccuucaugcggauggccuggggcgggagcuacauugcgcuugacucuggaugcggcagaugggauuguaucaugacguccuaccaguaucugauuauccagaacacaaccugggaggaccacugccaguuuagccggcccucuccuaucggguaccucggacugcuuucccaacgcacaagagauauuuauaucagccggcgccgccggggcaccuucaccuggacacuguccgacucugaaggcaaggauacgcccgggggauacugucugaccagauggaugcucauugaggccgagcugaaaugcuuuggcaauacagcugucgccaaguguaacgaaaaacaugacgaggaguucugcgauaugcuucggcuguuugacuucaauaagcaggcuauccagcgccucaaagcccccgcgcagaugagcauucaacugaucaacaaggccgugaaugcucuuaucaacgaucagcugauuaugaagaaucaccucagagacaucaugugcauuccuuauugcaacuacuccaaauauugguaccugaaucacaccacaaccggaaagacgagccugcccaaauguuggcucgugucuaacggcuccuaccugaaugaaacacauuucagcgacgauaucgagcagcaagccgacaacaugauuaccgagaugcuucagaaggaauauauggagcggcaggggaaaaccccucugggacucgucgaucuguuuguuuucucuaccagcuuuuaccugaucuccaucuuccuucaccucgugaagauuccgacacaucgccacaucgugggcaaaucuugccccaagccucauagacugaaucacaugggcauuuguagcugcgggcuguauaagcagcccggagucccugugaaauggaagcgguga

SEQ ID NO: 5566 - RNA, 1476 nt, Artificial Sequence
  derived and/or modified protein sequence (opt5) from LASV(G636-SLE-2009;Clade IV)__AIT17138__GPCstabilized
augggccagaucgugaccuucuuucaagaggucccccacguuauugaagaggugaugaacaucgugcugauugcccucagcauccuggcuguccuuaaggggcuguacaaucucgccacaugcggacuggugggccuuguuacguuccugcuccugugugggagauccugcaccacaucucuguauaaaggaguguacgaacuccagacccuggagcuuaacauggaaacacugaauaugaccaugccucucagcuguacaaagaacaauucccaucacuauauuauggucggcaacgagaccgggcuggagcuuacgcugaccaauacaucucucaucaaccauaaauuuugcaaucugagcgacgcgcacaagaaaaaccuguacgaucaugcucucauguccaucauuucuaccuuccaccugagcaucccgaauuuuaaccaguaugaagccauguccugugacuucaauggaggcaagauuagcgugcaguacaaccuuucucacuccuaugccguugaugcugccagccauugcggcacaguggcuaaugggguccugcaaaccuuuaugcggauggccuggggaggcucuuacaucgcgcucgacuccgggugcggaggcugggauuguauuaugacgagcuaccaguaucugaucauucagaacacaaccugggaggaccacugccaguucucuagacccuccccuaucggguaccuuggacugcucagccaacggacacgcgauaucuauauuuccagacggcgccggggcaccuuuaccuggacacucucugacagcgaaggcaaggauacgcccgggggauacugucugacccgcuggaugcuuaucgaggccgagcugaaaugcuucggcaacacagcuguggccaaguguaaugaaaaacaugacgaggaauuuugcgauaugcucagacuguucgacuuuaacaagcaggcuauucagcggcuuaaagcccccgcgcagauguccauccaacugauuaauaaggccgugaacgcucucaucaaugaucagcugaucaugaagaaccaucugcgcgacauuaugugcaucccuuauugcaauuacagcaaauauugguaccucaaccacaccacaaccggaagaacgucucugccccgguguuggcuugucuccaauggcagcuaccugaacgaaacacacuucucugacgauauugagcagcaagccgacaauaugaucaccgagaugcuccagaaggaauauauggagcgccaggggaaaaccccucugggacugguugaucuuuucguguuuagcacauccuucuaccucauuucuaucuuucugcaccuggugaagaucccgacccauagacacauugucggcaaaagcugccccaagccucaucggcucaaccacaugggcaucuguuccugcgggcuguauaaacagcccggagugccuguuaaguggaagcgcuga

SEQ ID NO: 5567 - RNA, 1476 nt, Artificial Sequence
  derived and/or modified protein sequence (opt5) from LASV(G692-SLE-2009;Clade IV)__AIT17146__GPCstabilized
augggccagaucgugaccuucuuucaagaggucccccacguuauugaagaggugaugaacaucgugcugauugcccucagcauccuggcuguccuuaaggggcuguacaaucucgccacaugcggacuggugggccuuguuacguuccugcuccugugugggagauccugcaccacaucucuguauaaaggaguguacgaacuccagacccuggagcuuaacauggaaacacugaauaugaccaugccucucagcuguacaaagaacaauucccaucacuauauuauggucggcaacgagaccgggcuggagcuuacgcugaccaauacaucuaucaucaaccauaaauuuugcaaucucagcgacgcgcacaagaaaaaccuguacgaucaugcucugauguccauuaucucuaccuuccaccucagcauuccgaauuuuaaccaguaugaagccauguccugugacuucaauggaggcaagaucagcgugcaguacaaccugucucacuccuaugccggcgaugcugccaaucauugcgggacaguugcuaacggagugcuucaaaccuuuaugcggauggccuggggcgggagcuacauugcgcuggacucuggaugcggcagaugggauuguaucaugacguccuaccaguaucucauuauccagaacacaaccugggaggaccacugcagcuucucucggcccuccccuaucggguaccugggacuucugagccagcgcacaagagauauuuauaucucccggcgccgccggggcaccuuuaccuggacacugucugacagcgaaggcaaggauacgcccgggggauacugucucaccagauggaugcugauugaggccgagcuuaaaugcuucggcaauacagcugucgccaaguguaacgaaaaacaugacgaggaauuuugcgauaugcugcgccucuucgacuuuaauaagcaagcuauccagcggcugaaagcccccgcgcagauguccauucagcuuaucaacaaggccgugaaugcucugaucaacgaucaacucauuaugaagaaucaccugagagacaucaugugcauuccuuauugcaacuacagcaaauauugguaccugaaucacaccacaaccggaaagacgucucuccccaaauguuggcugguguccaacggcagcuaccuuaaugaaacacauuucucugacgauaucgagcagcaggccgacaacaugauuaccgagaugcugcaaaaggaauauauggagcggcaggggaaaaccccucucggacuggucgaucuguucguuuuuagcacauccuucuaccuuaucucuaucuuucuccaccuggugaagauuccgacccaucgccacaucgugggcaaaagcugccccaagccucauagacugaaucacaugggcauuuguuccugcggguucuauaagcagcccggagucccugugaaauggaagcgguga

SEQ ID NO: 5568 - RNA, 1476 nt, Artificial Sequence
  derived and/or modified protein sequence (opt5) from LASV(G733-SLE-2010;Clade IV)__AIT17154__GPCstabilized
augggccagaucgugaccuucuuucaagaggucccccacguuauugaagaggugaugaacaucgugcugauugcccucagcauccuggcuguccuuaaggggcuguacaauuucgccacaugcggaauugugggccucguuuccuuucugcuucugugugggagaucuugcacgaccagccucuauaaaggaguguacgaacugcagacacuggagcucaacauggaaacccugaauaugacaaugccucuuuccuguaccaagaacaauucucaucacuauaucauggucggcaacgagacagggcuggagcucacccugacgaauaccagcaucauuaaccauaaauucugcaaucuuuccgacgcgcacaagaaaaaccuguacgaucaugcucucaugucuaucauuagcacauuucaccuguccaucccgaauuucaaccaguaugaagccaugagcugugacuuuaauggaggcaagauuucugugcaguacaaccugucccacagcuaugccggcgaugcugccaaucauugcgggaccaucgcuaacggaguucuccaaacauucaugcggauggccuggggcgggucuuacauugcgcuggacuccggaugcgauagaugggacuguaucaugaccagcuaccaguaucuuaucauucagaacacgacaugggaggaucacugccaguuuucucggcccuccccuaucggcuaccuggggcuccugagccaacgcaccagagacauuuauaucucccggcgccgccggggaacauucaccuggacccucucugauagcgaaggcaaggacacacccggcggguacugucugacgagauggaugcugauugaggccgagcucaaaugcuuuggaaauaccgcuguggccaaguguaacgaaaaacaugaugaggaguucugcgacaugcugcggcuuuuugauuucaauaagcaggcuauccagcgccugaaagcccccgcgcagauguccauccaacucauuaacaaggccgucaaugcucugaucaacgaccagcuuauuaugaagaaucaccugagagacaucaugugcauuccuuauugcaacuacagcaaauauugguaccucaaucacacaaccacagggaagaccucucugcccaaauguuggcugguguccaacggaagcuaccucaaugaaacgcauuucucugaugacaucgagcagcaagccgauaacaugaucacagagaugcugcagaaggaauauauggagcggcagggcaaaaccccucuugggcugguggaccucuuugucuucagcaccuccuuuuaccugauuucuaucuuccugcaccuuguuaagauuccgacacaucgccacguggugggaaaaagcugccccaagccucauagacucaaucacaugggcaucuguuccugcggccuguaugggcagcccggagucccugugaaguggaaacgguga

SEQ ID NO: 5569 - RNA, 1476 nt, Artificial Sequence
  derived and/or modified protein sequence (opt5) from LASV(G771-SLE-2010;Clade IV)__AIT17158__GPCstabilized
augggccagaucgugaccuucuuucaagaggucccccacguuauugaagaggugaugaacaucgugcugauugcccucagcauccuggcuguccuuaaggggcuguacaauuucgccacaugcggacucgugggccugguuacguuucuucugcucugugggagauccugcaccacaucucuguauaaaggaguguacgaacugcagacccucgagcugaacauggaaacacuuaauaugaccaugccucugagcuguacaaagaacaauucccaucacuauauuauggucggcaacgagaccgggcucgagcugacgcuuaccaauacaucuaucaucaaccauaaauucugcaaucugagcgacgcgcacaagaaaaaccucuacgaucaugcucugauguccauuaucucuaccuuucaccugagcauuccgaauuucaaccaguaugaagccauguccugugacuuuaauggaggcaagaucagcgugcaguacaaccucucucacuccuaugccggcgaugcugccaaucauugcgggacaguugcuaacggagugcugcaaaccuucaugcggauggccuggggcgggagcuacauugcgcuugacucuggaugcgauagaugggacuguaucaugacguccuaccaguaucugauuauccagaacacaaccugggaggaucacugccaguuuagccggcccucuccuaucggcuaccucgggcugcuuucccaacgcacaagagacauuuauaucagccggcgccgccggggaaccuucaccuggacacuguccgauucugaaggcaaggacacgcccggcggguacugucugaccagauggaugcucauugaggccgagcugaaaugcuuuggaaauacagcugucgccaaguguaacgaaaaacaugaugaggaguucugcgacaugcuucggcuguuugauuucaauaagcaggcuauccagcgccucaaagcccccgcgcagaugagcauucaacugaucaacaaggccgugaaugcucuuaucaacgaccagcugauuaugaagaaucaccucagagacaucaugugcauuccuuauugcaacuacuccaaauauugguaccugaaucacaccacaaccgggaagacgagccugcccaaauguuggcucgugucuaacggauccuaccugaaugaaacacauuucagcgaugacaucgagcagcaagccgauaacaugauuaccgagaugcuucagaaggaauauauggagcggcagggcaaaaccccucuggggcucgucgaccuguuuguuuucucuaccagcuuuuaccugaucuccaucuuccuucaccucgugaagauuccgacacaucgccacaucgugggaaaaucuugccccaagccucauagacugaaucacaugggcauuuguagcugcggccuguauaagcagcccggggucccugugaaauggaagcgguga

SEQ ID NO: 5570 - RNA, 1476 nt, Artificial Sequence
  derived and/or modified protein sequence (opt5) from LASV(G808-SLE-2010;Clade IV)__AIT17164__GPCstabilized
augggccagaucgugaccuucuuucaagaggucccccacguuauugaagaggugaugaacaucgugcugauugcccucagcauccuggcuguccuuaaggggcuguacaauuucgccacaugcggacucgugggccugguuacguuucuucugcucugugggagauccugcaccucuagccuguauaaaggaguguacgaacugcagacacucgagcugaacauggaaacccuuaauaugacaaugccucuguccuguaccaagaacaauucucaucacuauauucgggucggcaacgagacagggcucgagcugacccuuacgaauaccagcaucaucgaccauaaauucugcaaccuguccgaugcgcacaagaaaaaucucuacgaccaugcucugaugucuauuaucagcacauuucaccuguccauuccgaacuucaaucaguaugaagccaugagcugugauuuuaacggaggcaagaucucugugcaguacaaucucucccacagcuaugccggcgacgcugccaagcauugcgggaccguugcuaacggagugcugcaaacauucaugcgcauggccuggggcgggucuuacauugcgcuugauuccggaugcggcaauugggacuguaucaugaccagcuaccaguaucugauuauccagaacacgacaugggaggaucauugccaguuuucuagacccuccccuaucggguaccucggacugcuuagccaacggacccgcgacauuuauaucuccagacggcgccggggcacauucaccuggacccugucugauagcgaaggcaacgacgcccccgggggauacugucugacacgcuggaugcucauucaggcugagcugaaaugcuuuggcaauacggccgucgcuaaguguaacgagaaacacgaugaagaguucugcgacaugcuuagacuguuugauuucaauaagcaggccauccagcggcucaaagcgcccgcccaaauguccauucagcugaucaacaaggcugugaaugcccuuaucaacgaccagcugauuaugaagaaucaccuccgcgacaucaugugcauuccuuauugcaacuacagcaaauauugguaccugaaucauaccacaaccggaagaacaucucugccccgguguuggcucguguccaacggcagcuaccugaaugagacccacuucucugaugacaucgaacaacaggcugauaacaugauuacggagaugcuucagaaggaguauauggaacgccaggggaaaacaccucugggacucgucgaccuguuuguuuucagcaccuccuuuuaccugaucucuaucuuccuucaucucgugaagauuccgacccacagacauaucgugggcaaaagcugccccaagccucaccggcugaaucacaugggcauuuguuccugcgggcuguuuaaacaacccggagucccugugaaguggaagcgcuga

SEQ ID NO: 5571 - RNA, 1476 nt, Artificial Sequence
  derived and/or modified protein sequence (opt5) from LASV(Guinea Faranah;Clade IV)__AMZ00381__GPCstabilized
augggccagaucgugaccuucuuucaagaggucccccacguuauugaagaggugaugaacaucgugcugauugcccucagcauccuggcuguccuuaaggggcuguacaauguggccacaugcggacucauuggccugaucgcguuccuucugcucugugggagauccugcacgucuacccuguauaaaggaguuuacgaacugcaggcucucgagcugaacauggaaacacuuaauaugaccaugccucugagcuguacaaagaacaauucccaucacuauaucauggugggcaacgagaccgggcucgagcugacacuuaccaauacgucuauuaucaaccauaaauuuugcaaucugagcgacgcccacaagaaaaaccucuacaaucaugcccugauguccauuaucucuaccuuccaccugagcauuccgaacuuuaaucaguaugaagcuauguccugugauuucaacggaggcaagaucagcguccaguacaaucucucucacuccuaugccguggacgcugccaaccauugcggcacaguugcgaacgggauucugcaaaccuuuaugcggauggccuggggaggcagcuacaucgcucuugauucugggugcggaggcugggacuguaucauguccagcuaccaguaucuggugauucagaauacaaccugggaggaucauugccaguucucucgccccuccccuaucggguaccucggacugcuuagccaaagaacgcgggacauuuauaucucccgcagacgccggggcacauuuaccuggacacugucugauagcgaaggcaaggacacccccgggggauacugucugacccgguggaugcucauugaggccgagcugaaaugcuucggcaacacagcugucgccaaguguaaugaaaaacacgaugaggaauuuugcgacaugcuucgccuguucgauuuuaacaagcaggcgauccagagacucaaagcccccgcucagauguccauccaacugauuaauaaggccgugaacgcucuuaucaaugaccagcugauuaugaagaaccaccuccgggauaucaugugcauuccuuauugcaauuacagcaaauauugguaccugaaccauacgaucaccggacgcacaucucugcccaaguguuggcucguguccaauggcagcuaccugaacgaaacccacuucucugacgacaucgagcagcaagccgauaauaugauuacagagaugcuucagaaagaauaucuggagagacaggggaagaccccucucggacuggucgaccuguucguuuuuagcacguccuucuaccuuaucucuauuuuucuccaucugaucaaaauuccgacacaccggcauaucgugggcaagagcugccccaaaccucaccgccugaaccacaugggcguguguuccugcgggcucuauaagcagcccggagucccugugagauggaagcgguga

SEQ ID NO: 5572 - RNA, 1476 nt, Artificial Sequence
  derived and/or modified protein sequence (opt5) from LASV(GUINEA Z-185a;Clade IV)__AMZ00377__GPCstabilized
augggccagaucgugaccuucuuucaagaggucccccacguuauugaagaggugaugaacaucgugcugauugcccucagcauccuggcuguccuuaaggggcuguacaauguggccacaugcggacucauuggccugguuacguuccuuuuucugugugggagauccugcucuaccagccucuauaaaggaguguacgaacugcagacacuggagcucaacauggaaacccugaauaugacaaugccucuuuccuguaccaagaacaauucucaucacuauaucauggucggcaacgagacagggcuggagcucacccugacgaauaccagcaucauuaaccauaaauucugcaaucuuuccgacgcgcacaagaaaaaccuguacgaucauacacucaugucuaucauuagcaccuuucaccuguccaucccgaauuucaaccaguaugaagcuaugagcugugacuuuaauggaggcaagauuucugugcaguacaaccugucccacagcuaugccguugaugccgcuaaucauugcggcacaguggccaacgggguccuccaaaccuucaugcggauggcuuggggaggcucuuacaucgcccuggacuccgggugcggaaacugggauuguauuaugacgagcuaccaguaucuugugauccagaauacaaccugggaggaccacugccaguuuucuagacccuccccuaucggcuaccuggggcuccugagccaacggacacgcgauauuuauaucuccagacggcgccggggaaccuucaccuggacacucucugacagcgaaggcaaggauacgcccggcggguacugucugacccgcuggaugcugauugaggcggagcucaaaugcuuuggaaacacagccguggcuaaguguaaugaaaaacaugacgaggaguucugcgauaugcugagacuuuuugacuucaacaagcaggccauccagcggcugaaagcucccgcccagauguccauucaacucaucaauaaggcggucaacgcccugaucaaugaucagcuuauuaugaagaaccaucugcgcgacaucaugugcauuccuuauugcaauuacagcaaauauugguaccucaaccacaccguuacagggaagaccucucugcccaaauguuggcugguguccaauggaagcuaccucaacgaaacgcacuucucugacgauaucgagcagcaagcugacaaucugauuacagagaugcuucagaaggaauauauggagagacagggcaaaaccccucuggggcucguggaucuguuugucuucagcaccuccuuuuaccugaucucuaucuuccuucaccucgugaagauuccgacacaucggcacaucguuggaaaacccugcccuaagccccaucgccugaaccacaugggcauuuguagcugcggcguguauaagcagccugggguccccgugagauggaaacgguga

SEQ ID NO: 5573 - RNA, 1476 nt, Artificial Sequence
  derived and/or modified protein sequence (opt5) from MOPV/LASV reassortant(IGS-1;Clade IV)__AFY05576__GPCstabilized
augggccagaucgugaccuucuuucaagaggucccccacguuauugaagaggugaugaacaucgugcugauugcccucagcguccuggcugugcuuaaggggcuguacaauuucgccacaugcggacucguuggccuggugacguuucuucugcucugugggagauccugcaccacaucucuguauaaaggagucuacgaacugcagacccucgagcugaacauggaaacacuuaauaugaccaugccucugagcuguacaaagaacaauucccaucacuauaucauggugggcaacgagaccgggcucgagcugacgcuuaccaauacaucuauuaucaaccauaaauucugcaaucugagcgacgcgcacaagaaaaaccucuacgaucaugcucugauguccaucauuucuaccuuucaccugagcaucccgaauuucaaccaguaugaagccauguccugugacuuuaauggaggcaagauuagcguucaguacaaccucucucacuccuaugccggcgaugcugccaaucauugcgggacaguggcuaacggaguccugcaaaccuucaugcggauggccuggggcgggagcuacaucgcgcuugacucuggaugcggcaacugggauuguauuaugacguccuaccaguaucugaucauucagaauacaaccugggaggaccacugccaguuuagcagacccucuccuaucggguaccucggacugcuuucccaacggacacgcgauaucuauauuagcagacggcgccggggcaccuucaccuggacacuguccgacucugaaggcgaggauacgcccgggggauacugucugacccgcuggaugcucaucgaggccgaacugaagugcuuuggcaacacagcuguggccaaauguaaugagaagcaugacgaagaguucugcgauaugcuuagacuguuugacuucaacaaacaggcuauucagcggcucaaggcccccgcgcagaugagcauccaacugauuaauaaagccgugaacgcucuuaucaaugaucagcugaucaugaagaaccaccuccgcgacauuaugugcaucccuuauugcaauuacuccaaguauugguaccugaaccacaccacaaccggaagaacgagccugcccaaauguuggcucgucucuaauggcuccuaccugaacgagacacauuucagcgacgauauugagcagcaagccgacaauaugaucaccgaaaugcuucagaaggaguauauggaacggcaggggaaaaccccucugggacucguugaucuguuuguguucucuaccagcuuuuaccugauuuccaucuuccuucaccucgugaagaucccgacacaucgccacauugucggcaaaucuugccccaagccucauagacugaaccacaugggcaucuguagcugcgggcuguauaaacagcccggagugccuguuaaguggaagcgguga

SEQ ID NO: 5574 - RNA, 1476 nt, Artificial Sequence
  derived and/or modified protein sequence (opt5) from MOPV/LASV reassortant(IGS-11;Clade IV)__AFY05588__GPCstabilized
augggccagaucgugaccuucuuucaagaggucccccacguuauugaagaggugaugaacaucgugcugauugcccucagcguccuggcugugcuuaaggggcuguacaauuucgccacaugcggacucguuggccuggugacguuucuucugcucugugggagauccugcaccacaucucuguauaaaggagucuacgaacugcagacccucgagcugaacauggaaacacuuaauaugaccaugccucugagcuguacaaagaacaauucccaucacuauaucauggugggcaacgagaccgggcucgagcugacgcuuaccaauacaucuauuaucaaccauaaauucugcaaucugagcgacgcgcacaagaaaaaccucuacgaucaugcucugauguccaucauuucuaccuuucaccugagcaucccgaauuucaaccaguaugaagccauguccugugacuuuaauggaggcaagauuagcguucaguacaaccucucucacuccuaugccggcgaugcugccaaucauugcgggacaguggcuaacggaguccugcaaaccuucaugcggauggccuggggcgggagcuacaucgcgcuugacucuggaugcggcaacugggauuguauuaugacguccuaccaguaucugaucauucagaauacaaccugggaggaccacugccaguuuagcagacccucuccuaucggguaccucggacugcuuucccaacggacacgcgaucuguauaucagcagacggcgccggggcaccuucaccuggacacuguccgacucugaaggcgaggauacgcccgggggauacugucucacccgcuggaugcugauugaggccgaacuuaagugcuuuggcaacacagcuguggccaaauguaaugagaagcaugacgaagaguucugcgauaugcugagacucuuugacuucaacaaacaggcuauccagcggcugaaggcccccgcgcagaugagcauucaacuuaucaauaaagccgugaacgcucugauuaaugaucagcucaucaugaagaaccaucugcgcgacaucaugugcauuccuuauugcaauuacuccaaguauugguaccugaaccacaccacaaccggaagaacgagccuccccaaauguuggcuggucucuaauggcuccuaccuuaacgagacacacuucagcgacgauaucgagcagcaagccgacaauaugauuaccgaaaugcugcagaaggaguauauggaacggcaggggaaaaccccucucggacugguugaucuguuuguguucucuaccagcuuuuaccuuaucuccauuuuccuccaccuggugaagaucccgacacaucgccacaucgucggcaaaucuugccccaagccucauagacugaaccacaugggcauuuguagcugcgggcucuauaaacagcccggagugccuguuaaguggaagcgguga

SEQ ID NO: 5575 - RNA, 1476 nt, Artificial Sequence
  derived and/or modified protein sequence (opt5) from MOPV/LASV reassortant(IGS-12;Clade IV)__AFY05590__GPCstabilized
augggccagaucgugaccuucuuucaagaggucccccacguuauugaagaggugaugaacaucgugcugauugcccucagcguccuggcugugcuuaaggggcuguacaauuucgccacaugcggacucguuggccuggugacguuucuucugcucugugggagauccugcaccacaucucuguauaaaggagucuacgaacugcagacccucgagcugaacauggaaacacuuaauaugaccaugccucugagcuguacaaagaacaauucccaucacuauaucauggugggcaacgagaccgggcucgagcugacgcuuaccaauacaucuauuaucaaccauaaauucugcaaucugagcgacgcgcacaagaaaaaccucuacgaucaugcucugauguccaucauuucuaccuuucaccugagcaucccgaauuucaaccaguaugaagccauguccugugacuuuaauggaggcaagauuagcguucaguacaaccucucucacuccuaugccggcgaugcugccaaucauugcgggacaguggcuaacggaguccugcaaaccuucaugcggauggccuggggcgggagcuacaucgcgcuugacucuggaugcggcaacugggauuguauuaugacguccuaccaguaucugaucauucagaauacaaccugggaggaccacugccaguuuagcagacccucuccuaucggguaccucggacugcuuucccaacggacacgcgauauguauaucagcagacggcgccggggcaccuucaccuggacacuguccgacucugaaggcgaggauacgcccgggggauacugucugacccgcuggaugcucauugaggccgaacugaagugcuuuggcaacacagcuguggccaaauguaaugagaagcaugacgaagaguucugcgauaugcuuagacuguuugacuucaacaaacaggcuauccagcggcucaaggcccccgcgcagaugagcauucaacugaucaauaaagccgugaacgcucuuauuaaugaucagcugaucaugaagaaccaccuccgcgacaucaugugcauuccuuauugcaauuacuccaaguauugguaccugaaccacaccacaaccggaagaacgagccugcccaaauguuggcucgucucuaauggcuccuaccugaacgagacacauuucagcgacgauaucgagcagcaagccgacaauaugauuaccgaaaugcuucagaaggaguauauggaacggcaggggaaaaccccucugggacucguugaucuguuuguguucucuaccagcuuuuaccugaucuccauuuuccuucaccucgugaagaucccgacacaucgccacaucgucggcaaaucuugccccaagccucauagacugaaccacaugggcauuuguagcugcgggcuguauaaacagcccggagugccuguuaaguggaagcgguga

SEQ ID NO: 5576 - RNA, 1476 nt, Artificial Sequence
  derived and/or modified protein sequence (opt5) from LASV(LM032-SLE-2010;Clade IV)__AIT17802__GPCstabilized
augggccagaucgugaccuucuuucaagaggucccccacguuauugaagaggugaugaacaucgugcugauugcccucagcauccuggcuguccuuaaggggcuguacaaucucgccacaugcggacuggugggccuuguuacguuccugcuccugugugggagauccugcaccacaucucuguauaaaggaguguacgaacuccagacccuggagcuuaacauggaaacacugaauaugaccaugccucucagcuguacaaagaacaauucccaucacuauauuauggucggcaacgagaccgggcuggagcuuacgcugaccaauacaucuaucaucaaccauaaauuuugcaaucucagcgacgcgcacaagaaaaaccuguacaaucaugcucugauguccauuaucucuaccuuccaccucagcauuccgaacuuuaaucaguaugaagccauguccugugauuucaacggaggcaagaucagcgugcaguacaaucugucucacuccuaugccggcgacgcugccaaccauugcgggacaguugcuaacggagugcuucaaaccuuuaugcggauggccuggggcgggagcuacauugcgcuggauucuggaugcgacagaugggauuguaucaugacguccuaccaguaucucauuauccagaauacaaccugggaggaccacugccaguucagccggcccucuccuaucggcuaccuggggcuucugucccaacgcacaagagauauuuauaucagccggcgccgccggggaaccuuuaccuggacacuguccgacucugaaggcaaggauacgcccggcggguacugucucaccagauggaugcugauugaggccgagcuuaaaugcuucggaaacacagcugucgccaaguguaaugaaaaacaugacgaggaauuuugcgauaugcugcgccucuucgacuuuaacaagcaggcuauccagcggcugaaagcccccgcgcagaugagcauucaacuuaucaauaaggccgugaacgcucugaucaaugaucagcucauuaugaagaaccaccugagagacaucaugugcauuccuuauugcaauuacuccaaauauugguaccugaaccacaccacaaccgggaagacgagccuccccaaauguuggcuggugucuaauggauccuaccuuaacgaaacacauuucagcgacgauaucgagcagcaagccgacaauaugauuaccgagaugcugcagaaggaauauauggagcggcucggcaaaaccccucuggggcuggucgaucuuuucguuuuuagcacaucuuucuaccucaucuccaucuuucugcaccuggugaagauuccgacccaucgccacaucgugggaagaucuugccccaaaccucaucggcucaaccacaugggcauuuguagcugcggccuguauaagcagcccggggucccugugaaguggaaacgcuga

SEQ ID NO: 5577 - RNA, 1476 nt, Artificial Sequence
  derived and/or modified protein sequence (opt5) from LASV(LM222-SLE-2010;Clade IV)__AIT17806__GPCstabilized
augggccagaucgugaccuucuuucaagaggucccccacguuauugaagaggugaugaacaucgugcugauugcccucagcauccuggcuguccuuaaggggcuguacaauuucgccacaugcggacucauuggccuggugacguuucuucugcucugugggagauccugcaccacaucucuguauaaaggaguuuacgaacugcagacccucgagcugaacauggaaacacuuaauaugaccaugccucugagcuguacaaagaacaauucccaucacuauaucauggugggcaacgagaccgggcucgagcugacgcuuaccaauacaucuaucauuaaccauaaauucugcaaucugagcgacgcgcacaagaaaaaccucuacgaucaugcucugauguccaucauuucuaccuuucaccugagcaucccgaauuucaaccaguaugaagccauguccugugacuuuaauggaggcaagauuagcguccaguacaaccucucucacuccuaugccggcgaugcugccaaucauugcgggacaguggcuaacggaguucugcaaaccuucaugcggauggccuggggcgggagcuacaucgcgcuugacucuggaugcggcaagugggauuguauuaugacguccuaccaguaucugaucauccagaacacaaccugggaggaccacugccaguuuagcagacccucuccuauuggguaccucggacugcuuucccaacggacacgcgauaucuauauuagcagacggcgccggggcaccuucaccuggacacuguccgacucugaaggcaaagauacgcccgggggauacugucugacccgcuggaugcucaucgaggccgagcugaagugcuuuggcaauacagcuguggccaaauguaacgaaaagcaugacgaggaguucugcgauaugcuuagacuguuugacuucaauaaacaggcuauucagcggcucaaggcccccgcgcagaugagcauccaacugaucaacaaggccgucaaugcucuuauuaacgaucagcugaucaugaaaaaucaccuccgcgacauuaugugcaucccuuauugcaacuacuccaaguauugguaccugaaucacaccacaaccggaaaaacgagccugcccaaguguuggcucgugucuaacggcuccuaccugaaugaaacacauuucagcgacgauauugagcagcaagccgacaacaugaucaccgagaugcuucagaaagaauauauggagagacaggggaagaccccucugggacucguggaucuguuugucuucucuaccagcuuuuaccugaucuccauuuuccuucaccucguuaaaaucccgacacaucggcacauugugggcaagucuugccccaagccucaucgccugaaucacaugggcaucuguagcugcgggcuguauaaacagcccggagugccugucaaguggaaaagauga

SEQ ID NO: 5578 - RNA, 1476 nt, Artificial Sequence
  derived and/or modified protein sequence (opt5) from LASV(LM395-SLE-2009;Clade IV)__AIT17810__GPCstabilized
augggccagaucgugaccuucuuucaagaggucccccacguuauugaagaggugaugaacaucgugcugauugcccucagcauccuggcuguccuuaaggggcuguacaaucucgccacaugcggacuggugggccuuguuacguuccugcuccugugugggagauccugcaccacaucucuguauaaaggaguguacgaacuccagacccuggagcuuaacauggaaacacugaauaugaccaugccucucagcuguacaaaggacaacucccaucacuauauucgggucggcaaugagaccgggcuggagcuuacgcugaccaacacaucuauccucaaucauaaauuuugcaaccugagcgaugcgcacaagaaaaaucuguacgaccaugcucucauguccaucauuucuaccuuccaccugagcaucccgaacuuuaaucaguaugaagccauguccugugauuucaacggaggccgcauuagcgugcaguacaaucuuucucacuccuaugccggcgacgcugccaaccauugcgggacaguugcuaauggagugcugcaaaccuuuaugagaauggccuggggcgggagcuacaucgcgcucgauucuggaugcggccgcugggacuguauuaugacguccuaccaguaucugaucauucagaacacaaccugggaggaucacugccaguucagcagacccucuccuaucggguaccuuggacugcucucccaacggacacgcgacaucuauauuagcagacggcgccggggcaccuuuaccuggacacucuccgauucugaaggcaaggacacgcccgggggauacugucugacccgcuggaugcuuaucgaggccgagcugaagugcuucggcaacacagcugucgccaaauguaaugaaaagcaugaugaggaauuuugcgacaugcucagacuguucgauuuuaacaaacaggcuauucagcggcuuaaggcccccgcgcagaugagcauccaacugauuaauaaagccgugaacgcucucaucaaugaccagcugaucaugaagaaccaucugcgcgacauuaugugcaucccuuauugcaauuacuccaaguauugguaccucaaccacaccacaaccggaaaaacgagccugcccagauguuggcuugugucuaauggcuccuaccugaacgaaacacacuucagcgaugacauugagcagcaagccgauaauaugaucaccgagaugcuccagaaggaauauauggagcggcaggggaaaaccccucugggacuggucgaccuuuucguuuuuagcacaucuuucuaccucauuuccaucuuucugcaccuggugaagaucccgacccaucgccacguggucggcaaacccugcccuaagccccauagacucaaccacaugggcauuuguucuugcgggcuguauaaacagccuggagugcccguuaaguggaagcgguga

SEQ ID NO: 5579 - RNA, 1476 nt, Artificial Sequence
  derived and/or modified protein sequence (opt5) from LASV(LM765-SLE-2012;Clade IV)__AIT17814__GPCstabilized
augggccagaucgugaccuucuuucaagaggucccccacguuauugaagaggugaugaacaucgugcugauugcccucagcauccuggcuguccuuaaggggcuguacaauuucgccacaugcggacucgugggccugguuacguuucuucugcucugugggagauccugcaccacaucucuguauaaaggaguguacgaacugcagacccucgagcugaacauggaaacacuuaauaugaccaugccucugagcuguacaaagaacaauucccaucacuauauuauggucggcaacgagaccgggcucgagcugacgcuuaccaauacaucuaucaucgaccauaaauucugcaaccugagcgaugcgcaccggaagaaucucuacgaccaugcucugauguccauuaucucuaccuuucaccugagcauuccgaacuucaaucaguaugaagccauguccugugauuuuaacggaggcaaaaucagcgugcaguacaaucucucucacuccuaugccaaggacgcugccgaucauugcggcacaguugcuaacggggugcugcaaaccuucaugcgcauggccuggggaggcagcuacauugcgcuugacucugggugcggacggugggauuguaucaugacguccuaccaguaucugauuauccagaauacaaccugggaggaccacugccaguuuagccgccccucuccuaucggcuaccucgggcugcuuucccaaagaacacgggauauuuauaucagccgcagacgccggggaaccuucaccuggacacuguccgacucugaaggcaaggauacgcccggcggguacugucugacccgguggaugcucauugaggccgagcugaaaugcuuuggaaacacagcugucgccaaguguaacgaaaaacaugacgaggaguucugcgauaugcuucgccuguuugacuucaauaagcaggcuauccagagacucaaagcccccgcgcagaugagcauucaacugaucaacaaggccgugaaugcucuuaucaacgaccagcugauuaugaagaaucaccuccgggauaucaugugcauuccuuauugcaacuacuccaaauauugguaccugaaucacaccacaaccgggaagacgagccugcccaaauguuggcucgugucuaacggauccuaccugaaugaaacacauuucagcgacgauaucgagcagcaagccgacaacaugauuaccgagaugcuucagaaggaauauauggagcgccagggcaaaaccccucuggggcucgucgaucuguuuguuuucucuaccagcuuuuaccugaucuccaucuuccuucaccucgugaagauuccgacacauagacacaucgugggaaaacccugcccuaagccccaucggcugaaucacaugggcauuuguucuugcggccuguauaagcagccugggguccccgugaaauggaagcgcuga

SEQ ID NO: 5580 - RNA, 1476 nt, Artificial Sequence
  derived and/or modified protein sequence (opt5) from LASV(LM774-SLE-2012;Clade IV)__AIT17820__GPCstabilized
augggccagaucgugaccuucuuucaagaggucccccacguuauugaagaggugaugaacaucgugcugauugcccucagcauccuggcuguccuuaaggggcuguacaauuucgccacaugcggacucgugggccugguuacguuucuucugcucugugggagauccugcaccacaucucuguauaaaggaguguacgaacugcagacccucgagcugaacauggaaacacuuaauaugaccaugccucugagcuguacaaagaacaauucccaucacuauauuauggucggcaacgagaccgggcucgagcugacgcuuaccaauacaucuaucaucaaccauaaauucugcaaucugagcgacgcgcacaagaaaaaccucuacgaucaugcucugauguccauuaucucuaccuuucaccugagcauuccgaauuucaaccaguaugaagccauguccugugacuuuaauggaggcaagaucagcgugcaguacaaccucucucacuccuaugccgaggaugcugccaaucauugcggcacaguugcuaacggggugcugcaaaccuucaugcggauggccuggggaggcagcuacauugcgcuugacucugggugcggaaacugggauuguaucaugacguccuaccaguaucugauuauccagaauacaaccugggaagaccacugccaguuuagcagacccucuccuaucggcuaccucgggcugcuuucccaacggacacgcgauauuuauaucagcagacggcgccggggaaccuucaccuggacacuguccgacucugagggcaaggauacgcccggcggguacugucugacccgcuggaugcucauugaggccgaacugaaaugcuuuggaaacacagcugucgccaaguguaaugagaaacaugacgaagaguucugcgauaugcuuagacuguuugacuucaacaagcaggcuauccagcggcucaaagcccccgcgcagaugagcauucaacugaucaauaaggccgugaacgcucuuaucaaugaucagcugauuaugaagaaccaccuccgcgacaucaugugcauuccuuauugcaauuacuccaaauauugguaccugaaccacaccacaaccgggaagacgagccugcccaaauguuggcucgugucuaauggauccuaccugaacgagacacauuucagcgacgauaucgagcagcaagccgacaauaugauuaccgaaaugcuucagaaggaguauauggaaagacagggcaaaaccccucuggggcucgucgaucuguuuguuuucucuaccagcuuuuaccugaucuccaucuuccuucaccucgugaagauuccgacacaucggcacaucgugggaaaaucuugccccaagccucaucgccugaaccacaugggcauuuguagcugcggccuguauaagcagcccggggucccugugaaauggaagagauga

SEQ ID NO: 5581 - RNA, 1476 nt, Artificial Sequence
  derived and/or modified protein sequence (opt5) from LASV(LM776-SLE-2012;Clade IV)__AIT17824__GPCstabilized
augggccagaucgugaccuucuuucaagaggucccccacguuauugaagaggugaugaacaucgugcugauugcccucagcauccuggcuguccuuaaggggcuguacaauuucgccacaugcggacucgugggccugguuacguuucuucugcucugugggagauccugcaccacaucuguguauaaaggagucuacgaacugcagacccuggagcucaacauggaaacacugaauaugaccaugccucuuagcuguacaaagaacaauucccaucacuauauuauggugggcaacgagaccgggcuggagcucacgcugaccaauacaucuaucaucaaccauaaauucugcaaucuuagcgacgcgcacaagaaaaaccuguacgaucaugcucucauguccauuaucucuaccuuucaccugagcauuccgaauuucaaccaguaugaagccauguccugugacuuuaauggaggcaagaucagcguucaguacaaccugucucacuccuaugccggcgaugcugccaaucauugcgggacaguggcuaacggaguccuccaaaccuucaugcggauggccuggggcgggagcuacauugcgcuggacucuggaugcggcaagugggauuguaucaugacguccuaccaguaucuuauuauccagaacacaaccugggaggaccauugccaguuuagccgccccucuccuaucggguaccugggacuccugucccaaagaacacgggauauuuauaucagccgcagacgccggggcaccuucaccuggacacucuccgacucugaaggcaaagauacgcccgggggauacugucugacccgguggaugcugauugaggccgagcucaagugcuuuggcaauacagcuguggccaaauguaacgaaaagcacgacgaggaguucugcgauaugcugcgccuuuuugacuucaauaaacaggcuauccagagacugaaggcccccgcgcagaugagcauucaacucaucaacaaggccgugaaugcucugaucaacgaucagcuuauuaugaaaaaucaucugcgggacaucaugugcauuccuuauugcaacuacuccaaguauugguaccucaaucacaccacaaccggaaaaacgagccugcccaaguguuggcuggucucuaacggcuccuaccucaaugaaacacacuucagcgacgauaucgagcagcaagccgacaacaugauuaccgagaugcugcagaaagaauauauggagcgccaggggaagaccccucuuggacugguugaucucuuuguguucucuaccagcuuuuaccugaucuccaucuuccugcaucuugugaaaauuccgacacacagacauaucgucggcaagucuugccccaagccucaccggcucaaucacaugggcauuuguagcugcgggcuguauaaacagcccggagugccuguucgcuggaagagauga

SEQ ID NO: 5582 - RNA, 1476 nt, Artificial Sequence
  derived and/or modified protein sequence (opt5) from LASV(LM778-SLE-2012;Clade IV)__AIT17828__GPCstabilized
augggccagaucgugaccuucuuucaagaggucccccacguuauugaagaggugaugaacaucgugcugauugcccucagcauccuggcuguccuuaaggggcuguacaauuucgccacaugcggacucgugggccugguuacguuucuucugcucugugggagauccugcaccacaucucuguauaaaggagacuacgaacugcagacccucgagcugaacauggaaacacuuaauaugaccaugccucugagcuguacaaagaacaauucccaucacuauauuauggugggcaacgagaccgggcucgagcugacgcuuaccaauacaucuaucaucaaccauaaauucugcaaucugagcgaugcgcacaagaaaaaccucuacgaccaugcucugauguccauuaucucuaccuuucaccugagcauuccgaauuucaaccaguaugaagccauguccugugauuuuaauggaggcaagaucagcguccaguacaaccucucucacuccuaugccggcgacgcugccaaucauugcgggacaguggcuaacggaguucugcaaaccuucaugcggauggccuggggcgggagcuacauugcgcuugauucuggaugcggcaacugggacuguaucaugacguccuaccaguaucugauuauccagaauacaaccugggaggaucacugccaguuuagcagacccucuccuaucggguaccucggacugcuuucccaacggacacgcgacauuuauaucagcagacggcgccggggcaccuucaccuggacacuguccgauucugaaggcaaggacacgcccgggggauacugucugacccgcuggaugcucauugaggccgagcugaaaugcuuuggcaacacagcuguggccaaguguaaugaaaaacaugaugaggaguucugcgacaugcuuagacuguuugauuucaacaagcaggcuauccagcggcucaaagcccccgcgcagaugagcauucaacugaucaauaaggccgucaacgcucuuaucaaugaccagcugauuaugaagaaccaccuccgcgacaucaugugcauuccuuauugcaauuacuccaaauauugguaccugaaccacaccacaaccggaaagacgagccugcccaaauguuggcucgugucuaauggcuccuaccugaacgaaacacauuucagcgaugacaucgagcagcaagccgauaauaugauuaccgagaugcuucagaaggaauauauggagagacaggggaaaaccccucugggacucguggaccuguuugucuucucuaccagcuuuuaccugaucuccaucuuccuucaccucguuaagauuccgacacaucggcacaucgugggcaaaucuugccccaagccucaucgccugaaccacaugggcauuuguagcugcgggcuguauaagcagcccggagugccugucaaauggaagagauga

SEQ ID NO: 5583 - RNA, 1476 nt, Artificial Sequence
  derived and/or modified protein sequence (opt5) from LASV(Mad39;Clade IV)__ANH09722__GPCstabilized
augggccagaucgugaccuucuuucaagaggucccccacguuauugaagaggugaugaacaucgugcugauugcccucagcauccuggcuguccuuaaggggcuguacaauguggccacaugcggacucauuggccugguuacguuccuucugcucugugggagauccugcaccacaacccuguauaaaggaguguacgaacugcaggcgcucgagcugaacauggaaacacuuaauaugaccaugccucugucuuguacaaagaacaauagccaucacuauauccgggucggcaacgagaccgggcucgagcugacgcuuaccaauacaucccugaucaaccauaaauuuugcaaucucucugacgcucacaagaaaaaccuguacgaucaugcccugaugagcauuaucuccaccuuccaccucucuauuccgaauuuuaaccaguaugaagccaugagcugugacuucaaugauggaaagaucuccgugcaguacaaccugagccacacauaugcuggcgacaccgccaaucauugcggcacgguugcuaacggggugcuucaaacauuuaugcgcauggccuggggaggcucuuacauugcgcuggauuccgggugcggaggcugggacuguaucaugaccagcuaccaguaucucauuauccagaacacaaccugggaggaucacugccaguucucucggcccuccccuaucggguaccugggacuucugagccaacgcaccagagacauuuauaucucucggcgccgccggggcacauuuacguggacccuguccgauagcgaaggcaaggacacacccgggggauacugucucaccagauggaugcugauugaggccgagcuuaaaugcuucggcaauacagcugucgccaaguguaacgaaaaacaugaugaggaauuuugcgacaugcugcgccucuucgauuuuaauaagcaggcuauccagcggcugaaagcccccgcgcagauguccauucaacuuaucaacaaggccgugaaugcucugaucaacgaccagcucauuaugaagaaucaccugagagacaucaugugcauuccuuauugcaacuacucuaaauauugguaccugaaucacaccgugacgggaaagacaagccuccccaaauguuggcuggucuccaacggcagcuaccuuaaugaaacccauuucucugaugacaucgagcagcaagccgauaacaugauuaccgagaugcugcagaaggaauauauggagcggcaggggaaaacaccucucggacugguugaccuguucguguuuuccaccagcuucuaccuuaucucuaucuuucuccaccuggugaagauuccgacacaucgccacgucgugggcaaacccugcccuaagccccauagacugaaucacaugggcaucuguagcugcggguucuauaagcagccuggaguucccgugcgguggaaacgcuga

SEQ ID NO: 5584 - RNA, 1476 nt, Artificial Sequence
  derived and/or modified protein sequence (opt5) from LASV(Mad41;Clade IV)__ANH09724__GPCstabilized
augggccagaucgugaccuucuuucaagaggucccccacguuauugaagaggugaugaacaucgugcugauugcccucagcauccuggcuguccuuaaggggcuguacaauguggccacaugcggacucauuggccugguuacguuccuucugcucugugggagauccugcaccacaacccuguauaaaggaguguacgaacugcaggcgcucgagcugaacauggaaacacuuaauaugaccaugccucugucuuguacaaagaacgacagccaucacuauaucauggucggcaaugagaccgggcucgagcugacgcuuaccaacacauccaucauuucucauaaauuuugcaaucugagcgaugcucacaagcagaaccucuacgaccaugcccugauguccaucauuucuaccuuccaccugagcaucccgaauuuuaaccaguaugaagccauguccugugauuucaauggaggcaaaauuagcgugcaauacaaccucucucacacauaugcuggcgacgccgcuaaucauugcgggaccguugccaacggagugcugcagacguuuaugcggauggcguggggcggguccuacaucgcccuugauagcggaugcggcgggugggacuguauuaugacaucuuaccaguaucugaucauccagaauaccacaugggaggaucacugccaauucuccagacccagcccuauuggauaccucggccugcuuucucagcggacccgcgacaucuauauuuccagacggcgccggggcaccuuuacauggacgcugagcgauuccgaagggaaggacacccccggaggcuacugucugacacgcuggaugcucaucgaggcugagcugaagugcuucgggaacaccgccgucgcuaaauguaacgaaaagcaugaugaggaauuuugcgacaugcuuagacuguucgauuuuaauaaacaggccauucagcggcucaaggcgcccgcccaaaugucuauccagcugaucaacaaagcugugaaugcccuuauuaacgaccagcugaucaugaagaaucaccuccgcgacauuaugugcaucccuuauugcaacuacagcaaguauugguaccugaaucacacagugaccggcaaaacgucccugcccaaguguuggcucgucagcaacgggucuuaccugaaugaaacacauuucuccgaugacauugagcaacaggcugauaacaugaucaccgagaugcuucagaaagaauauauggagagacagggaaagaccccucugggccucguugaccuguucguguuuagcacaucuuucuaccugaucagcauuuuucuucaccucgugaaaaucccgacccaucggcacgucgugggcaagcccugcccuaaaccccaucgccugaaucacauggggauuuguuccugcggauucuauggccaaccugggguucccgugagauggaagcgguga

SEQ ID NO: 5585 - RNA, 1476 nt, Artificial Sequence
  derived and/or modified protein sequence (opt5) from LASV(Mad63;Clade IV)__ANH09728__GPCstabilized
augggccagaucgugaccuucuuucaagaggucccccacguuauugaagaggugaugaacaucgugcugauugcccucagcguccuggcugugcuuaaggggcuguacaauguugccacaugcggacucaucggccuggugacguuccuucugcucugugggagauccugcaccacaacccuguauaaaggagucuacgaacugcaggcgcucgagcugaacaugggcacacuuaauaugaccaugccucugucuuguacaaagaacaauagccaucacuauauuaugguggggaacgaaaccggacucgagcugacgcuuaccaauacauccaucaucaaccauaaauuuugcaaucugucugacgcucacaagaaagaucucuacgaccaugcccugaugagcauuaucuccaccuuccaccugucuguuccgaacuuuaaucaguaugaggccaugagcugugauuucaacggcggcaagauuuccgugcaguacaaucucagccacgcuuaugccggggacacagcuaaccauugcggaaccgucgccaauggcgugcugcaaacguuuaugcggauggcguggggagggucuuacaucgcccuugauuccggcugcgggggaugggacuguauuaugacaagcuaccaguaucugaucauucagaacaccacaugggaagaucacugccaguucucuagacccuccccuaucggcuaccucggccugcuuagccaacggacccgcgacaucuauauuucuagacggcgccgggggaccuuuacauggacgcuguccgauagcgagggagaauacacccccggcggguauugucugacacgcuggaugcucaucgaggcugagcugaagugcuucggaaacaccgccguggcuaaauguaaugaaaagcaugacgaggaauuuugcgauaugcuuagacuguucgacuuuaacaaacaggccauucagcggcucaaggcgcccgcccagauguccauccaacugauuaauaaagcugucaacgcccuuaucaaugaucagcugaucaugaagaaccaccuccgcgacauuaugugcaucccuuacugcaauuauucuaaguacugguaccugaaccacacaguuaccgggaaaacgagccugcccaaguguuggcucguguccaauggaagcuaucugaacgaaacacauuucucugacgauauugagcagcaagcugacaauaugaucaccgagaugcuucagaaagaauacauggagagacagggcaagaccccucugggccucguggaucuguucgucuuuuccaccagcuucuaucugauuucuaucuuucuucaccucgugaaaaucccgacacaucggcacguuguggggaagcccugcccuaaaccccaucgccugaaccacaugggaauuuguagcugcggcuucuacaagcagccugggguccccgugagauggaagcgguga

SEQ ID NO: 5586 - RNA, 1476 nt, Artificial Sequence
  derived and/or modified protein sequence (opt5) from LASV(Mad69;Clade IV)__ANH09730__GPCstabilized
augggccagaucgugaccuucuuucaagaggucccccacguuauugaagaggugaugaacaucgugcugauugcccucagcguccuggcugugcuuaaggggcuguacaauguugccacaugcggacucaucggccuggugacguuccuucugcucugugggagauccugcaccacaacccuguauaaaggagucuacgaacugcaggcgcucgagcugaacauggaaacacuuaauaugaccaugccucugucuuguacaaagaacaauagccaucacuauauuauggugggcaacgagaccgggcucgagcugacgcuuaccaauacauccaucaucaaccauaaauuuugcaaucugucugacgcucacaagaaaaaccucuacgaucaugcccugaugagcauuaucuccaccuuccaccugucuauuccgaauuuuaaccaguaugaagccaugagcugugacuucaaucagggaaagaucuccguucaauacaaccucagccacgcuuaugccggcgaugcugccaaucauugcggcacaguggcgaacgggguccugcagaccuuuaugcggauggccuggggaggcucuuacauugcucuugacuccgggugcggaggcugggauuguaucaugacgagcuaccaguaucugauuauccagaacacaaccugggagaaucacugccaauucucuagacccuccccuaucggguaccucggacugcuuagccagcggacacgcgacauuuauaucucuagacggcgccggggcaccuuuaccuggacacuguccgauagcgaaggcaaggggacgcccggaggcuacugucugacccgcuggaugcucauugaggccgagcugaaaugcuucgggaacacagcuguggccaaguguaaugaaaaacaugacgaggaauuuugcgauaugcuuagacuguucgacuuuaacaagcaggcgauccagcgguucaaagcccccgcucaaauguccauucagcucaucaauaaggccgugaacgcucugaucaaugaucagcuuauuaugaagaaccaucugcgcgacaucaugugcauuccuuauugcaauuacucuaaauauugguaccucaaccacaccgucacaggaaagaccagccugcccaaauguuggcugguuuccaaugggagcuaccucaacgaaacgcacuucucugaugacaucgagcaacaggccgacaauaugauuacagagaugcugcagaaggaauauauggagagacagggacggaccccucuuggccugguggaucucuuuguguucuccaccagcuuuuaccugaucucuaucuuccugcaccuugucaaaauuccgacacaucgccacgugguuggcaagcccugcccuaaaccccauagacucaaccacauggggaucuguagcugcggauuuuauaagcaaccuggcgugcccguccgguggaagcgcuga

SEQ ID NO: 5587 - RNA, 1476 nt, Artificial Sequence
  derived and/or modified protein sequence (opt5) from LASV(Mad83;Clade IV)__ANH09732__GPCstabilized
augggccagaucgugaccuucuuucaagaggucccccacguuauugaagaggugaugaacaucgugcugauugcccucagcauccuggcuguccuuaaggggguguacaauguugccacaugcggacugauuggccucgugacguuccugcuucuguccgggagaucuuguaccacaaccaucuauaaaggagucuacgaacuccaggcgcuggagcugaacauggaaacacucaauaugaccaugccucugagcugcacaaagaacaauucccaucacuauaucauggugggcaacgagaccgggcuugagcugacgcucaccaauacaucuauuaucaaccauaaauuuuguaaucugagcgacgcucacaagaaaaaccuuuacgaucaugcccugauguccauuaucucuaccuuccaccucagcauuccgaauuuuaaccaguaugaagccauguccugcgacuucaauggaggcaagaucagcguucaguacaaccugucucacacauaugcuggcgaugccgcuaaucauugugggaccguggccaacggaguccugcaaacguuuaugcggauggcguggggcggguccuacauugcccucgacagcggaugcggcgggugggauugcaucaugacaucuuaccaguaucugaucauucagaacaccacaugggagaaucauugucaguucucccgccccagcccuaucggauaccuuggccugcucucucaaagaacccgggacauuuauaucucccgcagacgccggggcaccuuuacauggacgcugagcgauuccgaagggaaggacacccccggaggcuacugccucacacgguggaugcugauugaggcugagcugaaauguuucgggaacaccgccguggcuaagugcaaugaaaaacacgaugaggaauuuugugacaugcuccgccuguucgauuuuaacaagcaggccauccagagacuuaaagcgcccgcccagaugucuauccaacugauuaauaaggcugugaacgcccucaucaaugaccagcugauuaugaagaaccaccuucgggauaucaugugcauuccuuauugcaauuacagcaaauauugguaccugaaccauacagucaccggaaagacgucccuccccaaaugcuggcugguuagcaaugggucuuaccugaacgaaacacacuucuccgacgacaucgagcagcaagcugauaauaugaucaccgagaugcuccagaaggaauauauggagcgccagggaaaaaccccucugggccuuguggaccuguucguguuuagcacaucuuucuaccucauuagcaucuuucugcaucuggucaagauuccgacccacagacauaucgugggcaaacccuguccuaagccccaccggcuuaaccacauggggauuugcuccuguggauucuauaagcagccuggcguucccgugcgcuggaaaagauga

SEQ ID NO: 5588 - RNA, 1476 nt, Artificial Sequence
  derived and/or modified protein sequence (opt5) from LASV(NL;Clade IV)__AAO59512__GPCstabilized
augggccagaucgugaccuucuuucaagaggucccccacguuauugaagaggugaugaacaucgugcugauugcccucagcauccuggcuguccuuaaggggcuguacaauuucgccacaugcggacucgugggccugguugcguuucuucugcucugugggagauccugcacgucuagccuguauaaaggaguguacgaacugcagacccucgagcugaacauggaaacacuuaauaugaccaugccucuguccuguacaaagaacaauucucaucacuauauucgggucggcaacgagaccgggcucgagcugacacuuaccaauacgagcaucaucaaccauaaauucugcaaucuguccgacgcucacaagaaaaaccucuacgaucaugcccugaugucuauuaucagcaccuuucaccuguccauuccgaauuucaaccaguaugaagccaugagcugugacuuuaauggaggcaagaucucugugcaguacaaccucucccacagcuaugcuguugaugccgcuaagcauugcggcacaguggccaaugggguccugcaaaccuucaugcgcauggcguggggaggcucuuacauugcccuugacuccgggugcggaagaugggauuguaucaugacaagcuaccaguaucugauuauccagaacaccacgugggaggaccauugccaguuuucucggcccuccccuaucggcuaccucgggcugcuuagccaacgcacaagagauauuuauaucucccggcgccgccggggaaccuucacauggacccugucugacagcgaaggcaaagauacccccggcggguacugucugacaagauggaugcucauugaggcugagcugaagugcuuuggaaacacggccguggcuaaauguaaugaaaagcacgacgaggaguucugcgauaugcuucggcuguuugacuucaacaaacaggccauccagcgccucaagacccccgcgcagauguccauucaacugaucaauaaggccgugaacgcucuuaucaaugaucagcugauuaugaaaaaccaccucagagacaucaugugcauuccuuauugcaauuacagccgguauugguaccugaaccauacaaccacagggaagaccucucugcccaaauguuggcucgucuccaauggaagcuaccugaacgaaacgcgcuucucugacgauaucgagcagcaagccgacaauaugauuacagagaugcuucagaaggaauauauggagagacagggcaaaaccccucuggggcucguugaucuguuuguguucagcaccuccuuuuaccugaucucuaucuuccuucaccucgugaagauuccgacacaucggcacaucgucggaaaaagcugccccaagccucaucgccugaaccacaugggcauuuguuccugcggccuguauaagcagcccggggugccuguuaaauggaagagauga

SEQ ID NO: 5589 - RNA, 1476 nt, Artificial Sequence
  derived and/or modified protein sequence (opt5) from LASV(Z0947-SLE-2011;Clade IV)__AIT17840__GPCstabilized
augggccagaucgugaccuucuuucaagaggucccccacguuauugaagaggugaugaacaucgugcugauugcccucagcauccuggcuguccuuaaggggcuguacaauuucgccacaugcggacucgugggccugguuacguuucuucugcucugugggagauccugcaccauuucucuguauaaaggaguguacgaacugcagacacucgagcugaacauggaaacccuuaauaugacaaugccucugagcuguaccaagaacaauucccaucacuauaucauggucggcaacgagacagggcucgagcugacccuuacgaauaccucuaucauuaaccauaaauucugcaaucugagcgacgcgcacaagaaaaaccucuacgaucaugcucugauguccaucauuucuacauuucaccugagcaucccgaauuucaaccaguaugaagccauguccugugacuuuaauggaggcaagauuagcgugcaguacaaccucucucacuccuaugccggcgaugcugccaaucauugcgggaccguugcuaacggagugcugcaaacauucaugcggauggccuggggcgggagcuacaucgcgcuugacucuggaugcgauagaugggacuguauuaugaccuccuaccaguaucugaucauccagaacacgacaugggaggaucacugccaguuuagccggcccucuccuauuggcuaccucgggcugcuuucccaacgcaccagagacaucuauauuagccggcgccgccggggaacauucaccuggacccuguccgauucugaaggcaaggacacacccggcggguacugucugacgagauggaugcucaucgaggccgagcugaaaugcuuuggaaauaccgcugucgccaaguguaacgaaaaacaugaugaggaguucugcgacaugcuucggcuguuugauuucaauaagcaggcuauucagcgccucaaagcccccgcgcagaugagcauccaacugaucaacaaggccgugaaugcucuuauuaacgaccagcugaucaugaagaaucaccucagagacauuaugugcaucccuuauugcaacuacuccaaauauugguaccugaaucacacaaccacagggaagaccagccugcccaaauguuggcucgugucuaacggauccuaccugaaugaaacgcauuucagcgaugacauugagcagcaagccgauaacaugaucacagagaugcuucagaaggaauauauggagcggcagggcaaaaccccucuggggcucgucgaccuguuuguuuucucuaccagcuuuuaccugaucuccauuuuccuucaccucgugaagaucccgacacaucgccacauugugggaaaacccugcccuaagccccauagacugaaucacaugggcaucuguucuugcggccuguauaagcagccugggguccccgugaaauggaagcgguga

SEQ ID NO: 5590 - RNA, 1476 nt, Artificial Sequence
  derived and/or modified protein sequence (opt5) from LASV(Z0948-SLE-2011;Clade IV)__AIT17844__GPCstabilized
augggccagaucgugaccuucuuucaagaggucccccacguuauugaagaggugaugaacaucgugcugauugcccucagcauccuggcuguccuuaaggggcuguacaauuucgccacaugcggacucgugggccugguuacguuucuucugcucugugggagauccugcaccauuucucuguauaaaggaguguacgaacugcagacacucgagcugaacauggaaacccuuaauaugacaaugccucugagcuguaccaagaacaauucccaucacuauaucauggucggcaacgagacagggcucgagcugacccuuacgaauaccucuaucauuaaccauaaauucugcaaucugagcgacgcgcacaagaaaaaccucuacgaucaugcucugauguccaucauuucuacauuucaccugagcaucccgaauuucaaccaguaugaagccauguccugugacuuuaauggaggcaagauuagcgugcaguacaaccucucucacuccuaugccggcgaugcugccaaucauugcgggaccguugcuaacggagugcugcaaacauucaugcggauggccuggggcgggagcuacaucgcgcuugacucuggaugcgauagaugggacuguauuaugaccuccuaccaguaucugaucauccagaacacgacaugggaggaucacugccaguuuagccggcccucuccuauuggcuaccucgggcugcuuucccaacgcaccagagacaucuauauuagccggcgccgccggggaacauucaccuggacccuguccgauucugaaggcaaggacacacccggcggguacugucugacgagauggaugcucaucgaggccgagcugaaaugcuuuggaaauaccgcugucgccaaguguaacgaaaaacaugaugaggaguucugcgacaugcuucggcuguuugauuucaauaagcaggcuauucagcgccucaaagcccccgcgcagaugagcauccaacugaucaacagagccgugaaugcucuuauuaacgaccagcugaucaugaagaaucaccuccgggacauuaugugcaucccuuauugcaacuacuccaaguauugguaccugaaucacacaaccacagggaaaaccagccugcccaaguguuggcucgugucuaacggauccuaccugaaugaaacgcauuucagcgaugacauugagcagcaagccgauaacaugaucacagagaugcuucagaaagaauauauggagcgccagggcaagaccccucuggggcucgucgaccuguuuguuuucucuaccagcuuuuaccugaucuccauuuuccuucaccucgugaaaaucccgacacauagacacauugugggaaagcccugcccuaaaccccaucggcugaaucacaugggcaucuguucuugcggccuguauaagcagccugggguccccgugaaguggaaacgcuga

SEQ ID NO: 5591 - RNA, 1476 nt, Artificial Sequence
  derived and/or modified protein sequence (opt5) from LASV(Z148;Clade IV)__AAT49008__GPCstabilized
augggccagaucgugaccuucuuucaagaggucccccacguuauugaagaggugaugaacaucgugcugauugcccucagcauccuggcuguccuuaaggggcuguacaauguggccacaugcggacucauuggccugguuacguuccuuuuucugugugggagauccugcucuaccacacucuauaaaggaguguacgaacugcagacccuggagcucaacauggaaacacugaauaugaccaugccucuuagcuguacaaagaacaauucccaucacuauaucauggucggcaacgagaccgggcuggagcucacgcugaccaauacaucuaucauuaaccauaaauucugcaaucuuagcgacgcgcacaagaaaaaccuguacgaucauacccucauguccaucauuucuacauuucaccugagcaucccgaauuucaaccaguaugaagcuauguccugugacuuuaauggaggcaagauuagcgugcaguacaaccugucucacuccuaugccguugaugccgcuaaucauugcggcaccguggccaacgggguccuccaaacguucaugcggauggcuuggggaggcagcuacaucgcccuggacucugggugcggaaacugggauuguauuaugacauccuaccaguaucuuaucauccagaauaccacaugggaggaccacugccaguuuagcagacccucuccuauuggcuaccuggggcuccugucccaacggacccgcgauaucuauauuagcagacggcgccggggaaccuucacauggacgcucuccgacucugaaggcaaggauacccccggcggguacugucugacacgcuggaugcugaucgaggcggagcucaaaugcuuuggaaacaccgccguggcuaaguguaaugaaaaacaugacgaggaguucugcgauaugcugagacuuuuugacuucaacaagcaggccauucagcggcugaaagcucccgcccagaugagcauccaacucaucaauaaggcggugaacgcccugauuaaugaucagcuuaucaugaagaaccaucugcgcgacauuaugugcaucccuuauugcaauuacuccagauauugguaccucaaccacacagucaccgggaaaacgagccugcccaaguguuggcugguuucuaauggauccuaccucaacgaaacacacuucagcgacgauauugagcagcaagcugacaaucugaucaccgagaugcuucagaaagaauauauggagcggcagggcaagaccccucuggggcucguggaucuguuuguguucucuaccagcuuuuaccugaucuccauuuuccuucaccucgucaaaaucccgacacaucgccacauugugggaaagcccugcccuaaaccccauagacugaaccacaugggcaucuguucuugcggcguuuauaagcagccuggggugcccguccgguggaagcgcuga

SEQ ID NO: 5592 - RNA, 1476 nt, Artificial Sequence
  derived and/or modified protein sequence (opt5) from LASV(Bamba-R114;Clade V)__AHC95555__GPCstabilized
augggccagaucgugaccuucuuucaagaggucccccacguuauugaagaggugaugaacaucgugcugauugcccucagcauccuggcuguccuuaaggggcuguacaauauugccacaugcggacucaucggccuggugacguuccuucugcucugugggagauccugcucuagcaaccuguauaaaggaguuuacgaacugcagucccucgaccugaauauggagacccuuaacaugacaaugccucugucuuguaccaagaauaacagccaucacuauauccgggcgggcaaugaaacagggcucgagcugacccuuacaaacaccucccugauuaaucauaaauuuugcaaccucucugaugcucacaagaaaaaucuguacgaccauacgcugaugagcaucauuuccaccuuccaccucagcaucccgaacuuuaaucaguaugaggccaugucuugugauuucaacggaggcaagauuuccgugcaguacaaucugagccacgccuaugcuaucgacgccgcugaacauugcggcacagucgccaacggggugcuucaaaccuuuaugcgcauggcguggggaggcucuuacauugcccuggauuccgggugcggaaacugggacuguaucaugacaagcuaccaguaucucaucauucagaauaccacgugggaggaucacugccaguucucucggcccuccccuaucggcuaccuggggcuucugagccaacgcacaagagacauuuauaucucccggcgccgccggggaaccuuuacauggacccugucugauagcgaaggcaacgcuacccccggcggguacugucucacaagauggaugcugauugaggccgagcuuaagugcuucggaaauacggcuguugccaaauguaacgaaaagcaugacgaggaauuuugcgauaugcugcggcuguucgacuuuaauaaacaggcgaucucccgccucaagagccccgcccagaugucuauccagcuuauuaacaaagcugugaaugcccugaucaacgaucaacucauuaugaagaaucaccugagagacaucaugugcauuccuuauugcaacuacuccaaguauugguaccugaaucacaccaucacagggcggaccagccuccccaaauguuggcuggucucuaacggaagcuaccuuaaugaaacacauuucuccgacgauaucgagcagcaggcugacaacaugauuaccgagaugcugcaaaaggaauauauggagcgccagggcaaaacgccucucgggcugguggaucuguucguguuuucuaccagcuucuaccuuaucuccauuuuucuccaccuggucaagaucccgacacauagacacauuguuggaaaacccugcccuaagccccaucggcugaaucacaugggcaucuguagcugcggccucuauaaacagccuggggugccccugaaguggaagcgcuga

SEQ ID NO: 5593 - RNA, 1476 nt, Artificial Sequence
  derived and/or modified protein sequence (opt5) from LASV(Komina-R16;Clade V)__AHC95557__GPCstabilized
augggccagaucgugaccuucuuucaagaggucccccacguuauugaagaggugaugaacaucgugcugauugcccucagcauccuggcuguccuuaaggggcuguacaauauugccacaugcggacucaucggccuggugacguucuuucuucugugugggagauccugcucuagcaaccucuauaaaggaguuuacgaacugcagucccuggaccucaauauggagacccugaacaugacaaugccucuuucuuguaccaagaauaacagccaucacuauauccgggugggcaaugaaacagggcuggagcucacccugacaaacaccucccuucugaaucauaaauucugcaaccucucugaugcgcacaagcgcaaucuguacgaccaugcucugaugagcauuaucuccacguuucaccucagcauuccgaacuucaaucaguaugaggccaugucuugugauuuuaacggaggcaaaaucaccguccaguacaaucugucccacagcuaugccggcgacacagcuaagcauugcgggaccauugccaacggagugcuucaaacauucaugagaauggcuuggggcgggucuuacaucgcccuggauuccggaugcggcaacugggacuguauuaugaccagcuaccaguaucucaucauccagaauacgacaugggaagaucauugccaguuuucucggcccuccccuauuggguaccugggacuucugagccaacgcaccagagacaucuauauuucccggcgccgccggggcacauucaccuggacccugucugauagcgagggcaacgcgacacccgggggauacugucucacgagauggaugcugaucgaagccgagcuuaagugcuuuggcaauaccgcuguugccaaauguaacgagaagcacgacgaagaguucugcgauaugcugcggcucuuugacuucaauaaacaggcuauuucccgccugagaagccccgcccagaugucuauccagcuuaucaacaaggcggugaaugcccugauuaacgaucaacucaucaugaaaaaucaucugcgggacauuaugugcaucccuuauugcaacuacuccaaguauugguaccugaaucacacagucaccggacgcacaagccuccccaaguguuggcuggugucuaacggcagcuaccuuaaugagacccacuucuccgacgauauugaacagcaggcugacaacaugaucacggagaugcugcaaaaagaguauauggauagacaggggaagacaccucucggacugguggaccuguuugucuucucuaccagcuuuuaccuuaucuccauuuuccuccaucugguuaaaaucccgacccaccggcauauugugggcaagcccugcccuaaaccccaccgccugaauagaaugggcaucuguagcugcgggcucuauaagcagccuggagugcccgucaaauggaagcgguga

SEQ ID NO: 5594 - RNA, 1476 nt, Artificial Sequence
  derived and/or modified protein sequence (opt5) from LASV(Ouoma-R123;Clade V)__AHC95559__GPCstabilized
augggccagaucauuaccuucuuucaagaggugccccacgucaucgaagagguuaugaacauugugcugaucgcccucagcauucuggcugugcuuaaggggcuguacaauaucgccacaugcggacucaucggccuggucacguuccuucugcucugugggagauccugcucuagcucccuguauaaaggaguguacgaacugcagucucucgaccugaacauggagacccuuaauaugacaaugccucugagcuguaccaagaacaauucccaucacuauauucggguuggcaacgaaacagggcucgagcugacccuuacaaauaccucucugaucaaccauaaauuuugcaaucucagcgaugcgcacaagaaaaaccuguacgaccaugcucugauguccauuaucagcacguuccaccucucuauuccgaauuuuaaccaguaugaggccauguccugugauuucaauggaggcaagaucagcgugcaguacaaccugucucacgccuaugcuauugacgccgcuucccauugcggcaccgucgccaauggggugcuucaaacauuuaugcgcauggcguggggaggcagcuacaucgcccuggauucugggugcggaaacugggacuguaucaugaccuccuaccaguaucucauuauccagaacacaaccugggaagaucauugccaguucagcagacccuccccuauuggcuaccuggggcuucugucucaacggacgcgcgacaucuauauuagcagacggcgccggggaacauuuaccuggacacuguccgauagcgagggcaaugcuacccccggcggguacugucucacccgcuggaugcugaucgaagccgagcuuaagugcuucggaaacacagcuguugccaaauguaaugagaagcacgacgaagaguuuugcgauaugcugagacucuucgacuuuaacaaacaggcgaucucucggcugaagucccccgcccagaugagcauucagcuuaucaauaaagcugugaacgcccugauuaaugaucaacucaucaugaagaaccaucugcgcgacauuaugugcaucccuuauugcaauuacucuaaguauugguaccugaaccacacggucaccgggaaaacaagccuccccaaguguuggcugguguccaauggaucuuaccuuaacgagacccacuucagcgacgauaucgaacagcaggcugacaauaugauuacagagaugcugcaaaaagaguauauggaaagacagggcaagaccccucucgggcugguggaucuguucgucuuuuccacgagcuucuaccuuaucucuauuuuucuccaucugguuaaaaucccgacacaccggcauauugugggaaagcccugcccuaaaccccaccgccugaaccacaugggcaucuguuccugcggccucuauaagcagccuggggugcccgucaaguggaaaagauga

SEQ ID NO: 5595 - RNA, 1476 nt, Artificial Sequence
  derived and/or modified protein sequence (opt5) from LASV(Soromba-R;Clade V)__AHC95553__GPCstabilized
augggccagaucgugaccuucuuucaagaggucccccacguuauugaagaggugaugaacaucgugcugauugcccucagcauccuggcuguccuuaaggggcuguacaauauugccacaugcggacucaucggccuggugacguucuuucuucugugugggagauccugcucuagcaaccucuauaaaggaguuuacgaacugcagucccuggaccucaauauggagacccugaacaugacaaugccucuuucuuguaccaagaauaacagccaucacuauauccgggugggcaaugaaacagggcuggagcucacccugacaaacaccucccuucuggaucauaaauucugcaaucucucugacgcgcacaagaaaaaccuguacgaucaugcucugaugagcauuaucuccacguuucaccucagcauuccgaauuucaaccaguaugaggccaugucuugugacuuuaauggaggcaagaucaccguccaguacaaccugucccacagcuaugccggcgaugcugcccgccauugcgggacaauugcuaauggagugcuucaaaccuucaugagaauggccuggggcgggucuuacaucgcgcuggacuccggaugcggcaacugggauuguauuaugacaagcuaccaguaucucaucauccagaacaccacgugggaagaccauugccaguuuucucggcccuccccuauuggguaccugagccuucugucccaacgcacaagagauaucuauauuucucggcgccgccggggaaccuucacauggacccugagcgacuccgagggcaaugccacccccggcggguacugucucacaagauggaugcugaucgaagcugagcuuaagugcuuuggaaacacggccguugcuaaauguaaugagaagcacgaugaagaguucugcgacaugcugcggcucuuugauuucaacaaacaggccauuagccgccugagaucucccgcgcagauguccauccagcuuaucaauaaggccgugaacgcucugauuaaugaccaacucaucaugaaaaaccaucugcgggacauuaugugcaucccuuauugcaauuacagcaaguauugguaccugaaccacaccgucacagggcgcaccucucuccccaaguguuggcuggugagcaauggauccuaccuuaacgagacacacuucucugaugacauugaacagcaggccgauaauaugaucaccgagaugcugcaaaaagaguauauggacagacagggcaagacgccucucgggcugguggaucuguuugucuucagcacauccuuuuaccuuaucagcauuuuccuccaucugguuaaaaucccgacccaccggcauauugugggaaagcccugcccuaaaccccaccgccugaacagaaugggcaucuguucuugcggccucuauaagcagccuggggugcccgucaaauggaagcgguga

SEQ ID NO: 5596 - RNA, 1473 nt, Artificial Sequence; identical to SEQ ID NO: 5350
  derived and/or modified protein sequence (opt5) from LASV(Alzey;Clade VI)__SCA79105__GPCstabilized

SEQ ID NO: 5597 - RNA, 1473 nt, Artificial Sequence
  derived and/or modified protein sequence (opt5) from LASV(Lassa/H.sapiens-wt/TGO/2016/201600568;Clade VI)__AVN98153__GPCstabilized
augggccagaucauuaccuucuuucaagaggugccccacgucaucgaagagguuaugaacauugugcugaucgcccucagccugcuugcuauucugaaggggguguacaaugucgccacaugcggaaucaucggccucgugacguuccuguuucuuugugggagauccugcucucugauuuauaaaggaagcuacgaacuccagacccuggagcugaacauggaaacacucaauaugaccaugccucuguccuguacaaagaacucuagccaucacuauauccggguuggcaaugagaccgggcuugagcugacacucaccaacacguccauuaucaaucauaaauucugcaaccugucugacgcgcacaagcgcaaucuuuacgaucaugcucugaugagcauucucuccaccuuucaccugagcaucccgaacuucaaucaguaugaagccaugucuugugacuuuaacggaggcaaaauuuccgugcaguacaaucugagccacgccuaugcugucgaugccgcugagcauugcggcacaguggccaacgggguucuccaaaccuucaugagaauggcguggggaggcucuuacaucgcccuggacuccgggugcggaaauugggauuguaucaugacaagcuaccaguaucuuauuauccagaacaccacgugggaagaccacugccaguuuucucgccccuccccuauuggcuaccuggggcuccugagccaaagaacacgggauaucuauauuucccgcagacgccggggaaccuucacauggacccucucugacagcgagggcaacgagacccccggcggguacugucugacacgguggaugcugaucgaagcugagcucaagugcuuuggaaauacggccguggcuaaguguaacgaaaaacaugaugaggaguucugcgacaugcugcgccuuuuugauuucaauaagcaggccauccagagacugaaaucccccgcgcagaugagcauucaacucaucaacaaggccgucaaugcucugauuaacgaccagcuuaucaugaaaaaucaucugcgggauaugaugugcauuccuuauugcaacuacucuaaguauugguaccucaaucacaccuccagcgggcgcgccucucugcccaaguguuggcuggugagcaacggauccuaccucaaugagacacacuucucugacgacaucgaacagcaagcugauaacaugaucaccgagaugcugcagaaagaauauauugacagacagggcaagacaccucuugggcugguggaucucuuugucuucagcaccuccuuuuaccugaucagcauuuuccugcaccuuaucaaaauuccgacgcaucggcacaucguuggaaagcccugcccuaaaccccaucgccucaaucacaugggcauuuguucuugcggccuguauaagcagccuggggugcccacaagauggaaacgguga

SEQ ID NO: 5598 - RNA, 1473 nt, Artificial Sequence
  derived and/or modified protein sequence (opt5) from LASV(NIGERIA IKEJI;Clade II)__AMZ00373__GPCstabilized
augggccagaucauuaccuucuuucaagaggugccccacgucaucgaagagguuaugaacauugugcugaucgcccucagccugcuugcuauucugaaggggaucuacaauguggccacaugcggacucuucggccugaucuccuuucuuuuccugugugggagaucuugcagcacgauguauaaaggagucuacgaacuccagacccuggagcuggacauggcgaaccucaauaugacaaugccucuguccuguaccaagaacaauucucaucacuauauuauggugggcaacgaaacagggcuugagcugacccucacaaaucagagcaucauuaaccauaaauuuugcaaucuguccgaugcucacaagaaaaaccuuuacgaccauacccugaugucuaucauuagcacguuccaccucuccaucccgaauuuuaaccaguaugaggccaugagcugugauuucaauggaggcaagauuucuguucaauacaaccugucccacagcuaugccguggacgcugccaaucauugcggcaccgucgcuaacggggugcugcagacauuuaugcggauggccuggggaggcucuuacaucgcgcucgauuccgggugcggaaacugggacuguaucaugaccagcuaccaguaucugauuauccagaauacaaccugggaagaucacugccaauucucucgccccuccccuauuggcuaccuugggcugcucagccagagaacgcgggacaucuauauuucccgcagacgccggggaacauuuaccuggacacugucugauagcgagggcaacgacgcccccggcggguacugucucacccgguggaugcugaucgaagcugagcugaaaugcuucggaaauaccgccaucgcuaaguguaacgagaaacaugaugaagaguuuugcgacaugcuccgccuguucgauuucaauaagcaggccauuaaaagacuuaaggcgcccgcccagauguccauccaacugauuaacaaggcuguuaaugcccucaucaacgaccagcugauuaugaaaaaucaccuucgggacaucaugugcaucccuuauugcaacuacagcaaguauugguaccugaauaacacagugacggggaaaucuucccuccccaaguguuggcuggucagcaauggaucuuaccugaacgagacccacuuuagcgaugacauugaacagcaagcugauaauaugaucacagagaugcuccagaaagaguauauggaccgccagggcaagaccccucuggggcuuguggaucuguucguguuuuccacaucuuucuaccucauuagcaucuuucugcaucuggucaaaauuccgacccacagacauaucacgggaaagcccugcccuaagccccaccggcuuaaccauaugggcauuuguuccugcggccucuauaaacagccugggguucccgugaaguggaaacgcuga

SEQ ID NO: 5599 - RNA, 1476 nt, Artificial Sequence
  derived and/or modified protein sequence (opt6) from LASV(Josiah;Clade IV)__NP_694870__GPCstabilized
augggacaaaucguuacauucuuucaagaaguaccccacguaauagaagaagucaugaacauaguacuaauagcacuaucaguucucgcaguacuaaaaggucuauauaauuuugcuacauguggcuuagucggccuaguaaccuuccuacuccuaugcggaagaucaugcaccacuucacucuacaaaggaguauacgaauuacaaacccuagaacuaaacauggaaacacuaaauaugacaaugccacuuucauguaccaaaaacaacagccaccacuauauaaugguaggaaaugaaacaggacuugaauuaacauuaaccaacacaucuauaaucaaucauaaauucugcaaccuaucagaugcacauaagaaaaauuuauacgaucacgcauuaaugucaauaauauccacauuccaccuaucaauaccaaacuuuaaucaauacgaagcaaugucuugcgauuucaacggaggaaaaauaucaguacaauacaaccuuucacacucuuaugcuggagacgcagcaaaucacuguggaacagucgcaaacggagucuuacaaacauuuaugagaauggcauggggaggaucuuacauagcacuagauucaggaugcggaaacugggacugcauaaugacaucauaccaauauuuaaucauacaaaacacaacaugggaagaccacugccaauucucaagaccaucaccuauaggauaccuaggacuuuuaucacaaagaacacgcgacauuuacauauccagaagaagaagaggcacuuucaccuggacacuaucagacucagaaggcaaagacacaccaggaggauacugcuuaacgagauggaugcuaauagaagcagaacuaaaaugcuucggcaacacagcaguagcaaaauguaacgaaaaacaugaugaagaauuuugcgacaugcucagacuauucgauuucaacaaacaagccauacaaagacuaaaagcuccugcacaaaugucaauacaacuaauaaauaaagcaguaaacgcacuaauaaacgaucaacuaauaaugaaaaaccaccuaagagacauaauguguaucccauacugcaacuauucaaaauacugguaccuaaaccacaccacaacaggaagaacaagccuaccaaaaugcuggcuaguaucaaacggaucauauuuaaaugaaacccacuucuccgaugauauagaacaacaagcagauaacaugauaacagaaaugcuacaaaaagaauacauggaacgacaaggaaaaacaccucugggccuaguagaccuauucguauucuccacaucauucuaccuaauauccauauucuuacaccuagucaaaauaccaacacacagacacauaguaggaaaauccugcccaaaaccccauagacucaaucauaugggaauaugcuccuguggacuauacaaacaaccgggaguaccaguaaaauggaaaagauaa

SEQ ID NO: 5600 - RNA, 1473 nt, Artificial Sequence
  derived and/or modified protein sequence (opt6) from LASV(LP;Clade I)__AAF86701__GPCstabilized
augggacagauaauaacuuucuuccaagaaguaccucacguaauagaagaaguaaugaacauaguauuaauugcacucucacuacucgccauacuaaaaggacuauacaauauugcuaccugcgguauaauuggauuaguagcauucuuauuccuaugcggaaaaucaugcucacuaacauuaaaaggaggauacgaacuacaaacacuagaacuaaauauggaaacacuaaauaugacaaugccacuaucauguacuaaaaacucaucacaccacuacauuagaguaggcaacgaaacgggacuagaauuaacccuuacgaauacaucuauaauaaaucauaaauuuugcaacuuaucagacgcacacaagaaaaaucuauacgaccacgcccuaaugucaauuauuucaacguuccaccuauccauaccaaacuucaaccaauacgaagcaaugucaugugacuucaaugguggcaaaaucuccguacaauacaauuuaucacacuccuacgcaggagaugcagcagaacauugcggcacaguagccaacggaguacuacaaacauuuaugagaauggcauggggcggcagauacauagcauuagauucaggaugcggcaauugggacugcauaaugacuucauaccaauaccuaauaauacaaaacacaacaugggaagaccacugucaauucucaagaccauccccaauaggauaccuaggacugcuuucccaaagaacaagagauauauauauaucacgacgaagacguggaacauucacauggacauuaucagacucagaaggaaacgaaacaccaggaggcuacugucuaacaagauggaugcuuauagaagcagaacuaaaaugcuucggaaauacagccguagcuaaaugcaacgaaaaacacgaugaagaauuuugcgacauguuaagacuuuucgacuucaauaaacaggcuauccgaagacuaaaagcucccgcacaaaugucaauccaacuaauaaacaaagccguaaacgcacuaauaaacgaccaacuaaucaugaaaaaccacuuaagagauauaaugugcauaccauauugcaauuacucuaaauacugguaccucaaucacacaucaucaggacgaacaucauuaccaaaauguuggcuaaucaguaacggaucauaccuuaaugaaacccaauuuucagacgacauagaacaacaagccgauaacaugaucacagaaaugcuacaaaaagaauauauagaacgacaaggaaaaaccccacucggucuaguagacauauucaucuuuucaacaucauucuaccuaauuuccauuuuccuacaccuaaucaaaauaccuacacaccgacacauaguaggaaaaccauguccaaaaccacauagacuaaaccacaugggaguaugcucaugcggauuauacaaacacccuggaguaccaacaaaauggaaaagauaa

SEQ ID NO: 5601 - RNA, 1473 nt, Artificial Sequence
  derived and/or modified protein sequence (opt6) from LASV(803213;Clade II)__AAF86703__GPCstabilized
augggacaaauaauaacauucuuucaagaagucccacacguaauugaagaaguuaugaauauaguacuaaucgcacuaucgcuauuagcaauacuaaaaggaaucuacaacguagcaacaugcggacuauuuggacucauauccuuucugcuauuaugcggcagauccugcucagucaccuauaaaggaguauaugaacuacaaacacuagaacuaaauauggcuaaucuuaauaugacaaugccacuaucaugcacaaaaaacaacucucaccacuauauaaugguaggaaaugaaaccggacuagagcuuacacuaacaaauaccuccauaauaaaccacaaauuuuguaacuuaucagacgcacacaaaaaaaacuuauacgaccacgcacuaaugucuauaauuagcacauuucacuuauccauaccuaacuuuaaccaauaugaagcaaugucaugcgauuuuaacggcggcaaaaucagcguacaauacaacuuaucccauucauuugccguagaugcagcuaaccacugcggaacaaucgcaaauggcguacuacaaacauucaugagaauggcauggggaggaucuuacauugcacuugauucagguugcggaaauugggacuguaucaugacaucauaucaauaucuaauaauacaaaacaccacaugggaagaccacugccaauucucaagaccaucaccaaucggauaccuaggacuauuaucacaaagaacaagagauauauacauaucaagaagacgaagaggaaccuuuaccuggacauuaucagauucagaaggaaacgaagcccccggaggauacugucucacaagauggaugcuuauagaagcagaacuaaaaugcuuuggaaauaccgccguagcaaaaugcaacgaaaaacacgaugaagaauucugugacaugcuacgacuauucgacuucaacaaacaagcuauaaaaagacuaaaaacaccagcacaaaugucaauccaacuaaucaauaaagcaguaaacgcacuaauaaacgaucaacucauaaugaaaaaccaccuaagagauauaauguguaucccauacuguaacuacuccagauacugguaccuaaaucacacaguaacaggaaaaacaucacuaccacgaugcuggcuaguaucuaacggaaguuacuuaaacgaaacacacuucucugacgauauagaacaacaagcagacaacaugauuacugaaaugcuacaaaaagaauacauggacagacaaggaaaaacaccauuaggacuaguagacuuauucguauucuccaccuccuucuaucuaauauccauauuccuccacuuaguaaaaauacccacacauagacacaucgucggaaaaccauguccaaaaccucaccgccucaaccacaugggaauauguuccugcggauuauacaaacaucccggcguaccagucaaauggaaaagauaa

SEQ ID NO: 5602 - RNA, 1473 nt, Artificial Sequence
  derived and/or modified protein sequence (opt6) from LASV(GA391;Clade III)__CAA36645__GPCstabilized
augggccaaauaguaacauuuuuccaagaaguaccacacguaauagaagaaguaaugaauaucguccuaauagcacucagcauauuagcaauauuaaaaggacuauauaaugucgcaacauguggacuaauaggucuagucacauuucucuuacuaucaggaagauccugcucccucauauacaaaggaacuuacgaauuacaaacucuagaauuaaacauggaaacacuaaacaugacaaugccacuaucauguaccaaaaacaauucacaccacuacauacgaguaggcaacgaaacaggccuagaauuaacauuaacaaacacaucuauacuaaaccauaaauuuuguaaccuauccgacgcacacaaaaggaaucuauacgaccauucacuaaugagcauaauaucuaccuuccaucuuucuauuccaaacuucaaccaauacgaagccaugucaugcgacuucaacggcggaaaaauaacaguacaauacaacuuaucacacucauucgcaguagaugcagcaggacacugcggaacacuagccaacggaguauuacaaacauucaugagaauggcauggggaggaucuuacauagcacuagacucuggaugcgguaacugggacugcauuaugacaucauaucaauaucuaauaauacaaaauacaacuugggacgaucauugccaauucucacguccaucacccauaggcuauuuaggucuacuaucacaaagaacaagagacauauacauuucgagacgaagaagagguacauucacauggaccuuaucagacucagaagguaacgaaaccccuggaggauacugccuaacaagauggauguuaauagaagccgaacuaaaaugcuucggaaauacagcaguagcaaaauguaacgaaaaacaugacgaagaauuuugcgacaugcuacgacucuucgauuucaacaaacaagcaauaagaagacuaaaaacacccgcacaaauguccauacaacucauaaacaaagcaguaaacgcacucauaaacgaccaacuaauaaugaaaaaucaccuccgagacauaauguguauucccuacugcaacuacucaagauacugguaccuaaaucacacaucaacaggaaaaacuucacuaccaagaugcuggcuuauaucuaacggaucauaccuaaacgaaacaaaauuuagcgacgauauagaacaacaagcagacaacaugauaacagaaauguuacaaaaagaauacauagaucgacaaggaaaaacuccucuaggucuaguagaccuauucguauucucuacaucauucuauuuaauaagcauauuccuacauuuaguaaaaauacccacacaccgccauauaguaggaaaaccauguccaaaaccccacagauuaaaccacauggguauauguucauguggauuauauaaacaaccaggagucccagucagauggaaaagauaa

SEQ ID NO: 5603 - RNA, 1476 nt, Artificial Sequence
  derived and/or modified protein sequence (opt6) from LASV(AV;Clade V)__CCA30314__GPCstabilized
auggggcaaaucguaacauucuuccaagaaguuccacacguaauagaagaaguaaugaauauaguauuaaucgcauuaucaauacuagcaguauuaaaaggacuauauaauauagcaacaugcggccucaucggacuaauaacauuccucuuacuaugcggaagaagcuguucaucaaaucuuuacaaaggaguuuacgaauuacaaucauuagacuuaaacauggaaacacuaaacaugacuaugccauuaucauguacaaaaaacaauucacaccauuauauaagaguaggcaaugacacaggacuagaauuaacacuaacaaacaccucaauacuaaaccacaaauucugcaacuuaucagacgcccacaaaaaagauuuauacgaccacgcacuaauguccauaauaucaaccuuccaccuaucaauaccuaacuucaaucaauaugaagcaaugucaugugacuucaauggaggaaaaauuucuguacaauacaacuuaucucacucauacgcaauagacgcagccaaccacugcggaacgguugcaaacggcauacuacaaacuuucaugagaauggcuugggguggaucauauaucgcucuagauucuggaugcggcaacugggacugcauaaugacauccuaccaauaccuaauuauacaaaacaccacaugggaaaaccacugccaauucagccgaccaucuccaauuggauaccuaggauuauuaucucaacgaacaagagauauauauaucucaagaagaagaagaggcacauucacuuggacacuaagcgacucugaaggaaacgcaaccccaggcgguuauuguuuaacacguuggaugcuaauagaagcagaauuaaaauguuucggaaacacagcaguagcaaaaugcaacgaaaaacacgacgaagaauuuugugacauguuaagauuauucgacuucaacaaacaagcaauaucacgauuaaaaagcccugcacaaauguccauccaauuaauaaauaaagcuguuaaugcacuaauaaacgaccaauuaauaaugaaaaaccacuuaagagacauaauguguauaccauacugcaacuacucaaaauauugguaucucaaccacacuauaacuggaaaaacaucucuaccaaaaugcuggcucguaucaaacggaucauacuuaaaugaaacccacuucucagacgauauagaacaacaagccgacaauaugaucaccgaaaugcuccaaaaagaauacauggaaagacaaggaaaaacaccacuuggauuagucgaccuauucgucuucucaacaucauucuaccuaauauccauauucuuaagacucguaaaaauacccacacauagacauauaguaggaaaaccaugccccaaaccccacagacuaaaccacaugggaauaugcagcuguggacuauacaaacaaccaggaguacccguaagauggaaacgguag

SEQ ID NO: 5604 - RNA, 1473 nt, Artificial Sequence
  derived and/or modified protein sequence (opt6) from LASV(Togo/2016/7082;Clade VI)__AMR44577__GPCstabilized
augggacaaauaaucacauuuuuccaagaaguaccacauguaauagaagaagucaugaacauaguacuaauagcacucucauuauuagcaauacucaaaggcguauacaauguagcaacuuguggaauaauaggucuagucacauuucuauuucuaugcggacgaucaugcucacuaauauauaaaggauccuacgaauuacaaacauuagaauuaaacauggaaacacucaauaugaccaugccacuauccuguaccaaaaacucaucacaccauuacauaagaguaggaaaugaaacaggauuagaauuaacauuaacaaauacaucuauaauaaaucauaaauucugcaaucucuccgacgcccauaaaagaaacuuauacgaccacgcacuaaugucaauacuaucaaccuuccaccuaucaauuccaaacuuuaaccaauaugaagccauguccugcgauuuuaacggaggaaaaauaagcguucaauacaaccuaucccacgcauacgcuguagacgcagcagaacacugcgguaccguagcaaacggaguacuacaaaccuuuaugagaauggccuggggaggaucauauauagcauuagauucaggaugcggcaacugggacugcauuaugaccucuuaccaauaucuaauaauacaaaacacaaccugggaagaucacugccaauucucaagaccaucaccaauaggcuauuuagguuuauuaucacaaagaacuagagauauauauaucucaagaagaagacgcggaacauuuacuuggacauuaucagacuccgaaggcaaugaaacaccaggaggcuacugucuaacacgauggaugcuaauagaagcagaauuaaaauguuuuggaaacacagccguagccaaaugcaacgaaaaacaugacgaagaauuuugcgacaugcuaagacuauucgacuucaacaaacaagcaauccaaagacuaaaaucaccagcacaaaugucuauacaacuaauuaacaaagcagugaaugccuuaauaaacgaucaacucaucaugaaaaaccaucuuagagauaugauguguauaccauauuguaacuauucuaaauacugguaccucaaucauacaucaucaggacgaacaucccuaccuaaauguuggcucguaucuaacggaucauaccuuaaugaaacccacuucagcgacgacauagaacaacaagccgauaacaugauaacagaaauguuacaaaaagaauauauagauagacaaggaaaaacaccacucggauuagucgaucucuucguauucuccacaucuuucuauuuaauuucuauauuuuuacaccuaauaaaaauacccacacacagacauauaguaggaaaaccauguccaaaaccacacagacuaaaucacaugggcauaugcucauguggauuauacaaacaaccuggagucccaacuagauggaaacgauaa

SEQ ID NO: 5605 - RNA, 1473 nt, Artificial Sequence
  derived and/or modified protein sequence (opt6) from LASV(KAK-428;Clade n.d. (VII))__ANH09740__GPCstabilized
augggacaaauaguuacauucuuccaagaaguaccacacguaauugaagaagucaugaauauaguauuaaucgcacuuucacuacuagccauacucaaaggauuauacaacuucgcaacaugcggaguuaucggauuaauaacauucuuacucuuaugcggacgaucauguucagcaacauacaaaggccaauacgaacuacaaacacuagaauuaaacauggaauccuuaaacaugacaaugcccuuaucauguaccaaaaacaacucacaucacuauauacgagcagguaauaauaccggacuugaacucacauuaacaaacacuucgaucauaucacacaaauucugcaacuuaucagacgcacacaaaaaaaauuuauacgaccauacuuuaaugucuauaauaaccacauuccacuuaucuauaccaaacuucaaucaauacgaagcaaugucuugcgauuucaacggaggaaaaauaaguauacaauauaaccuaucacacucauacgcaggagacgcagcacaacacuguggaacaguagcaaacggaguacuacaaaccuuuaugagaauggccuggggaggaucuuauuuagcuuuagauucaggaugccgaggaugggauugcauaauaucaucauaccaauacuuaauaauacaaaacaccaccugggacgaccacugccaauucuccagacccaguccuauaggauaccucggauuuguaucacaaaaaaccagagacaucuacauaucaagaagaagacgaggaacauucacauggacacuuucagauagugaaggacacgacaugccaggaggauauugccuaacaagauggauguuaauagaagcagacuuaaaauguuucggaaacacagcaguagcaaaaugcaacgaaaaacacgacgaagaauuuugcgacauguggcgauuauucgauuucaacaaacaagcaauacaaagauuaaaagcacccgcacaaaugaauauacaauuaaucaacaaagccguuaacgcacucauaaacgaccaacuaaugaugaaaaaccauuuacgagacauaaugugcauaccauacugcaacuacuccaaauucugguaccuaaauaacacaacaacaggaagaacaucccuaccucguugcuggcuaaucagcaauggauccuaccuaaaugaaacacacuucucagaugacauagaacaacaagcugauaacaugaucacagaaaugcuacaaaaagaauauauggaucgacaaggaaaaacaccuuuaggauuaguagaccuuuucgucuucucaacuucuuucuaccuaaucacaaucuucuuacauuuaguaaagaucccuacccacagacacauaguuggaaaacccugcccaaaaccacacagacuaaaucacaugggaaucugcucaugcggauuauacaaacaaccagguguaccuguaagauggaaacgauaa

SEQ ID NO: 5606 - RNA, 1473 nt, Artificial Sequence
  derived and/or modified protein sequence (opt6) from LASV(Acar 3080;Clade I)__AAT49014__GPCstabilized
augggacaaauaauuacauucuuucaagaaguaccacacgucauagaagaaguaaugaauaucguacuaauagcauuaucauuacuagcaauauuaaaaggcuuauacaauauagcaacaugcggaauaauaggacucgucgcuuucuuauuccuaugcggaaaaucuugcucacuaacacuaaaaggaggcuacgaacuccaaacauuagaauuaaacauggaaacucuaaacaugacaaugccauuaucaugcacaaaaaacuccucacaucacuacauaagaguaggcaacgaaaccggucucgaauuaacucuaacaaacacauccauaauaaaccauaaauucugcaacuuauccgacgcacauaaaaaaaaccucuacgaccacgcacuaaugucaauaauaucaacauuccauuuauccauaccaaauuucaaucaauaugaagcaaugucuugugacuuuaacggaggaaaaaucuccguacaauauaaccuaucacacucuuacgcaggcgacgcagcagaacacugugguacaguagcaaacggaguauuacagacauuuaugcgaauggcauggggaggcagauauauagcacuagauucaggauguggaaauugggacugcauaaugacaucauaccaauauuuaauaauacaaaauaccacaugggaagaccacugccaauucucaagaccaucaccuauaggcuaccucggucuccucucucaaagaaccagagauauauauaucuccagacguagaagaggcacauucacauggacauuauccgauucagaaggaaacgaaacccccggcggauacugucucaccagauggaugcuaauagaagcagaacuaaaaugcuucggaaauacugcaguagccaaauguaacgaaaaacacgacgaagaauucugcgacauguuaagacuauucgacuucaacaaacaagcaauaagaagacucaaagcaccagcacaaaugucaauacaacuaaucaacaaagcaguaaacgcacuaauaaacgaccaacuaaucaugaaaaaucacuuaagagacaucauguguauacccuacuguaacuauucaaaauacugguaucucaaucauacauccuccggaagaacaucccuaccuaaaugcuggcuaauaucaaacggaucauacuuaaacgaaacacaauucucagacgacauagaacaacaagcugaccacaugauuacagaaauguuacaaaaagaauacauagaaagacaaggaaaaacaccauuaggauuaguugacauauucauauuuucaacauccuucuauuuaauauccauauuucuacaccuaauaaaaauacccacccauagacacauaguaggaaaacccugcccaaaaccacauagacucaaucacaugggcguauguuccuguggacuauacaaacaucccgguguaccaacaaaauggaaaagauaa

SEQ ID NO: 5607 - RNA, 1473 nt, Artificial Sequence
  derived and/or modified protein sequence (opt6) from LASV(Pinneo-NIG-1969;Clade I)__AIT17836__GPCstabilized
augggacaaauuauuacauucuuccaagaaguaccucacguaauagaagaaguaaugaacaucguacuaauagcauuaucacuacuagccauacuaaaaggacuauacaacauagcaacauguggaauaauaggccuuguagccuuccuauuccuaugcggaaaauccugcucacuaacacuaaaagguggcuacgaauuacaaacauuagaacuaaacauggaaacuuuaaauaugacaaugccacucuccugcaccaaaaauucaagucaucacuacaucagaguaggaaacgaaacaggauuagaacuaacauuaaccaauacauccaucauaaaccauaaauucuguaaccuaucagaugcacacaaaaaaaacuuauaugaccacgcauuaaugagcauuauaagcaccuuucaccuaucaauaccaaacuucaaccaauaugaagcaaugucaugugacuuuaacgguggaaaaauaucaguacaauauaaccuaucacauucauacgccggugacgcagccgaacacugcggaacaguagcaaacggaguacuacaaacauuuaugcgcauggccuggggaggacgcuacauagcacuagauucaggaugcggaaauugggacuguaucaugacuuccuaccaauauuuaauaauacaaaacacaaccugggaagaucacugucaauuuucccgaccaucaccaauaggauauuuaggacuacuaagucaaagaacaagggauauauacaucucuagaagaaggagaggaacauuuacauggacccuaucugacuccgaaggaaacgaaacaccaggaggauacugcuuaacacgauggauguuaauagaagcagaacucaaaugcuucggaaacacagccguagcaaaauguaacgaaaaacacgaugaagaauucugugacaugcuacgauuauuugauuucaacaaacaagcaauaagacgacucaaagcaccagcacaaaugucaauacaacuaauaaacaaagcaguaaacgcauuaauaaaugaccaacucauaaugaaaaaucaccuaagagauauaaugugcauaccauauugcaauuacucaaaauacugguacuuaaaccacaccucauccggacgaacaucauuaccaaaaugcuggcuaauaucaaauggaaguuaccuaaacgaaacacaauucucagacgacauugagcaacaagccgauaacaugauuacagaaauguuacaaaaagaauacauagaaagacaaggcaaaacucccuuaggccuuguagacauauucauauuuucuacaucauuuuaccuaauaucaauauuucuacacuuaauuaaaauaccaacgcauagacauaucgucggaaaaccaugcccaaaaccacauagauuaaaucacaugggaguaugcucaugcggauuauacaaacacccuggaguaccaacaaaauggaaacgauaa

SEQ ID NO: 5608 - RNA, 1473 nt, Artificial Sequence
  derived and/or modified protein sequence (opt6) from LASV(ISTH0009-NIG-2011;Clade II)__AIT17404__GPCstabilized
augggacaaauaaucacauuuuuccaagaaguaccccacgucauagaagaaguuaugaacauaguacucauagcauuaagccuacuagcaauauuaaaaggcauauacaacguagcaaccugcggauuauucggacuuguaucuuuccuuuuacucuguggaagaucaugcucuacaacauacaagggcgucuacgaacuacaaacauuagaacuugacauggcaucacucaacaugacaaugccacuaucaugcaccaaaaauaacucacaucauuacauaaugguaggaaacgaaacuggacuugaacuaacacuaaccaacacuucaauaaucaaucauaaauucugcaaccuaucagaugcccacaagaaaaaucuauaugaccaugcauuaaugucuauaauaucuaccuuccaccucuccauaccaaauuuuaaccaauaugaagcaaugucaugugauuucaacggaggaaaaaucucuguacaauacaaccuaucucacgcauacgcaguagacgccgcaaaccauugcggaacaauagccaacggagucuuacaaacauucaugcgaauggcauggggaggaucuuauauagcacuggacucaggauguggaucaugggacugcauaaugacaucauaucaauacuuaaucauacaaaauacaacuugggaagaccacugccaauucucacgaccaucacccauaggauaccuaggacuucuaucacaaagaaccagagacauauacauaucuagacguagaagaggaacauucaccuggacacuaucagacucugaaggcaacgaaacacccggaggcuauugccuaacaagauggaugcuaauagaagcagaacuaaaaugcuuuggaaacaccgcaguagcaaaaugcaaugaaaaacacgacgaagaauuuugcgauaugcuaagauuauucgacuuuaacaaacaagcaauacgacgccuaaaaacucccgcccaaauguccauccaacuaauaaacaaagcaguaaacgcauuaauaaaugaccaacuaauaaugaaaaaucaccuaagagauauaaugugcauaccauacuguaauuacuccaaauacugguaccucaaucauaccguaaccggaaaaacaucauuaccccgaugcuggcuaguaucuaauggcucauaccuaaacgaaacacauuucucagacgacaucgaacaacaagcagacaauaugauaacagaacuauuacaaaaagaauacauggacagacaaggaaaaacuccacuaggcuuaguagacuuauucgucuuuucaaccucauucuacuuaauaucaauauuccuccaucuaauaaaaauacccacacaccgacacauaacaggaaaaccaugcccaaaaccacacagauuaaaccacaugggcauauguaguugugguuuauauaaacacccaggaguaccaguuaaauggaaacguuaa

SEQ ID NO: 5609 - RNA, 1473 nt, Artificial Sequence
  derived and/or modified protein sequence (opt6) from LASV(ISTH0012-NIG-2011;Clade II)__AIT17408__GPCstabilized
augggacaaauuauaacauuuuuccaagaaguaccacacguaauagaagaaguuaugaacauaguacugauagcauuauccuuauuagcaaucuuaaaaggaauauacaacguagcaacauguggacuuuuuggacuagucuccuuccuacuuuuaugcggaagaucaugcagcacaacuuacaaaggcguauacgaacuacaaacacucgaacuagacauggcaucuuuaaacaugacaaugccauuaucaugcaccaaaaacaacucacaccacuacauaaugguuggaaaugaaacaggacuugaacuaacacuaacaaacacuucaauaaucaaccacaaauucuguaaccuaucagacgcucacaaaaaaaacuuauaugaucacgcccucaugucaauaauaucuacauuucaucuaucaauaccaaacuucaaccaauacgaagccaugucaugcgacuucaacggaggaaaaauaagcguacaauacaacuuaucacacacauaugcaguagacgcagcaaaccacugugguacagucgcaaacgguguacuccaaaccuucaugagaauggcauggggaggcuccuauauagcacucgacucaggcuguggauccugggauugcaucaugaccuccuaccaauacuuaauuauacaaaauaccacaugggaagaccacugccaauucucccgacccucaccaaucggauaucuaggauuauuaagccaaagaacaagagacauauacauaucacgacgacgaagaggaacauucacauggacacucagcgauucagaaggaaacgaaacaccaggaggauacugccuaacuagauggaugcuaauagaagccgaauuaaaaugcuucggcaacacugcaguagcaaaauguaacgaaaaacacgacgaagaauucugcgauaugcuaagacuauuugacuucaacaaacaagcaauaagacgacuaaaaacaccugcacaaaugucaauacaacuaaucaacaaagcaguaaaugcacuaauaaacgaucaacuaaucaugaaaaaucacuuacgcgacaucaugugcaucccauacugcaacuauucaaaauauugguacuuaaaccacacaguuacaggaaaaacaucauuaccaagaugcugguuaguaucaaacggaucauacuuaaaugaaacacacuucuccgacgacauagaacaacaagcagauaacaugauaacagaacuauuacaaaaagaauacauggacagacaaggcaaaacaccacucggacuagucgaccuauucgucuucagcacuucauuuuacuuaaucucaaucuuccuacaucuaguaaaaauaccaacacacagacacguaauaggcaaaccaugucccaaaccacacagacugaaucacaugggaauaugcuccugcggccuauauaaacauccaggaguaccuguaaaauggaaacgauaa

SEQ ID NO: 5610 - RNA, 1473 nt, Artificial Sequence
  derived and/or modified protein sequence (opt6) from LASV(ISTH0047-NIG-2011;Clade II)__AIT17412__GPCstabilized
augggucaaauaaucacauucuuccaagaaguaccccacguaaucgaagaaguaaugaauauaguacuaauagcacuauccuuacuagcaauauuaaaaggaauauacaacguagcaacuugcggauuauucggcuuagugucauuuuuacuacuuugcggcagaucauguuccacaacauacaaaggaguauacgaauuacaaacauuagaacuagauauggccucacuaaacaugacuaugccacuaucuugcaccaaaaacaauucacaccauuacauuaugguaggaaaugaaacaggccuagagcuuacauuaacaaacacaucuauaauaaaccacaaauucugcaacuuaucugacgcccacaaaaaaaaucuauacgaccacgcacuuaugucaauaauaucaacauuucaccuaucuauccccaacuucaaccaauacgaagcaaugucuugcgacuucaacggaggaaaaauauccguacaauauaaucuaucucacgcuuaugcaguagacgcagccaaucacugcggcaccauagccaauggcguacuucaaacauuuaugagaauggcuuggggcgguucauacauagcacucgacucaggauguggaucaugggacuguauuaugaccucauaucaauaccuaauuauacaaaauacaucaugggaagaccacugucaauucucacgcccaucaccaauaggauaccuaggacuucuaagucaaagaacaagagacauauacauaucacgcagaagacguggcacauuuacauggacccuauccgacucagaaggaaacgaaacaccuggaggauacugccuaacaagauggaugcuaauagaagcagaacuaaaaugcuucggcaauacugcaguagcaaaauguaaugaaaaacaugacgaagaauuuugugacaugcuaagacuauuugacuuuaacaaacaagccauacguagacuaaaaacaccagcacaaaugucuauccaacuaaucaacaaagcaguuaaugcacuuauuaacgaucaacuuauaaugaaaaaucaccuaagagacauaauguguauacccuauugcaacuacucaaaauacugguaccucaaucacacaguaacaggaaaaacaucauuaccaagauguuggcuaguaucaaauggaucauaucuaaacgaaacacacuucucagacgauauagaacaacaagcugauaacaugaucaccgaauuauuacaaaaagaauauaucgacagacaaggaaaaacaccacuaggacuaguagacuuauucguuuuuucaacauccuucuaccuaauaaguauauuccuacaccuagucaaaaucccaacccacagacacgucauaggaaaaccaugcccaaaaccacacagacuaaaccacaugggaauauguucauguggucuuuacaaacacccuggagucccaguuaaauggaaaagauaa

SEQ ID NO: 5611 - RNA, 1473 nt, Artificial Sequence
  derived and/or modified protein sequence (opt6) from LASV(ISTH0073-NIG-2011;Clade II)__AIT17416__GPCstabilized
augggacaaauaauuacuuucuuccaagaaguaccacacguaauagaagaaguaaugaacaucguacuaauagcacuaucccuacuagccauacuaaaaggaauauacaacguagcaacaugcggucuauucggacuagucucauuuuuauuacuaugcggaagaucauguucaacaacauacaaaggaguguacgaacuacaaacacuugaauuagauauggcauccuuaaauaugacaaugccucuaaguugcacaaaaaauaauagccaccacuacauaauggucggcaaugaaaccggacuagaacuaacacucacaaacacauccauuauaaaucacaaauucugcaaucuaucagaugcacaccgaaaaaacuuauacgaucacgcacuaauguccauaauuucaacauuccaccucucaauaccaaauuuuaaccaauacgaagccaugagcugcgauuucaauggaggaaaaauaucuguacaauacaaccuaucacacgcauacgcuguagacgcagcaaaccacugcggcacaauagcaaacggaguacuccaaacauucaugagaauggcauggggaggaucuuacaucgcccuagacucaggaugcggaucuugggauugcauaaugacauccuaucaauaucuaauaauacaaaacaccuccugggaagaucauugccaauucaguagacccuccccaauaggcuaccuaggucuauuaucacaacgaacaagagauauauacaucucaagacgaagacgcggaaccuuuaccuggacacuaucagacucagaaggaaacgaaacuccaggaggauacugcuuaacaagauggauguuaauagaagcagaacucaaaugcuucggaaauaccgcaguagcaaaaugcaacgaaaaacacgacgaagaauucugugauaugcuaagacuauucgacuuuaacaaacaagcuauaagaagacucaaaacaccagcacaaauguccauucaacuaauaaacaaagcagucaaugcccuaauaaacgaccaacuuauaaugaaaaaccacuuaagagauaucaugugcauaccauauugcaauuauucaaaauacugguaccuaaaucacacaguaacaggcaaaacaucacuaccaagaugcuggcuuguaucaaacggaaguuaccuaaacgaaacccacuucucagacgacauagaacaacaagcagacaauaugauuacagaacuccuacaaaaagaauauauagauagacaaggaaaaacacccuuaggauuaguagaccuuuuugucuucucaacaucauucuacuuaauaucaauauuucuacacuuaguaaaaauuccaacucacagacacguaauaggaaaaccaugcccaaaaccacacagacucaaccacaugggaauaugcagcugcggauuauauaaacaccccggcguaccagucaaauggaaaagauaa

SEQ ID NO: 5612 - RNA, 1473 nt, Artificial Sequence
  derived and/or modified protein sequence (opt6) from LASV(ISTH0230-NIG-2011;Clade II)__AIT17420__GPCstabilized
augggacaaauaauaacauucuuucaagaaguaccacauguuaucgaagaagucaugaauauaguauuaauagcacuaucacucuuagcaauacuaaaaggcaucuauaauguagcaacaugcggauuauucggauuaguaucauuccuauuacucugcggcagaucaugcucaacaacuuauaaaggagucuacgaacuccaaacguuagaauuagacauggcaucacuaaacaugacaaugcccuuaucaugcacaaaaaacaacucacaccacuacaucaugguagggaacgaaaccggacuagaacuaacccuaacaaauacaucuauaauaaaucacaaauuuugcaaccucagcgacgcacacaaaaaaaaucuauaugaucacgcacucaugucaauaauaucaacuuuccaucuaucaauacccaauuucaaccaauacgaagcuaugucaugugauuucaacggaggaaaaauaucaguccaauacaaccuuucacacaccuaugccguagaugcagcaaaucacuguggaacaauugccaauggaguucuacaaacuuucaugagaauggcauggggaggaucauacauagcucuugauagcggauguggcucaugggacuguauaaugaccaguuaccaauaccuaauaauccaaaacacuaccugggaagaccacugccaauucucaagaccuucaccuauaggauaccuaggacuacuaucacaacgaacuagagauauauauauaucacgaagacgaagaggaacauucacauggacacuaucagauucagaaggaaacgaaacaccaggaggauauugucuaacaagauggaugcuaauagaagcugaacuaaaauguuuuggaaacacagccguagcuaaaugcaacgaaaaacacgaugaagaauucugcgacauguuacgauuauuugauuucaacaaacaagcaauacgcagacuaaaaacaccugcacaaaugagcauccaacuaaucaacaaagcaguaaacgcccuaauaaaugaucaauuaauaaugaaaaaccacuuaagagauauaaugugcauccccuacuguaacuauuccaaauacugguaccuuaaccauacagucacaggaaaaacaucacucccccgaugcugguuagucuccaacggcagcuaccuaaacgaaacacacuucucagacgauauagaacaacaagcugauaauaugauaaccgaacuauuacaaaaagaauacauggaccgacaaggcaaaacaccauuaggacuagucgaccuauucguuuucucaacaucauuuuaucuaaucuccauauuccuccacuuaauaaaaauaccaacacacagacacaucacaggcaaacccugcccaaaaccacacagacuuaaccacauggguaucuguucauguggacuauacaaacacccuggaguaccagucaaauggaaaagauaa

SEQ ID NO: 5613 - RNA, 1473 nt, Artificial Sequence
  derived and/or modified protein sequence (opt6) from LASV(ISTH0531-NIG-2011;Clade II)__AIT17424__GPCstabilized
augggacaaauaauaacauucuuucaagaaguaccacacguaauagaagaagucaugaauauaguacuaaucgcucuaucacuacuagcaauacuaaaaggcauuuauaacguagcaacaugcggucucuucggccuaguaucauuucuacuacuuuguggaagauccugcucaaccaccuacaaagguguauacgaacuacaaacauuagaauuagacaugaccaacuuaaacaugacaaugccauuaucaugcaccaaaaauaacucccaucacuauauaauggucggaaaugaaacaggacucgaacuaacauuaacaaacacaucaauaaucaaucauaaauuuuguaaccuauccgaugcacacaaaaaaaaccuauauaaccaugcauuaaugucaauaauaucaaccuuccaccuaucaauaccaaauuuuaaccaauacgaagcaauguccugcgacuuuaacggcggcaaaauaucaguacaauacaaccucucccacgcauacgcaguugaugcagccaaucacugcggaacuauagccaacggaguacuacaaacauucaugcgaauggccuggggaggaucauacauagcacuagacucaggauguggaucaugggacuguauaaugacaucuuaccaauaccuaauaauacaaaacacaacaugggaagaccacugccaauucucaagacccucaccaauuggauacuuaggacucuuaucccaacgcaccagagacaucuacauaucaagaagaagaagagggacauuuacauggacauuaucagacuccgaaggcaaugaaacaccaggcggauacugcuuaacaagauggaugcuaauagaagcagaacucaaaugcuuuggcaacacagcaguagcaaaaugcaacgaaaaacacgacgaagaauuuugcgauaugcuaagauuauucgauuucaacaaacaagcaauaagaagacuaaaaacaccagcacaaaccaacauucaacuaauaaacaaagcaguuaaugcauuaauaaacgaccaacuaauaaugaaaaaccacuuaagagacauaaugugcauaccauacugcaacuacucuaaauacugguaucuaaaucacacaguaacaggaaaaacaucacuaccuagaugcugguuaguuuccaaugguucauaucuaaacgaaacacauuuuuccgaugauauagaacagcaagcagacaauaugauaacagaacuauuacaaaaagaauauauggacagacaaggaaaaacaccacuaggacuaguagaucuauucguauuuucuacaucauucuauuuaauaucaauauuccuacacuuaguaaaaaucccaacacauagacacauaauaggaaaaccauguccaaaaccucacagacuaaaccacaugggaaucuguucaugcggcuuauacaaacacccuggcgucccaguuaaauggaaacgcuaa

SEQ ID NO: 5614 - RNA, 1473 nt, Artificial Sequence
  derived and/or modified protein sequence (opt6) from LASV(ISTH0595-NIG-2011;Clade II)__AIT17428__GPCstabilized
augggacaaauaaucacauuuuuccaggaaguaccucacguaauagaagaaguuaugaauauaguacuaauagcauuaucauuacuagcaauauuaaaaggaauauauaacgucgcaaccugcggacuauuuggucuuguaucauuucuucuacuauguggcagauccugcuccacaacauacaaaggaguauaugaacuacaaacucuugaauuagacauggccucacucaacaugacaaugccucuaucaugcacaaaaaacaacucucaccacuauaucaugguaggaaacgaaacuggucuagaacuaacacuaacaaacacauccauaauaaaccacaaauucuguaacuuaucagacgcacacaaaaaaaauuuauacgaccacgcauuaaugucaauaauuuccacauuccaccuaucaauaccaaacuucaaccaauacgaagcaaugucaugcgacuucaacggaggaaaaauaucaguccaauauaauuuaucucacacauacgcugucgacgcagcaaaccauuguggaaccauagcaaacggaguuuuacaaacauucaugagaauggcuugggguggaucauacauagcauuagacucaggcugcggaucaugggacugcaucaugacaagcuaccaauaccuaaucauacaaaacacaacuugggaagaucacugccaauucuccagaccaucaccuauagguuaccuaggauuacuaucacaaagaacaagagauauauacauauccagaagaagaagaggaacauucacauggacauuaagugacucugaaggaaaugaaaccccaggcggauauugccuaacaagauggaugcuaauagcagcagaccuaaaaugcuucggaaacacagccguagcaaaauguaacgaaaaacacgaugaagaauucugugauaugcuaagacuauucgauuucaacaaacaagcaaucgaaagacucaaaacacccgcacaaaugucaauucaacuaauaaauaaagccgucaacgcacuaauaaacgaccaacuaauaaugaaaaaccaucuccgagacauaaugugcauaccauauugcaauuacucaaaauacugguaucuaaaucacaccguaacaggaagaacaucauuacccagaugcuggcuaguaucaaauggaucauacuuaaacgaaacacacuucucagacgauauagaacaacaagcagauaauaugauaacagaacuuuuacagaaagaauauauggacagacaaggaaaaacaccauuaggacuagucgaucuauucguauucucaacauccuucuaucucauaucaauauucuuacauuuaguccguauaccaacacauagacauguuauaggaaaaccaugcccaaaaccacauagacuaaaccacaugggcauaugcucauguggucucuacaaacacccaggagucccagucaaauggaaaagauaa

SEQ ID NO: 5615 - RNA, 1473 nt, Artificial Sequence
  derived and/or modified protein sequence (opt6) from LASV(ISTH0964-NIG-2011;Clade II)__AIT17430__GPCstabilized
augggacaaaucauaacauucuuccaagaaguaccacacgucauugaagaaguaaugaacauaguacuaauagcacuaucauuacuagccauacuaaaaggaauauacaauguagcaacauguggacuauucggccuaguauccuuccuacuuuuaugcggaagaucuuguucaacaacauacaaagguguauaugaacuacaaaccuuagaacuagauauggcaucauuaaacaugacaaugccauuaucauguaccaaaaacaauucccaccacuauauaaugguaggaaacgaaacagguuuagaacuaacauuaacaaauacauccaucauaaaucauaaauuuuguaaccucucagacgcacacaagaaaaauuuauaugaucaugcacuaaugucuauaauuuccacauuccaucucucaauaccaaacuucaaucaauacgaagcaaugucuugcgauuucaacggaggaagaauaucaguacaauacaaucucucccacacuuaugcaguagaugcagccaaacacugugguacaauagccaauggaguacuucaaacauucaugagaauggcaugggguggaucauacauagcacuagacucaggauguggcucaugggacugcauaaugaccucauaccaauacuuaaucauccaaaauacaaccugggaagaccacugccaauuuucaagaccauccccaauaggcuaccuaggacuucuaucccaaagaacaagagacauuuacauaucaagacgaagaagaggcacauuuacuuggacacucucagacuccgaaggaaacgaaacaccuggagguuacugccucacacgauggaugcuaauagaagcagaacuaaaauguuucggaaauacagcagucgcaaaaugcaacgaaaaacacgacgaagaauuuugugauaugcuaagacuauucgacuucaacaaacaagccauaagacgacuaaaaacuccugcacaaaugucaauacagcuaauaaauaaagcuguaaaugcauuaaucaacgaccaacuaauaaugaaaaaucacuuacgagacauaaugugcauacccuacugcaacuauucaaaauauugguaccucaaucauacaguaacaggaaaaacaucucuaccuagaugcuggcuaguaucaaauggaucauacuuaaaugaaacccacuucucugacgacauagaacaacaagcagacaacaugaucacagaacuacuacaaaaagaauacauagaucgacaaggcaaaacaccacuaggacucguagaucuauucguauucucuacaucauucuaccuaaucuccauauuccuccacuuaguaaaaaucccaacucaccgacacguaauaggcaaaccaugcccaaaaccacacagauuaaaccauaugggcauaugcucauguggauuauacaaacacccaggaguaccaguaaaauggaaacgauaa

SEQ ID NO: 5616 - RNA, 1473 nt, Artificial Sequence
  derived and/or modified protein sequence (opt6) from LASV(ISTH1038-NIG-2011;Clade II)__AIT17438__GPCstabilized
augggccaaaucauaacauuuuuccaagaaguaccacacguaauagaagaaguuaugaacauaguacuaauagcacuaucacuacuagccauauuaaaaggcaucuacaacguugcaacaugcggacuauuuggacuaguaucauuccuacuacuaugcggaagaucaugcucaacaaccuacaaaggaguauaugaauuacaaacucuagaacuugacauggccaacuuaaacaugacaaugccauuaucaugcacuaaaaauaacucucaccauuauaucagaguagguaacgaaacaggacucgaauuaacccuaacaaauacauccauaauaucacacaaauuuuguaaucuaucggacgcucacaaaaaaaaccuauaugaccacgcauuaaugucuauaaucucaacuuuccaucuaucuauaccuaacuucaaccaauacgaagcaauguccugcgacuuuaauggaggaaaaauauccguacaauacaaccuaucucacaccuacgcaguagacgcagcaaaccacuguggaacuauugcaaacggaguacuacaaaccuuuaugagaauggcuuggggaggaucuuacauagcacuagauuccggaugcggaucaugggauugcaucaugacaucauaccaauacuuaauaauacaaaauacaacaugggaagaccacugccaauuuucucgaccaucaccaauaggcuaucuagguuuacucagccaacgaacccgagacauauacauaucacgaagacgcagaggaacauucacuuggacacuaucagacucagaaggaaaagaaacaccaggaggauacugccuaacccgcuggauguuaauagaagcagaacuaaaaugcuuuggaaauacagccguagcaaaaugcaacgaaaaacaugacgaagaauucugcgacaugcuuagacucuucgauuucaacaaacaagcaauuagaagacuaaaaacacccgcacaaaugaacauacaacuaauaaacaaagccguaaacgcacuaaucaaugaucaauuaauaaugaaaaaccaccucagagauauaaugugcauacccuauugcaauuacucaaaauauugguaucuaaaccacacuguaaccggaaaaacaucauuaccaagaugcuggcuuguaagcaacgguucauaccuaaacgaaacacacuucucagacgacauagaacaacaagccgacaauaugaucacagagcuacuccaaaaagaauacaucgauagacaaggaaaaacuccuuuaggacuagucgaccuauucguauucucuacaucauucuaccuaaucucaauauucuuacaccuaguaaaaaucccaacucauagacacguaauaggcaaaccaugccccaaaccacauagauuaaaccaaaugggcauauguagcugcggacuauacaaacaaccaggagugccaguaaaauggaaaagauaa

SEQ ID NO: 5617 - RNA, 1473 nt, Artificial Sequence
  derived and/or modified protein sequence (opt6) from LASV(ISTH1048-NIG-2011;Clade II)__AIT17442__GPCstabilized
augggacaaauaauaacauucuuccaggaaguaccacaugucauagaagaagucaugaacauaguuuuaaucgcauuaucacuauuagcaauccuaaaaggaaucuauaacguagcaacaugugguuuauuuggcuuaguaucauucuuacuacucugcggcagaucauguucaacaacauauaaagguguauacgaauuacaaacauuagaacuagacauggcaucacuaaacaugacaaugccauuauccugcacgaaaaacaacucacaccauuacauuaugguaggaaaugaaaccggauuagaacuaacacuaacaaauacaucaauaaucaaccacaaauuuugcaacuuaucagaugcacaccgaaaaaaccuauacgaccaugcacucaugucaauaauaucaacuuuucacuuauccauaccuaacuucaaucaauacgaagcuaugucaugcgauuucaacggaggaaaaaucucuguacaauacaaucuaucacacgcauacgcaguugacgcagcaaaccauugcggaacaauagcaaauggaguauuacaaacauuuaugcgaauggcaugggguggcucauacauugcacuugacucaggcugcgguucuugggacugcauaaugaccucauaccaauaccuaauaauacaaaacacaaguugggaagaccacugccaauucucacgacccuccccaauaggauauuuaggauuacucucacaacgaacaagagauauauauauaucuagaagacgaagaggaacauucacauggacauuaucagacuccgaaggaaacgaaacaccaggaggauacugcuuaacaagauggaugcuaauugaagccgaacuuaaaugcuuuggaaacaccgcaguagcaaaauguaaugaaaaacacgacgaagaauucugcgacaugcuaagacuuuucgacuucaauaaacaagcaaucagacgccuaaaaacaccagcacaaaugucuauacaauuaaucaacaaagccguaaaugcauuaauaaacgaccaacuuauaaugaaaaaccaccuuagagacauuaugugcauuccauauugcaacuacucaaaauauugguaccuaaaccacacaguaacaggaaaaaccucacuaccccgaugcugguuaguauccaauggauccuauuuaaacgaaacccauuuuucagacgauauagaacaacaagcagacaauaugauaaccgaacuacuacaaaaagaauauauugacagacaaggaaaaacaccacuaggucuaguagaccucuucguauucucaacaucauucuaccuaauaucuauauuccuacacuuagucaaaauaccuacccaccgacauguuauagguaaaccaugcccaaaaccacacagaauaaaccacaugggaauaugcucauguggucuauauaaacacccuggaguaccaguaaaauggaaaagauaa

SEQ ID NO: 5618 - RNA, 1473 nt, Artificial Sequence
  derived and/or modified protein sequence (opt6) from LASV(ISTH1058-NIG-2011;Clade II)__AIT17446__GPCstabilized
augggacaaauaaucacauucuuccaagaaguaccacacguaauagaagaaguuaugaauauaguacuaaucgcacuaucacuacuagccauauuaaaaggaauauacaauguagcaaccugcggacuauucggcuuaguaucauuccuacuacucugcggaagaucauguucaacaacauauaaaggaguauacgaauuacaaaccuuagaacuagacauggccucacuaaauaugacaaugccacuaucaugcacuaaaaacaauucacaucauuauauaaugguuggaaacgagacaggauuagaacuaacacuaaccaauacaucaauaauaaaccacaaauuuuguaaccuaucagacgcacacaaaaaaaaucuauacgaccaugcccuaaugucaaucauauccacauuccaccuaucaauaccaaacuucaaccaauaugaagcaaugucaugcgauuucaaugguggaaaaauaucuguccaguacaacuuaucccacacauacgcagucgacgcagcaucacacugcgguacagucgcuaacggaguacuacaaacauucaugagaauggccuggggaggaucauacaucgcacuagacucaggcuguggcucaugggacugcauuaugacaucuuaucaauacuuaauaauacaaaacacaacuugggaagaccauugccaguucuccagaccaucuccuaucggauaucuaggauuacuaucucaaagaacacgagauauauacauaucacgaagaagacgcggaacuuuuacuuggacacuaucagauucugaaggaaacgaaacaccaggaggauauugccuaacaagauggauguuaauagaagccgaauuaaaaugcuucggaaacacagcaguagcuaaaugcaaugaaaaacaugaugaagaauuuugugacaugcuucgauuauuugacuuuaacaaacaagcaauaagaagacuaaaaacacccgcacaaauguccauacaacuaaucaacaaagcagucaacgcccuaauaaacgaucaacucauaaugaaaaaucaucuaagagacauaaugugcauaccauacugcaacuacuccaaauauugguaucuaaaccauacaguaacuggcaaaacaucccuaccaagaugcuggcuuguauccaacggcucauaccuaaacgaaacacacuuuucagacgauauagaacaacaagcagacaauaugaucacugaacuauuacaaaaagaauauauggaccgacaaggaaaaacaccacuaggcuuagucgauuuauucguauucucaacauccuucuaucuuauaucuauauucuuacaucuaguaaaaauucccacacacagacacgucauuggaaaaccuugcccaaaaccacaccgacucaaccauauggguauauguuccuguggauuauacaaacacccaggaguaccaguaaaauggaaaagauaa

SEQ ID NO: 5619 - RNA, 1473 nt, Artificial Sequence
  derived and/or modified protein sequence (opt6) from LASV(ISTH1064-NIG-2011;Clade II)__AIT17450__GPCstabilized
augggacaaauaauaacauucuuccaagaagucccucacguaauagaagaaguaaugaauauaguucuaauagcccuuucacuucuagcaauauuaaaaggcaucuauaacguagcaacaugcggacuuuuuggcuuaguaucauuccuccuacuaugcgggagaucauguuccacuaccuauaaaggcguauacgaacuacaaacacuagaauuagacauggcaucguuaaauaugaccaugccccuaucaugcacaaaaaacaacucacaccacuacauaaugguaggaaacgaaacagguuuagaauuaaccuuaacaaacacaucaauaaucaaccacaaauucugcaaucucucagacgcacacaaaaaaaaccuuuacgaccaugcacuaaugucaauaaucucuacuuuucauuuauccaucccaaacuuuaaccaauacgaagcaaugucaugugacuuuaacggcggaaaaauauccguacaauacaaucuuucacacacauacgcaguagacgcagcaaaccauugcggaaccaucgcaaacggaguucuacaaacauuuaugagaauggcuuggggaggaucuuacauugcacucgacucaggauguggauccugggacugcauaaugacaucauaccaauaccuaauaauacaaaauaccacuugggaagaccacugccaauuuucccgaccaucaccaauaggcuacuuaggacuauuaucacaaagaacacgagacauauacauaucaagacgaagacggggcacauuuacauggacacuaucagacucggaaggaaaugaaacaccaggaggcuacugcuuaacaagauggauguuaauagaagcugaauuaaaaugcuuuggaaacacagcaguagccaaauguaaugaaaaacacgacgaagaauuuugugacaugcuaagacuauuugauuuuaacaaacaagcaaucagaagacuaaaaaccccagcacaaauguccauacaacuaauaaauaaagcuguaaacgcacuaaucaaugaucaauuaauaaugaaaaaucaucuacgagacauaaugugcauaccauauuguaacuacucaaaauacugguaucuaaaucacaccguaacaggcaaaacaucauuacccagaugcuggcuaguaucaaauggauccuaccuaaacgaaacacacuuuucagaugacaucgaacaacaagcagacaacaugauaaccgaacuacuacaaaaagaauacauagacagacaaggaaaaaccccccuaggauuaguagacuuauucgucuuuuccacuucauuuuaccuaauauccauauuccuacaccuuguaaaaauacccacccacagacauauaaucggaaaaccaugcccaaaaccacacagauuaaaccacaugggcauaugcucauguggauuauacaaacacccugguguacccguaaaauggaaaagauaa

SEQ ID NO: 5620 - RNA, 1473 nt, Artificial Sequence
  derived and/or modified protein sequence (opt6) from LASV(ISTH1069-NIG-2011;Clade II)__AIT17454__GPCstabilized
augggacaaauaauaaccuucuuucaagaaguuccucacguaauagaagaaguaaugaauauaguccuaauagccuuuucauuacuagccauacuaaaaggaauauauaacguagcaacaugugguuuauuuggcuuagucagcuucuuacuacucugcggaagaucuuguucaacuacauacaaaggaguauaugaacuacaaacacucgagcucgacauggcuucacuaaauaugacuaugccacuaaguuguacuaaaaacaacagccaccauuacauaaugguaggaaaugaaacaggauuagaacuaacccucacaaacacaucaaucauaaaccauaaauucugcaaucuaucagacgcccacaaacgaaaccuauaugaucacgcacucaugucaauuauaucaaccuuccaccucucuauuccaaacuuuaaccaauacgaagcaaugucaugcgacuuuaacgguggaaaaauaucaguacaauacaaucuaucccacacauaugcaguagacgccgccggccauugcggaacaauugcaaauggaguuuuacaaacauuuaugcguauggccugggguggcucauacauagcacuagacucaggauguggauccugggauugcauaaugacaucauaccaauaccuaaucauccaaaacacaacaugggaagaccacugccaauuuucaagaccauccccaauagguuacuuaggucuacuaucacaaagaacacgagacauauacauaucuagacgaagaagaggcacauucaccuggacacuaucagacucugaaggcaaugaaacaccaggaggauauugucuuacaagauggaugcuaauagaagcagaacuaaaaugcuucggcaacaccgcuguagcaaaaugcaacgaaaaacaugacgaagaauuuugcgauaugcuaagacuuuuugauuuuaauaaacaagcaauaagacgauuaaaaacaccagcacaaaugucuauacaacuaaucaauaaagcaguaaaugcauuaauaaaugaccaauuaauaaugaaaaaccaccuaagagacauaaugugcauaccauauugcaauuauucaaaauacugguaccuuaaccacacuauuacuggaaaaacaucacuaccaagaugcuggcuaguaucaaacgguucauacuuaaaugaaacucauuuuuccgaugacauagaacaacaagcagacaacaugauaacagaacuccuacaaaaagaauacauggacagacaagguaaaacaccacuaggccuaguagauuuauuuguauucucaacaucauuuuacuuaauaucaaucuuccuucaucuaguaaaaauaccaacacaccgacauauaauaggaaaaccaugcccaaaaccacaccgacuaaaucacaugggaaucugcucaugcggacuuuauaaacacccaggaguaccaguccgauggaaaagauaa

SEQ ID NO: 5621 - RNA, 1473 nt, Artificial Sequence
  derived and/or modified protein sequence (opt6) from LASV(ISTH1096-NIG-2012;Clade II)__AIT17458__GPCstabilized
augggacaaauaauuacauuuuuucaagaaguaccacacguuauagaagaagucaugaauauaguacucauagcauuaagccuauuagcaauacuaaaaggaauauauaaugucgcuacaugcggauuauucggacuaguaagcuucuuacuauuaugcggacgaucaugcucaacaacauauaaaggaguauacgaauuacaaacucuagaacuugacauggccucccuaaacaugacaaugccauuauccuguacaaaaaauaauucacaucacuacauuaugguagguaaugaaacaggccucgaacuuacacuuacaaacacauccauaaucaaccauaaauucugcaaccuaagcgacgcacauaaaaaaaacuuauaugaccaugcauuaaugucaauaauaucaacauuucaccuaucaauacccaauuucaaccaauacgaagcaaugucuugcgauuucaauggaggaaaaauaucaguacaauauaaucuuagccacacauacgccauugacgcagcaaaccacuguggcacaauugcaaacggaguacuacaaacauucaugcgcauggcauggggaggaucauacaucgcacuugauucuggcuguggauccugggacuguauaaugaccacauaccaauaccuaauaauacaaaacacaacaugggaagaucauugccaauucagcagaccaucaccaauaggauaccuaggacuacuuucacaaagaacaagagacauauacauaucaagaagaagaagaggaacauuuacauggacccuauccgacucagaaggaaacgaaacaccaggaggauacugccuaaccagauggaugcuaauagaagcagaacucaaauguuucggcaacacagcuguagcaaaaugcaacgaaaaacaugacgaagaauucugcgauaugcuccgacuauucgacuucaauaaacaagcuauaagacgacucaaaacaccagcccaaauguccauacaacuaaucaacaaagcaguaaacgcacuaauaaacgaccaacuaauaaugaaaaaccaccucagagacauaaugugcauaccauauugcaauuacucaaaauacugguaccuaaaccacacaguaacuggaaaaacaucacuaccuagaugcugguuaguaucuaauggaucauaccuaaacgaaacacauuucucagacgacauagaacaacaagcagacaacaugauaacagaacuuuuacaaaaagaauauauggacagacaaggaaaaacaccacuaggacuaguagaucucuucgucuuuucuaccucauucuaucuaauaucaauauuccuucaccuagucaaaauaccaacacacagacauguaauagggaaacccugcccaaaaccacauagauuaaaccacaugggaauuugcucaugcggacuauacaaacauccaggagucccaguaaaauggaaaagauaa

SEQ ID NO: 5622 - RNA, 1473 nt, Artificial Sequence
  derived and/or modified protein sequence (opt6) from LASV(ISTH1107-NIG-2012;Clade II)__AIT17462__GPCstabilized
augggacaaauaauaacauuuuuucaagaaguaccccacguaauagaagaaguaaugaauauaguccuaauugcacuaucccuucuagcuauauuaaaaggaauauacaacguagcaaccuguggauuauucggauuaguaucauuuuuauuauuaugcggacgaucaugcucaacaacauacaaaggaguauaugaauuacaaacauuagaauuagacauggccuccuuaaacaugacaaugccacuaaguugcacaaaaaacaacucacaccauuacauaaugguaggaaacgaaacaggccuagaacuuacauuaacaaacacauccauaaucaaccauaaauucugcaaccuauccgacgcacacaaaaaaaaccuauaugaccaugcauuaaugucaaucauaagcaccuuccacuuaucuauaccaaacuuuaaucaauaugaagcaaugucaugcgauuucaacgguggcaaaauaucaguccaauauaaucucucacacgcauacgcaguagaugcagcaaaccacuguggaacaaucgcaaacggaguacuacaaaccuucaugagaauggccuggggagguucuuauaucgcacuugauucaggcugcggaucuugggacugcauaaugacaucuuaccaauaccuaauaauacaaaacacaacaugggaagaccauugccaauuuucacgcccaucaccaaucgguuaccuaggauuauuaucacaaagaaccagagauauauauauaucaagacgccgaagaggaacauucacuuggacacuaucagacuccgaagguaacgaaacaccaggcggcuacugcuuaacuagauggaugcuaauagaagcagaacuaaaaugcuucggaaacacagccguagcaaaaugcaaugaaaaacacgacgaagaauucugugacaugcuucgacuuuucgacuucaacaaacaagcaauacguagacuaaaaacuccugcacagaugagcauacaacuaauaaauaaagccguaaaugcucuaauaaacgaccaauuaauaaugaaaaaucauuuaagagauauaaugugcauaccauacuguaacuacucaaaauauugguaucuaaaccacacaguaacaggaaaaacaucauuaccaaaaugcugguuaguaucaaacggaucauaccuaaacgaaacacacuuuuccgaugauauagaacaacaagcugacaauaugauaacagaacuacuacaaaaagaauauauagacagacaaggaaaaacaccacuuggccuaguagaccuuuucguauucucaacuucauuuuaccuuauaucaauauuccuacauuuaguaaaaauaccaacacacagacacguaauaggaaaaccaugcccaaaaccacauagacuuaaccacaugggaaucuguuccugcggacuauacaaacacccaggaguucccgucaaauggaaaagauaa

SEQ ID NO: 5623 - RNA, 1473 nt, Artificial Sequence
  derived and/or modified protein sequence (opt6) from LASV(ISTH1111-NIG-2011;Clade II)__AIT17466__GPCstabilized
augggacaaauaauaacauucuuucaagaaguaccgcaaguaauagaagaaguuaugaauauaguauuaauagcacuaucccuacuagcaauacuaaaagguauauacaauguagcaacaugcggacuauucggacucgucucauucuuauuauuaugcggacgauccugcuccacaacauacaaaggaguauaugaauuacaaacauuagaauuagacauggcaucucucaacaugacaaugccauuaucaugcacaaaaaacaacucucaucacuacauaauggucggaaacgaaacaggucuagaauuaacauuaacuaaucaaucuauaauaaaccacaaauucugcaauuuaucagacgcacacaaaaaaaaucuauaugaucacgcacuaaugagcauaauaaguacauuucaucuaucaaucccaaauuucaaccaauacgaagcaaugaguugcgacuuuaacggaggaaaaauauccguacaauacaaccuaucccacacauucgcaguagacgcagcaaaucacugcggcaccauagcaaacggcguacuacaaacauucaugagaauggcauggggcggaucauacauagcauuagauaguggaugcggaucuugggacugcauuaugacaucauaccaauacuuaaucauacaaaacaccaccugggaagaccacugucaauuuucacgaccaucaccaauaggauauuuaggccuccuaagucaacgcacuagagacauauacauauccagaagacgaagaggcacauucacauggacccuaucagacucagaaggaaaugaaacaccuggagguuauugucuuacacgauggaugcuaaucgaagcugaacuaaaaugcuucggaaacacagcuguagcaaaaugcaacgaaaaacacgacgaagaauucugcgacaugcuacgacuuuuugauuucaacaaacaagcaauaagacgauuaaaaacaccagcacaaaugucaauacaacuaaucaacaaagcaguaaacgcacugauuaacgaucaauuaauuaugaaaaaucacuuaagagacauaauguguauaccauacuguaauuauucaaaauauugguaccuaaaucacacaauaacaggaaaaacaagucuacccagaugcuggcuaguaucuaacggaucauaccuaaacgaaacccacuuuucagaugacauagaacaacaagcagacaacaugauaacagaauuacuacaaaaagaauacauggacagacaaggaaaaacaccauuaggacuaguagaccuuuuuguauucuccacaucauuuuaucuaauaucaauauuuuuacaccucguaaaaauuccaacacacagacacguaauaggaaaaccauguccuaaaccccacagauuaaaccacaugggaauauguuccugcggacucuacaaacauccuggaguacccguaaaauggaaaagauaa

SEQ ID NO: 5624 - RNA, 1473 nt, Artificial Sequence
  derived and/or modified protein sequence (opt6) from LASV(ISTH1121-NIG-2012;Clade II)__AIT17470__GPCstabilized
augggacaaaucauaacauucuuucaagaaguaccucacgucauagaagaaguaaugaauauaguauuaauagcacuaucacuacuugcaauccuaaaaggaauuuauaacguagcaacaugcggccuauuuggauuaguaucuuuccuucuauuaugcggaaggucaugcucaacaacauacaaaggaguauacgaacuacaaacacuagaauuagacauggcaucauuaaauaugacuaugccauuaucaugcacaaaaaacaacucacaucacuacauaaugguaggcaacgaaacaggccuugaacuaacauuaacaaauacauccauaauuaaucacaaauucugcaaccuaucagaugcacauagaaaaaaccuauacgaccaugcacuaaugucaauaauaucaacauuccaucuaucuauaccuaauuuuaaccaauacgaagcaaugucaugcgauuuuaauggaggaaaaauauccguacaauauaaucuuucacacacauacgccgucgacgccgcaaaccacugcggaacaauagcaaacggaguacuacaaacuuucaugagaauggcauggggaggaucauacauagccuuagauucaggcugcggauccugggacuguauaaugacuucauaccaauaccuaauaauacaaaacaccaccugggaagaccacugccaauucucacgaccaucaccuauaggauaccucggcuuauuaucacaacguacucgcgacauauacauaucucgacgacgcagaggaacauucacuuggacacuaucagauucagaaggaaaugaaacaccaggcggauacugucuaacaagauggaugcuaauagaagcagaauuaaaaugcuucggaaacaccgccguagccaaauguaaugaaaaacacgacgaagaauucugcgacauguuacgacucuuugacuuuaacaaacaagccauaagaagacuaaaaacuccugcacaaaugagcauacaauuaauaaacaaagcuguaaaugcacuaauaaacgaccaacuaauaaugaaaaaucauuuacgagacauaaugugcauacccuauuguaacuacuccaaauauugguaccuuaaucauacaguaacaggaaaaacauccuuaccacgcugcuggcuagucaguaacggaucauauuuaaacgaaacacauuucuccgacgacauugaacaacaagccgacaacaugaucacagaauuauuacaaaaagaauacauagacagacaagguaaaacaccacuaggccuaguagaccuauuuguauucucaacauccuucuacuuaaucuccaucuuccuacaccucgucaaaaucccuacacacagacaugucauaggaaaaccuugcccuaaaccacacagacuuaaccacaugggaauauguucaugcggacuauacaaacaccccgguguaccuguaaaauggaaaagauaa

SEQ ID NO: 5625 - RNA, 1473 nt, Artificial Sequence
  derived and/or modified protein sequence (opt6) from LASV(ISTH1129-NIG-2012;Clade II)__AIT17474__GPCstabilized
augggacaaauaauaacauucuuccaagaaguaccacacgucaucgaagaaguaaugaauauuguauuaaucgcacuauccuuacuagcaauacuaaaaggaauauauaacguagccaccugcggccuauuuggacucguaucauuuuuacuuuuauguggaagaucaugcuccacgacauauaaaggaguauacgaacuucaaacacuagaacuagauauggcaucccuaaacaugacuaugccccuaucuugcacaaaaaacaacucacaccauuauauaauggucggaaaugaaacaggacuagaauuaacacuaacaaacacuuccauaaucaaccacaaauuuugcaaccucucagacgcucacaaaaaaaaccuauacgaccacgcacucaugucaauaauaagcaccuuccacuuaucaaucccaaauuuuaaccaauaugaagcaaugagcugcgauuucaaugguggaaaaauaucuauacaauacaaccuaucacauacauaugcaguagacgcugcaaaccauuguggcacaauagcuaacggagucuuacaaacuuucaugagaauggcuuggggagguucauacauagcccuagacuccggauguggaucaugggacugcauuaugacauccuaccaauaucuaauaauacaaaauacaacaugggaagaucauugccaauucucacgaccaucuccaauagguuaccuaggacuccuaucacaaagaacacgagacauauacauaucuagaagaagaagaggaacauucaccuggacacucucagacucugaaggaaacgaaacaccagguggauauugcuuaacacgauggauguuaauagaagcagaauuaaaaugcuucggaaauaccgcaguagcuaaaugcaacgaaaaacacgaugaagaauuuugcgauaugcuaagacucuuugauuucaacaaacaagcaaucagacgacuaaaaacaccagcacaaaugucaauacaacuaauaaacaaagcagucaacgcacucauaaacgaccaacuaauaaugaaaaaucacuuaagagacauaauguguauaccauacugcaacuacuccaaauauugguaccuaaaucacacaauaacaggaaaaacaucacuaccaagauguuggcuaguauccaacggaucauaucucaacgaaacacacuucucagacgacauagaacaacaagcagacaauaugauaacagaacuuuuacaaaaagaauacauagaccgacaaggaaaaaccccuuuaggacuaguagauuuauucguauucucaacauccuuuuaccuaauauccauauuucugcaccuagucaaaauaccuacacacagacacauaaccggaaaacccugccccaaaccccaucgccuaaaccauaugggaauaugcuccugcggacuauacaaacauccagguguacccguaagauggaaaagauaa

SEQ ID NO: 5626 - RNA, 1473 nt, Artificial Sequence
  derived and/or modified protein sequence (opt6) from LASV(ISTH1137-NIG-2011;Clade II)__AIT17478__GPCstabilized
augggacaaauaaucacauucuuccaagaaguaccccacguaaucgaagaaguuaugaacauaguccucauagcacuaucacuauuagcaauauuaaaaggaauauauaauguagccacaugcggauuauucggauuaguaucauuucuauuauuaugcggaagaucaugcucaacaacauacaaaggagucuacgaauuacaaacauuagaauuagacauggcaucccucaauaugacaaugccucuauccuguacaaaaaacaacucccaucacuacauaaugguaggaaacgaaacaggacuagaacucacacuuacaaauacuucaauuauaaaucacaaauucuguaaccuauccgacgcacacaaaaaaaaccuauacgaccaugcauuaaugucaauaauaucaacauuccacuuaucaauaccaaauuucaaccaauaugaagcaaugucaugcgacuuuaacggaggaaaaauaucuguccaauacaacuuaagucauacauacgcaguagaugccgcugaucauugcggaacaauagcaaacggagucuuacagacauuuaugagaauggcauggggaggaucauacauagcccuagauaguggaugcggaucaugggacuguauaaugacuucauaccaauaccuaaucauacaaaacacaacaugggaagaucacugccaauuuagcagaccuucaccaauaggauauuuaggauuacuaucacaaagaacaagggauaucuacauaucaagaagaagaagaggaacauuuacauggacacuaucagacucugaaggaaaugaaaccccaggaggauacugccuuaccagauggauguuaauagaagcugaauuaaaaugcuucggaaauaccgcaguugcuaaaugcaacgaaaaacacgacgaagaauucugcgacaugcuaagacuauucgauuucaacaaacaagcaauaucacgacuaaaaacaccagcacaaaugucaauucaacuaauuaacaaagcaguaaaugcacuaauaaacgaccaauuaauaaugaaaaaccaucuacgcgauauaaugugcauucccuacuguaacuacucaaaauacugguacuuaaaccauaccguaacaggaaaaaccucacucccuagaugcugguuagucucaaacggaucauaccuaaaugaaacacauuucucagaugacauagaacaacaagcagauaacaugauuacagaaaugcuacaaaaagaauacauagauagacaaggaaaaacaccccuagguuuaguugacuuauucgucuucucaacaucauuuuaccuaauaagcauauuucuacaccuaguaaaaauacccacacacagacacguaauaggaaaaccuugcccaaaaccccauagacucaaccauaugggaauauguucauguggacuauacaaacacccaggcguaccaguaaaauggaaaagauaa

SEQ ID NO: 5627 - RNA, 1473 nt, Artificial Sequence
  derived and/or modified protein sequence (opt6) from LASV(ISTH2010-NIG-2012;Clade II)__AIT17482__GPCstabilized
augggacaaauaaucacauucuuccaagaaguuccacacgucauagaagaaguaaugaacauaguucuaauugcccuaucacuacuugcaauacuaaaaggaauauacaacguagcaacaugcggucuuuucggccuaguaucauuccuauuauuaugcggaagaucaugcucaacaacauauaaaggaguauacgaauuacaaacgcucgaacuagauauggcaucauuaaauaugacaaugccacuaucuugcaccaaaaacaacucucaccacuacauaaugguaggaaacgaaaccggccuagaauuaacauuaacuaauacaucaaucauaaaccacaaauucugcaacuuauccgacgcucacaagaaaaaccuauaugaucaugcauuaaugagcauuauaucaacauuccaccuaucuauaccuaacuucaaucaguaugaagcaaugaguugcgacuucaacggaggcaaaauauccguccaauauaacuuaucccaugcauacgcagucgaugcagcaaaccacugcggaaccauagcaaacggaguauuacaaaccuucaugagaauggccuggggaggaucauacauagcacuagacucuggaugcggcuccugggauuguauaaugacauccuaccaauaccucauaauccaaaacauaacaugggaagaucauugccaauucucacgaccaucaccaauaggauaccucggacuauuaucccaaagaacuagagacauauacaucucccgcagaagacgagguacauuuacauggacccucucagacucagaaggaaacgaaacaccaggcggauacugcuuaacacgauggauguuaauagaagcagagcuaaaaugcuucggaaauacugcaguagccaaaugcaacgaaaaacacgacgaagaauuuugcgacauguuaagacuauucgauuucaacaaacaagcaauaagaagacucaaaacaccagcccaaaugucaauacaacuaauaaauaaagcaguaaaugccuuaauuaaugaccaacuaauaaugaaaaaccaucuaagagauauaaugugcauaccuuauugcaacuacaguaaauacugguaccuaaaccauacagucaccggaaaaacuucacuaccaagaugcuggcuaguauccaauggaucauaucuaaacgaaacacacuuuucagacgauaucgaacaacaagcagacaacaugaucacagaacucuuacaaaaagaauacauagauagacaaggcaaaacaccacuaggucuaguagaccuauuuguauucucaacaucauucuaccucauaucaauauuccuccaucuaguaaaaauaccaacucaucgacacguaguaggaaaaccaugucccaaaccccacagauuaaaucauaugggaauaugcucaugcggauuauacaaacauccaggcgucccaguaaaauggaaaagauaa

SEQ ID NO: 5628 - RNA, 1473 nt, Artificial Sequence
  derived and/or modified protein sequence (opt6) from LASV(ISTH2016-NIG-2012;Clade II)__AIT17486__GPCstabilized
augggccaaauuaucaccuucuuccaagaaguaccacacguaauagaagaagucaugaacauaguauuaauugcacuaucacucuuagcaauacuaaaaggaauauauaacguagcaaccugcggacuauucggauuaguaagcuuucuauuacuuugcggaagaucaugcuccacaacauauaaaggaguauacgaauuacaaacauuagaacuagacauggcaucacuaaacaugacaaugccacuaucaugcacuaaaaacaauucacaccauuacauaaugguaggcaaugaaaccggacuagaacucaccuuaacaaacacaucaauaauaaaucacaaauucuguaauuuaucugaugcacacaaaaaaaauuuauacgaccacgcacuaaugucaauaaucucaacauuucaccuaucaauaccaaauuucaaucaauacgaagccaugucaugugauuucaacggcggaaaaauauccguacaauacaaccucucacauacauaugcaguagacgcagcaaaucacugcggaacuauagcaaacggaguauuacaaacuuuuaugcgaauggcauggggcggaucauauauugccuuagacucuggaugcggauccugggauuguauaaugacaucauaccaauaccuaaucauacaaaacacaaccugggaagaccacugucaguucucaagaccaucaccaguaggauaccuuggacuauuaucacaaagaacaagagacaucuacauuucaagacgucgaagagguacauuuacauggacacuuucagacuccgaagguaacgaaacaccaggagguuacugccuaacuagauggauguuaauagaagcagaacuaaaauguuucggaaauacagccguagcaaaaugcaacgaaaaacacgacgaagaauucugugacauguuaagacuauucgauuucaacaaacaagcuauaagaagacuaaaaacacccgcacaaaugucaauccaacucauaaauaaagcaguuaaugcauuaaucaacgaucaacuaauaaugaaaaaccauuuacgagauauuauguguauaccuuacugcaacuacucaaaauauugguacuuaaaccacacaguaacuggaaaaaccucauuaccuagaugcuggcuagucucaaauggaucauaccuaaaugaaacacauuucucagacgacauagaacaacaagcagacaacaugauaacagaauuacuacaaaaagaauauauagacagacaaggcaaaacaccacuaggacucguagaccuauucguauucucaacauccuucuaucucaucagcauauucuuacaccuugucaaaauaccaacacacagacacguaauaggaaaaccauguccaaaaccacacagacuuaaccacaugggaauauguucaugcggauuauacaaacaccccggcguaccagucaaauggaaacgauaa

SEQ ID NO: 5629 - RNA, 1473 nt, Artificial Sequence
  derived and/or modified protein sequence (opt6) from LASV(ISTH2020-NIG-2012;Clade II)__AIT17490__GPCstabilized
augggacaaaucauaacuuuuuuccaggaaguaccacacguaauagaagaaguaaugaacauaguacuaauaacauuaucacuacuagcaauacuaaaaggaauauacaacguagcaaccugcggacuauucggccucguaucauucuuacuauuaugcggacgcucaugcagcaccacauacaaaggaguauaugaacuacaaacauuagaauuagauauggccaauuuaaacaugacaaugccauuaucauguacaaaaaacaauucccaccacuacauaaugguaggaaaugaaacaggacuagaacuaacauuaacuaacacaucuauaaucaaccacaaauuuuguaacuuaucagaugcacacaaaaaaaaccuauacgaccacgcacucaugucaauaauaucaaccuuucacuuaucaauaccaaauuucaaccaauacgaagcuauguccugcgacuuuaacggaggcaaaauauccguacaauauaacuuaucacauacauuugcaguagaugccgcaaaccauugcggaacaauagcaaaugguguauuacaaacguucaugagaauggcauggggaggaucauauauagcacuagacagcggcuguggaucaugggacuguauaaugaccucauaccaauaccuaauaauacaaaacacaacaugggaagaccauugccaauucucaagacccucaccaauaggauaccuaggacuacuaucacaacgaacaagagacaucuauauuuccagacgaagacgaggaacauucacauggacauuauccgauucugaaggcaacgaaacaccaggaggauacugccuaacaagauggaugcuaauagaagcagaacucaaaugcuucggaaacacagcaguagccaaaugcaaugaaaaacacgaugaagaauucugcgauauguuacgacuuuucgauuucaauaaacaagcaaucagaagacuaaaaacaccagcacaaaugucuauccaauuaauaaauaaagcaguaaaugcucuaauaaaugaucaacuaauaaugaaaaaccaccuaagagauauaaugugcauccccuacugcaacuacagcaaauauugguaccucaaccauacaguaacaggcaaaacaucuuuaccccguugcuggcuaguaucaaacggcucauaccuaaacgaaacacauuucuccgacgauauagaacaacaagcagacaauaugaucacagaacuacuacaaaaagaauacauggaccgacaaggaaaaacuccacuaggauuaguagauuuauuuguuuucagcacuagcuuuuaucuaauauccauauucuuacacuuaguaaaaaucccaacacaccgucauauaauaggaaaaccaugccccaaaccccacagacuaaaccauaugggcauaugcuccugcggauuauauaaacacccaggcguaccaguaaaauggaaaagauaa

SEQ ID NO: 5630 - RNA, 1473 nt, Artificial Sequence
  derived and/or modified protein sequence (opt6) from LASV(ISTH2025-NIG-2012;Clade II)__AIT17494__GPCstabilized
augggacaaaucauaacauuuuuccaagaagucccacacgucauagaagaaguaaugaauauagucuuaauugcauuaucucuccuugcuauauuaaaaggcgucuauaacguagcuacaugcggacuauuuggucuaguauccuuuuuacuacuaugcggaagaucuugcucaacaauuuacaaaggaguuuaugaacuacaaacacuagaacuagauauggcaucucuaaacaugacaaugccucuaucaugcacaaaaaacaacucacaucacuacauuaugguaggaaacgaaacaggacuagaacuaaccuuaacaaacacaucaauaaucaaccauaaauucuguaaccuaucagacgcacauaaaaaaaaccucuacgaccaugcacuaaugucaauaauaucaacauuccaucuuucaauaccaaauuuuaaccaauacgaagccaugucaugugauuuuaaugguggcaaaauaucaguacaauacaaucuaucacauacauacgcaguagacgcagcaaaccacugcgguaccaucgcaaauggaguauuacaaaccuuuaugagaauggcaugggguggaucauacauagcauuagacucaggaugcggaucuugggauugcauaaugaccuccuaccaauauuuaaucauacaaaacacauccugggaagaccacugucaauuuuccagaccaucaccaauaggauaccuaggccuccucucacaacgcacacgagauauauauauaucaagaagaagacgagguacauucacauggacucuaucagacucagaaggcaaugaaacacccggugguuacugcuuaacaagauggaugcuaauagaagcagaauuaaaaugcuucgguaacaccgcuguugccaaaugcaacgaaaaacacgacgaagaauucugcgauaugcuaagacuuuucgacuucaacaaacaagcuauaagaagacucaaaacaccagcacaaaugucaauacaauuaauaaauaaagcagucaacgcacucaucaacgaccaacuaauaaugaaaaaccacuuacgagacauaaugugcaucccauacuguaauuauucaaaauacugguaccuaaaccacacuguaacagggaaaacaucccuaccgagaugcugguuaguaucaaacggaucauaccuaaacgaaacucacuucucagacgacauagaacaacaagcugacaauaugauaacagaacuacuacaaaaagaauacauagauagacaaggaaaaacaccccuaggauuagucgaucuuuucgucuucucaacaucauucuaucuaauaucuauauuccuacaccuagucaaaauaccaacacacagacacguaauaggaaaaccaugcccaaaaccacaucguuuaaaccacaugggaaucuguucuugcggacuauacaaacacccaggaguaccaguaaaauggaaaagauaa

SEQ ID NO: 5631 - RNA, 1473 nt, Artificial Sequence
  derived and/or modified protein sequence (opt6) from LASV(ISTH2031-NIG-2012;Clade II)__AIT17498__GPCstabilized
augggacaaaucauaacauucuuccaagaaguaccacacguaauagaagaaguaaugaacauaguacuaaucgcacucucauuauuagccauacucaaaggaauauauaacguugcaaccugcggauuauuuggauuaguaucauuccuccuccuauguggccggucaugcuccaccacauacaaaggaguauacgaacuacaaacacuagaacucgacauggcuucacuaaacaugacaaugccauuaucaugcacaaaaaauaacucucaccauuacauaaugguaggaaaugaaacuggauuagaacuaacauuaacaaauacaucaauaauaaaccacaaauucugcaacuuaucagaugcacacaaaaaaaaucuauacgaccaugcacuaaugucaauuauaucaacauuucaccuuucaauaccaaacuucaaccaauaugaagcaauguccugcgauuuuaacggagguaaaauaucaguacaauacaaucuaucacacaccuacgcaguagaugcagcaaaccauugcggcacaauagcaaacggcguccuacaaaccuucaugagaauggccugggguggaucauauauagcucuagacaguggaugcggaaacugggacuguaucaugacaucauaccaauacuuaauaauacaaaacaccacaugggaagaccacugccaauucucaagaccauccccaauaggauacuuaggacugcuaucccaaagaacaagagauauauacauaagcagaagaagaagaggcacauucaccuggacuuuaucagacucagaaggaaaugaaacccccggaggauacugccuaacucguuggaugcuuauagaaacugaacuaaaauguuuuggaaacacagcaguagccaaauguaaugaaaaacacgacgaagaauucugcgacauguuaagacuuuucgacuucaacaaacaagcaauaucaagacuaagaucaccagcacaaaugagcauacaacuaauaaacaaagcagucaacgcauuaauaaacgaccaacuaauaaugaaaaaccacuuaagagacauaauguguauaccauacugcaauuauucuaaauacugguaucucaaccacacgguaacaggaaaaacaucacuacccaaaugcuggcuaguauccaacggcucauaccuaaaugaaacacacuucucagacgacaucgaacaacaagccgacaacaugauaaccgaaaugcuucaaaaagaauacauagaccgacaaggaaaaacaccauuaggacuagucgauuuauucguauuuuccaccucauucuauuuaauaucaaucuuucuacaccuugucaaaauacccacacaccgacacauaacagguaaaccauguccaaaaccacauagacuaaaccacauggguaucugcaguugcggucucuacaaacaccccggaguaccaguaaaauggaaaagauaa

SEQ ID NO: 5632 - RNA, 1473 nt, Artificial Sequence
  derived and/or modified protein sequence (opt6) from LASV(ISTH2037-NIG-2012;Clade II)__AIT17502__GPCstabilized
augggacaaauaaucacuuucuuccaagaaauaccccacgucauagaagaagucaugaacauaguauuaaucacauuaucauuacucgcuauacuaaaaggaauauauaauguagcaacaugcggccuauuuggucuaguaucauuuuuauuacuuuguggaaaauccugcucaacaacauacaaaggaguauaugaacuacaaacacucgaauuagacauggcauccuuaaauaugacaaugccacucucuugcacuaaaaauaacucccaccauuauauaaugguaggaaacgaaacaggacuagaacuaacauuaacaaacaccuccauaaucaaccauaaauuuugcaacuuauccgacgcucaccgcaaaaaucuauaugaccacacccuuaugucaaucauaucaacauuccaccuaagcauaccaaacuucaaccaauaugaagccaugucaugcgauuuuaacggaggcaaaauauccguacaauacaaccuaucacaugcauaugcaauagacgcagcaacacacugcggaacaauugcaaacggaguacuccaaacauuuaugcgaauggcauggggaggaagcuacauugcacuugauucaggaugcggagguugggauugcauaaugacuucauaccaauacuuaauaauacaaaacacaacaugggaagaucacugucaguucagccgaccaucaccuauaggauaccuaggacuacucucacaaagaacaagagacauauauauaucaagacgaagacgcggaaccuucacauggacacuuuccgacucagaaggaaacgaaacaccuggaggauacugccuaaccagauggaugcuuauagaagcagaacuuaaaugcuucggaaacacagcuguagcaaaaugcaacgaaaaacaugacgaagaauuuugugacaugcucagacuauucgauuucaauaaacaagcaaucagaagacuaaaaacaccagcacaaaugucaauacaacuaauaaauaaagcaguaaacgcauuaauaaaugaucaacuaauaaugagaaaucaccuacgcgacauaaugugcauaccauacuguaauuacucaaaauacugguaucuaaaccacacaguaacuggaaaaacaucccuacccaaaugcugguuaguaucuaacggcucauaucuaaaugaaacccacuucagcgacgacauagaacaacaagcagacaacaugauaacagaacuacuacaaaaagaauauauggaucgacaaggaaaaacaccauuaggucuagucgaccucuuuguauuuuccacuucauucuaucuaauaucaauauuccuacauuuaguaaaaauaccaacccaccgacacguaaucggaaaaccaugcccaaaaccacacagacuaaaccacauggguguaugcucauguggacucuacaaacauccaggaguaccagucaaauggaaacgauaa

SEQ ID NO: 5633 - RNA, 1473 nt, Artificial Sequence
  derived and/or modified protein sequence (opt6) from LASV(ISTH2042-NIG-2012;Clade II)__AIT17506__GPCstabilized
augggucaaaucauaacuuucuuccaagaagucccacacguaauagaagaaguaaugaacauaguacuaauagcauuaagucuacuagcuauauuaaaagguauauauaacgucgcaacaugcggacuauuuggauuagucuccuucuuauuacucugcggacgaucuuguucuacaaccuauaaaggaguauaugaauuacaaacacuugaacucgacauggcaucucuaaauaugacaaugccccuaucaugcaccaaaaacaacagccaccauuacaucaugguaggcaacgaaacaggucucgaauuaacauuaacaaacacauccaucauuaaccacaaauucugcaaccucuccgaugcacauaagaaaaauuuauaugaucacgcauuaaugucaauaaucucaacuuuccaccuaucuauaccaaacuucaaucaauacgaagcaaugucuugcgacuucaacggaggaaaaauaucaguacaauacaaccuaucacaugcauacgcaguagacgcagccgaacacugcgguacaauagcaaacggcguucuacaaacauucaugagaauggcaugggguggaucauauaucgcacuagacucaggcugcggaucaugggacuguguaaugacaucauaucaauaccuaauuauacaaaacacaaccugggaagaccacugucaauucucaagaccaucaccaauagguuacuuaggacuacuuucacaaagaacaagagacauauauauaucuagaagaagacgaggaacauucacauggacacuaucugacucagaaggcaaugaaaccccaggaggauauuguuuaacaagauggaugcuaauagaagcagaacuaaaauguuucggaaauacagcaguagccaaaugcaacgaaaaacacgaugaagaauuuugugacauguuacgacuauucgacuucaauaaacaagcaauagaaagauuaaaaacaccagcacaaaugucaauccaauuaaucaacaaagcaguaaacgcccuaaucaacgaucaacuaauaaugaaaaaccacuuaagagauauaaugugcauaccuuacugcaacuauucaaaauauugguaccucaaucacacaguaacaggcaaaacaucucuaccaagaugcuggcuagucucaaacggaucauaccuaaaugaaacucauuucucagacgacauagaacaacaagcagauaacaugauaacagaaauguuacaaaaagaauacauagauagacaaggaaaaaccccauuaggucuagucgacuuauucguauucuccacaucuuucuacuuaauaucaauauuucuacacuuagucaaaauaccaacacacagacacgucauuggaaaacccugcccaaaaccacacagauuaaaucacaugggaauaugcucuugcggacuauacaaacacccaggaguaccaguuaaauggaaaagauaa

SEQ ID NO: 5634 - RNA, 1473 nt, Artificial Sequence
  derived and/or modified protein sequence (opt6) from LASV(ISTH2046-NIG-2012;Clade II)__AIT17510__GPCstabilized
augggucaaaucaucacauucuuccaagaaguaccccacguaauagaagaagucaugaacauaguucuaauugcacuaucacuauuagcaauauuaaaaggaauauacaacguagcaacauguggauuauucggauuagucucauuccuauuauuauguggaagaucauguucaacuacuuacaaaggaguauacgaacuacaaacacuagaacuagacauggcaucacuaaacaugacaaugccauuaucaugcacaaaaaacaauucccaccacuacauaaugguuggaaaugaaaccggccucgagcuaacccuaacaaauacaucaauuauaaaucacaaauuuugcaauuuaucagaugcacacaaaaaaaacuuauacgaccacgcacuaaugucaaucauuucaaccuuucauuuaucaauaccaaacuucaaccaauacgaagcaaugucaugcgauuucaacggaggaaaaaucaguguacaauauaaucucucacacacauaugcaguagacgcagcaaaccacugcggaaccauagcaaacggagucuuacaaacauucaugcgaauggccuggggaggcagcuacaucgcauuagacucaggcuguggaagcugggauugcauaaugacaucuuaccaauaccuaauaauccaaaacacaacaugggaagaccacugccaauuuucaagacccucccccauaggauaucucggauuacuuucucaaagaacaaaagauauauauauauccagaagaagaagaggaaccuucacauggacacuaucagacucagaaggaaaugaaacaccagguggauauugccucacaagauggaugcuaauagaagccgaguuaaaauguuucggaaacaccgcagucgcaaaaugcaacgaaaaacaugacgaagaauucugugauaugcuacguuuauucgacuucaauaaacaagcaauaagacgauuaaaaacaccagcacaaaugucuauccaacucauaaauaaagcaguaaacgcauuaaucaacgaccaacuaauuaugaaaaaccaucuaagagacauaauguguauaccauacuguaauuacucaaaauacugguaucuaaaucacacaguaaccgguaaaaccucacuaccaagaugcuggcuagucucaaacgguucauaccuaaacgaaacacacuucucagacgauauugaacaacaagcagauaacaugauaacagaacuacuacaaaaagaauacauugaccgacaaggcaaaaccccacuaggccuaguagacuuauuuguauucucaacaucuuucuaccucauaucaauauuuuuacaucuaguaaaaauaccaacccacagacacgucauaggaaaaccauguccaaaaccacacagacuuaaucacauggguauaugcucaugcggccuauacaaacacccaggaguaccaguaaaauggaaaagauaa

SEQ ID NO: 5635 - RNA, 1473 nt, Artificial Sequence
  derived and/or modified protein sequence (opt6) from LASV(ISTH2050-NIG-2012;Clade II)__AIT17514__GPCstabilized
augggacaaauaauaacauucuuucaagaaguuccacauguaauagaagaaguuaugaacauuguauuaauagcacuaucacuacucgcaguauuaaaaggaauauacaacguagccaccugcggcuuauucggacuaguaucauuccuacuacucugcggaagaucuugcaguacuacauacaaaggaguauaugaacuucaaacauuagaauuagacauggcaucucuaaacaugaccaugccuuuaucuuguacaaaaaacaacucucaucauuacauaaugguagguaacgaaaccggauuagaauuaacacucacaaauacaucaauaauuaaccacaaauucugcaacuuaucugaugcacauaaaaaaaaccuauaugaccacgcacuaaugucaauuauaucaacauuccacuuauccauacccaacuucaaucaauacgaagcaauguccugcgauuucaauggaggaaaaauaucaguacaauacaacuuaucacauacauacgcaguagacgcugccaaccacugcggaacaaucgcaaacggaguacuacaaaccuucaugagaauggcauggggaggaucauacauagcacuagacuccggaugcggaagcugggauugcauaaugacaucauaucaauaccuaauaauacaaaauacaacaugggaagaccacugccaauucuccagaccuuccccaauaggauaccucggacuucuaagucaaagaacccgagauauauauauuucaaggcgacgaagaggaacauuuacauggacuuuauccgauucagaaggaaacgaaacaccaggaggcuacugccuaacaagauggaugcuaauugaagcagaauuaaaauguuucggaaacacagcaguagcaaaaugcaaugaaaaacacgacgaagaauucugcgauaugcuaagacuauucgauuuuaacaaacaagcaauaagaagacucaaaacaccugcacaaaugucaauacaacuaauaaacaaagcaguaaacgcacuaauaaaugaccaauuaauuaugaaaaaucaccuaagagacauaauguguauaccuuauugcaacuacucaaaauacugguaccuuaaucacacaguaacaggaaaaacaucacucccuaggugcuggcuaguaucaaacggaucauacuuaaacgaaacacauuucucugaugauauagaacaacaagcagacaacaugauaacagaacuacuccaaaaagaauacauagaccgacaaggaaaaacaccacuuggccuaguugaccucuuugucuucucaacaucauucuauuuaauaucaauauucuuacaucuaguaaaaauaccaacacacagacauguaauaggaaaaccauguccaaaaccccacagauuaaaccacaugggaauaugcuccugcggacuauauagacacccaggaguaccagucaaauggaaaagauaa

SEQ ID NO: 5636 - RNA, 1473 nt, Artificial Sequence
  derived and/or modified protein sequence (opt6) from LASV(ISTH2057-NIG-2012;Clade II)__AIT17518__GPCstabilized
augggccaaauaauaacauucuuccaagaaguaccacacguaauugaagaaguaaugaauauaguauuaauagcauuaucacuauuagcaauacuaaaaggaaucuauaacguagccacauguggacuauuuggauuaguaucauuuuuacuacuaugcgguagaagcuguucaacaacauacaaaggaguauacgaacuacaaacauuagaauuagacauggcuucucuuaauaugacaaugccccuaucauguacaaaaaacaauucccaccacuacaucaugguaggaaacgaaaccggacuagaauuaacuuuaacaaacacaucaauaauaaaccacaaauucugcaaccuaucagacgcccacaaaaaaaaucuuuaugaccacgcacuaaugucaauaauauccaccuuucaccuaucaauacccaacuucaaucaauacgaagcaaugucaugcgauuuuaacgguggaaaaauaucaguacaauacaacuuaucacaugcauacgccguagacgcagcaaaccauugcggaacuaucgcuaacggaguauuacaaaccuucaugcgcauggcauggggaggcucauauauagcauuagacuccggaugcggauccugggauugcauaaugacuuccuaucaauacuuaauaauacaaaauacaacaugggaagaucauugccaauucucacgaccuuccccaauaggauaucucggacuauuaucacaaagaacaagagauauauacauauccagaagacgcagaggaacauucacauggacacuaucugacagcgaaggcaacgaaacuccaggcggauacugcuuaaccagauggauguuaaucgaagcagaacuuaaaugcuuuggaaacacugcaguagccaaaugcaaugaaaaacacgaugaagaauucugugacaugcuaagacucuucgauuucaacaaacaagcaauacgaagauuaaaaacaccagcacaaauguccauucaauuaaucaacaaagcagucaaugcauuaauaaacgaucaauuaauaaugaaaaaucaccuacgugacauaaugugcauaccauacugcaacuacagcaaauauugguacuuaaaccacaccguaacaggaaaaacaucauuaccacgcugcugguuagucucaaacggaaguuaccuaaacgaaacacauuucucagacgauauagaacaacaagcagacaacaugauaacagaacuacuacaaaaagaauauauggauagacaaggaaaaacaccacuaggacuaguagaccuauucguauuuucgacuucauuuuaucuaauaucaauauuucuacaucuaguuaaaauaccaacacacagacacguaauaggaaaaccaugcccaaaaccacauagacuaaaccauaugggaauuuguuccuguggauuauacaaacacccaggggucccaguaaaauggaaaagauaa

SEQ ID NO: 5637 - RNA, 1473 nt, Artificial Sequence
  derived and/or modified protein sequence (opt6) from LASV(ISTH2064-NIG-2012;Clade II)__AIT17524__GPCstabilized
augggacaaauaauaacauucuuucaagaaguaccucacguaauagaagaaguaaugaacauaguccuaauagcauuaucacuacuagcaauauuaaaaggcauauauaacguagcaaccuguggacuauuuggccuaguaucauucuuacuauuaugcggaagaucaugcucuacaacauacaaaggcguauacgaacuacaaacccuagaacuagauauggcaucuuuaaacaugacaaugcccuuaucauguacaaaaaauaacucccaccacuacaucaugguaggaaacgaaacaggacuagaauuaacucucaccaacacauccaucaucaaccacaaauucugcaaucuaucagacgcccauaaaaaaaaccuauaugaccacgcauuaaugucuaucauuucaacauuccaccuaucaauccccaacuucaaccaauacgaagcgauguccugugauuuuaauggagguaaaauauccguacaauacaauuuaucacacacauacgcaauugacgccgcuaaccacuguggaacuauagcaaacggaguccuacaaaccuucaugagaauggccuggggaggaagcuacauagcacuagacucaggaugcggauccugggauuguauaaugaccucauaccaauacuuaauaauacaaaauacaacaugggaagaccacugccaauuuucaagaccuucaccaauaggauaccuaggauuauuaucccaacgaacaagagacauauacauaucaagaagaagaagaggaacauuuacuuggacacucucagacucagaaggaaaugaaacaccaggaggcuacuguuuaacuagauggaugcucauagaagcagaauuaaaaugcuucggaaacacugcagucgcaaaaugcaaugaaaaacacgaugaagaauucugcgauaugcucagauuauuugacuucaacaaacaagcaauaagaagauuaaaaacacccgcacaaaugucaauacaauuaaucaauaaagcaguaaacgcauuaauaaaugaucaauuaaucaugaaaaaccaccuaagagacauaaugugcauacccuacugcaacuacucaaaauacugguaucuaaaccacacagucacagguaaaacaucccuaccucgcuguuggcuaguuucaaauggaucauaucuaaacgaaacacauuucuccgacgauauugaacaacaagccgauaacaugauaaccgaaaugcuccaaaaagaauacauggaucgacaaggaaaaacaccacuaggacuaguagauuuauuuguuuucuccacuucauucuaucuaauauccauauuucuucaccuaguaaaaauacccacacaccgacacguaaucggaaaacccugcccaaaaccacacaggcucaaccacaugggcauaugcagcugcggacuauauaaacaccccggugucccaguuaaauggaaacgauaa

SEQ ID NO: 5638 - RNA, 1473 nt, Artificial Sequence
  derived and/or modified protein sequence (opt6) from LASV(ISTH2065-NIG-2012;Clade II)__AIT17528__GPCstabilized
augggacaaauaauaacauucuuccaagaagucccccauguuauagaagaaguaaugaacauaguauuaauugcacucucacuauuagcaauguuaaaaggaauauauaauauagccacuugcggucuauucggccucauaucauuccuacuacuaugcggaagaagcugcucaacaacauacaaaggaguauacgaacuccaagcacuagaacuugacauggccaauuuaaacaugacaaugccacuauccugcacuaaaaacaauucacaccacuacaucaugguaggaaaugaaacaggauuagaauuaacacuaacuaacaccucuauuauuaaucacaaauuuugcaaccuauccgacgcccacaaaaaaaaucucuacgaccaugcucuaaugucaauaauuuccacauuucaccuauccauaccuaacuucaaccaauacgaagcaaugucaugcgacuucaacgguggaaaaauaagcguacaauacaaccuaucacauacauacgcaggcgaugcagcuaaacacugcggaacaauagcaaacggaguuuuacaaacauucaugagaauggcauggggaggaucauauaucgcccuagacucuggaugcggaaauugggacugcauaaugacaucauaccaauaucuaauuauacaaaauacaacaugggaagaccacugccaauuuuccagaccauccccaauaggauacuuaggacuauuaagucaaagaacaagagauauauacauuucaagaagaagaagaggcaccuucacauggacauuaucagacucugaaggaaaugaaaccccaggaggauacugucuaaccagauggauguuaaucgaagcagaacuaaaaugcuucggaaacacugcugucgcaaaauguaacgaaaaacacgaugaagaauuuugcgacaugcuaagacuauucgacuucaacaaacaagcaauacgaagauuaaaaacacccgcccaaaugucaauacaacuaauaaauaaagcuguaaacgcucuaauaaaugaccaacuaauaaugaaaaaucacuuaagagauauaaugugcauaccauacugcaacuauuccaaauacugguaccuaaaucacucaguaaccggacgaaccucacuaccaagaugcuggcuaguaucuaacggaucauaccuaaaugaaacacaauucagugacgacaucgaacaacaagcagacaauaugauaacagaaaugcuccaaaaagaauauauagacagacaaggaaaaaccccacuaggacuaguagaccuauuuguauuuagcacuagcuuuuaccuaauaucaauauuccuacacuuaauaaaaaucccaacacacagacauauaguaggaaaaccuugcccaaaaccacacagacuaaaccacaugggaauauguucaugcggccuuuauaaacaccccggaauaccaguuaaauggaaacguuaa

SEQ ID NO: 5639 - RNA, 1473 nt, Artificial Sequence
  derived and/or modified protein sequence (opt6) from LASV(ISTH2094-NIG-2012;Clade II)__AIT17538__GPCstabilized
augggucaaaucauaaccuuuuuccaagaaguuccacacguaauagaagaaguaaugaauauaguauuaauagcccuuucacuacuagcaaucuuaaaaggaauauauaacauagcaacaugcggacuauucggcuuaauauccuuuuuauuauuaugcggaagaucaugcucuacaacauacaaaggaguauaugaacuacaaacacuagaacuagacauggcaaaccuaaacaugacuaugccacucagcugcaccaaaaacaacucacaucacuacauaaugguaggcaacgaaacaggauuagaacuuacauuaacaaacacauccaucauuaaccacaaauucugcaacuuaucugaugcacacaagaaaaaccuauacgaccacgcauuaaugucaauaauaucaacauuccaccucucaauacccaacuucaaccaauaugaagcuaugucaugcgacuuuaacgaaggaaaaauaucaguacaauacaaccucucccacucauacgcaauagacgccgccggacauuguggaacaauagcaaauggcguccuucaaacauuuaugagaauggcuugggguggauccuacauagcacuagacuccggauguggcaauugggauugcauaaugacaucauaucaauaccuaauaauccaaaauaccacaugggaagaccauugccaauuuucacgacccucaccaauaggauaucuaggucuauuaucacaaagaacaagagacauauacauaucaagaagacgaagaggaacauucaccuggacucuaucagacucugaaggaaacgaagcaccaggagguuacugcuuaacaagauggauguuaauagaagcagaacucaaauguuuugguaauacugcaauugcaaaauguaaugaaaaacaugacgaagaauuuugcgacauguuaagauuauucgacuucaacaaacaagcaaucaaacgacuaaaagcaccagcacaaaugaguauccacuuaauaaacaaagcuguaaaugcacuaauaaaugaccaacuaauaaugaaaaaccaucucagagauauaauguguauaccauacugcaauuacaguaaauauugguauuuaaaccacaccguaacaggaaaaaccucucucccaaaauguuggcuaguaucaaauggaucauaccuuaaugaaacucacuucagugacgauaucgaacaacaagcagauaacaugaucacagaacucuuacaaaaagaauauauggaccgacaaggaaaaacaccacuaggauuaguagauuuauucguauucuccaccuccuuuuaccuaauaucaauauuccuacaccuaguuaaaauaccuacacauagacauauaguugguagaccauguccaaaaccacauagacuaaaucacaugggaaucugcucaugcggccuauacaaacaccccggaguaccaguaaaauggaaacgauaa

SEQ ID NO: 5640 - RNA, 1473 nt, Artificial Sequence
  derived and/or modified protein sequence (opt6) from LASV(ISTH2129-NIG-2012;Clade II)__AIT17544__GPCstabilized
augggacaaauaauaacauucuuccaagaaguaccacacguaauagaagaaguaaugaauauaguacuaauagcacuuuccuuauuagcaauacuaaaaggcauauacaauguagccaccugcggucuuuucgguuuaguaucauuucuauuauuauguggaagaucaugcucaaccacauacaaaggcgucuacgaacuacaaacccucgaacucgacaugggaucacuaaacaugacaaugccacuaucaugcacaaaaaacaacucacaccauuauauaaugguaggcaacgaaaccggacucgaacuaacacuaacaaacacaucaauaauuaaccauaaauucugcaaccuaucagaugcacauaaaaaaaacuuauacgaccacgcauuaaugucaauaaucucaacauuccauuuauccauaccaaauuucaaccaauaugaagcaaugucaugcgacuucaacggcggaaaaauaucaguccaauauaaccuaucacacagcuacgcaguagacgcagccaaccacugcggaacuauagccaacggcguauuacaaacauucaugagaauggcauggggaggaucauacauagcucuagacuccggauguggaagcugggacugcaucaugacaucauaucaauauuuaauaauccaaaacaccacaugggaagaccauugccaauuuucccgaccaucaccaauaggauaccugggcuuauuaucacaaagaacccgagacauauacauaucaagacgaagaagaggaacauuuacauggacacuuucagacucggaaggaaaugaaaccccuggaggauauugccuaacaagauggauguuaaucgaagccgaacuaaaauguuucggcaacacagcaguagccaaaugcaacgaaaaacacgacgaagaauucugcgacaugcuucgacuuuucgauuucaacaaacaagcaauaagacgauuaaaaacucccgcccaaaugucaauacaacuuaucaauaaagcaguaaacgcccuaauuaacgaccaacucauaaugaaaaaccaucuaagagauauaaugugcauaccauauuguaauuacuccaaauacugguaccuaaaucacaccguaacaggcaaaacuucacuaccccgaugcuggcuaguaucaaacggaucuuaccucaaugaaacacauuucucagaugauauagaacaacaagcagacaacaugauaacagaacuacuacaaaaagaauacauggacagacaaggaaaaacaccacuaggauuaguagaucuauuuguauucucaaccucauucuacuuaauaucaaucuuuuuacaccuuguaaaaauacccacucacagacacauaaucggaaaaccauguccaaaaccacacagauuaaaccacaugggaauaugcucaugcggccuauacaaacacccaggaguaccaguaaaauggaaacgauaa

SEQ ID NO: 5641 - RNA, 1473 nt, Artificial Sequence
  derived and/or modified protein sequence (opt6) from LASV(ISTH2217-NIG-2012;Clade II)__AIT17548__GPCstabilized
augggacaaauaauuacauuuuuccaagaaguuccacauguaauagaagaagucaugaauauaguauuaaucgcacuaucacuauuagcaauuuuaaaaggaauauauaaugucgcaacauguggacuauucggccuuguaucuuuccuauuccuaugcggaagaucauguucuacaaccuauaaaggcgucuaugaacuacaaacacuagaacuagauauggcaucacuuaacaugacaaugccccuaucaugcacuaaaaauaacagucaccauuauauaaugguaggaaaugaaacaggccuagaauuaacacuaacaaacacaagcaucauaaaucauaaauuuugcaacuuauccgacgcacacaaaagaaaucuauaugaccacgcacucauguccauaauaucaacuuuccaucuaucaauacccaauuucaaccaauacgaagcaaugucaugcgauuucaacggagguaaaauaucaguccaauacaauuuaucacaugcauacgccggcgacgcagcuaaacacugcggcacaauagcaaacggaguacuacaaacauucaugcgaauggcuuggggaggaaguuauauugcccuagacucuggaugcggauccugggauugcaucaugacauccuaccaauauuuaauuauacaaaacacaacuugggaagaccacugccaauucucaagacccagcccaauaggauaucuaggacuacuaucacaacgcacccgagacauauauaucagcagaagaagaagaggaacauucaccuggaccuuaucagacucagaaggcaacgaaacaccaggaggauacugccuaacaagauggauguuaauagaagcugaacuuaaaugcuucgguaacaccgcaguagccaaaugcaaugaaaaacacgaugaagaguucugugacaugcuuagacuauucgacuuuaacaaacaagcaauuagacgacuacguacaccagcacaaaugucuauacaacuaauaaauaaagccguaaacgcacuaauaaaugaucaauuaauaaugaaaaaccacuuacgagacauaauguguauaccauacugcaauuacucaaaauacugguaucuaaaccauacuguaacaggaaaaacauccuuaccaaaaugcuggcuagucucuaacggaucauaccuaaacgaaacacauuuuucagacgacauagaacaacaagcagacaacaugauaacagaaauguuacaaaaagaauacaucgacagacaaggaaaaacaccauuaggcuuaguagaccuauucgucuucucaaccucauucuacuuaauaucaauuuuccuacaucuaguaaaaauaccuacacacagacauguaauaggaaaaccaugcccaaaaccacauagauuaaaccacaugggaauaugcagcugcggacuauauaaacacccaggaguaccaguaaaauggaaacgauaa

SEQ ID NO: 5642 - RNA, 1473 nt, Artificial Sequence
  derived and/or modified protein sequence (opt6) from LASV(ISTH2271-NIG-2012;Clade II)__AIT17552__GPCstabilized
augggacaaauaauaacauucuuucaagaaguaccacacgucauagaagaagucaugaauauaguacuaauagcccucucacuccuagcaauacucaaaggcauauauaaugucgcaacaugcggacuauuuggacuaguauccuucuuacuacucugcggacgcucauguucuaccacauauaaaggaguauacgaauuacaaacauuagaacuagacauggcaucacuuaauaugacaaugccacuaucaugcacuaaaaacaauucacaccacuacaucaugguaggaaacgaaaccggcuuagaauuaacauuaacaaacacaucaauuauuaaucacaaauuuuguaaccuuucagacgcucauaaaaaaaaccuauacgaccaugcguuaauguccauaauaucaaccuuucauuuauccauaccaaacuucaaccaauacgaagcaaugucaugcgauuuuaauggaggaaaaauuucaguacaauacaaccucucccacgcauacgcaguaaaugccgcaaaccacuguggcacaauagcaaauggcgucuuacaaaccuucaugagaauggcauggggaggaucauacauagcccuagacucuggaugcggauccugggacugcauaaugacauccuaucaauaucuaaucauacaaaacacaacuugggaagaucauugccaauuuucccgaccaagcccaaucggauaucucggauuacucucacaaagaacucgagauauauacauaucucgacgacgcagaggaacauucacuuggacacuaucagacucagaaggaaaugaaacccccggaggguacugccuaacaagauggauguuaaucgaagcugaauuaaaaugcuucgguaacacagcagucgccaaauguaacgaaaaacaugacgaagaauuuugcgacaugcuacguuuauucgauuucaauaaacaagccauaagaagacuaaaaacaccagcacaaaugucuauccaacuaaucaacaaagcaguaaacgcucucaucaacgaucaacuaauaaugaaaaaccaccuccgcgacaucaugugcauacccuacugcaauuacuccaaauacugguacuuaaaccacacagucaccggaaaaacaucacuuccacgaugcuggcuaguaucaaauggaucuuaucuuaacgaaacacacuucucagacgacauagaacaacaagcagacaacaugauuacagaauuacuacaaaaagaauauauggacagacaaggaaaaacuccucuaggauuagucgaccuauuugucuucuccacauccuucuauuuaauaucaauauuuuuacacuuaguaaaaauucccacacauagacacguaauaggcaaacccuguccaaaaccacauagauuaaaucauaugggaauaugcucaugcggcuuauauaaacacccuggagucccagucaaauggaaaaaauaa

SEQ ID NO: 5643 - RNA, 1473 nt, Artificial Sequence
  derived and/or modified protein sequence (opt6) from LASV(ISTH2304-NIG-2012;Clade II)__AIT17556__GPCstabilized
augggacaaauaaucacuuucuuucaagaaguaccacauguaaucgaagaaguaaugaacauaguauuaauagcacucucacucuuagcaauacuaaaaggaauuuacaacguagcaaccugcggacuauucggccuuguaucauuccuucuucuauguggaagaucuugcucaacaacauacaaaggaguauacgaacuacaaacacucgaacuagacauggcaucacucaauaugacaaugccacuaucaugcaccaaaaacaacucacaccauuacauaaugguaggaaaugaaacagguuuagaauuaacauuaacaaacacaucuaucaucaaccacaaauucugcaaccuaagcgaugcacacaagaaaaaccuauacgaccacgcacuaaugucuauaauaucaacauuucacuuaagcaucccaaacuucaaccaauacgaagcaaugucaugugauuucaauggaggaaaaauaucaguacaauacaacuuaucccacacauaugcuguagacgccgcaaaccacugugguacaauagcaaacgguguacuacaaacuuucaugagaauggcauggggaggcucauauauugcacucgacucuggaugcggauccugggacugcauaaugacaucauaccaauaccuaauaauacaaaacacaacaugggaagaccacugccaauucucacgaccaaguccaauagguuaccuaggauuauuaucacaaagaaccagagauauauacauaagccguagaaggagaggaaccuucacauggacacuauccgacucugaaggaaacgaaacacccggaggauacuguuuaacuagguggauguuaauagaagcagaacuaaaaugcuuuggaaauacagcaguagcaaaauguaaugaaaaacaugaugaagaauuuugcgacaugcuaagauuauucgacuucaacaaacaagcaauaagacgacuaaaaacaccagcacaaaugaguauacaauuaauaaauaaagccguaaacgcacuaauaaacgaccaauuaauaaugaaaaaucacuuacgagauaucaugugcauuccauacugcaacuauucaaaauacugguaccuaaaccacacaauaaccggaaaaaccagucuaccaagauguuggcuaguaucaaacggauccuacuuaaacgaaacacacuuuucagaugacauagaacaacaagcagacaauaugauaacugaacuacuacaaaaagaauacauugacagacaaggaaaaacaccacucggccuuguagacuuauucguauucucaaccagcuucuaccucauaucaauauuccuccaucuaguaaaaauaccaacucacagacacauaacaggaaaaccauguccaaaaccacacagacucaaccacaugggcauuugcucaugcggauuauauaaacauccaggaguaccaguaagauggaaaagauaa

SEQ ID NO: 5644 - RNA, 1473 nt, Artificial Sequence
  derived and/or modified protein sequence (opt6) from LASV(ISTH2312-NIG-2012;Clade II)__AIT17560__GPCstabilized
augggccaaauaauaacauucuuucaagaaguuccacacguuauagaagaaguaaugaacauaguacuaaucgcacuaucacuacuggcaguccuaaaaggcauauacaauguagcaacauguggacuauuuggccuaguuucauucuuacuacuauguggaagaucaugcucaacaacauacaaaggaguauaugaacuacaaacauuagaacuagacauggcuuccuuaaacaugaccaugccacuaucauguacuacuaacaauucacaccacuacauaaugguaggaaaugaaaccggacuagaacuaacacuaaccaauaccucaauaauaaaucauaaauucugcaaccuaucagacgcacacaagaaaaauuuauaugaccacgcacuaauguccauaauaucuacauuucaucuaagcauuccaaacuucaaccaauaugaagcuauguccugugacuucaacggaggcaaaauuuccguucaauacaaucuaucacacgcuuacgcaggagaagcagcaaaucauugcggcacaauugcaaauggaguacuacaaacuuucaugagaauggccuggggaggauccuacauagcacuagacaguggaugcggcucaugggacugcauaaugacaucuuacaaauauuuaauaauacaaaacacaacauggggcgaucacugccaauucucacgucccucaccuaucggauaucuaggacuauuaagucaacgaacaagagacauauacauaucccgaagaagacgaggaacuuuuacauggacacuaucagacucugaaggaaacgaaacaccaggagguuacugccuaacaagauggaugcuaauagaagcagaacuaaaaugcuucggaaacacagcaguagcaaaauguaacgaaaaacacgacgaagaauuuugugauauguuacgacuauucgacuucaauaaacaagcaauacgaaaacuaaaaaccccagcacaaaugucaauacaacuaauaaacaaagcaguaaacgcacucauaaacgaccaacuaauaaugaaaaaccacuuacgugacauaaugugcauaccuuacuguaacuacucacgauacugguaccuaaaucacaccguaacaggacgaacaucacuaccaagaugcugguuaguaucuaacggauccuacuuaaacgaaacacacuucucagacgacauagaacaacaagcugacaauaugauaacagaauuauuacaaaaagaauauauugauagacaaggaaaaacuccucuaggcuuaguagacuuauuuguuuucucaacaucauucuaccuaauaucaauauuccuccaccuaguaaaaauuccaacacaucgccauauaauaggaaaaccaugcccaaaaccacacagacuaaaucacaugggaaucugcucaugcggccucuacaaacauccaggcgucccaguaaaauggaaaagauaa

SEQ ID NO: 5645 - RNA, 1473 nt, Artificial Sequence
  derived and/or modified protein sequence (opt6) from LASV(ISTH2316-NIG-2012;Clade II)__AIT17564__GPCstabilized
augggccaaauaaucacauuuuuccaagaaguuccccauguuaucgaagaaguaaugaauauaguacuaaucgccuuaagccuacuagccauauuaaaagguauauacaacguagccacaugcggacuauucggacuucuuaguuuccuacuucucugcggaagauccuguuccacaacauacaaaggcguauaugaacuacaaacacuagaacuagacauggcauccuuaaauaugaccaugccucuuucaugcacuaaaaauaauucacaccauuacauaaugguaggaaacgaaaccggacuagaacuaacauuaacaaacacaucaaucauaaaccacaaauucuguaaccuuagugacgcacauaagaaagacuuauacgaccacgccuuaauguccaucauaucuacauuccaucuaucaauaccaaauuucaaucaauaugaagcaauguccugugauuuuaacggaggcaaaauaucuguacaauauaaccuaucacaugccuaugcagucgacgcagcaaaacauuguggaacaauagcaaauggaguauuacaaaccuucaugagaauggcaugggguggcuccuacaucgcacuagacucagguugcggauccugggauugcauaaugacaucuuaucaauaucuaauaauacaaaauacauccugggaagaccacugucaauucucacgaccauccccaauaggauacuuaggacuacuaagucaaagaaccagagacaucuacauaucucgaagaagaagagguacauucaccuggacauuauccgacuccgaaggaaacgaaacaccaggaggcuacugucuaacaagauggaugcucaucgaagcagaacuaaaaugcuucggaaauacugccguagcaaaaugcaacgaaaaacaugacgaagaauuuugugacauguuaagacucuucgauuucaauaaacaagcaauaaaaagacuaaaaacaccagcacaaaugucaauacaacuaaucaacaaagcugucaacgcacucauuaaugaccaacuaauaaugaaaaaucacuuacgagacauaaugugcauaccauacuguaacuacucuaaauacugguaccuaaaccacacaguaaccggcaaaacaucacuaccacgaugcuggcuaguaucaaauggaucauaucuaaacgaaacacauuucucagaugacauagaacaacaagccgauaacaugauuacagaacuauuacaaaaagaauauauugacagacaaggaaaaacaccacuaggccuaguagaccuauucgucuucucaacauccuucuaucuaaucucuauauuccuacacuuaguaaaaauaccuacccacagacacguaauaggaaaaccaugccccaaaccacacagacuaaaucauaugggaauauguucauguggauuauauaaacacccaggagucccaguaaaauggaaaagauaa

SEQ ID NO: 5646 - RNA, 1473 nt, Artificial Sequence
  derived and/or modified protein sequence (opt6) from LASV(ISTH2358-NIG-2012;Clade II)__AIT17572__GPCstabilized
augggacaaauaauaacauucuuucaagaaguaccacacguaauagaagaaguaaugaauauaguacuaauagccuuaucacuacucgcaauacucaaaggaauauauaacguagcaaccugcggacuauuuggacuaguaaguuucuuauuacuaugcggaagauccugcucaaccaccuacaaaggcguauacgaauuacaaacauuagaacuagauauggcaaaccuaaacaugacaaugccacuaucuugcacaaaaaauaauucacaccacuauauaauggucggaaaugaaacaggacucgaauuaacacuaacuaacacaucaauuauaaaccacaaauucugcaacuuaucagacgcacacaaaaaaaaucucuaugaucacgcccucaugucaauaauaucaacauuccacuuaucaauuccgaacuucaaucaauacgaagcuaugucaugugauuucaauggcggaaaaauaaguguacaauacaaccuaucccacaacuacgcagucgacgcagcaaaccacugcgguacaauagcaaacggaguauuacaaacauucaugcgaauggccuggggaggaucauauauagcccuagacucuggcuguggaaacugggauugcauaaugacaucauaccaauacuuaauuauucaaaacacaacaugggaagaccacugccaauucucacgaccaucaccaauaggauaccuaggacuccuaucacaaagaacaagagacaucuacaucuccagaagaagacgaggaacuuucacauggacacuaucagacucagaaggaaacgauaugccaggaggauacugccuaacacgauggauguuaauagaagccgaacuaaaauguuucggaaauacagcaguagcaaaauguaaugaaaaacacgaugaagaauucugcgacaugcucagacuauucgauuucaauaaacaagcaauaagacgacuuaaaacaccagcacaaaugaauauacaacuaauaaauaaagcaguaaacgcacuaaucaacgaccaacuuauaaugaaaaaucaucuaagagauauaaugugcauaccauacugcaacuauuccaaauacugguaccuaaaccauaccgugacaggaaaaacaucacuuccaagaugcugguuaguaucaaauggaucauaccuaaaugaaacacacuucuccgacgauauagaacaacaagcagacaacaugaucacagaauuauuacaaaaagaauauauggaccgacaaggcaaaacaccuuuaggacuuguugaucuauucguauuuucaacaucauucuaucuaauaaguaucuuucuacaccuaguaaaaauaccaacacacaggcacauaauaggaaaaccauguccaaaaccacaucguuuaaaccacaugggcauauguucauguggauuauacaaacacccagguguaccuguaaaauggaaaagauaa

SEQ ID NO: 5647 - RNA, 1473 nt, Artificial Sequence
  derived and/or modified protein sequence (opt6) from LASV(ISTH2376-NIG-2012;Clade II)__AIT17576__GPCstabilized
augggacaaauuauuacauuuuuccaagaaguaccacacguaauagaagaagucaugaacauaguacucauagcauuaucacuuuuagcaauacuuaaaggaauauacaauguagcaacaugcggauuauuuggccuaguuuccuuucuacuacuuugcggaagaucaugcucaacuacauauaaaggcguauacgaacuccaaacccuugaauuagacauggcuucauuaaacaugacaaugccacucucauguacaaaaaauaacucacaccacuacaucaugguaggaaacgaaacuggacuagaauuaacacuaacaaacacaucaauaauaaaccacaaauuuugcaaccuaucagaugcacacaaaaaaaaucuauacgaccaugcacucaugagcauaauauccacauuucauuuaucaauaccuaacuucaaccaauacgaagcaaugucaugugauuuuaacggaggaaaaauaagcguacaauacaacuuaucacauacauacgcaguagacgcagcaaaccauugcggaacaauagcaaauggaguauuacaaaccuucaugcgcauggcauggggaggaucauauauagcacuagauucaggcugugguaacugggacugcauaaugacauccuaccaauacuuaauaauacaaaacaccacaugggaagaucacugccaauucucaagaccaucaccaauaggauacuuaggauuacuaucccaacgaacacgugacauauacaucucaagaagaagacgaggaaccuucacauggacuuuaucagacucagaaggaaaugaaacaccaggaggcuacugccuaaccagauggaugcuaauagaagccgaauuaaaaugcuucggcaauacagcaguagcuaaauguaaugaaaaacacgacgaagaauucugugacauguuacgauuauucgacuucaauaaacaagcaauauccagacuaaaaacccccgcacaaauguccauccaacuaauaaacaaagccguaaacgcuuuaauaaaugaccaacuaaucaugaaaaaucauuuaagagacauaaugugcauaccauacuguaauuauucaaaauauugguaccuaaaucauacaguaaccgguaaaacaucacuuccccguugcugguuaguuaguaacggcucauaccucaacgaaacccacuucucagacgauauagaacaacaagcagauaauaugaucaccgaaaugcuccaaaaagaauacauagauagacaaggaaaaacaccacuaggcuuaguagaccucuucguauucucaacaucauucuaccucauaucaauauuccuacaccuagucaaaauuccaacacacagacacauaacaggaaaaccaugcccuaaaccacacagacucaaucacaugggaauaugcuccuguggcuuauacaaacaccccggagucccaguaaaauggaaacgcuaa

SEQ ID NO: 5648 - RNA, 1473 nt, Artificial Sequence
  derived and/or modified protein sequence (opt6) from LASV(Lassa virus/H.sapiens-wt/NGA/2015/ISTH_0543;Clade II)__AVO03639__GPCstabilized
augggacaaauaauaacauucuuccaagaagucccccaugucauagaagaaguaaugaacauaguauuaauugcauuaucauuacuagcuauacuaaaaggaauauacaacguagccaccugcggacuauucggcuuaguaucauuucuauuacuaugcggaagaucuugcucaacaaccuacaaaggcguauacgaacuucaaacauuagaacucgauauggcaaacuuaaacaugacaaugccauuaucauguacaaaaaacaauucucaccacuacauaaugguaggaaaugaaacagguuuagaacuaacauuaacaaauacaucaaucaucaaucauaaauuuuguaaccuaagcgaugcacacaaaaaaaaccuauaugaucacgcauuaaugucaauaauauccacuuuucacuuaucaauaccaaacuucaaccaauaugaagcaauguccugcgacuuuaauggaggcaaaauaucaguacaauacaacuuaucacacacauacgcaguagacgccgcaaaccacuguggaacaauagcaaacggaguacuacaaacguucaugcgcauggcuuggggaggaucauacauagcauuagacucaggaugcggaucuugggacuguauaaugacaucauaccaauauuuagucauucaaaauacaacaugggaagaccacugccaauucucaagaccuucaccaauaggcuacuuaggacucuuaucccaaagaaccagagacauauauauaucucgacggcgaagaggaacuuucacauggacacucagcgacucagaaggaaaugaaacaccaggaggcuauugccucacaagauggauguuaauagaagcagaacuaaaaugcuucggaaacacagcaguugccaaaugcaacgaaaaacacgaugaagaauucugcgacaugcuaagacuuuucgauuuuaacaaacaagcaauacgaagacucaaaacaccagcccaaaugucaauacaacuaauaaacaaagccguaaaugcccuaaucaaugaccaacuuaucaugaaaaaccaucuaagagacaucaugugcauucccuacugcaauuacucaaaauacugguaucucaaucacacagucacuggaaaaacaucacuaccaagaugcuggcuaguaucaaacgguucuuaucuaaacgaaacacacuucucagacgacauugaacaacaagccgacaacaugauaacugaacuucuacaaaaagaauauauagacagacaaggcaaaacaccacuugguuuaguagacuuauucguauucucaaccucauucuaccuaaucucaaucuuccuucacuuaguuaaaauaccaacacaccgacacauaacuggcaaaccauguccaaaaccacacagacucaaccauaugggaauaugcucuugcggauuauacaaacacccaggugucccaguaaaauggaaaagauaa

SEQ ID NO: 5649 - RNA, 1473 nt, Artificial Sequence
  derived and/or modified protein sequence (opt6) from LASV(Lassa virus/H.sapiens-wt/NGA/2015/ISTH_0547;Clade II)__AVO03583__GPCstabilized
augggacaaauaauaacauucuuccaagaaguaccucacguaauagaagaaguaaugaacauaguacuaauagcuuuaucacuucucgcaauacuaaaagguaucuauaacguugcaacauguggucuuuucggccuaguaucauuuuuacuauuaugcggaagaucuugcucaacaacauacaaaggagucuacgaauuacaaacauuagaacuagacauggccucccuaaauaugacaaugccauuaucaugcacaaaaaauaauucacaucacuacauuaugguaggaaaugaaaccggacuugaacuaaccuuaacaaauacuucaaucauaaaccacaaauucuguaaucuauccgacgcucauaaaaaaaaccuauaugaucaugccuuaaugucaauaauaucaacauuccacuuaucaauaccaaacuucaaccaauacgaagcaaugucaugcgauuucaauggaggaaaaaucucaguacaauacaaucuaucucauacauacgcaguagacgcagcuaaccacugcggaaccauagcaaauggcguccuacaaaccuucaugagaauggcauggggcggcucauacauagcacuagacagcggaugcggaucuugggauugcauaaugacauccuaucaauaucucauaauacaaaacacaacuugggaagaccacugucaauucucccgaccuucuccaauaggauacuuaggccuacuaucucaacgaacaagagacauauacauaucacgaagaagacgaggaaccuucacuuggacacucuccgacucugaaggcaaugaaacaccaggaggauauugccuaacaagauggauguuaauagaagcagaauuaaaauguuucggcaacacugccguagcuaaaugcaacgaaaaacacgacgaagaauuuugcgacaugcuaagauuauucgacuucaacaaacaagcaauacgacgacuaaaaacaccagcacaaauguccauacaacuaauaaauaaagccguuaacgccuuaauaaacgaccaacuaaucaugaaaaaucauuuacgcgacauaaugugcauuccauacugcaacuauucaaaauauugguacuuaaaucacacagucacaggaaaaacaucacucccaagauguuggcuaguaucaaacggauccuaccuaaacgaaacccacuucucagacgauauagaacaacaagccgacaacaugauaacagaauuacuccaaaaagaauacauagaaagacaaggaaaaacaccauuaggacuuguagacuuauucguauuuucaaccucauucuauuuaaucucaaucuuuuuacaccucguaaaaauaccaacacacagacacauaacaggcaaaccaugcccaaaaccacauagacuaaaccauaugggcauauguucuuguggauuauauaaacacccaggaguuccaguaaaauggaaaagauaa

SEQ ID NO: 5650 - RNA, 1473 nt, Artificial Sequence
  derived and/or modified protein sequence (opt6) from LASV(Lassa virus/H.sapiens-wt/NGA/2015/ISTH_0574;Clade II)__AVO03657__GPCstabilized
augggacaaauuauaacauucuuccaagaaguaccccacgucauugaagaagucaugaacauaguucuaauugcacuaucacuccuugcaauacucaaaggcauauacaacguagcaacaugcggauuauucggcuuaguagcauuccuacuauuaugcgguagaucaugcucaacaacauacaaaggaguuuaugaacuacaaacccuagaacuagauauggcaucauuaaacaugaccaugccauuaucaugcacaaaaaacaacucacaucacuacauaaugguaggaaaugaaaccggacuagaacucacauuaacaaacacauccauaauaaaccauaaauuuugcaauuuauccgaugcacauaaaaaaaaucucuaugaccacgcacuaauguccauaaucucuacauuccaccuaucaaucccaaacuucaaccaauacgaagcaaugucaugcgacuuuaacggaggaaaaaucucaguccaauacaaucuaagccacacauacgccguagacgcagcaaaccacugcggcaccauaacaaacggaguacuacaaacauucaugagaauggcuuggggcgguucauacauagcccuugauucaggcugcggcucaugggacuguauaaugacaucauaccaauacuuaaucauacaaaauacaacaugggaagaccauugccaauucucuagaccuaguccaauaggauauuuaggacuauuaucacaacgaacccgagacauauacauaucaagaagaagaagaggaacauucaccuggacauuauccgacuccgaaggcaaugaaacaccaggaggauacugccucacccgauggaugcuaauagaagcagaacuaaaaugcuucggaaauacugccguagcuaaauguaacgaaaaacacgacgaagaauucugcgacauguuaagacuauuugacuucaacaaacaagccauacgaagacuaaaaaccccagcacaaaugucuauacaacuaauaaauaaagcaguaaacgcacuaauaaacgaccaacuuauaaugaaaaaucaccuaagagauauaaugugcauaccauauugcaauuacucaaaauauugguacuuaaaucacacaguaacaggcagaaccucucuuccaagaugcuggcuaguuucaaauggaagcuaccuaaacgaaacccacuucucagacgacauagaacaacaagcagacaacaugauaacagaauuauuacaaaaagaauacauggacagacaaggcaaaacaccacuaggucuaguagaccucuucguguucucaacaucauuuuacuuaauaucaauauuucuacaccuaauaaaaauaccaacacacagacauguaauaggcaaacccugcccaaaaccacacagacucaaccauaugggaauauguucauguggauuauacaaacaccccggaguaccagucaaauggaaaagauaa

SEQ ID NO: 5651 - RNA, 1473 nt, Artificial Sequence
  derived and/or modified protein sequence (opt6) from LASV(Lassa virus/H.sapiens-wt/NGA/2015/ISTH_0681;Clade II)__AVO03617__GPCstabilized
augggacaaauaauuaccuuuuuccaagaagucccccauguaauagaagaaguaaugaacauaguacuuauagcauuaucacuuuuagcaauauuaaaaggaauuuacaacguagcaaccuguggauuauuuggacuuguaagcuuucuacuacuaugcggaagaucaugcucaacaacauacaaaggagucuacgaacuacaaacacuugaauuagacauggcaucacuaaacaugacuaugccccuauccuguacaaaaaauaauagucaccauuacauaaugguaggcaacgaaacaggacuagaauuaacacucacaaauacauccauaauaaaucacaaauuuuguaacuuaucagacgcacacaaaaaaaauuuauacgaccacgcacuaaugucaauaauaucaaccuuccaccuaagcauaccaaauuucaaucaauaugaagcaaugucaugcgauuucaacggcggaaaaauaucaguacaauacaaccuaucacacacauacgcagaaggagcagcaaaccacugcggaacaauagcaaacggagucuuacaaacauuuaugagaauggcauggggagguucauacauagcacuagacucugguugcggaucuugggacugcauaaugacuucguaccaauauuuaauaauacaaaacacuacaugggaagaccacugccaauucucacgaccaucaccaauaggcuacuuaggauuacuaucacaaagaacuagagacauauacauauccagacgaagaagaggaacauucaccuggacccuaucugauucagaaggaaaugaaacaccaggaggauauugucuaacaagauggaugcuaauagaagcugaauuaaaauguuucggcaacacagcuguagcaaaauguaacgaaaaacacgacgaagaauucugcgauaugcuaagacuauuugacuuuaacaaacaagcaaucaugcgccuaaaaacaccagcacaaauguccauacaacuaauaaacaaagcagucaaugcucuaauaaacgaccaauuaauaaugaaaaaccaucuaagagacauaaugugcauaccuuauugcaauuacuccaaauauugguauuuaaaccacaccguaaccggaaaaacaucacuaccaagaugcuggcuaguaucaaacggauccuaccuaaacgaaacacacuucucagacgacaucgaacaacaagccgauaauaugauaacagaaaugcuacaaaaagaauacauggauagacaaggaaaaacaccauuaggauuagucgaccuauuuguauucucaacauccuuuuauuuaaucucaauauuuuuacaccuuguaaaaauaccuacacauaggcauguaauaggaaaaccauguccaaaaccacacagacucaaucacaugggaauuugcuccugcggauuauacaaacacccaggaguuccaguaaaauggaaaagauaa

SEQ ID NO: 5652 - RNA, 1473 nt, Artificial Sequence
  derived and/or modified protein sequence (opt6) from LASV(Lassa virus/H.sapiens-wt/NGA/2015/ISTH_0682;Clade II)__AVO03625__GPCstabilized
augggacaaauaaucacauuuuuccaagaaguaccacacgucauagaagaaguaaugaacauaguccuaaucgcacucucucuacuagcaauacuaaaaggaauuuacaauguagcuacaugcggacuauuuggauuaguaucauuuuuauuauuaugcggaagaucaugcucuacaacauacaaaggaguuuacgaacuccaaacauuagaauuagacauggcaucacuaaacaugacaaugcccuuaucaugcaccaaaaacaacucacaccacuacaucauggucgguaacgaaacaggucucgaacuuacacuaacaaauacaucaauaauaaaccacaaauuuugcaaccuauccgaugcccacaaaaaaaaucuauaugaccacgcacuuaugucaauaauauccacuuuccauuuaucaauaccaaacuucaaccaauaugaagcaauguccugcgacuucaauggaggcaaaauauccguacaauacaaccucucacacgcauacgcaguagacgcagcuaaccacugcggaacaauagcaaaugguguacugcaaacuuuuaugagaauggcauggggagguuccuacauagcacuagauucaggaugcgguagcugggacugcauaaugacaucauaccauuaccuaauaauacaaaauacaacuugggaagaccauugccaauucuccagaccauccccaaucgguuaucuugguuuauuaucacaacgaacaagagacauauauauaucccgcagaagaagagguaccuucacuuggacccuaucugauucugaaggaaaugaaacaccaggcggauauugucuaaccagauggaugcucauagaagcagaauuaaaauguuucggaaauacagcuguagcaaaauguaacgaaaaacacgaugaagaauuuugcgacauguuaagacuuuucgacuucaauaaacaagcaauacguagauuaaaaacaccagcacaaaugucaauacaacuaauuaacaaagcaguaaacgcacuaauaaaugaucaacuaaucaugaaaaaucaccuaagagacauaauguguauacccuauugcaacuacucaaaauauugguaccuaaaucacaccguaacagguaaaacaucuuuaccuagaugcuggcuaguuuccaaugguucuuaucuaaaugaaacacacuucucagacgacauagaacaacaagcugacaacaugauaacagaacuauuacaaaaagaauacauagauagacaaggaaaaacaccacuaggccucguagaccuauucguuuuuucaaccagcuuuuacuuaauaucaauauuccuucaucuaguaaaaauaccaacacacagacacguaauagguaaacccugucccaaaccacacagacuaaaucacaugggaauaugcucaugcggacuauacaaacacccaggaguaccaguaaaauggaaaagauaa

SEQ ID NO: 5653 - RNA, 1473 nt, Artificial Sequence
  derived and/or modified protein sequence (opt6) from LASV(Lassa virus/H.sapiens-wt/NGA/2015/ISTH_0687;Clade II)__AVO03581__GPCstabilized
augggacaaaucauaacuuucuuccaagaaguaccacacguaauagaagaaguaaugaacauaguauuaauagcauuauccuuacuagcaauacucaaaggaaucuacaacguagcaaccugcggacuauucggacuaguaucauuccuacuacucugcggcagguccuguucaacuacauacaaaggaguauaugaauuacaaacacuagaauuagauaugaccaacuuaaacaugaccaugccauuaucauguacaaaaaauaacucacaucauuacauaaugguaggcaacgaaaccggauuagaauuaacacuaacaaacacaucaauaaucaaccacaaauucuguaaucuauccgacgcucauaaaaaaaaucuauacaaccacgcacuaaugucgauaaucucaaccuuccaccuaucaauaccaaauuuuaaccaauaugaagcaaugucaugcgauuuuaacggaggaaaaauauccguacaauacaacuuaucacacacauaugcaguagacgcagcaaaccacugcggcacaguugcaaacgguguacuucaaaccuuuaugagaauggccuggggaggaucauauaucgcauuagauucaggauguggaggaugggauugcauaaugacaucauaucaauaccucauaauacaaaacacaaccugggaagaccacugucaauucuccagaccaucacccauaggcuaucucgguuuacuaagccaaagaacaagagacauauacauaucuagacgaagaagaggaaccuuuacuuggacccuauccgacucagaaggaaacgaaacaccaggaggauacugcuuaacaagauggaugcucauagaagcagaacuaaaaugcuucggaaauaccgccguagcaaaaugcaaugaaaaacacgacgaagaauucugugacauguuacgacuauucgacuucaauaaacaagcaauuagaaaauuaaaagcaccagcacaaaugucuauacaacucauuaauaaagccguaaacgcacuuauaaaugaccaacuaaucaugaaaaaucaccuaagagacauaaugugcaucccuuacugcaacuacucaaaauacugguaucuaaaucacacaguuaccggaaaaacaucccucccaaaaugcuggcuuguauccaauggaucuuaccuaaacgaaacacacuucuccgaugacauagaacaacaagcagacaauaugauuacagaacuucuacaaaaagaauauauggaucgacaaggaaaaacaccacuaggccuagucgaccuauuuguauucucaaccucuuucuaucuuauaucuauauucuuacaccuuguaaaaauucccacacaucgacacauaauaggaaaaccaugcccaaaaccccaccgacuaaaccacauggguauaugcucaugcggccucuacaaacaucccggaguaccaguaaaauggaaacguuaa

SEQ ID NO: 5654 - RNA, 1473 nt, Artificial Sequence
  derived and/or modified protein sequence (opt6) from LASV(Lassa virus/H.sapiens-wt/NGA/2015/ISTH_0736;Clade II)__AVO03573__GPCstabilized
augggacaaauaauaacauuuuuucaagaaguaccacacguaauagaagaagucaugaauauagucuuaauagcucuaucacuucuagcaguacuaaaaggcauuuacaauguagccaccugcggauuauuuggucuaguaucauuccuauuauuaugcggaagaucuugcuccacaacauacaaaggaguauacgaauuacaaacauuagaacuagauauggcaaguuuaaacaugacaaugccucucuccuguacaaaaaauaacucacaccacuacauaaugguugguaaugaaaccggccuagaacuaacacuuaccaacacaucaauaaucaaccacaaauuuugcaauuuaucagaugcacauaaaaaaaacuuauacgaccacgcauuaaugucuauaauaucaacauuucaccuaucaauaccaaacuucaaucaauacgaagcaaugucaugcgacuucaacggaggaaaaauaucuguacaauacaaucucucccacacacacgcaguagacgcggcaaaccacuguggcacaauagccaacggaguccuacaaacauucaugcgaauggcuuggggaggaucauauaucgcauuagauuccggaugcggaucaugggacugcauaaugacauccuaucaauauuuaauaauacaaaacacuacaugggaagaccacugccaauucucaagaccaagcccaaucggauaucucggccuacuuucccaaagaaccagagacauauauauaucaagaagaagacgcggaacauuuacauggacucuaucagauucagaaggaaacgaaacaccagguggcuacugccuaacaagauggauguuaaucgaagcagaacuaaaaugcuucggaaauacagcaguagcaaaauguaaugaaaaacacgacgaagaauucugugacauguuacgauuauucgacuucaacaaacaagcaauaagaagacucaaaacaccagcacaaaugucuauacaacuaauaaauaaagcaguaaacgcacuaauaaaugaucaacucauaaugaaaaaccaucuaagagacauaauguguauaccauauugcaauuauucuagauacugguaccuaaaccacacaguaaccggaaaaacauccuuacccagaugcuggcuaguuuccaacggcuccuaccuaaaugaaacacauuucucagaugauauagaacaacaagcagacaauaugauaacugaacuacuacaaaaagaauacauagaccgucaaggaagaacaccccuagguuuaguagauuuauucguauucucaacaucuuucuaccuuauaucaauuuuucuacaccuaguaaaaauaccuacacaccgccacguaaucggaaaaccaugcccaaaaccacacagacuaaaccauaugggaaucugcucauguggauuauacaaacacccaggaguaccaguaaaauggaaacgauaa

SEQ ID NO: 5655 - RNA, 1473 nt, Artificial Sequence
  derived and/or modified protein sequence (opt6) from LASV(Lassa virus/H.sapiens-wt/NGA/2015/ISTH_0789;Clade II)__AVO03551__GPCstabilized
augggacaaauaguaacauuuuuccaagaaguaccacacguuauagaagaaauaaugaacauaguauuaauaacauuaucucuacuagcuauacuaaaagguguauacaauuuagcaacaugcgggcuuaucggacuaaucacauucuuauuccuaugcggacgaucaugcagcacaaucuacaaaggcucauaucaauuccaaacacuagaacuaaacauggaaaccuuaaauaugacuaugccacuaucaugcacaaaaaacuccucacaccacuacauaagaguaucaaaugaaacaggacucgaacuaacacuaacaaacaccucaauaauaaaucacaaauucuguaacuuaucagacgcacacaaaaaaaaucucuacgaucauacacuaaugagcauaauaucuacuuuucaccuuucuauaccaaauuucaaccaauacgaagcuaugucaugcgacuuuaacggaggaaaaauaucuguacaauauaauuuaucacacucauacgccguagaugcagccaaccacugcggaacaguagccaacggaguacuacaaacauucaugcgcauggcuuggggaggauccuacauagcacuugacuccggaugcgguaacugggauugcauaaugacaucauaccaauauuuaauaauacaaaacaccacaugggaagaccacugccaauuuucaagaccaucuccaauaggauauuuaggauuauuaucccaaagaacaagagacauauacauaucaagaagaagaagaggaacauucacauggacacucucagacucagaaggaaaagaaacccccggcggauacugccuaacaagguggaugcucauagaagcagaauuaaaauguuucggaaacacagcaguagcaaaauguaacgaaaaacacgacgaagaauucugugauaugcuaagacuuuucgauuucaacaaacaagcaauacaaagauuaaaagccccugcccaaaugucuauacaacuaauaaauaaagcaguaaacgcauuaauaaaugaccaacucauaaugaaaaaccaucuaagagacaucauguguauaccauacugcaacuacucaaaauacugguaccuaaaccacacuucaacaggucgaacaucccuaccaaaaugcuggcuaguaucaaacggaucauaccuaaaugaaacacacuuuucagacgacauagaacaacaagcagacaacaugaucaccgaaauguuacaaaaagaauacauagacagacaaggaaaaacgccacuaggacuugucgauuuauucguauucucaacauccuucuauuuaauaucuaucuuuuuacaucuaguaaaaauaccaacacacagacauauaguaggaaaaucaugcccuaaaccacauagacucaaccacaugggcauaugcuccugcgguuuauauaaaagaccaggagucccaguaaaauggaaaagauaa

SEQ ID NO: 5656 - RNA, 1473 nt, Artificial Sequence
  derived and/or modified protein sequence (opt6) from LASV(Lassa virus/H.sapiens-wt/NGA/2015/ISTH_0821;Clade II)__AVO03641__GPCstabilized
augggacaaauaauaacuuucuuccaagaaguaccacacgucauagaagaaguaaugaacauaguccucauagcauuaucacuccucgccauauuaaaaggcauauauaauguugccacaugcggacuauucggauuaguuucauucuuacucuuauguggaagaucauguucaacaacauacaaaggcguauacgaacuccaaacauuagaacuagacauggcaucauuaaacaugacaaugccucuaucaugcaccaaaaauaacucacaucauuacaucaugguagguaaugaaacaggauuagaauuaacucuaaccaauacaucuauaauaaaccauaaauucugcaacuuaucagaugcacacaaaaaaaaucuauacgaccacacauuaaugucaauaaucucaacauuccaccuauccauaccaaacuucaaucaauaugaagcaaugucaugcgauuucaacggaggaaaaauauccguacaauacaaccuaucucauacauaugcaguagacgcagcaaaucauugcggaacaauagcuaauggaguucuacaaacauucaugagaauggcauggggagguucuuacauagcccuagacucaggaugcggcaacugggauugcauaaugaccucauaccaauaccucauaauacaaaacacuaccugggaagaccauugccaauucuccagacccucaccaauuggauaccuaggacuacuaucacaaagaaccagagacauauacauauccagaagaagaagagguaccuucaccuggacccuaucagacuccgaaggaaacgaaacacccggaggauacugccuaacaagauggaugcuaauagaagcagaauuaaaaugcuuuggaaauacagcaguagccaaaugcaacgaaaaacaugacgaagaauucugcgauauguuacgucuauuugacuuuaauaaacaagcuauaucacgacucaaaacaccagcacaaauguccauacaauuaauaaacaaagcaguaaaugcucuaauaaacgaucaauuaaucaugaaaaaccaucuacgcgacauaaugugcaucccauacugcaauuacucaaaauacugguacuuaaaccauacagucaccgguaaaacaucacucccccgaugcuggcuaguaucaaacggaucauacuuaaacgaaacacacuucucagaugacauagaacaacaagcugauaauaugauaacagaaaugcuacaaaaagaauacauugacagacaaggcaaaacaccacuagguuuaguagaucuauucguuuucuccaccuccuucuaccuaaucaguauauuucuccauuuagucaaaauaccaacccaucgacacguaauaggaaaaccauguccaaaaccucauagacuuaaccacauggguauaugcucaugcggacuauacaaacaccccggaguaccaguaaaauggaaacgauaa

SEQ ID NO: 5657 - RNA, 1473 nt, Artificial Sequence
  derived and/or modified protein sequence (opt6) from LASV(Lassa virus/H.sapiens-wt/NGA/2015/ISTH_0831;Clade II)__AVO03545__GPCstabilized
augggacaaauaguaacauucuuccaagaaguaccacacguuauagaagaaaucaugaauauagucuuaauaacauuaucauuauuagcaauacuaaaaggaguauacaaucucgcaacaugcggacuaauaggacuaauaacauuccucuuccuaugcggacgaucaugcucaaugaccuacaaaggaucauaccaacuagaaacacuagaacuaaauauggaaacacuaaauaugacaaugccccuaucaugcacuaaaaacacaucacaccacuacauucgaguuggaaaugaaaccggacuagaacuaacucuaacaaauaccucuauaauaaaccacaaauuuuguaaccucucugaugcacacaaaaaaaaccuauacgaccacucacuaaugucuaucguuuccacauuccaccuaucuauaccgaacuuuaaccaauaugaagccaugucaugcgacuucaauggaggaaaaaucucuauacaauacaaccuaucucacgccuaugccggcgacgcagccaaacacuguggaacccuagccaacggaguacuacaaacuuucaugagaauggcauggggaggauccuacauagcccuagacucaggauguggaaacugggauugcauaaugacaucuuaccaauaccuaauuauacaaaacaccacaugggacgaucauugccaauucucucgacccucacccauaggauaucuuggacuccucucacaaagaacaagagaaauauacaucucaagaagaagaagaggcacauuuacauggacauuauccgacucagaaggaaaugaagcaccaggaggauauugucuaacaagauggaugcuuauagaagcagaacuaaaauguuuugguaacacagcaguagcaaaaugcaacgaaaaacaugacgaagaauucugcgacaugcuaagauuauuugauuucaauaaacaagccauacaacgacucaaaacaccagcacaaaugucaauacaacuaaucaauaaagcaguaaacgcacuaauaaaugaccaauuaauaaugaaaaaccaucuacgagacauaaugugcauaccuuacuguaacuauucaaaauacugguaccuaaaccacacaacaacugguagaaccucacuaccaagaugcuggcuaguaaguaacggcucauaucucaaugaaacucauuucucagacgauauagaacaacaagcagacaauaugaucaccgaaauguuacaaaaagaauauaucgaucgacaaggaaaaacaccacucggauuagucgauuuauucguauucucaacaucuuucuauuuaauaucuauauucuuacacuuagucaaaauaccaacacacagacacauagucggcaaaagcuguccaaaaccacacagauuaaaccauaugggcaucugcucaugcggccuauacaaacaaccaggaguuccagucagauggaaaagauaa

SEQ ID NO: 5658 - RNA, 1473 nt, Artificial Sequence
  derived and/or modified protein sequence (opt6) from LASV(Lassa virus/H.sapiens-wt/NGA/2016/ISTH_0009;Clade II)__AVO03571__GPCstabilized
augggccaaauaauaacauucuuccaagaaguaccucacguaauagaagaaguaaugaacaucgucuugauagcauuaucauuauuagccauauuaaaagguauauacaauguagcaacauguggacuacuuggauuaguaucuuucuuacuccuaugcggaagaucuugcucuaccacuuacaaagguguauacgaacuacaaacauuagaauuagacauggcaucacuaaacaugacaaugccauuaucaugcacuaaaaauaacagccaccacuacauaaugguaggaaacgaaacaggacuagaacuaacccuaaccaauacaucaauaauaaaucauaaauucuguaacuuaucugaugcacauaagaaaaaccuauaugaccacgcacuaaugagcauuauaucaaccuuccacuuaucuauaccaaauuucaaccaauaugaagccaugucaugcgauuucaacggaggaagaaucucuguacaauacaaccuaucacacuccuaugcaguagacgccgcaaaccauuguggaacaauagcuaacggaguacuacaaaccuucaugagaauggcuuggggagguucauacauagccuuagacaguggaugcgguucaugggacugcauaaugacaucauaucaauaccuaauaauacaaaauacaacuugggaagaccacugccaauuuucaagaccaucaccaauaggauauuuaggucuauuaucacaaagaacaagagacauauacauuucuagacgaagacgaggaacauucacauggacacuaucagacucagaaggaaacgaaacacccggaggcuacugucuuacacgauggaugcuaauagaagcagaacuaaaaugcuucgguaacacugcaguugcaaaauguaacgaaaaacaugaugaagaauuuugcgacaugcuccgauuauucgauuucaacaaacaagcaauacgucgacuuaaaacaccagcucaaauguccauacaauuaauaaacaaagcaguaaaugcauuaauaaaugaccaacuaauaaugaaaaaccaccuaagagauauaaugugcauaccauacugcaacuacucuaaauacugguacuuaaaccacaccguaaccggaaaaacaucacuaccccgcugcuggcuaguaucaaauggaaguuaccuaaacgaaacacacuuuucagacgacauagaacaacaagcagacaacaugauaacagaacuacuacaaaaagaauacaucgauagacaaggcaaaacaccacuuggccuagucgaucuauucguauucagcacaucauuuuaucucauaucaaucuucuuacacuuagucaaaauaccuacacacagacacauaaccggaaaaccaugucccaaaccacacagacuaaaccacaugggaauaugcuccugcggacuauauaaccacccaggaguaccaguaaaauggaaaagauaa

SEQ ID NO: 5659 - RNA, 1473 nt, Artificial Sequence
  derived and/or modified protein sequence (opt6) from LASV(Lassa virus/H.sapiens-wt/NGA/2016/ISTH_0017;Clade II)__AVO03567__GPCstabilized
augggacaaauaauaacauucuuccaagaaguaccacacgucauagaagaaguuaugaacauuguacuuauagcacuuucacucuuagcaauccuaaaagguauauacaauguagcuaccugcggacuauuuggacuaguaucauucuuauuacuauguggcagaucaugcucaacaacauacaaaggaguauacgaauuacaaacacuagaacuugacauggcaucacuaaacaugacuaugccuuuauccugcaccaaaaacaacucacaccacuacauaaugguaggaaacgaaacaggccuagaacuaacauuaacaaacacaucaaucauaaaccacaaauucuguaacuuaucagaugcacacaaaaaaaaccucuacgaccacgcucuaauguccauaauaucaacauuccacuuaucuauaccaaacuucaaccaauacgaagcaaugucaugcgacuuuaacggcggaaaaauaucaguacaguacaaccuaagccacacauaugccauagacgcagccaaccauuguggaacaauagcaaauggaguacuacaaacuuucaugagaauggcauggggaggaucauauauagcccuagacucaggauguggaucaugggacuguaucaugacaucauaccaauacuuaauaauacaaaauacaaccugggaagaccacugccaauuuucccgacccucaccuauaggauaucuagguuuacuaucccaaagaacacgagacauauacaucucaagaagaagaagagguaccuucaccuggacacucuccgacagcgaaggaaacgaaaccccuggcggauacugucuuacacgauggauguuaauagaagcagaauuaaaauguuuuggaaauacagcaguugcaaaaugcaaugaaaaacacgacgaagaauucugugacaugcuccgacuauuugauuuuaauaaacaagcaauaagacgacuaaaaaccccagcccaaaugucaauacaacuaauaaacaaagcaguuaacgcacuaauaaacgaccaauuaauaaugaaaaaccaccuaagagacauaaugugcauaccauacuguaacuacagcaaauacugguacuuaaaccacaccguaacaggaaaaacaucauuacccagauguuggcuaguauccaaugguucauacuuaaacgaaacacacuuuuccgacgauauagaacaacaagcagacaacaugauaaccgaacuauuacaaaaagaauacauggacagacaaggaaaaaccccacuaggccuaguagaucuauucguauucucaaccucauucuaccucauaaguauauuucuacaccuaguaagaauaccaacccauagacacguaauaggaaaaccaugcccaaaaccacauagacucaaccauaugggaauaugcagcugcggacuguacaaacauccuggaguaccaguuaaauggaaaagauaa

SEQ ID NO: 5660 - RNA, 1473 nt, Artificial Sequence
  derived and/or modified protein sequence (opt6) from LASV(Lassa virus/H.sapiens-wt/NGA/2016/ISTH_0035;Clade II)__AVO03619__GPCstabilized
augggacaaauaauaacauucuuucaagaaguaccacacgucauagaagaaguaaugaacauaguacucauagcauuaucucuucuagcaauacuaaaaggcauauacaacguagcaacuuguggacuauucggcuuagucucauucuuacuacuaugcggccgaucaugcucaaugacauacaaaggaguauacgaauuacaaacauuagaauuagauauggcaagcuuaaacaugacaaugccacuaucauguacaaaaaacaacucacaucacuacauaauggucggcaaugaaaccggccuagaacuaacacuaacaaacacaucuauaauaaaccacaaauucugcaacuuaucagaugcccacaaaaaaaacuuauaugaccacgcacuaaugucaaucauuucaacauuucauuuaucaauaccaaacuucaaccaauaugaagcaauguccugcgacuuuaacggaggcaaaaucaguguucaauauaaccuaucccauacauacgcaguagacgcagcaaaucacugcggaacaauugcaaacggaguacuacaaacauuuaugcguauggcauggggaggaucauauauagcacuagacucaggaugcggaagcugggacugcauuaugacaucauaccaauacuuaauaauacaaaacacaacaugggaagaccacugucaauuuucaagacccucaccuauaggcuaccuaggacuucuaucacaaagaacacgcgauauauacauaucacgacgaagaagaggaacauuuacauggacacucucagacuccgaaggaaacgaaacaccaggagguuacugccuaaccagauggaugcuaauagaagcagaacuuaaaugcuuuggaaacaccgcaguagcaaaaugcaacgaaaaacacgacgaagaauucugcgacaugcucagacuauucgacuucaacaaacaagcaauacgcagacuaaaaacacccgcccaaaugucuauacaacuaauaaauaaagcaguuaacgcacuaaucaaugaucaauuaauaaugaaaaaccaccuacgagacauaaugugcaucccauacugcaacuacuccaaauauugguacuuaaaccacacaauaacaggaaaaaccucacuaccccgaugcuggcuaguaucaaauggaucauacuuaaacgaaacacacuucuccgacgacauagaacaacaagcagacaacaugaucaccgaacuacuucaaaaagaauauauggacagacaaggcaaaacaccacucgguuuagucgacuuauuuguauucucaacauccuucuacuuaauauccaucuuccuacaccuaguaaaaauaccaacacauagacauguaauaggaaaaccaugcccaaaaccacacagauuaaaccacaugggaauaugcucauguggucuauacaaacaccccggagucccagucaaauggaaaagauaa

SEQ ID NO: 5661 - RNA, 1473 nt, Artificial Sequence
  derived and/or modified protein sequence (opt6) from LASV(Lassa virus/H.sapiens-wt/NGA/2016/ISTH_0104;Clade II)__AVO03631__GPCstabilized
augggccaaguaauaacuuucuuccaagaaguuccccacguaauagaagaaguaaugaacaucguucuaauugcacucucucucuuagccauacuuaaaggcauauacaaugucgcaacaugcggccuauucggccuuauaucauucuuacuacuaugcggaagaucauguucaacaacauacaaaggaguauacgaacuacaaacucucgaacuuaacaugcaaaacuuaaacaugacaaugccacuauccugcaccaaaaauucaucccaucauuauauaaugguaggaaaugaaacaggacuagaacuaacacuaacaaauaccucuauaauaaaccacaaauucuguaacuuaucagacgcccacaaaaaaaacuuauacgaccacgcacuaaugucaauaaucucaacauuucaucuuagcaucccaaacuuuaaccaauaugaagcaaugucaugugauuucaauggaggaaaaauaucaguacaauacaacuuaucccacacauaugcaauagaugcagcaaaccacuguggaacaguagcaaacggcguccuacaaacauuuaugcguauggcauggggaggaagcuacauagcacuugacucaggaugcggaaacugggacugcauuaugaccucauaucaauaucucauaauccaaaauacaacaugggaagaccacugccaauucuccagaccaucacccauaggauacuuaggucuacuaucacaacgaacuagagauauauacauaucaagacgaagacgcggcacauuuaccuggaccuuaagugauucagaaggaaacgaagcaccuggaggauauugccuaacaagguggauguuaauagaagcagaacuuaaaugcuucggaaauacagcaguagcaaaaugcaacgaaaaacacgacgaagaguucugcgacaugcucagauuauuugauuuuaauaaacaagcaauaaaaagacuaaaaacaccagcacaaaugucaauacaacucaucaacaaagcaguuaaugcccuuaucaaugaucaacuaauaaugaaaaaccaccuaagagauauaaugugcaucccauacugcaacuauucuaaauauugguaucuaaaccacacugucacuggacgcacaucauuaccaagaugcuggcuagucagcaauggaucauaccucaacgacacacaauucucagacgauauagaacaacaagccgacaacaugauuacagaaaugcuacaaaaagaauacauggauagacaaggcaaaaccccacuaggacuaguugaccuauucguuuuuucgacaucauuuuaccucauaucaauauuccuacaccuaguaaaaauaccaacacacagacacaucgucggaagaccuuguccuaaaccacaccgauuaaaucacaugggaauauguucaugcggucuauacaaacauccaggaguacccguaaaauggaaaagauaa

SEQ ID NO: 5662 - RNA, 1476 nt, Artificial Sequence
  derived and/or modified protein sequence (opt6) from LASV(Lassa virus/H.sapiens-wt/NGA/2016/ISTH_0133;Clade II)__AVO03635__GPCstabilized
augggucaaauaauaacauucuuccaagaaguuccacacguaauagaagaaguaaugaacauaguacuaauagcacuaucauuacuagcaguucuaaaagcuauauauaacguagcaaccugcggaguauucggccuaauaucuuuucuacuacucugcggccgaucauguuccacaacauacaaaggaguauaugaauuacaaacacuugaauuagacauggcaaaucuaaacaugacuaugccacuaucaugcacaaaaaauaacucccaccacuacauaaugguuggaaacgaaacaggacuagaauuaacucuuacaaacaccucaaucauaaaccauaaauuuugcaaccuaucagacgcacauaaaaaaaaccuauacgaccacucauuaaugucuauaauaucuacauuccacuuaucaauaccaaauuucaaucaauaugaagcaaugucaugcgacuuuaacggagguaaaauaucaguacaauacaaccucucacauucuuacgcagucgacgcagcuaaacacugcggcacuauagcaaacggcguuuuacaaacauucaugcgaauggcuuggggaggaucauacauagcacuugacuccggaaaaugcggaugggauugcauaaugacuaguuaccaauaucuaauuauacaaaauaccacuugggaagaccacugucaauucucaagaccaucuccaauuggauaccuaggauuacucucucaaagaacuagagauauauacauaucuagacgacucagaagaacauuuacauggacauuaagugacagugaaggaaacgacgcucccggaggauacugucuaacaagauggaugcuaauagaagcagaacuaaaaugcuucggcaacacagcuauagcaaaaugcaaugaaaaacaugacgaagaauucugcgacauguuaagauuauucgacuuuaaccgacaagcaauuaaaagauuaaaaacagaaccacaaaugucaauacaacuaauaaacaaagcaguaaaugcauuaauuaacgaccaacuaauaaugaaaaaccaccuacgugacauaaugggauguccuuacugcaacuacucaaaauauugguaccuaaaccacaccauaacaggaaaaacaucauuaccccgauguugguuaguaucaaacggcucauaccuaaacgaaacacauuucucagacgauauagaacaacaagcagacaacaugauaacagaauuacuacaaaaagaauacauggacagacaaggaaaaacaccauuaggacuaguagaucucuucguauuuucuacaucauuuuaccuaauaucaauauuucuucaucuaguaaaaauacccacacaccgccacauaguagguaaaccaugccccaaaccacauagacuaaaucauaugggaauauguucaugcggacuauauaaacauccagguguaccaguaaaauggaaaagacaauaa

SEQ ID NO: 5663 - RNA, 1473 nt, Artificial Sequence
  derived and/or modified protein sequence (opt6) from LASV(Lassa virus/H.sapiens-wt/NGA/2016/ISTH_0141;Clade II)__AVO03649__GPCstabilized
augggacaaauaauaacauucuuccaagaaguaccccauguuauagaagaaguuaugaauauaguauuaauaacauuaucacucuuagcaauacuaaaaggaauauacaacgucgccacaugcggccuuuucggauuaguaucuuuccuccuuuuaugcgguagaucuugcucaacaaucuacaaaggcgucuacgaacuacaaacacuagaacuagacauggcaucuuuaaacaugaccaugccauuaucauguacuaaaaacaacucccaccacuacauaaugguaggaaacgaaacaggacuagaacucacacuaaccaacacauccaucauaaaccacaaauuuugcaaucucuccgaugcacacaaaaaaaaccuauacgaucacgcauuaaugucaauaauaucaacauuucaucucuccauaccaaacuuuaaccaauacgaagccaugucuugcgacuucaauggaggaaaaauaucuguacaauacaaccuaucacacaccuaugcaguagacgcagcagaacacuguggaacaauugcaaacggaguauuacaaacauucaugagaauggcauggggaggaucauacaucgcauuagacuccggcugcggaucaugggacugcauuaugacaucauaccaauaccuaaucauccaaaacacuacaugggaagaccacugccaauucuccagaccuucuccaauaggauaucuaggacuacucucacaaagaacaagagacauuuacauauccagaagacgacgagggacuuuuaccuggacauuaagcgauucagaaggaaaugaaacaccaggcggauauugucuaacuagauggaugcuuauagaagcagaacuaaaauguuuuggcaacaccgcaguagcuaaaugcaacgaaaaacaugacgaagaauucugugacaugcucagauuauucgacuucaacaaacaagcaauaagaagacuaaaaacaccagcacaaaugucaauucaauuaauaaauaaagcagucaacgcucucauaaaugaucaauuaauaaugaaaaaccaucuaagagauauaaugugcauccccuacuguaauuauucaaaauauugguacuuaaaucacacaguuacuggaaaaacaucccuacccagauguuggcuaguaucaaacggauccuaucuaaacgaaacaagauucucugacgauauagaacaacaagcugauaauaugaucacagaacuacuacaaaaagaauacauagauagacaaggaaaaacaccauuaggacucguagacuuauucguauucucaacauccuuuuaccuaauuucaauauuccuacaucuuguaaaaauaccaacacacagacauauaaucggaaaaccaugcccaaaaccacacagauuaaaccacauggguauaugcucauguggauuauacaaacauccaggaauaccagucaaauggaaaagauaa

SEQ ID NO: 5664 - RNA, 1473 nt, Artificial Sequence
  derived and/or modified protein sequence (opt6) from LASV(Lassa virus/H.sapiens-wt/NGA/2016/ISTH_0146;Clade II)__AVO03633__GPCstabilized
augggacaaauuauaacauuuuuucaagaaguuccucacguaauagaagaaguaaugaacauaguacucauagcccuaagucuacuagcaauacucaaaggaaucuauaacgucgcaacaugcggacuuuucggucuaguaagcuuccuacuacucuguggacgaucaugcucaacaaccuacaaaggaguuuaugaauuacaaacauuagaauuagacauggcaucauuaaacaugacaaugccauuaucaugcacaaaaaacaacagccaucacuauauaaugguaggaaacgaaacugguuuagaacuaacacucacaaacacaucaauaaucaaucacaaauucuguaaccuaucagacgcacauaaaaaaaacuuauaugaucacgcauuaauguccauuauaucaacauuccauuuaucaauaccaaacuuuaaccaauacgaagcaaugucaugcgauuucaacggcggcaaaauaucaguccaauacaaucuaucccacacauacgccguagacgcagcaaaccacuguggaacaauagccaacggaguacuacaaaccuucaugagaauggcauggggaggauccuauauagcauuagacucuggauguggaucuugggacugcauuaugacauccuaccaauaucuaauaauacaaaacacaacuugggaagaccacugccaauuuucaagacccucaccaauaggauaccuaggacuauuaucccaaagaacaagagauauuuacauuuccagaagacgacgaggaacauuuaccuggacauuaucagacucagaaggaaaugaaacaccagguggauacugccucacccgauggaugcuuauagaagcagaauuaaaaugcuucggaaacacagcaguagcaaaauguaacgaaaaacacgacgaagaauucugcgauaugcuaagacuuuucgacuucaauaaacaagcaauaagaagacuaaaaacaccugcacaaaugucaauacaauuaauaaacaaagcaguaaacgcacuaauaaaugaucaacuaauaaugaaaaaucaucuaagagacauaauguguauaccauauugcaauuauucaaaauacugguaccuaaaccacacaguaacaggaaaaaccucauuaccaagauguugguuaguaucaaacggauccuacuuaaacgaaacacauuucagcgacgauauagaacaacaagcagacaauaugauaacugaacuucuacaaaaagaauauauggauagacaaggaaaaacaccacuaggauuaguagaccuuuucguuuucucaacaucauucuaccuaauaucaauauuccuacaccuaguaaaaauacccacccauagacaugucauaggaaaaccaugcccaaaaccccaccgauuaaaccauaugggaaucugcucaugcggauuauacaaacauccaggcguaccagucaaauggaaacgauaa

SEQ ID NO: 5665 - RNA, 1473 nt, Artificial Sequence
  derived and/or modified protein sequence (opt6) from LASV(Lassa virus/H.sapiens-wt/NGA/2016/ISTH_0187;Clade II)__AVO03549__GPCstabilized
augggacaaauaguaaccuuuuuucaagaaguaccacacguaauagaagaaguaaugaauauagucuuaauagcacuaucaguauuagcaauacuuaaaggauuauauaauuuugcaaccugcggccuaaucggauuaguuacauucuuacuacuaucaggcagaucauguuccaugguauauaaaggaguauaugaauuacaaacacuagaauuaaacauggaaaccuuaaauaugacuaugccacuaaguugcaccaaaaacaacucucaccacuacauaagaguaggaaacgauacaggacuagaacuaaccuuaacaaauaacacacuucuaaaccacaaauucugcaaccuauccgaugcacauaaaaaaaaucuauacgaccacgcauuaaugucaauaauaucaaccuuccaccuaucaauaccuaacuucaaucaauacgaagccauguccugcgacuucaacggcggacgcaucacaguacaauacaacuuaagucauucauaugcagucgaugcagcaaaccacugcggaacaguagcaaauggagucuuacaaacauucaugagaauggcauggggaggaucauauauagcccuagacagcagaugcggaaacugggacugcauaaugacauccuaccaauaccuaauaauccaaaauaccacuugggaagaucacugccaauuuucaagacccucacccauuggcuacuuaggcuuacuuucacaaagaacacgugacaucuacauauccagaagaagaagaggaacauucacauggacccuaucagacucagaaggaaacgaaacaccaggcggcuacugcuuaacacgcuggaugcuaauagaagcagaacuaaaaugcuucggaaacacagcuguagcaaaaugcaacgaaaaacacgacgaagaauucugugacaugcuaagauuauuugacuucaacaaacaagcuauaagaagacuaaaagcacccgcucaaaugucaauccaguuaauaaauaaagcaguaaaugcauuaauaaacgaucaacucauaaugaaaaaucaucuuagagacauaaugugcauacccuacugcaauuacaguaaauacugguaccuaaaucauacauccacaggcaaaacaucacuacccagauguuggcuaguaucuaacggcaguuacuuaaaugaaacccacuucucagacgauauagaacaacaagcagacaacaugauuaccgaaaugcuacaaaaagaauaccuagauagacaaggaaaaacaccuuuaggauuaguagauauauucguuuucucaacaucauucuacuuaauaucaauauuucuucaucuuauaaaaaucccaacacacagacacauaguaggaaaaccaugcccaaaaccacacagacuaaaccacauggguaucugcuccugcggccucuacaaacaaccuggcguacccgucagauggaaaagauaa

SEQ ID NO: 5666 - RNA, 1473 nt, Artificial Sequence
  derived and/or modified protein sequence (opt6) from LASV(Lassa virus/H.sapiens-wt/NGA/2016/ISTH_0199;Clade II)__AVO03653__GPCstabilized
augggccaaauaauaacauucuuccaagaaguaccacaugucauagaagaaguaaugaauauuguacuaauagcauuaucauuacuagccauacuuaaagguauauacaauguagcaacaugcgggcuauucggacuaguaucauuucuacuacuaugcggcagaucauguucuacaacauacaaaggagucuacgaauuacaaacacuagaauuagauauggcaucucuaaacaugaccaugcccuuaucuugcacaaaaaauaacucacaccauuacauaaugguugguaacgaaacaggccuagaacuaaccuuaacaaacacgucaauaauaaaccauaaauucuguaaccucuccgacgcacacaaaaaaaaccuauaugaccaugcacuaaugucaaucauaucaacuuuucaccuaucaauaccaaacuucaaccaauacgaagcaaugaguugcgacuucaacggaggaaaaauaucaguacaauacaaccuaucucacacuuaugcaguugacgcagcaaaucauugcggcacaauagcaaauggaguacuacaaaccuucaugagaauggcuuggggaggaucauauauagcacuagacucaggauguggaaacugggacugcauaaugaccucauaccaauacuuaaucauacaaaauaccacaugggaagaccacugccaauuuucaagaccaucaccaaucggauaccuaggacuacuaucccaacguacaagagacaucuacauauccagaagaagacgcggaacauuuacauggacacuaucagacucagaaggcaacgaaacaccaggaggauacugucuaacuagauggaugcuaauugaagcagaacuaaaaugcuucggcaacacagcaguagcuaaaugcaacgaaaaacacgaugaagaauuuugcgacaugcuaagacuauucgauuucaacaaacaagcaauaucaagauuaaaaacaccagcucaaaugagcauacaacucauuaacaaagcaguaaacgcauuaaucaacgaccaacuaauaaugaaaaaccaccuaagagacauaaugugcauaccuuacugcaauuauuccaaauacugguaccuaaaccauaccguaaccggaaaaacaucacuaccaagaugcuggcuugucuccaauggaucauauuuaaacgaaacccacuuuucagaugacauagaacaacaagcagacaauaugauaacagaaaugcuccaaaaagaauacaucgacagacaaggaaaaacaccauuaggauuaguagaccuauucguauucucaacaucauucuaccuaauaucaauauuucuccaucucguuaaaaucccaacacacagacacguaauuggaaaaccaugcccuaaaccucacagauuaaaccauaugggaaucuguucaugcggacuuuacaaacacccaggaguucccguaaaauggaaacguuaa

SEQ ID NO: 5667 - RNA, 1473 nt, Artificial Sequence
  derived and/or modified protein sequence (opt6) from LASV(Lassa virus/H.sapiens-wt/NGA/2016/ISTH_0419;Clade II)__AVO03539__GPCstabilized
augggacaaauagucacuuucuuucaagaaguaccacacguaaucgaagaaguaaugaacauaguauuaauagcacucucacuacuugccauacuuaaaggaaucuacaacuucgccaccugcggacuaauaggauuaauuacauuuuuauuccucugugguagauccuguuccgcaauauacaaaggcucauaccaacuacaaacaaucgaauuaaauauggaaacacuaaauaugacuaugccacuaucauguacaaaaaacucaagucaucauuacauaagagucggaaaugaaacaggauuagaauuaacauuaacaaauauaucuaucauagaucacaaauucugcaaccuaucagacgcacauaaaaaaaaccuauacgaucacgccuuaaugucaauaauauccacauuucauuuaucaauacccaacuuuaaccaauacgaagcaaugucaugcgacuucaauggcggaaaaauaucaguccaauacaacuuaucacacacauacgcaguugacgcagcaaaccacugcggcacaguugcaaaugguguucuacaaacauuuaugagaauggccugggguggaucauauauagcacuugacagcgguuguggcaacugggacuguauaaugacaucauaccaauacuuaaucauacaaaauacuacaugggaagaccauugccaauucucucgcccaucaccaauaggauaucuaggacuacucucacaaagaacaagagacauauacauaucccgacgacgaagaggaacauuuacauggacauuaucagauucagaaggaaaagaaacaccaggagguuacuguuuaacaagauggauguuaaucgaagcagaacuaaaaugcuucggaaauacagcagucgcaaaauguaacgaaaaacacgacgaagaauuuugcgacaugcuacgccuauucgauuucaacaaacaagcuauccaacgccuaaaagcaccagcacaaaugucaauacaauuaaucaacaaagcaguaaacgcacuaaucaacgaccaauuaauaaugaaaaaccaccuuagagacauaaugugcauaccauacugcaauuacaguaaauacugguaccuaaaccauacaucaacaggaagaacuucauuaccaagaugcugguuaguaucaaauggcucuuaccucaacgaaacacacuuuucagacgacauagaacaacaagcagacaacaugauaacugaaauguuacaaaaagaauauauagauagacaaggaaaaacaccccuaggauuaguagaccuuuucguauuuucaaccucauucuaccuuauaucaauauuccuacaccuaauaaaaauaccaacccaccgacauaucguaggaaaaucaugcccaaaaccacacagauuaaaccacauggguaucugcucaugcggacucuauaaacaaccuggaguaccagucaaauggaaaagauaa

SEQ ID NO: 5668 - RNA, 1473 nt, Artificial Sequence
  derived and/or modified protein sequence (opt6) from LASV(Lassa virus/H.sapiens-wt/NGA/2016/ISTH_0447;Clade II)__AVO03559__GPCstabilized
augggacaaauaauaacauucuuccaagaaguaccacacguaauagaagaaguaaugaauauaguucuaauagcauuaucacuauuagccauacuaaaaggaauauauaauauagcuacaugcggacuauuuggacuuguaucauucuuauuacuaugcggaagaucauguucaacaaccuacaaaggaguuuaugaacuccaaacacuagaacuagacauggcaucauuaaauaugacaaugccauuaucuugcacuaaaaacaacucacaccacuacauaaugguaggaaacgaaacaggucuugaacuaacacuaacaaauacaucaaucauaaaccacaaauucugcaacuuaucagacgcacacaagaaaaaccucuaugaccauacacucauguccauaauaucaaccuuccaccuauccauaccaaauuucaaccaauacgaagcaaugucaugugauuucaacggaggcaaaauaucaguccaauacaaccuaucacacgcauacgcagucgaugcagcaaaccacugcggaaccauagcaaaugguguauuacaaacauucaugcgcauggcauggggaggaucauauauagcacuagauucaggaugcggaaacugggacuguaucaugacauccuaccaauaucuaauaauccaaaacaccaccugggaagaccacugccaauucucaagaccaucaccaauaggauacuuaggacuucuaucacaacgcacaagagacauauauauaucaagaagaagaagaggaacauucacauggacacuaucugacuccgaaggaaacgaaacaccaggaggauacugccuaaccagauggaugcuaauagaagcagaacucaaaugcuucggaaacacagcaguagcaaaaugcaacgaaaaacacgacgaagaguucugcgacauguuacgacuauucgacuucaacaaacaagcaaucagaagacuaaaaacaccagcacaaaugucaauacaacucaucaacaaagcaguaaacgcccuaauaaacgaucaauuaauaaugaaaaaccauuuaagagacauuaugugcauaccauacuguaacuacuccaaauacugguauuuaaaccacacuguaacaggaaaaaccucauuaccacgaugcuggcuagucucaaauggaaguuaccuaaacgaaacacacuucucagacgacauagaacaacaagcagacaacaugauaacugaauuauuacaaaaagaauacauagacagacaaggaaaaacaccacuaggucuaguagaccucuucguauuuucaacaucauucuaucuaaucucaauauuccuacaccuagucaaaauaccuacacaccgccacguaguaggaaaaccuugcccaaaaccacaccgauuaaaccauaugggaaucugcucaugcggacuguacaaacaucccggaguaccaguaaaauggaaaagauaa

SEQ ID NO: 5669 - RNA, 1473 nt, Artificial Sequence
  derived and/or modified protein sequence (opt6) from LASV(Lassa virus/H.sapiens-wt/NGA/2016/ISTH_0543;Clade II)__AVO03595__GPCstabilized
augggccaaaucauaaccuuuuuccaagaaguaccacacguaauagaagaaguuaugaauauaguccuaauagcacuaucacuccuagccauccucaaaggaauauacaacauagcaacaugcggucuauuuggccuaauaagcuuccuacuuuuaugcggaagaucuuguucaacuaccuacaaaggaguauaugaacuacaaacacucgaacuagacauggcaaaucucaacaugacaaugccacuauccugcacaaaaaauaacucacaccauuacaucaugguagguaacgaaaccggacucgaacuaacacuuaccaauacaucaaucauaaaccacaaauucugcaaccuaucagaugcucacaaaaaaaaucuauaugaccacgcccuuauguccauaaucuccacauuucacuuaucaauaccaaacuucaaucaauacgaagcaaugucuugcgacuucaacggcggaaaaauaucaguacaauauaaccuaucacacucauacgcaguagacgcagcuggacauugcggcacaauagcaaacggaguacuccaaacauucaugagaauggcauggggaggaucauacauagcacuagacucaggaugcgguaauugggacugcauaaugacauccuaccaauauuuaguaauacaaaacacaacaugggaagaucauugccaauuuucaagaccaucaccaauaggcuaucuaggacuacucucccaaagaaccagagacauauacauaucaagaagaagacgagguacauucaccuggacauuaucagacucagaaggaaaugaagcaccaggaggauacugccucacaagauggauguuaauagaagcagaauuaaaaugcuucggaaacacugcuauagccaaauguaaugaaaaacacgacgaagaauucugugacaugcuaagauuauucgacuucaacaaacaagcaauaagaagauuaaaagcaccagcacaaaugucaauacaauuaauaaacaaagcgguaaacgcauuaauuaacgaccaacuaauaaugaaaaaucacuuaagagacauaaugugcauacccuauuguaacuacucuaaauauugguaucuaaaccacacaguaaccggaaaaaccucccuuccuaaauguuggcuaguaucaaacggcucauaccuaaacgaaacucauuucucagacgauauagaacaacaagcugauaauaugaucacagaacuccuccaaaaagaauauauggaccgacaaggaaaaaccccacuaggcuuaguagaucuuuuuguauucucaacauccuuuuacuuaauauccauauuuuuacaccuaguaaaaauaccaacacauaggcauauagucggaagaccaugcccaaaaccacacagauuaaaccacaugggaauaugcucauguggacuauacaaacaccccggcguaccaguaaaauggaaaagauaa

SEQ ID NO: 5670 - RNA, 1473 nt, Artificial Sequence
  derived and/or modified protein sequence (opt6) from LASV(Lassa virus/H.sapiens-wt/NGA/2016/ISTH_0565;Clade II)__AVO03637__GPCstabilized
augggacaaauagucacauuuuuccaagaaguaccacacguaauagaagaaguaaugaauauaguccuuauagcccuauccuuacucgcaauacuuaaaggaaucuacaacguagcaaccuguggacuauucggacuaaucucauuucuacuauuaugcggccgcucaugcucaacaacauauaaaggaguauaugaacuacaaacauuagaacuugacauggcaaaccucaauaugacaaugccacuaucauguaccaaaaauuccucacaccauuacaucaugguaggaaacgaaacaggacuagaacuuacauuaaccaacacaucaauaauaaaccacaaauucuguaaucuaucugaugcacacaaaaaaaaucuauacgaccacgcacuaaugucgauaauaucaacauuccaccugucaauaccaaacuucaaccaauacgaagcaaugucaugcgacuuuaauggagguaaaaucucaguccaauacaaccuaucacauacauacgccguagacgcugcaaaucauugcggaacaaucgcaaacggaguauuacaaacauucaugagaauggcauggggaggaagcuacauagcacuagacucaggcugcggaaauugggauugcauaaugacaucauaccaauauuuaaucauucaaaauaccacaugggaagaccacugccaauucagccgaccuucaccaauaggauaccuaggccuauuaucacaaagaacuagagacaucuauauaagcagaagaagaagaggaacauucacauggacacuaagcgacucagaaggcaacgaagcccccggcggauacugucuaacccgcuggauguuaauagaagcagaacuaaaaugcuucggaaauacugcgaucgcaaaaugcaacgaaaaacaugaugaagaauucugcgacaugcuacgauuauucgacuucaacaaacaagccauaaaaagacuuaaaucaccugcacaaauguccauacaacuaauaaacaaagcagucaacgcacuaauaaacgaccaacuaauaaugaaaaaccaccucagagacauaaugugcauaccauauugcaacuauucuagauacugguaccuaaaucacacaguuaccggaaaaacuucauuacccagauguuggcuaauuucaaacggaucauacuuaaacgaaacacauuucucagaugacaucgaacaacaagcugacaacaugauaacagaacuauuacaaaaagaauacauggauagacaaggaaaaacaccacucggauuaguagaccuuuucguauucucaacaucuuucuaucuaauuucaauuuuucuacacuuaguaaaaauaccaacacauagacacauaguaggacgaccaugcccaaaaccucacagacuaaaccacaugggcauauguucauguggacuauacaaacacccuggaguaccuguaaaauggaaaagauaa

SEQ ID NO: 5671 - RNA, 1473 nt, Artificial Sequence
  derived and/or modified protein sequence (opt6) from LASV(Lassa virus/H.sapiens-wt/NGA/2016/ISTH_0572;Clade II)__AVO03611__GPCstabilized
augggacaaauaauaacauucuuccaagaaguaccacacgucauagaagaaguaaugaauaucguccuaauagcacuaucgcuauuagccauacucaaaggaauauacaacgucgcaacauguggauuauucgguuuaguagcauuucuacuauuauguggaagaucuugcucaacaacauauaaaggaguauacgaacuacaaacacuagaacuagacauggcaucuuuaaacaugacaaugccauuaucaugcacaaaaaacaacagccaucacuauauaaugguaggaaacgaaacaggacuagaacuuacauuaacaaauacuucaauaauaaaccacaaauucuguaaucuaucagacgcacacaaaaaaaacuuauacgaccaugcacuaauguccauaauaucuacauuccaccuaucaauucccaacuucaaucaacaugaagcuaugucaugcgacuucaacggaggaaaaauaucaguucaauauaaucuaagucacacauacgcuguagaugcagcaaaccacugcggcacuaucgcaaaugguguccuacaaacauuuaugagaauggcauggggaggaucauacauagcacuagacucuggaugugguagcugggacugcauuaugacaucauaccaauauuuaaucauacaaaacaccacuugggaagaccacugccaauucucacgacccucaccaauaggauaccuaggcuuacuaucacaaagaacaagagacauuuauauaucacgaagaagaagaggcacauucaccuggacauuaucagacucagaaggaaacgaaacaccaggagguuacugccuaacccgauggaugcucauagaagcagaacuaaaauguuucggaaauacagcaguagccaaaugcaacgaaaaacacgacgaagaauuuugugacaugcuccgcuuauuugacuucaauaaacaagcaauccgaagacucaaaaccccagcacaaaugucaauccaacuaauuaauaaagccguuaacgcauuaauaaacgaccaauuaauaaugaaaaaucaucuaagagacauaaugugcaucccuuacugcaauuauucaaaauauugguacuuaaaccauaccguaacaggaagaacaagccuaccaagaugcuggcuuguauccaacggcuccuacuuaaaugaaacacacuuuucagacgacauagaacaacaagcagacaacaugauaacagaacuauuacaaaaagaauauauggaucgucaaggaaaaacaccacuuggacuaguagacuuauuuguauuuuccacaucauucuauuuaauaucaaucuucuuacauuuaaucaaaauaccaacccacagacacguaauaggaaaaccaugcccuaaaccacauagacuaaaucacaugggaauauguuccugcggacucuauaaacauccagguguaccagucaaauggaaaagauaa

SEQ ID NO: 5672 - RNA, 1473 nt, Artificial Sequence
  derived and/or modified protein sequence (opt6) from LASV(Lassa virus/H.sapiens-wt/NGA/2016/ISTH_0610;Clade II)__AVO03585__GPCstabilized
augggacaaauaaucaccuuuuuccaagaaguuccacauguaaucgaagaaguaaugaacauaguauuaaucgcacucucucuucuugcaauacuaaaaggagucuacaacguagccaccugcggacuuuucggauuaguaucauuccuacuauuauguggaagaucuuguucaaccacauacaaaggagucuacgaauuacaaacccuagaacuagauauggcaucucuaaacaugacaaugccacucucaugcacaaaaaacaauagucaccacuauauaaugguaggaaacgaaacaggacuugaauuaacacucacaaacacaucaauaauaaaccauaaauucuguaaucuaagcgacgcacauaaaaaaaauuuauacgaccacgcauuaauguccauaauaucaacauuccacuuaucaaucccaaauuuuaaucaauacgaagcaaugucaugcgacuucaacgguggcaaaauaucaguucaauacaauuuaucacacaccuacgcaguagacgccgccaaccacugcggaaccauugcaaacggaguacuccaaacauuuaugcgaauggcauggggaggaucauacauagcacuagacucaggcugcggaucaugggauuguaucaugacaucauaucaauacuuaaucauacaaaacacaacaugggaagaucauugccaauuuuccagaccauccccaauuggcuacuuaggacuccuaucccaaagaaccagagacauauacauaucccgaagaagaagaggaacauucacuuggacacuaucagauucagaaggaaaugaaacccccggugguuauugucuaacccgauggauguuaaucgaagcagaacuaaaauguuucggaaacacagcaguugcaaaaugcaacgaaaaacacgacgaagaauucugcgacauguuaagauuauucgacuuuaacaaacaagcaaucagaagacuaaaagcccccgcacaaauguccauacaauuaauaaacaaagcaguaaacgcacucaucaacgaucaacuaauaaugaaaaaccacuuaagagacauaauguguauaccauacugcaauuauucaaaauacugguauuuaaaucacacaguaacaggacgaacaucuuuaccaagauguugguuaguaucaaacggaucauaucuaaaugaaacucacuuuuccgaugacauagaacaacaagcagauaauaugauaacagaacuacuacaaaaagaauacauagacagacaaggcaaaacaccacuaggacuagucgaccuauucguauucuccacaagcuucuacuuaaucuccauauucuuacacuuaguaaaaauaccaacucacagacauauaaucggaaaaccuugcccaaaaccucacagacuaaaucacaugggaauaugcuccugcggacuauacaaacaccccggcguaccaguaaaauggaaaagauaa

SEQ ID NO: 5673 - RNA, 1473 nt, Artificial Sequence
  derived and/or modified protein sequence (opt6) from LASV(Lassa virus/H.sapiens-wt/NGA/2016/ISTH_0621;Clade II)__AVO03543__GPCstabilized
augggccaaauaguaaccuuuuuccaagaaauaccacacguaguugaagaaauaaugaacauaguacucauaacacuaucacuccuugcaaucuuaaaaggauuauacaacuucgccacaugcggacuuauaggacuaauaacauucuuauuccuaugcgguagauccuguucaacaauuuacaaaggaucuuaucaacuacaagcucuagaauuaaacauggaaacuuuaaacaugacaaugccauuaucuuguacuaaaaacaauucacaccacuacauaagaguuggaaaugaaacaggacucgaauuaacacuuacaaacacauccauaaucgaccacaaauucugcaaccuaucagaugcccauaaaagaaacuuauacgaccacacacuaaugucaauaauaucaacauuccaucuauccaucccaaauuucaaccaauacgaagcaaugucuugugacuucaauggaggaaaaauauccguacaauauaaucuaucccacagcuacgccggcgacgcagcaagacacugcggcacaguagcaaacggaguacuacaaacauucaugcguauggcauggggaggaucauacauagccuuagauagcggaugcggaaauugggacugcauaaugacaucauaucaauaccuaaucauacaaaacacaacaugggaaaaccacugucaauucucucgcccaucaccaauagguuaccuaggauuacuaucacaaagaacaagagacauauacauaucaagaagaagacgcggaacauuuaccuggacacuaucagacucagaaggaaaagaaacacccggaggauauugccuaacacgcuggaugcuaauugaagcugaauuaaaauguuuuggaaacacugcaguagcaaaauguaacgaaaaacacgacgaagaauuuugugacauguuacgacuuuucgacuucaauaaacaagcaauacaaagacuaaaaaccccugcacaaaugucaauucaacuaauaaauaaagcagucaacgcacuaauaaacgaucaacuaaucaugaaaaaccaccuccgagauauaaugugcauaccauauugcaacuacucuaaauacugguaccuaaaccacacaacaacaggaaaaacaucccuacccaaaugcuggcuagucucaaauggaucauaccucaacgaaacacacuuuucagacgacaucgaacaacaagccgauaauaugaucacagaaaugcuucaaaaagaauacauagaccgccaaggaaaaacaccucuaggauuaguagacuuauuuguuuucucaaccucauucuaccuaauauccauuuuccuacaccuaauaaaaauaccaacccacagacacauaguaggaaaauccuguccuaaaccccaucgccuaaaucacaugggaaucugcucauguggccuauacaaacaaccaggcgugcuaguaaaauggaaacguuaa

SEQ ID NO: 5674 - RNA, 1473 nt, Artificial Sequence
  derived and/or modified protein sequence (opt6) from LASV(Lassa virus/H.sapiens-wt/NGA/2016/ISTH_0701;Clade II)__AVO03629__GPCstabilized
augggacaaaucauaaccuuuuuucaagaaguaccacauguuauagaagaaguaaugaacauagucuuaauagcacuaucauuauuagcaauauuaaaagguauauauaacgucgccacuugcggacuauuuggcuuagucucauuucuacuauuauguggaagaucaugcucaaccaccuauaaaggaguuuaugaauuacaaacauuagaauuagauauggcuucccuaaauaugacaaugccucucuccugcacuaaaaacaacucacaccacuacauuaugguaggcaacgaaacaggacuagaauuaacacuaacaaacacaucaauaauaggacauaaauucuguaauuuaucugacgcacacaaaaaaaaccuauaugaucaugcauuaaugucaauaauaucaacauuccaucuaucaaucccaaacuuuaaccaauacgaagcaaugucaugugauuucaacggaggcaaaauaagcguacaauauaaccuaucccacgcauaugcagucgacgccgcaaaucacugcggaaccaucgcaaauggaguauuacaaacauucaugagaauggcauggggaggcucauauauagcuuuagacucaggaugcggauccugggacugcauaaugacaucauaucaauaccucaucauacaaaacacaacaugggaagaucacugucaauuuucucgccccagcccaauaggauaccucggacuacuaucccaaagaaccagagacauauauauaucaagacgaagaagaggaaccuuuacauggacacuuuccgacuccgaagggaacgaaaccccaggaggauacugccucacaagauggaugcuaauagaagcagagcuaaaauguuuuggaaacacagcaguagcaaaaugcaacgaaaaacacgaugaagaauuuugcgauaugcuaagauuauucgacuucaauaaacaagcaaucagaagauuaaaaacacccgcacaaaugagcauacaauuaauuaacaaagccgucaacgcccuuauaaacgaucaauuaauaaugaaaaaccaccucagagauauaaugugcauaccauauugcaacuauucaaaauacugguacuuaaaucauaccguaacugguaaaacaucucucccaagauguugguuaguauccaacggcucauaccuaaaugaaacacacuuuucagacgacauugaacaacaagcagacaauaugauaacagaauuacuacaaaaagaauacauagacagacaaggcaaaacaccacuaggccuagucgaccuauucguauucucaacaucauuuuaucuaauauccauauucuuacacuuaguaaaaauaccaacacaccgucauguaauaggaaaaccauguccaaaaccacacagacucaaccauauggggauauguucuugcggacuauacaaacauccaggagucccaguaaaauggaaaagauaa

SEQ ID NO: 5675 - RNA, 1473 nt, Artificial Sequence
  derived and/or modified protein sequence (opt6) from LASV(Lassa virus/H.sapiens-wt/NGA/2016/ISTH_0702;Clade II)__AVO03557__GPCstabilized
augggccaaauaauaaccuucuuccaagaaguaccacacguaauagaagaaguaaugaacauaguauuaaucgcauuaucacuauuagcaguacuaaaaggcauuuauaauguagcaacaugcggucuauucggauuaguagcauuccuccuacuauguggacguucauguucaacaacauacaaaggaguuuacgaauuacaaacuuuagaauuagauauggcaaaccuuaauaugacaaugccauuaucauguacaaaaaacaacucacaccacuacauaaugguaggaaacgaaacaggauuagaacuaacucuaaccaacacaucaauaauaaaccacaaauucuguaacuuaucugaugcacacaaaaaaaaccuauacgaccacgcauuaaugucaauaauuucaacuuuucacuuaucuauaccaaacuucaaccaauacgaagcaaugucaugugacuucaacggaggcaaaauaaguguacaauacaaucuuucccauacauacgcaguagacgcagccaaucauugcggaacaauagcaaacggaguauuacaaaccuucaugagaauggcauggggaggaucauacaucgcacuagacucuggaugcggauccugggacugcauaaugacaagcuaccaauaccuaauaauccaaaauaccaccugggaagaucauugccaauucagcagaccaucacccauaggauaucuaggacuacuaucacaaagaacaagagacaucuauauaucaagaagaagacgcgguacauucaccuggacauuauccgacucagaaggaaacgaaacaccaggaggcuacugccuaacaagauggauguuaauagaagcagaacuaaaaugcuucggcaacacagcuguagcuaaaugcaacgaaaaacacgacgaagaauucugcgauaugcucagacuuuucgauuucaauaaacaagccauaagaagacuaaaaacacccgcucaaaugucuauucaacuaaucaacaaagcaguaaaugcauuaaucaacgaccaacuaauaaugaaaaaucaucuacgagauauaaugugcauaccauacuguaauuacucuaaauacugguauuuaaaucacacaguaacaggcagaacaaguuuaccaagauguuggcucguuucaaacggcucauacuuaaacgaaacacacuucucagacgacauagaacaacaagcugacaacaugauaaccgaacuauuacaaaaagaauacauggacagacaaggaaaaacaccauuaggccuaguagacuuauucguuuuuuccacauccuucuaucuaauaagcauauucuuacauuuaauaaaaauuccaacacacagacacguaaucggaaaacccuguccaaaaccacacagauuaaaccacaugggaauaugcucaugcggacuuuacaaacauccaggaguaccaguuaaauggaaacgauaa

SEQ ID NO: 5676 - RNA, 1473 nt, Artificial Sequence
  derived and/or modified protein sequence (opt6) from LASV(Lassa virus/H.sapiens-wt/NGA/2016/ISTH_0703;Clade II)__AVO03597__GPCstabilized
augggacaaauaauaacuuuuuuucaagaagucccccacguaauagaagaaguaaugaacaucguacuaaucgccuuaucucuacucgcaauccuaaaaggaauauacaacguagcaacaugcggauuauucggacucgucagcuuucuucuauuauguggaagaucauguuccacaacauauaaaggagucuaugaacuccaaacacuagaauuagacauggcaucacuaaauaugacaaugccacucucauguacaaaaaacaacucacaucacuacauaaugguaggcaaugaaacaggacuagaacuaacccucacaaauacaucuauaauaaaccauaaauucugcaacuuaucagaugcacacaaaaaaaauuuauacgaccaugcauuaaugucaaucaucucaacauuccaccuauccauacccaauuucaaccaauacgaagcaaugaguugcgauuuuaacggaggaaaaauaucaguacaauauaaccuaucccacaccuacgcaguagacgcagcaucacauugcggaacaauagcaaacggcguccuacaaacauuuaugagaauggcuuggggaggaucauacauagcauuagacucuggcuguggaucaugggacuguauaaugacaucauaccaauaccuaaucauacaaaacacaacaugggaagaccauugucaauucucuagacccuccccaauaggauaucuuggacucuuaucccaaagaacaagagacaucuacaucucaagacgaagaagaggaacauucaccuggacucucucagacucugaaggaaaugaaacuccaggaggauacuguuuaacaagauggaugcuaauagaagcugaauuaaaaugcuucggaaacaccgcaguagccaaauguaacgaaaaacacgacgaagaauuuugcgauaugcuccgauuauucgauuucaacaaacaagcaauaagacgccuaaaaacacccgcccaaaugucaauccaauuaauaaauaaagcaguaaacgcacuaauaaaugaccaauuaaucaugaaaaaccacuuaagagauauaauguguauacccuauugcaauuauucaaaauacugguaccucaaccacacaguaacaggacgaacaucacuaccaagaugcuggcuaguaucaaacggauccuaucuaaacgaaacacacuuuucagacgauauugaacaacaagcagauaauaugaucacagaacuacuacaaaaagaauauauagaaagacaaggaaaaacaccacuaggauuagucgaccucuucguauuuuccacuaguuuuuaccuaauaucaauauucuuacaucuaauaaaaauacccacacacagacacguaauaggaaaaccauguccaaaaccccauagacucaaccacaugggaauauguagcuguggacuuuauaaacauccagguguucccgucaaauggaaacgauaa

SEQ ID NO: 5677 - RNA, 1473 nt, Artificial Sequence
  derived and/or modified protein sequence (opt6) from LASV(Lassa virus/H.sapiens-wt/NGA/2016/ISTH_0717;Clade II)__AVO03547__GPCstabilized
augggacaaauaguaacauucuuccaagaagucccucacguaaucgaagaaguaaugaacaucguacuaauagcauuaucuauacuugcaauacucaaaggacuauacaacguagcaacaugcggccucauaggauuaguaacauuuuuacuacucucuggccgcucauguucaaugauauauaaaggcguauaugaacuccaaacauuagaacuaaauauggaaacacuaaauaugacaaugccacuaucguguacaaaaaauaacucacaccacuacauaaugguaggaaacgaaacaggcuuagaacucacauuaacaaacacuucauuauuaaaccauaaauuuugcaaccucucugaugcacacaaaaaaaacuuauacgaccacacuuuaauguccauaauaucaacuuuccacuuaucaauaccaaacuuuaaccaauacgaagcaauguccugcgauuucaacggaggaaaaauaacaguccaauacaaccuaucucacacuuacgcaguagacgcaguaaaucauugcgguacacuagcaaacggcauauuacaaacauucaugagaauggcauggggaggaucauauauagcacuagacucacgaugcgguucaugggauugcauaaugacaucauaccaauaccuaauaauacaaaauacuacaugggaagaucacugucaauucucaagaccaucaccaauuggauaccuaggacuacuaucccaacguacacgcgacauauacauaucaagacgaagaagaggaaccuuuacauggacauuaucugacagcgaagguaacgaaacuccaggagguuauugcuuaacacgcuggaugcuaaucgaagcagaauuaaaaugcuucggaaauacagcuguagcaaaauguaacgaaaaacacgacgaagaauucugugauauguuacgauuauuugacuuuaauaaacaagcaauacgaagacuuaaagcaccagcacaaauguccauacaacuaauaaacaaagcaguaaacgcacuaauaaacgaccaacuaauaaugaaaaaccauuuaagagacauaaugugcauaccauacugcaacuacuccaaauacugguaccuaaaucacaccucuacaggaagaacaucacuacccagaugcuggcuugucucaaacgguucuuauuuaaacgaaacacauuucucagacgacauagaacaacaagcagacaacaugauaacagaaauguuacaaaaagaauaccuagacagacaaggaaaaaccccacuaggacuaguagaccuuuuuguauucucuacauccuuuuaccucauaucaauauucuuacaccucauuaaaauccccacacauagacauauagucggaaaaccauguccuaaaccacauagacuaaaccacauggguauuuguucaugcggacuauacaaacaacccggaguaccaguccguuggaaaagauaa

SEQ ID NO: 5678 - RNA, 1473 nt, Artificial Sequence
  derived and/or modified protein sequence (opt6) from LASV(Lassa virus/H.sapiens-wt/NGA/2016/ISTH_0753;Clade II)__AVO03609__GPCstabilized
augggccaaauaauaacauucuuccaagaaguaccccacguuaucgaagaaguaaugaauauaguucuuauagcauuaucacuacuagcaauauuaaaagguauauacaacguagcaacauguggauuauucggacuuguaucauuccuacuucuaugcggaagaucaugcucaaccaccuacaaaggaguauacgaauuacagacacuugaacuagauauggcaucauuaaauaugaccaugccacuaucaugcacaaaaaacaacucucaucauuauauaaugguaggaaacgaaacaggauuagaauuaaccuuaacaaacacauccauaauaaaucacaaauucugcaaccuaucagacgcucacaaaaaaaaccuauacgaucacgcauuaaugagcauaauauccaccuuccaucucagcauaccaaacuucaaccaauaugaagccaugucaugugacuucaaugguggcaaaaucucaguucaauacaaucucucacacacauacgcaguagacgccgcaaaucauugcggaacaauagccaacggaguauuacaaacuuuuaugagaauggcauggggcggcucauacauagcacuugacucagguuguggaaacugggacuguauaaugacaucauaucaauaccuaauaauacaaaacacaacaugggaagaccacugucaauuuucacguccaucaccaauaggauacuuagguuuacuaucccaaagaacuagagacauauauauaucaagaagaagaagaggaacuuuuaccuggacacuauccgauucugaaggaaaugaaacaccaggagguuacuguuuaacaagauggaugcucauagaagcagaacuaaaaugcuucggaaacacagcaguagcaaaaugcaacgaaaaacacgacgaagaauuuugugauaugcuaagacuauucgauuucaacaaacaagcaaucuccagauuaaaaacacccgcacaaaugagcauacaacuaauaaacaaagcaguaaacgcacucauaaaugaccaauuaauuaugaaaaaccaccuacgagacauaaugugcauaccuuauugcaacuacuccaaauacugguacuuaaaccauacugucaccggaagaaccucccucccaagaugcuggcuagucucaaacggaucauaccuaaacgaaacacauuuuucugacgauauugaacaacaagcagacaauaugaucacagaacuacuacaaaaagaauauauggacagacaaggaaaaacuccacuaggacuaguagacuuauucgucuuuucaacaucauuuuaucuuauuuccauauuccuacauuuaguaaaaaucccaacccacagacauguaauagguaaaccaugcccaaaaccacauagauuaaaccauaugggaauauguuccugcggacucuacaaacaccccggaguaccagucaaauggaaaagauaa

SEQ ID NO: 5679 - RNA, 1473 nt, Artificial Sequence
  derived and/or modified protein sequence (opt6) from LASV(Lassa virus/H.sapiens-wt/NGA/2016/ISTH_0759;Clade II)__AVO03593__GPCstabilized
augggucaaaucauaacauucuuccaagaaguaccacacguaaucgaagaaguaaugaacauaguauuaauagcacuaucccucuuagccauacuaaaaggaauauacaacguagcaacuuguggacuauucggucuagucucauuccuauuauuauguggaagauccugcucaacuacuuauaaaggagucuaugaacuacaaacacuagaacuagacauggcaucacuuaacaugacaaugccuuuaucaugcacuaaaaacaauucacaccacuacaucauggucggaaacgaaacaggacuagaauuaacacuaacaaacacaucaauaaucaaccacaaauucugcaaccuauccgacgcacacaagaaaaaucucuaugaccauacacucaugucaauaauaucaacauuccaccuaucuaucccuaauuuuaaucaauacgaagcaaugucaugcgacuucaauggaggaaaaauauccguacaauacaaccuaucucacacauaugccguagacgcagcuaaccacugcggaacaauagcaaacggaguauuacaaacauucaugagaauggcauggggaggaaguuacauagcacuagacaguggauguggaucaugggacugcauaaugacaucauaccaauacuuaauuauccaaaauacaucaugggaagaccacugucaauucucaagaccaagcccaauaggauacuuaggacuauuaucucaaagaaccagagacauauacauaucucgccgaagaagaggaacauucaccuggaccuuaucagacuccgaaggaaacgaaacaccaggaggcuacugucuuacaagauggaugcuaaucgaagcagaauuaaaauguuuuggaaacacagcaguugcaaaaugcaaugaaaaacaugacgaagaauuuugcgacaugcuacgacuauucgauuucaauaaacaagcaauaagacgacuaaaaacuccagcccaaaugucaauacaacuaauaaacaaagcaguaaacgcacuaauaaacgaucaacuaauaaugaaaaaccaccucagagauauaaugugcauaccuuacuguaacuacucaaaauauugguacuuaaaccacacuguuacuggaaaaacauccuuaccuagaugcuggcuaguauccaacggaucauaucuaaacgaaacucacuuuucugacgacauagaacaacaagcagauaacaugaucacagaacuccuacaaaaagaauacaucgacagacaaggaaaaacaccacuaggauuaguagaccucuucguauuuuccacaucauucuacuuaauaucaauauuccuacacuuaguaaaaauaccuacacacagacacguaauaggaaaaccauguccaaaaccccaccgcuuaaaccacaugggcauaugcucauguggacuuuacaaacacccaggcguaccaguaaaauggaaacgcuaa

SEQ ID NO: 5680 - RNA, 1473 nt, Artificial Sequence
  derived and/or modified protein sequence (opt6) from LASV(Lassa virus/H.sapiens-wt/NGA/2016/ISTH_0777;Clade II)__AVO03615__GPCstabilized
augggacaaauaauuacuuucuuccaagagguaccacacguaauagaagaaguaaugaacauaguauuaauagcauugucacuacuugcaauacuaaaaggcauauauaacguagcaacaugcggacuacucggacuuauaucauuucuacuauuaugcggcagaucauguucaaccacauacaaaggugucuacgaauuacaaacauuagaacuugauauggcaaacuuaaauaugaccaugccccuuuccugcaccaaaaacucaucacaucacuacauaauggucggaaacgaaacaggauuggaacuaacauuaaccaacacaucaaucaucaaccacaaauucugcaaucuaucagacgcacacaaaaaaaaccuauacgaccacgcacuaaugucaauuauauccacauuucaccucucaauaccaaauuuuaaccaauacgaagcaaugagcugugacuucaacggaggaaaaauaaguguacaauacaacuuaucacacgccuacgcagucgaugcagcaaaccauugcggaacaauagcaaacggcguacuacaaacauucaugagaauggcauggggaggaucauacaucgcacuagacuccggaugcggaaauugggauuguauaaugacaucauaucaauacuuaauaauacaaaacacaaccugggaagaccacugccaauucucaagaccauccccaaucggauaccugggacuauuaucacaacgaacaagagacaucuacaucagcagaagaagacgaggaacauucacauggacacuauccgacucagaaggaaaugaagcaccaggcggauacugcuuaacaagauggaugcucaucgaagcagaacucaaaugcuucggaaacacagcaauagcaaaauguaacgaaaaacacgacgaagaauucugcgacaugcuacgccuauucgacuucaacaaacaagccauaagaagauuaaaaacaccugcacaaaugucaauccaacuaauaaacaaagcaguaaacgcauuaauaaacgaccaacuuauaaugaaaaaucacuuaagagacaucauguguauaccauacuguaacuacucaaaauacugguaccucaaucacacaguaacagguaaaacaucauuaccccgaugcuggcuaauaucaaacggcucauaucuaaacgaaacacacuuuucugacgacauugaacaacaagccgacaacaugaucaccgaacuacuacaaaaagaauacauggacagacaaggaaaaaccccccuaggacuagucgacuuauucguauucucuacaucauucuaccuaauuucuauauuccuacaucuaguaaaaauuccuacacacagacacauaguaggaaaaccuugccccaaaccacaccguuuaaaccauaugggcaucuguaguuguggauuauacaaacacccaggcguacccguuaaauggaaacgauaa

SEQ ID NO: 5681 - RNA, 1473 nt, Artificial Sequence
  derived and/or modified protein sequence (opt6) from LASV(Lassa virus/H.sapiens-wt/NGA/2016/ISTH_0779;Clade II)__AVO03655__GPCstabilized
augggccaaauaauaacuuucuuccaagaaguaccgcauguagucgaagaaguaaugaauguaguacuaaucgcauuaucauuauuagcaauccuaaaaggaauauacaauauagcaacaugcggauuauuuggacuaauaucuuuccucuuauuaugcggaagaaguugcuccacaacauacaaagggguauacgaacuacaaacauuagaacuagacauggccaaccucaauaugaccaugccauuauccuguacaaaaaacaacagccaccacuacauaaugguaggaaacgaaacaggacuagaacuaacccuaacaaacacaucaauaaucaaccauaaauucugcaacuuauccgaugcacacaaaaaaaaccuauacgaccauacacucaugucuauaauaagcacauuucaccuaucuauaccaaacuuuaaccaauacgaagcaaugucaugugacuuuaacggcggcaaaauaucaguacaauacaaccuaucacacggcuaugcaguagaugcagcaaaccacugcggaacaauagcaaauggaguacuacaaaccuuuaugagaauggcauggggaggaucauacaucgcacucgacagcggauguggaaauugggacuguauaaugacaucauaucaauaucucgucauacaaaacacaacaugggaagaccauugccaauucucaagaccauccccaauagguuaccuaggccuacuaucacaaagaacaagagacauauauauaucaagacgacgaagaggcacuuucacauggacuuuaucugauuccgaaggaaaugacgcaccagguggauauugcuuaaccagauggaugcuaauagaagcagaauuaaaaugcuucggaaacaccgcaaucgcaaaaugcaaugaaaaacacgacgaagaauuuugugacauguuaagacuauucgacuucaacagacaggcaauaaaacgacuaaaaacucccgcccaaaugucaauacaauuaauaaacaaagcaguaaacgcacuaauaaaugaccaauuaaucaugaaaaaccaccuacgagacauaauguguauaccauacuguaacuacuccaaauacugguacuuaaacaacaccgucacuggcaaaucaucacuaccaaaaugcuggcuaguaucaaauggcucauaucuaaacgaaacacacuuuuccgacgacauugaacaacaagccgauaacaugauaacagaaauguuacaaaaagaauacauagacagacaaggcaaaacaccacuaggacuaguagaucuauucguauucucaacauccuuuuaccuaauaucaauauucuuacaccuaguaagaauaccaacucauagacacauaacuggaaaaccaugcccaaaaccacacagacuaaaucauauggguaucugcuccugcggauuauacaaacaaccaggcguacccguaaaauggaaaagauaa

SEQ ID NO: 5682 - RNA, 1473 nt, Artificial Sequence
  derived and/or modified protein sequence (opt6) from LASV(Lassa virus/H.sapiens-wt/NGA/2016/ISTH_0917;Clade II)__AVO03535__GPCstabilized
augggacaaauaguaacauucuuccaagaaguaccacauguaauagaagaaauaaugaacauaguccuaauaacacuaucacuacuagcuauauuaaaaggaguuuacaaucuagcaacauguggauuaauaggauuaauaacauucuuauuucuaugcggaagaaguugcaguaugacauauaaagguaacuaucaacuagaaacacuagaacuuaacauggaaaugcuaaacaugacaaugccauuaucuugcacuaaaaacaacucacaccauuacauaagagucggaaaugaaacaggucucgaauuaacacuaacaaacacaucaauaauacaacacaaauuuuguaaucuaucugaugcacacaaacgcaaucuauaugaccauagcuuaaugucaauaguuucaacauuccaucuaucuauaccaaauuucaaccaauacgaagcuaugagcugcgacuuuaacggaggaaaaauaucuauacaauauaacuuaucacauacauaugcaggagaugcagcaaaacauugcggaacauuagcuaauggaauacuacaaacuuucaugagaauggccuggggaggaucauacauagcccuagacuccggcuguggcggaugggacuguauaaugaccaauuaccaauaucuaauuauacaaaauguaacaugggaagaccacugucaauuuucgagacccucuccaauaggauacuuaggacuacuuucccaaagaaccagagaaguuuacauauccagaagaagaagaggaacauucacuuggacauuaucagacucagaaggaaaugaagcacccggcggauauugcuuaacaagauggaugcuaauagaagcagaacuaaaaugcuucggaaacacagccguagccaaaugcaaugaaaaacacgacgaagaauuuugugauauguuacgccucuucgauuucaacaaacaagcaauucgacgauuaaaagcacccacacaaaugucaauacagcuaaucaacaaagcaguaaacgcauuaauaaacgaccaacuaauaaugaaaaaccacuuaagagacauaaugugcaucccauacugcaacuauucaaaauauugguaucuaaaucacaccauuacaggacgcacaucucuaccaagaugcuggcuaguaucaaacggcuccuauuuaaaugaaacacacuucuccgaugauauagaacaacaagcagauaacaugauaacagaaaugcuacaaaaagaauauaucgacagacaaggaaaaacaccccuuggauuaguugaccuauucguauucucaacaaguuucuaucuaaucaguauauuccuacaccuaguaaaaauaccaacccacagacauauagucggaaaaucauguccaaaaccacauagauuaaaccacaugggcauaugcucaugcggacuauacaaaagaccaggaguauccguuagauggaaaagauaa

SEQ ID NO: 5683 - RNA, 1473 nt, Artificial Sequence
  derived and/or modified protein sequence (opt6) from LASV(Lassa virus/H.sapiens-wt/NGA/2016/ISTH_1006;Clade II)__AVO03643__GPCstabilized
augggacaaauaauaacauucuuccaagaaguaccacauguaauagaagaagugaugaauauaguccucaucgcacuaucacuauuagcaauacuaaaaggaauauacaacguagcaacaugcggauuauuuggccuagucgcauuuuuacuauuaugcggcagaagcuguucaacaacauacaaaggaguauacgaauuacaaacauuagaauuggacauggcaucacuaaauaugacuaugccacuaagcuguacaaaaaauaacucacaccauuacauaaugguaggaaaugaaacaggacuagaauuaaccuuaacaaauacaucaauuauaaaccacaaauucugcaaccuaucugacgcccacaaaaaaaaccuuuaugaccacgcauuaauguccaucauauccaccuuccacuuaucuauaccaaacuucaaccaauacgaagcaaugggcugugacuuuaacggaggaaaaauaucaguccaauauaaucuaucacacucauacgccguagacgcagcuaaccauuguggaacaauagcaaacggaguacuacaaacauucaugagaauggcauggggaggaucuuauauagcauuagacucaggaugcggaucaugggauuguauuaugacuucauaccaauaccuaauaauacaaaauacaaccugggaagaucacugccaauucucccguccaucaccaauaggcuaccuaggcuuauuaucacaacgaacacgagacauauacauaucaagaagaagaaggggaacauucacuuggacacuaucugauucagaaggaaaugaaacaccaggcggauacugucuaacacgcuggaugcuaaucgaagcagaacuaaaaugcuucggaaacaccgccguagcaaaaugcaaugaaaaacaugacgaagaauucugcgauaugcuacgacuauucgacuucaauaaacaagcaauaagaagacuaaaaacaccagcucagauguccauacaauuaauaaacaaagcaguuaacgcucuaauuaacgaccaacuaauaaugaaaaaccaccuaagagauauaaugugcaucccauauugcaacuauucaaaauacugguaccucaaucauacaguaacaggacgaacaucucuaccaagauguuggcuagucucaaacgguucauacuuaaacgaaacacacuuuucugaugacauagaacaacaagcagacaauaugaucacagaacuauuacaaaaagaauacauggauagacaaggaaaaacaccacucggauuaguagauuuauucguauucagcacaucauucuauuuaaucuccauauuccuacauuuaauaaaaauaccaacacacagacauguaauaggaaaaccauguccaaaaccacacagauuaaaucacaugggaauauguucauguggacuauacaaacacccuggcguuccaguaaaauggaaaagauaa

SEQ ID NO: 5684 - RNA, 1473 nt, Artificial Sequence
  derived and/or modified protein sequence (opt6) from LASV(Lassa virus/H.sapiens-wt/NGA/2016/ISTH_1026;Clade II)__AVO03589__GPCstabilized
augggucaaaucauaaccuucuuucaagaaguaccccacguaauagaagaaguaaugaauauaguauuaauagcacuaucacuauuagccauacuaaaaggaauauauaacguagcaacuugcggacuauucggccuaguaucauuccuauuauuaugcggaagaucuuguucaacaacuuauaaaggaguauacgaacuacaaacacuagaacuugacauggccucauuaaauaugacaaugccucuaucaugcacaaaaaacaacucccaccacuacauuauggucggcaaugaaacagguuuagaacuaacacuaacaaauaccuccauaauaaaccauaaauuuuguaacuuaucagacgcacauaaaaaaaacuuauacgaccaugccuuaaugucaauaauaucaacauuccaucuaucuauaccaaauuucaaccaauacgaagcaaugagcugcgacuuuaauggaggaaaaauuuccguccaauacaaccuaucacacgcauacgcuauagacgcagccucacacugugguaccauagcaaauggaguacuacaaacauucaugcgaauggccuggggaggaucuuacaucgcacucgacucaggauguggaucaugggacugcauaaugacaucauaccaauauuuaauaauacaaaacacaacaugggaagaucauugucaauuuucaagaccaucaccaaucggauaucuaggcuuacuaucacaaagaacuagagacauuuacauaucaagaagaagaagaggaacauuuacauggacacuaucagacucugaaggaaaugaaaccccaggaggauacugcuuaacaagauggauguuaaucgaagcagaacuaaaauguuucggaaauaccgcaguagcaaaaugcaaugaaaaacacgacgaagaauucugcgauauguuacgacuauucgacuucaacaaacaagccauacgaagacuaaaaacaccugcacaaaugucaauacaacucauaaacaaagcaguuaaugcauuaauaaacgaccaacuaauaaugaaaaaccaccuaagagauauaaugugcauaccauauugcaauuacuccaaauauugguacuuaaaccacacuguaacaggaaaaacaucccuaccaagaugcuggcuaguaucaaauggauccuauuuaaacgaaacacauuuuagcgaugauauagaacaacaagcagacaacaugauuacagaacuacuacaaaaagaauaccuagaccgacaaggaaaaacaccacucggacuaguagaucuauucguauucucuacaucauucuaccuaauaucaauauucuuacaucuaguuaaaauaccgacacauagacauguaauaggaagacccugcccuaaaccacacagauuaaaccacaugggcauaugcucauguggacucuacaaacauccaggaguaccaguaaaauggaaacgcuaa

SEQ ID NO: 5685 - RNA, 1473 nt, Artificial Sequence
  derived and/or modified protein sequence (opt6) from LASV(Lassa virus/H.sapiens-wt/NGA/2016/ISTH_1070;Clade II)__AVO03651__GPCstabilized
augggacaaauaaucacuuucuuucaagaaguaccacauguaauagaagaaguuaugaauauuguacuaauugccuuaucucuauuagcaauccuaaaaggcauuuacaaugucgcaacaugcggccuauuuggacucguaucauuccuacuuuuaugcggcagauccuguucaaccacauauaaaggcguauaugaacuacaaacccucgaauuagauauggcaucauuaaacaugacaaugcccuuaucaugcaccaaaaauaauucacaucacuauauaaugguaggaaaugaaacaggauuagaacucacauuaacaaacacaucaauaauaaaucacaaauuuugcaaccuaucugacgcccauaaaaaaaaccuauacgaucacgccuuaaugucaauaauaucaacauuccauuuaucaauaccaaacuuuaaucaauacgaagccaugucaugcgacuuuaacggaggaaaaaucucaguccaguauaaucuaucucacacauuugcaguagacgcagcaaaucacuguggcaccauagcaaauggaguacuccaaaccuuuaugcgaauggcauggggaggaucuuauauagcacuagacucaggauguggcucaugggacugcauaaugacuucuuaccaauaccucauaauacaaaacacaaccugggaagaucauugccaauucucaagaccaucaccuauaggcuaccuaggcuuacuaucccaaagaacaagagacaucuauauaucaagaagaagaagaggaacauucacauggacccucuccgacucagaaggcaacgaaaccccaggaggauacugccuaacacgauggaugcuaauagaagcagaacuaaaauguuuuggaaauaccgcaguagcaaaaugcaaugaaaaacacgaugaagaauucugugacaugcuacgauuauucgacuucaacaaacaagcaauaagaagacuaaaaacacccgcacaaaugucaauacaauuaauaaacaaagccgucaacgcuuuaaucaacgaccaauuaauaaugaaaaaucaucuaagagacauaaugugcauaccauacugcaauuacucaaaauauugguaccuaaaccacacaguaacaggaaaaacuucacuaccaagaugcugguuagucucaaacggauccuaucuuaaugaaacacacuuuucagacgacauagaacaacaagcagacaacaugauaacugaacuccuacaaaaagaauacauggauagacaaggaaaaacaccacuaggauuaguagauuuauucguauucucaaccuccuucuaccuaauaucuauauuccuacaccuaguaaaaaucccaacucaucgacauauaauaggaaaaccaugcccaaaaccacacagauuaaaucauaugggaauaugcucauguggauuauacaaacauccaggaguaccaguaaaauggaaacgauaa

SEQ ID NO: 5686 - RNA, 1473 nt, Artificial Sequence
  derived and/or modified protein sequence (opt6) from LASV(Lassa virus/H.sapiens-wt/NGA/2016/ISTH_1123;Clade II)__AVO03645__GPCstabilized
augggccaaauuauaacauucuuccaagaaguuccacaugucauagaagaaguaaugaacauaguacucauagcauuaucucuccuagcaauacuaaaaggcaucuacaacguugcaaccuguggauuauucggauuaguauccuucuuauuacuauguggcagaucaugcuccacaacauacaaaggaguauacgaauuacaaacauuagaacuugacaugggaucacuaaauaugaccaugccccuaagcugcaccaaaaacaacucccaucacuacauaaugguagguaaugaaacaggacuagaacuaacacuaacaaacaccucaauaaucaaucauaaauucuguaaucuaucagacgcacacaaaaaaaaucuauaugaccacgcuuuaaugucaauaauaucaacauuccaccucucaauacccaacuuuaaccaauacgaagcaauguccugcgauuucaacgguggaaaaauaucaguacaauacaacuuaucucaugcauacgccguagacgcagcaaaccacugugguaccauagcaaacggaguucuacaaaccuuuaugcgaauggcauggggaggaucauacaucgcucucgacuccggaugcggaaguugggacugcauaaugacaucauaccaauacuuaauaauacaaaacaccucaugggaagaccacugucaauucagcagaccaucccccauaggcuaccucggacuacuaucacaacgaacaagagacaucuacauaucacgacgaagaagaggcacauucacauggacauuaucugacucagaaggaaaugaaacacccggaggauacuguuuaacccgauggaugcucauagaagcagaacuaaaaugcuuuggcaacacugcagucgcaaaauguaaugaaaaacaugacgaagaauuuugcgauaugcucagacucuucgauuucaacaaacaagcaauaagacgauuaaaaacaccugcacaaauguccauacaacuaauaaacaaagcaguaaaugcacuaauaaacgaccaacucauaaugaaaaaccaccuacgagauauaaugugcauaccauacugcaacuacucaaaauacugguauuuaaaccacacagucaccggaaaaacaucauuacccagaugcuggcucguaucaaauggauccuauuuaaacgaaacacacuucucagacgacauugaacaacaagccgacaacaugaucacagaacuacuacaaaaagaauauaucgaucgacaaggcaaaacaccccuaggacuaguagaccuauucguauucaguacaucauucuaccuaaucucaauauuucuacacuuaguaaaaauaccaacccaccgacacguaauaggaaaaccaugccccaaaccacaucgauuaaaccacaugggcauaugcucauguggauuauauaaacaucccggaguacccguaaaauggaaaagauaa

SEQ ID NO: 5687 - RNA, 1473 nt, Artificial Sequence
  derived and/or modified protein sequence (opt6) from LASV(Lassa virus/H.sapiens-wt/NGA/2016/ISTH_1150;Clade II)__AVO03627__GPCstabilized
augggacaaguaaucaccuuuuuucaagaaauaccacacgucaucgaagaaguaaugaacauaguccuaauaacccuaucccuucuagccauucuaaaagguauauauaauguugcaacauguggccuauucggacuaaucucuuuucuacuacuaugcggccgauccugcuccacaacauacaaaggagucuacgaauuacaaacacuagaacuagacauggcuaaccuaaacaugacuaugccccuaucaugcacaaaaaacuccucacaucauuacauaaugguaggaaacgaaacaggacucgaauuaacucuaacuaacacauccauaauaaaccacaaauucuguaaccuaucagacgcacacaaaaaaaaccuauaugaccacgcacuaaugucaaucaucucaacuuuccacuuaucaauacccaauuucaaccaauacgaagcuaugucaugcgacuuuaauggaggaaaaauaucaguccaauacaaccuaucacacgcauacgcaguagaugccgcaaaccacugcgggaccauagcaaacggaguacuacaaacauucaugagaauggcauggggaggaucauacaucgcucuagauucuggaugcggaaauugggacugcaucaugacaucauaccaauauuuaauaauccaaaauacaacuugggaagaucacugucaauuuucaagaccaucaccaaucggcuacuuaggauuacuaucacaaagaacaagagauauauacauaucccgaagacgccguggaaccuucacauggacacuaucagacagcgaaggcaaugaagcaccagguggauacugccuaacucgauggaugcuaauagaagcagaacuaaaaugcuucggaaauacagcaauagccaaauguaaugaaaaacaugaugaagaauucugcgacaugcuacgacuuuucgacuuuaacaaacaagcaauaagaagacucaaaacuccagcacaaaaauccauccaacuaauaaauaaagcaguaaacgccuuaauaaaugaccaauuaauaaugaaaaaccaccuaagagacauaauguguaucccauacugcaacuauucaaaauacugguaucuaaaccacaccguaacaggaaaaacaucacuaccaaaaugcuggcuaauaucaaauggaucuuaccucaaugaaacacacuuuucagacgacauagaacaacaagcugauaacaugaucacagaacucuuacaaaaagaauacauggaccgacaaggaaaaaccccuuuaggauuaguagacuuauuuguuuuuucaacaucguucuacuuaauaucuauauuucuacauuuagucaaaauaccaacacacagacauauaguaggacgaccuugccccaaaccacacagauuaaaccacaugggaaucugcucaugcggccuauacaaacacccaggcgucccaguaaaauggaaacgauaa

SEQ ID NO: 5688 - RNA, 1473 nt, Artificial Sequence
  derived and/or modified protein sequence (opt6) from LASV(Lassa virus/H.sapiens-wt/NGA/2016/ISTH_1174;Clade II)__AVO03555__GPCstabilized
augggacaaauaauaaccuucuuucaagaaguaccacacguaauagaagaaguaaugaacauaguacuaauagcauuaucccuacuagccauauuaaaaggcaucuacaacguagcaacaugcggauucuuuggucuaguaucuuucuuacuacucugcggacgaucaugcucaacaauauacaaaggaguauaugaacuacaaacacuagaacucgauauggcaucccuaaacaugacuaugcccuuauccuguaccaaaaacaauucacaucacuacauaaugguagguaacgaaacaggccuagaacuuacauuaacaaauacaucuauuauaaaucauaaauucugcaacuuaucagaugcacacaagaaaaaccuauaugaccacgcacuaaugucaauaauaucaacauuucaucuaaguaucccacacuucaaccaauacgaagcuaugucaugcgacuucaacggaggaaaaauaucaguacaauauaauuuaucacacacauaugccguagaugcagcuaaucacugcggaacaauagcaaacggaguacuacaaacauucaugagaauggcauggggcgguuccuauauagcauuagacaguggaugcgguucaugggacugcaucaugacaucauaccaauaccuaauaauucaaaacaccacaugggaagaucauugucaauucucacgaccaucuccaauaggauaccuaggacuauuaucccaaagaacaagagacauauauaucucaagaagaagaagaggaacauuuaccuggacccuauccgacucagaaggaaaugaaacacccgguggcuacugccuaacaagauggaugcucauagaagcagaacuuaaaugcuucggaaauaccgcuguagcuaaauguaacgaaaaacaugaugaagaauuuugugacaugcuaagacuauuugauuucaauaaacaagccauaagaaaacuaaaaaccccagcacaaauguccauacaacuaauaaacaaagcaguaaacgcauuaauaaacgaccaacuaauaaugaaaaaccaucuccgugacauaaugugcauaccauacugcaauuacucaaaauacugguacuuaaaucacacaguaacaggaaaaacauccuuaccucgaugcugguuaguaucuaauggauccuaucucaacgaaacacacuucucagacgacauagaacaacaagcagauaacaugauaacagaacucuuacaaaaagaauacauggacagacaaggcaaaacaccccuaggauuagucgaccucuucguauucucaacaucuuuuuaccuaaucucaauauuucuacacuuaguuaaaauaccaacacauagacacguuauaggcaaacccuguccaaaaccccaccgucuuaaccauaugggaaucuguucaugcgguuuauauaaacacccaggaguaccaguaaaauggaaacgauaa

SEQ ID NO: 5689 - RNA, 1473 nt, Artificial Sequence
  derived and/or modified protein sequence (opt6) from LASV(Lassa virus/H.sapiens-wt/NGA/2016/ISTH_1207;Clade II)__AVO03599__GPCstabilized
augggacaaauuauaacauucuuccaagaaguaccacacguaauagaagaaguaaugaacauaguacuaauugcauuaucacuacucgccauacuuaaagguaucuauaacguagccacaugcggauuauuuggauuaguaucauucuuacuacuuugcggcagaucauguaguaccacauauaaaggaguauacgaacuacaaacauuagaacuagacaugacaucacuaaauaugaccaugccucucuccuguacaaaaaauaacucacaucauuauauaaugguuggcaacgaaacaggauuagaacuuacccucacaaacacaucaaucauaaaucacaaauucugcaaucuaucagacgcccauaaaaaaaaccuauacgaccaugcauuaaugucaauaauaucaaccuuucaucucucaauaccaaauuucaaucaauaugaagcaaugucaugcgacuucaacggaggaaaaauauccguacaauacaaccuaucacacacauacgcuguagacgccgcaaaucacugcggaacaauagcaaauggaguauuacaaacauucaugcgaauggcauggggaggaucauacauagcacucgauucaggcuguggaucuugggauuguauaaugacuucauaccaauaccuaaucauucaaaacacuacaugggaagaccacugccaauuuucacguccuuccccaauaggauaccuaggacuucucucccaaagaacaagagacauauacauaucaagaagaagaagaggaacauucacuuggacacucuccgacuccgaaggaaacgauacacccggaggcuauugcuuaaccagauggauguuaauagaagcagaauuaaaauguuucggaaacaccgcuguagcaaaaugcaacgaaaaacaugacgaagaauucugcgacauguuaagacuauucgacuucaacaaacaagccauuagacgucuaaaaacaccagcacaaaugucaauacaauuaaucaacaaagcaguaaacgcccuaauaaacgaccaacuaauaaugaaaaaucaccuaagagacauaauguguaucccauacugcaauuauuccaaauacugguaccuaaaccacacaguaacaggaaaaacaagccuaccaagauguuggcuuguaucuaauggaucauaccuuaacgaaacacacuuuucagacgacaucgaacaacaagcagacaacaugaucacagaacuacuacaaaaagaauacaucgauagacaaggaaaaacaccacuaggauuaguagaucucuuuguauuuucaacauccuucuaccuaaucucuaucuuccuucacuuagucaaaaucccaacacauagacacguaauaggaaaaccauguccaaaaccacacagacuaaaucacaugggcauauguucaugugguuuauauaaacauccaggcgucccuguaaaauggaaacguuaa

SEQ ID NO: 5690 - RNA, 1473 nt, Artificial Sequence
  derived and/or modified protein sequence (opt6) from LASV(Lassa virus/H.sapiens-wt/NGA/2016/ISTH_1306;Clade II)__AVO03623__GPCstabilized
augggacaaauaauaacauuuuuccaagaaguaccacacguaauagaagaaguaaugaauauaguccuaaucgcacuaucacuauuagcaauacuaaaaggaauauacaacgucgcaacauguggauuauucgguuuaguaucauuucuacucuuauguggaagauccugcucuaccaccuauaaaggaguauacgaacuacaaacccuagaacuagacauggcaucacuaaacaugacuaugccacuaucaugcacaaaaaacaacucacaccacuacauuaugguuggaaacgaaacaggacuagaacuuacacuaacuaauacaucaauuauaaaccacaaauucugcaaccuaucugaugcacauaaaaaaaaccuauaugaccacgcauuaauguccauaauaucaacauuccaccuaucaauacccaacuucaaccaauaugaagcaauguccugugacuucaacggcggcaaaauaucaguacaauacaauuuaucccacacauacgcaguagacgcagcaaaucauugcgguacaguagcaaacggaguacuacaaacauuuaugagaauggcauggggcggaucauacaucgcacucgacucaggaugcgguucaugggauugcauaaugaccucuuaccaauaccuaauaauacaaaauacuaccugggaagaccacugccaauucuccagaccaucccccauaggcuauuuaggacuccuaagucaacgcacacgagacaucuacaucucuagacgacgacgaggcacauucacauggacacuaucugacuccgaaggaaacgaaacaccaggagguuacugccuaacaagauggaugcucauagaagcagaacuaaaauguuuuggaaauacagcaguagcaaaaugcaacgaaaaacaugacgaagaauuuugugacaugcuaagauuauucgacuucaacaaacaagccauaagaagacuaaaaacuccagcucaaaugucaauccaacuaauuaauaaagcuguaaaugcacuaauaaaugaucaauuaauaaugaaaaaccacuuaagagauauaauguguauccccuacugcaauuacucaaaauacugguaccuaaaccacacaguaacaggucgaacaucauuaccaagauguuggcuaguuucaaauggcucauacuuaaacgaaacucauuuuucagaugacaucgaacaacaagcagauaacaugauaacagaacuccuacaaaaagaauauauagacagacaagguaaaacaccccuaggacuaguagaccuauuugucuuuucuacaucauucuaccuaauaucaauauucuuacaccucguaaaaauccccacacauagacacguaauaggaaaaccaugcccaaaaccccauagacuaaaucacaugggaauuugcucauguggauuauacaaacaccccggaguaccagucaaauggaaaagauaa

SEQ ID NO: 5691 - RNA, 1473 nt, Artificial Sequence
  derived and/or modified protein sequence (opt6) from LASV(Lassa virus/H.sapiens-wt/NGA/2016/ISTH_1311;Clade II)__AVO03575__GPCstabilized
augggacaaaucgucacauucuuucaagaaguaccccacguaaucgaagaagucaugaauauaguacuaaucgcuuuaucacucuuagcaauacuaaaaggaauauacaauguugcaacaugcggacuauuuggacuaauaucauucuuacuauuauguggaagaucuugcucuacaacauacaaaggaguauaugaacuccaaacacuagaacuagacauggcaaaccuaaacaugacuaugccucuaucaugcacuaaaaauaauucacaucacuacauaaugguagguaacgaaacaggacuagaacuaacccuaacaaacacaucaauaaucaaccacaaauuuugcaaucuaucagaugcacacaagaaaaacuuauacgaucacgcauuaaugucaauaauaucuacauuccaccucagcauaccuaacuucaaccaauacgaagcaaugucaugcgacuucaacggcggcaaaauuuccguccaauacaauuuaucacacgcauaugcaggcgaugcagccucacauugcggaacaauagcaaacgguguccuacaaacauuuaugagaauggcauggggaggcucauacauagcacuagauucaggaugcggaaacugggauugcauaaugacaucauaccaauaccuaauaauacaaaacacuaccugggaagaucacugccaauuuucacgacccucuccaaucggcuaucuaggacucuuaucacaacgaacaagagauaucuacaucucaagaagaagacgaggcacauuuacauggacuuuaucagacucagaaggaaaugacgccccaggcggauauugccuaacuagauggaugcucauagaagcagaauuaaaaugcuucggaaauacagcaauagcuaaaugcaacgaaaaacacgacgaagaauuuugugacaugcuaagacuauuugacuucaacaaacaagcaauaaaaagacuuaaaacaccagcacaaauguccauacaacuaauaaacaaagcaguaaacgcacuuauaaacgaucaauuaauaaugaagaaccauuuaagagacauaauguguauaccauauuguaacuacucaaaauauugguaucuaaaccauacaacaacaggaaaaacaucacuuccaaaaugcugguuaauaucaaacggaucauaucuaaacgaaacacacuucagugaugacauagaacaacaagccgacaacaugauuacagaacuucuacaaaaagaauaccuagauagacaaggcaaaacaccacucggacucguagaccuauucgucuucucuaccucauucuaccucauauccauauuuuuacaccuaauaaaaauaccaacacauagacacauagucggaagacccugcccaaaaccccaucgacuaaaccacaugggcauaugcucaugcggauuauacaaacacccuggcguaccagucaaauggaaaagauaa

SEQ ID NO: 5692 - RNA, 1473 nt, Artificial Sequence
  derived and/or modified protein sequence (opt6) from LASV(Lassa virus/H.sapiens-wt/NGA/2016/ISTH_1423;Clade II)__AVO03577__GPCstabilized
augggccaaaucguaacguuuuuucaagaaguaccccacguaauagaagaaguaaugaauauaguucuaauagcuuuaucauuauuagcaauauuaaaagguauauacaacguagccacaugcggucuauucggacuaguauccuuccucuuacuauguggacgcucaugcucaacaacauauaaaggaguauaugaacuacaaacacuagaauuagacauggcaaauuuaaacaugacaaugccacuaucauguacaaaaaacaacucccaccauuauauaaugguaggaaaugaaacaggacucgaacuaacauuaaccaauacaucaaucauaaaccauaaauuuugcaaccuaucugacgcacacaaaaaaaaucuauacgaccaugcauuaaugucaaucauaagcacauuccaccuaucaauuccaaauuuuaaucaauacgaagcaaugucaugcgauuuuaacggaggcaaaaucucuguccaauacaacuuaucacacucuuaugcaguagacgcugcaaaucacuguggaacaguagcaaacggaguacuacaaacauuuaugagaauggcauggggaggaucauacauagcacuagauucaggcuguggaucuugggacuguaucaugacaucauaccaauaccuaaucauacaaaacauaacaugggaagaccacugccaauucuccagaccaucaccaauagguuacuuaggauuauuaagucaaagaacaagagacaucuacauaucaagaagaagacgaggaacauucaccuggacuuuaucagacuccgaaggaaaagaaacaccaggugguuacugccuaacaagauggaugcuaauagaagcagaacuaaaaugcuucggaaacacagcaguagcaaaaugcaacgaaaaacaugacgaagaauucugcgacaugcuccgcuuauucgacuucaacaaacaagcaauaagacgucuaaaaacaccagcacaaaugucuauacaauuaauaaauaaagcaguaaacgcucuaauaaacgaccaacuaaucaugaaaaaccaccuacgcgauauaaugugcauuccauacugcaacuacuccaaauacugguaccuaaaccacacaguaacaggaaaaacaucacucccccguuguugguuaguaucaaacggcucauaccucaacgaaacacauuucuccgacgauauagaacaacaagcagacaacaugauaacagaauuacuacaaaaagaauacauagauagacaaggaaaaaccccacuaggccucguagaccuauucguauucuccacuuccuucuaccucauaucaauauuucuacaccuaguaaaaauaccaacacaucgacacauauuagguaaaccaugccccaaaccacauagacuaaaucauaugggaauaugcagcugcggacuauacaaacauccuggcguaccaguuaaauggaaacgauaa

SEQ ID NO: 5693 - RNA, 1473 nt, Artificial Sequence
  derived and/or modified protein sequence (opt6) from LASV(Lassa virus/H.sapiens-wt/NGA/2016/ISTH_1462;Clade II)__AVO03587__GPCstabilized
augggacaaauaauaacauucuuccaagaaguaccacauguaauagaagaaguaaugaacauaguccuaaucgcuuuaucacuauuagcaauccuaaaaggaaucuacaauguagcaacaugcgguuuauucggccuagucagcuuccuucuccuaugcggcagauccuguucaacuaccuacaaagguguauacgaacuacaaacauuagaacuagauauggcaucauuaaacaugacaaugccauuaucaugcaccaaaaauaacucccaccauuacauaaugguaggaaacgaaaccggccuagaauuaacacuaacaaacacuagcauaauaaaccauaaauuuugcaaucucucagacgcacacaaaaaaaaccuuuaugaccacgcauuaaugucaauaauaucgacauuucaccuauccauaccuaacuucaaccaauacgaagcaaugucuugcgacuuuaacggaggaaaaaucucaguucaauacaaucuaucucacaccuacgcaguagacgcagcaaaccauuguggaaccauugcaaacggagucuuacaaacauucaugagaauggcguggggaggauccuacauagcacuagauuccggaugcgguuccugggacugcaucaugaccucauaccaauacuuaaucauacaaaacacaacaugggaagaccacugucaauuuucaagaccaucaccaaucgguuaccuaggacuacuuucccaaagaacucgcgauauauauauaucaagaagacgacgaggaacauucacauggacauugucugacucugaagguaacgaaacaccaggaggauacugccuaaccagauggauguuaauagaagcagaauuaaaaugcuucggaaacacagccguagcaaaaugcaaugaaaaacacgacgaagaauucugcgacaugcuacgacuauucgacuucaauaaacaagcaauaagaagacuaaaaacaccagcacaaaugucaauacaacucauaaacaaagccguaaaugcauuaauaaacgaccaacuuauaaugaaaaaccacuuaagagacaucauguguaucccauacugcaacuacucaaaauacugguacuuaaaccauacaguaacaggaagaacaucucucccacgaugcuggcuaguaucaaacggaucauaucuaaacgaaacacauuucucagaugacauugaacaacaagccgacaacaugauaacagaacuauuacaaaaagaauacaucgaaagacaagguaaaacaccacuaggacucguugaccuauucguauucucuacaucauuuuauuuaauaucaaucuuccuacaccucauaaaaauaccaacccacagacauguaauaggcaaacccugcccaaaaccccauagauuaaaccacaugggaauaugcucuuguggauuauacaaacacccaggagucccaguaaaauggaaacgauaa

SEQ ID NO: 5694 - RNA, 1473 nt, Artificial Sequence
  derived and/or modified protein sequence (opt6) from LASV(Lassa virus/H.sapiens-wt/NGA/2016/ISTH_1472;Clade II)__AVO03605__GPCstabilized
augggacaaaucauaacauucuuccaagaaguuccacauguaauagaagaaguaaugaacaucguccuuaucgcacuaucauuauuagccauauuaaaaggaauauauaacguagcaacauguggacuauucggacuaguaucauuccuacuauuaugcggcagauccuguucaacaacauacaaaggcguauacgaauuacaaaccuuagaauuagacauggcaucauuaaauaugacaaugccacuaucaugcaccaaaaauaacucacaucauuacauuauggucggaaaugaaacaggacuagaacuaacccuaacaaacacuucuauuaucaaucauaaauucugcaaucuauccgaugcucauaaaaaaaaucuauacgaccacgcauuaauguccauaauaucaaccuuccauuuaucaauuccaaauuucaaccaauacgaagcuauguccugcgauuucaacggaggaaaaauaucaguccaauacaacuuaucacacacauaugccguagaugcagccaaucacugcggaacaauagcaaauggaguacuacaaacauucaugcgaauggccuggggaggaucauacauagcccuugacagcggaugcggaucaugggacuguaucaugaccaguuaccaauaucuaauaauccaaaacacuacaugggaagaccacugccaauucucacgaccaucucccauaggcuacuuaggacuauuaucacaaagaacacgcgacaucuacaucucacgacgucgccgaggaaccuucacauggacacuauccgacucugaaggaaacgaaacaccuggaggauauugccuaaccagauggauguuaauagaagcagaacucaaauguuucggaaauacagcagucgcaaaaugcaacgaaaaacacgacgaagaauucugcgauaugcuuagacuauucgacuuuaacaaacaagcaauaagaagauuaaaaacaccagcacaaaugucaauacaacuaauaaacaaagcaguaaacgcccucaucaacgaucaauuaauaaugaaaaaccacuuaagagauauaaugugcaucccauacuguaacuacucaaaauauugguaucuaaaccacacuguuacaggacgaacauccuuaccaagaugcuggcucguuucaaacggaucauacuuaaaugaaacccacuuuagugacgacauagaacaacaagccgacaacaugauaaccgaauuauuacaaaaagaauacaucgaccgacaaggaaaaacaccacuaggacuagucgaccuauucguauucucuacaucuuucuaucucauaucuauauuccuacaccuuauaaaaauaccaacacacagacauguaauaggcaaaccaugcccaaaaccacauagauuaaaccauaugggaauaugcucauguggacuuuacaaacaccccggagucccaguaaaauggaaacgauaa

SEQ ID NO: 5695 - RNA, 1473 nt, Artificial Sequence
  derived and/or modified protein sequence (opt6) from LASV(Lassa virus/H.sapiens-wt/NGA/2016/ISTH_1474;Clade II)__AVO03613__GPCstabilized
augggacaaauuaucacauucuuucaagaaguaccccacguaauagaagaaguuaugaacaucguucuaauagcccuaucucuacucgcaauacuuaaaggaauuuacaauguagcaacaugcggacucuucggccuaguaucauuccuucuacuaugcggaagauccugcucaacaacuuauaaaggcguauaugaacuacaaacacuagaacuagacauggcaucauuaaacaugaccaugccacuauccugcacaaaaaauaauucccaucacuacauaauggucggaaacgaaacaggucucgaauuaacauuaacaaauacauccaucauacaucacaaauuuuguaaccuaucagaugcacacaaaaaaaaccuauaugaccacgcucuaauguccauaauaucaacauuccacuuaucuauaccaaacuuuaaccaauacgaagcaauguccugcgacuucaacggaggcaaaauaucaguacaauacaaccuuucccacacauacgccguagacgcagcaaaccauugcggaaccauagcaaacggaguacuccaaacguucaugcguauggcauggggaggauccuauauugcacuagauagcggauguggauccugggacugcaucaugacaucauaucaauauuuaauuauacaaaacacaacaugggaagaucacugccaauucucuagaccaucaccaauaggauaccucggacuacuaucacaaagaacaagagacauauauaucucaagacgacgaagaggaaccuucacauggacccucucagacucagaaggaaacgaaacaccaggaggauacugccuaacacgauggaugcuaauagaagccgaacuaaaauguuucggcaacacagcuguagcuaaaugcaacgaaaaacacgacgaagaauuuugcgacaugcuaagacuauucgacuucaauaaacaagcaauaagaagauuaaaaacaccagcacaaaugucuauacaacuaauaaauaaagcaguaaaugccuuaauaaaugaucaauuaauaaugaaaaaucauuuaagagacauaauguguauaccauacuguaacuacuccaaauacugguaucucaaccauacaguaacuggaagaacaucacucccaagauguuggcuaguaucuaacggaucauauuuaaaugaaacucacuucuccgaugacauagaacaacaagcagacaacaugauaacagaacuccuacaaaaagaauacauugaucgacaaggaaaaacaccacuaggauuaguugaccuauuuguauucucuacaucauucuaccucauuucaaucuuucuacaucuaauaaaaauuccaacacaucgacauguaauaggaaaaccaugcccaaaaccccaucgucuaaaccacaugggaauaugcucauguggauuauacaaacaccccggagucccugucaaauggaaaagauga

SEQ ID NO: 5696 - RNA, 1476 nt, Artificial Sequence
  derived and/or modified protein sequence (opt6) from LASV(Lassa virus/H.sapiens-wt/NGA/2016/ISTH_1496;Clade II)__AVO03579__GPCstabilized
augggacaaauaaucacauucuuccaagaaguaccccacguaaucgaagaaguaaugaauauaguuuuaaucgcuuugucacuccuagcaauccuaaaagguguauacaacguagccacaugcggacuauuuggacuaguaucauuccuauuauuaugcggcagaucauguucaacaacaauauacaaagguguauaugaacuacaaacauuagaacuagauauggcuucauuaaauaugacaaugccuuuaucauguacaaaaaacaacagccaccacuacauaaugguaggaaaugaaacaggcuuagaacucacacuaacuaacacaucaauaaucaaccacaaauuuugcaacuuauccgacgcucacaaaaaaaaccucuacgaccacgcuuuaauguccauuaucucaaccuuccaccuuucaaucccaaacuucaaucaauacgaagcaauguccugcgacuucaauggaggaaaaauaagcguacaauauaaccuaucacacgcauacgcaguagacgcagcaaaccacugugguacaaucgcaaacggaguccuacaaacauucaugagaauggcauggggaggaucauacauagcacuagauucagguugucgaucaugggacugcauuaugacaucauaccaauacuuaauaauacaaaauacuacaugggaagaccauugucaauuuuccagaccaucaccaauaggauaccuaggacucuuaucacaaagaaccagagacauauacauaaguagaagaagaagaggcacauucacauggacccuaucagacucagaagguaacgaaacucccgguggauacugccuaacaagauggauguuaauagaagcugaacuuaaaugcuucggaaacacugcaguagcaaaaugcaacgaaaaacacgacgaagaauuuugugauaugcuuagauuauucgacuuuaacaaacaagccauaagacgacuaaaaacaccagcacaaaugucuauacaacuaauuaauaaagcagucaacgcauuaaucaaugaccaacuaauaaugaaaaaccacuuaagagacauaauguguauaccauacugcaauuacucuaaauauugguaccuaaaccacaccguaacaggcaaaacaucauuaccgagauguugguuaguaucaaauggaucauaucuuaacgaaacacacuuuucagacgauauagaacaacaagccgacaacaugauaacagaacuacuacaaaaagaauacaucgacagacaaggaaaaacuccacucggauuaguagaucuauucgucuucucaacaucauucuaccuaaucagcauauuccuacacuuaguaaaaauaccaacccacagacacgucauaggaaaaccaugcccaaaaccacaucgcuuaaaccauaugggaauuuguucaugcggauuauauaaacauccaggaguacccguaaaauggaaaagauaa

SEQ ID NO: 5697 - RNA, 1473 nt, Artificial Sequence
  derived and/or modified protein sequence (opt6) from LASV(Lassa virus/H.sapiens-wt/NGA/2016/ISTH_1541;Clade II)__AVO03553__GPCstabilized
augggacaaauagucacguucuuucaagaaguaccccacguaauagaagaaauaaugaauauaguccucaucacacuauccuuacuagccguauuaaaaggaauauacaacuucgcaaccugcggacuuaucggacucauaacuuuucucuuuuuaugcggaagaucaugcaguacaauauacaaagguaacuaccaauuacaaacucuagaacuaaauauggaaacacucaacaugaccaugccacucucauguaccaaaaacaacagccaucauuacauaagagucggaaacgaaacaggauuagaacucacacucacaaauguaaguauaauaaaccaccgcuuuugcaaccuauccgacgcccacaaaagaaaucuauaugaccacacacuaaugagcauaaucucaacauuccaccuaucuauaccaaauuucaaucaauaugaagccaugucaugugacuuuaacggagguaaaauauccguccaauacaaccuaucacacggauacgcaguagacgcagccaaacacugcggcacaguugcaaacggaguucuacaaacauucaugagaauggcauggggaggaucuuacauagcauuagacucuggauguggaaauugggauuguauaaugacaucauaucaauacuuaauaauucaaaacacaaccugggaagaccacugccaauucucacgaccauccccaauugguuaucuaggacuacuaucacaaagaacacgagacauauacaucucaagaagaagaagagguacauucaccuggaccuuaucagacucagaaggacgcgaaacaccaggaggcuacugccuaaccagauggaugcuaaucgaagcagaacuaaaauguuucggcaauacagccguagcaaaauguaaugaaaaacaugacgaagaauuuugcgauaugcuaagauuauucgauuucaauaaacaggccauacaaagauuaaaaacuccagcacaaauguccauacaacuuauaaacaaagcagucaacgcacucauaaaugaccaauuaauaaugaaaaaccaccuaagagauauaaugugcaucccauauugcaacuauucaaaauacugguacuuaaaccauacaacaacuggaaaaacaucucuacccaaauguuggcuagucacuaacggcucuuacuuaaacgaaacacacuucuccgacgacauagaacaacaagcagacaacaugauaacagaaauguuacaaaaagaauacauagacagacaaggaaaaacaccacuagguuuaguagacuuauucguauuuaguacaucauuuuacuuaauaucaauauuucuacaucuuauaaaaaucccaaaccacagacacauagugggcaaaccauguccaaaaccacacagacucaaccauaugggaauaugcagcugcggauuuuacaaacaaccaggaguacccguacgauggaaaagauaa

SEQ ID NO: 5698 - RNA, 1473 nt, Artificial Sequence
  derived and/or modified protein sequence (opt6) from LASV(Lassa virus/H.sapiens-wt/NGA/2016/ISTH_1546;Clade II)__AVO03537__GPCstabilized
augggacaaaucgucacauucuuucaagaaauaccucacgucguugaagaaauaaugaacauaguuuuaaucacacuaucuuuacuagcaauacuaaaaggacuuuauaacuuugcaacaugcggacuaauaggacuaauaacauuucucuuccuuugcgguagauccugcucaacaauauauaaaggaucauaucaacuacaagcauuagaacucaauauggaaacauuaaauaugacuaugccccucucaugcacaaaaaacaacucacaucauuauauuagaguaggaaaugaaaccggucuagaacuaacacuuaccaauacaucaauaauaaaccacaaauucuguaaucuuagugaugcacacaaaaaaaacuuauacgaccacacacuaauguccauaauauccacauuccacuuaucaauacccaacuuuaaucaauaugaagccaugucaugcgacuucaacggagguaaaauauccguacaauacaaccuaucacacucauacgcaggagaugcagcaagacauugcggaacuguagcaaacggagucuuacaaacauuuaugagaauggccuggggcggaucauacauagcacucgacucaggaugcggcaacugggacugcauaaugacauccuaccaauaccuaauaauacaaaacacaacaugggaagaucacugucaauucagcagaccuucaccaauaggauaucuaggucuacuuucgcaaagaacacgagauauauacaucuccagaagacgccgaggaaccuuuacauggaccuuaucagacucugaaggaaaagaaacaccaggaggauacugccuaacaagauggaugcuaauagaagcagaacuaaaaugcuucggaaauacagcaguagcuaaauguaacgaaaaacacgacgaagaauuuugcgacaugcuaagauuauucgauuucaacaaacaagccauacaaagacuaaaaacaccagcacaaaugucaauccaacuuauaaacaaagcugucaacgcccuaauaaacgaccaacuaauaaugaaaaaccaccuaagagauauaauguguauaccauacugcaacuacuccaaauauugguauuuaaaccacacaacaacaggaaaaacauccuugccccgaugcuggcuaguaucuaauggaucauaccuaaacgaaacucacuucucagaugacauagaacaacaagcagauaauaugauaacagaaauguuacaaaaagaauacauagacagacaaggaaaaacuccucuaggauuaguagacuuauucguauucucaacaucauuuuaccuaauuucaauauuccuucaccucaucaaaauaccaacacaccgacacauaguaggaaaaucaugucccaaaccacacagauuaaaccauaugggaauaugcucaugcggucuauauaaacaaccaggagugccaguaaaauggaaaagauaa

SEQ ID NO: 5699 - RNA, 1473 nt, Artificial Sequence
  derived and/or modified protein sequence (opt6) from LASV(Lassa virus/H.sapiens-wt/NGA/2016/ISTH_1591;Clade II)__AVO03647__GPCstabilized
augggccaaauaauaacauucuuucaagaaguaccucacguuauagaagaaguaaugaacauaguucuaauagcucuaucacuacuagcaauauuaaaaggaauuuauaauguugcaaccuguggacuauucggacuaguaucauuucuauuacuauguggacgaucaugcucaacaacuuauaaaggcguauacgaacuacaaacuuuagaacuagacauggcaucccuaaacaugaccaugcccuuauccugcacaaaaaacaacucacaucacuauauaaugguaggaaacgaaacaggccuagaacucacuuuaacaaauacaucaauaauccaacacaaauucugcaaucucucagacgcucacaaaaaaaaccuauaugaucaugcucuaaugucaauaguaucaacauuucauuuaucaaucccuaauuuuaaccaauacgaagcaaugucaugcgacuucaauggaggaaaaauaacaguccaauacaacuuaagccauucauacgcaauagacgccgcaaaccacugugguacagucgcaaauggaguauuacaaacauuuaugaggauggccuggggaggaagcuacauagcauuagacucaggaugcggaucaugggauugcauaaugacuucauaccaauaucuaauaauucaaaauacaacaugggaagaccauugccaauucucuagaccaucaccaaucggauaucuaggacuauuaagucaacgcaccagagacauuuauauaucaagaagaagacgcggaacauuuacauggacauuaucagacucagaaggaaaugaaacaccaggaggauauugucuuacaagauggauguuaauagaagcagaauuaaaaugcuucggaaacacagcuguagcaaaaugcaacgaaaaacacgacgaagaauucugcgauauguuacgacuauucgacuucaauaaacaagcaauacgaagacuaaaagcaccagcucaaaugaguauccaacuaauaaauaaagcaguaaacgcauuaauuaacgaccaauuaauaaugaaaaaccacuuaagagauauaaugugcauaccauacuguaacuacucaaaauacugguaccuaaaccauacaguaacaggacgaacaucuuuaccaagaugcuggcuaguaucaaacgguagcuaucucaaugaaacccacuuuuccgacgauauagaacaacaagcugacaauaugaucacagaacuacuccaaaaagaauauauggaccgacaaggaaaaacaccauuaggacuaguagaccuauucgucuucucaacaagcuucuaccuaauaucaauauuccuacaccuaguaaaaauuccuacucaccgacacauaaucggaaaaccaugccccaaaccacacagacuuaaccacauggguguaugcucaugcggacuauacaaacacccaggaguaccgguaaaauggaaaagauaa

SEQ ID NO: 5700 - RNA, 1473 nt, Artificial Sequence
  derived and/or modified protein sequence (opt6) from LASV(Lassa virus/H.sapiens-wt/NGA/2016/ISTH_1604;Clade II)__AVO03541__GPCstabilized
augggacaaauuguaacauucuuucaagaaguaccacacguaauagaagaaauaaugaacauaguacuaauaacauuaucacucuuagccauauuaaaaggaguauacaacuuagcaacauguggacuaauaggcuuaauaacauuucuauuccuaugcggaagauccugcucaaugaccuacaaaggaucauaccaacucgaaacauuagaacuaaacauggaaacauuaaacaugacaaugccauuaucaugcacaaaaaacaccagccaccauuacauaagaguagguaacgaaacaggauuagaacuaacucuuacaaacacaagcaucauaaaccacaaauucugcaaccuuuccgaugcccacaaaaaaaacuuauacgaccacucacuaaugagcauaguaucaacauuccacuuaucaauaccaaacuucaaccaauaugaagccaugucaugugauuuuaauggaggaaaaaucucaauacaguacaaucuaucucaugcauacgcaggagacgcggcaaaacauugcggaaccuuagcaaacggagucuuacaaacauuuaugcgaauggcauggggcggaucauacauagcacucgacucaggaugcggaaacugggacugcauaaugacaucuuaccaauacuuaauaauacaaaacacaacuugggaagaucacugccaauuuuccagaccuucacccauaggcuaucuaggauuacuaucacaaagaacuagagaaauauacauaucaagacgaagaagaggaacauucacauggacccuaucugauagcgaaggaaaugaagcacccggagguuauugucucacacgauggauguuaauagaagcagaauuaaaaugcuucggaaacgccgccguagcaaaaugcaacgaaaaacacgacgaagaauucugcgauaugcuaagauuauucgacuucaacaaacaagcaauacaaagacuaaaaacaccagcccaaaugucaauacaauuaauaaauaaagcaguaaacgcgcuaaucaacgaccaauuaauaaugaaaaaucaccuuagagacauaauguguauaccauauugcaacuacucaaaauauugguaccuaaaucacacaacaaccggaagaacaucucuuccacguugcugguuaguaagcaacggaucauaccuuaacgaaacacauuucucagacgacauagaacaacaagcagacaauaugauaaccgaaauguuacaaaaagaauauauagauagacaaggaaaaacaccccuaggacuaguagaccuauucguauuuuccacaagcuuuuaucuaauaucaauauuucuacaccuaguaaaaauaccaacacacagacacauaguaggaaaaucaugcccaaaaccacauagauuaaaccacaugggcauaugcucaugcggacuauauaaacaacccggaguuccaguaagauggaaacguuaa

SEQ ID NO: 5701 - RNA, 1473 nt, Artificial Sequence
  derived and/or modified protein sequence (opt6) from LASV(Lassa virus/H.sapiens-wt/NGA/2016/ISTH_1609;Clade II)__AVO03661__GPCstabilized
augggacaaauagucacauucuuccaagaaauaccacacgucauagaagaaguaaugaacauaguacuuauaacccucucacuacuugcaguacuuaaaggaauauacaacuucgcaacaugcggccuaauaggauuaauaacauuccuauuucuaugcggaagaucuugcucaacaauauacaaaggaucauaccaacuccaaaaacuagaauuaaacauggaaacacucaacaugacaaugccacuaucauguaccaaaaacucaucccaccacuacauccgaguaggaaacgaaacaggacucgaacuaacauuaacaaacaccucaauaauaucacacaaauucuguaaccuuucagacgcucacaaaaaaaaccuauaugaccacgcacucaugucaauaauaucuacauuccaccuaucaauacccaauuuuaaucaauacgaagcaaugucaugugauuucaauggaggaaaaaucucuguacaauauaacuuaucccacucauacgcuggcgacgcugcaagacacugcggcacacuagcaaacggaguacuacaaacauuuaugcgaauggcuuggggaggcagcuacauagcauuagacucaggcugcggaaauugggacuguaucaugacaucauaccaauuucuaauaauacaaaacacaacuugggaagaccacugccaauucagcagaccaucaccaaugggauaucuuggccuacucucucaaagaacaagagacauauacauaucaagaagaagaagaggaacauucacauggacucuaucagauucagaaggaaaagaaacaccuggaggauacugucuuacgagauggauguuaauagaagccgaacucaaaugcuucggcaacacugccguagcaaaaugcaacgaaaaacacgacgaagaauucugugacauguuaagacuauucgauuucaauaaacaagcaauacaaagacuuaaaacaccagcccaaaugucuauccaacuaauaaacaaagcugucaaugcccucauaaacgaccaacuaaucaugaaaaaccaccuaagagauauaauguguauaccauacugcaacuacucacaauacugguaccuuaaucauacuauaacaggaaaaacaucacuaccaaaaugcuggcuaguaucaaacggaucuuaccuaaacgaaacacacuucucagacgacauagaacaacaagcugacaauaugauaacagaaaugcuacaaaaagaauauauagacagacaaggaaaaacaccccuaggucucgucgaucucuuuguauucucaacaucguucuacuuaauaucuauauuccuacacuuaauuaaaauaccaacacaccgccacauuguaggaaaaucaugcccaaaaccacauagacuaaacagaauggguauaugcucaugcggacuauacaaacaaccaggcguaccagucaaauggaaacgauaa

SEQ ID NO: 5702 - RNA, 1473 nt, Artificial Sequence
  derived and/or modified protein sequence (opt6) from LASV(Lassa virus/H.sapiens-wt/NGA/2016/ISTH_1610;Clade II)__AVO03603__GPCstabilized
augggacaaauaauaaccuucuuccaagaaguaccacacguaauagaagaagucaugaauauuguccuaauagcccuaagccuacucgcaauauuaaaaggaaucuacaacgucgcaacaugcggauuauucgggcuaguaucauuucuuuucuuauguggaagauccuguuccacaacauauaaaggaguauacgaauuacaaacacuagaauuagacauggcaucauuaaauaugacuaugccucuaucaugcacuaaaaacaauucacaccauuauauaauggucggaaaugaaacaggacuagaacuaacacuaacaaacacaucuauaaucaaccacaaauuuugcaaccuaucagacgcccacaagaaaaaucuauaugaccacgccuuaaugucaaucauauccacauuccaucuaucaauaccaaacuuuaaccaauacgaagcaaugucaugcgacuucaacggaggcaaaauaucaguacaauacaacuuaucacacacauacgcaauagacgcagcaaaccacuguggaacaaucgcuaauggaguauuacaaacuuucaugcgaauggcauggggaggaucauauaucgcacuugacuccggcugcggaucuugggacugcaucaugaccagcuaccaauaucuuauuauacaaaacacaacaugggaagaccauugccaauucuccagaccauccccaauaggcuaccuaggauuauuaucacaaagaacacgagacauauacauaucuagaagaagaagaggaacauucacauggacacuaucagacucagaaggcaacgaaacaccuggaggauacugucuaacccgauggaugcuaauagaagccgaacuaaaaugcuuuggaaacacagccguagcaaaaugcaaugaaaaacacgacgaagaauuuugugacauguuacgacuauuugacuuuaacaaacaagccauaagaagauuaaaagcuccugcacaaaugaauauacaacuaauaaacaaagcaguaaacgcacuaauaaacgaccaacuaaucaugaaaaaccacuuaagagauauaaugugcauaccauacuguaacuacucaaaauacugguaccuaaaccacaccguaaccggacgaacaucacuaccaagauguugguuaguuuccaacggcucauacuuaaaugaaacacacuuuucagacgacauagaacaacaagcagacaauaugaucacagaauuauuacaaaaagaauacauggauagacaagguaaaacacccuuaggucuaguagacuuauucguauucucuacuucauucuacuuaauaucuauauuucuacaucuuauaaaaauccccacacacagacacauagucggaaaaccauguccaaaaccccaccgcuuaaaccacaugggaauaugcucaugcggccuauauaaacauccaggaguuccaguaaaauggaaaagauaa

SEQ ID NO: 5703 - RNA, 1473 nt, Artificial Sequence
  derived and/or modified protein sequence (opt6) from LASV(Lassa virus/H.sapiens-wt/NGA/2018/ISTH_0959;Clade II)__AVV65099__GPCstabilized
augggacaaauaaucacauucuuccaagaaguaccacacguaauagaagaaguaaugaauauaguucucauagcauuaucacuccuugcaauauuaaaaggaauauauaacguaguaacuugcggacuauucggccuaguauccuuucuacuacuauguggaagaucaugcuccaccaccuauaaaggaguauacgaacuucaaacacuugaacuagacauggccucauuaaauaugaccaugccauuaaguugcacaaaaaacaacucacaccauuacauaaugguaggaaacgaaacaggacuagaauuaacacuuacaaacacaucuauaaucaaucacaaauucugcaaucuauccgacgcccacaaaaaaaaccuauacgaccaugcacuuaugucaauaauaucaaccuuccaccuuucaauuccaaacuucaaucaauacgaagcaaugucuugcgauuucaacggaggaaaaauaucaguacaauacaaucuaucccaugccuacgcaauagacgcugcaaaucacugcggaacaauagcaaacggcguccuccaaacauucaugagaauggcauggggaggcucauauaucgcauuagacucuggauguggaucaugggauuguaucaugacaaguuaccaauaccuaauuauacaaaauacaaccugggaagaccacugccaauucucaagacccuccccaauaggauaucuaggacuauuaucacaacgaacuagagacauauauauaucacgaagaagaagagguacauucacauggacacuaucagacucagaaggaaacgaaacaccaggcgguuauugcuuaacacgauggaugcuaauagaagcagaacuaaaaugcuuugguaauacagcuguagcaaaaugcaaugaaaaacaugacgaagaauucugugacaugcucagauuauuugauuuuaacaaacaagcaauaagaagguuaaaaacaccugcacaaaugucaauacaauuaauaaacaaagccguuaacgcacuaauaaacgaccaauuaauaaugaaaaaccaucuucgcgacauaaugugcauaccauacugcaacuacucuaaauacugguacuuaaaccacacaguaacaggcaaaacauccuuaccacgaugcuggcuaguaucaaacgguuccuacuuaaacgaaacccacuucucagaugacauagaacaacaagcagacaacaugaucacagaauuauuacaaaaagaauacauagauagacaaggaaaaacaccacuaggccucgucgauuuauucgucuuuucaacaucauuuuauuuaauuucaauauuccuacauuuaguaaaaauaccaacacaccgacacguaauaggaaaaccuuguccaaaaccccacagauuaaaccauaugggaauauguuccugcggccuauauaaacauccaggcguucccgucaaauggaaacguuaa

SEQ ID NO: 5704 - RNA, 1473 nt, Artificial Sequence
  derived and/or modified protein sequence (opt6) from LASV(Lassa virus/H.sapiens-wt/NGA/2018/ISTH_1024;Clade II)__AVV65105__GPCstabilized
augggccaaauuauaacauucuuccaagaaguaccacaugucaucgaagaaguaaugaauauuguauuaaucgccuugucucuacuugcaauacuaaaaggaguauacaacguagcaacaugcgguuuauuuggccuaguaucauuucuacuacuaugcggaagaucauguuccaccaccuacaaaggaguauacgaacuacaaaccuuagaacucgacauggcaaaucuaaacaugacaaugccacuauccugcaccaaaaacaauucccaccacuacaucagaguuggaaacgaaacaggauuagaacuaacacucacaaacaccucaauaauaaaccacaaauucuguaauuuaucagacgcccacaaaaacaaccucuacgaccaugcccuaaugucaauaauaucaacauuucaccuaucaauaccaaacuucaaccaauaugaagcaaugucaugugacuucaacggaggaaaaaucucuguccaauacaaucuaucacacgcauacgcaguagacgccgcaaaccacugcgguaccauagcaaacggagucuuacaaacauucaugagaauggcuuggggaggaucuuauauagcuuuagacucaggauguggaucuugggacuguaucaugaccucauaucaauaccuaauaauacaaaauacaacaugggaagaucacugccaauucagcagaccaucaccaauaggauaccuaggucucuuaagucaacgaacaagagauauauacauaucccgaagacgacgcggaacauucacauggaccuuaucugacucagaagguaacgaaacaccaggagguuacugcuuaacaagauggauguuaauagaagcagaauuaaaauguuucggcaauacagccguagcaaaauguaacgaaaaacacgacgaagaauuuugcgauaugcuaagacucuucgauuucaacaaacaagcaaucagaagacucaaaaccccagcacaaaugucaauacaauuaauaaacaaagcaguaaacgcccuaauaaacgaccaauuaaucaugaaaaaucaucuacgagacauaauguguauaccauauuguaacuacucaaaauacugguaccuuaaccacacagucacaggaaaaacaucauuaccaagaugcuggcuaguaucaaacggcacauaccuaaacgaaacccauuucucagacgacauagaacaacaagcagauaacaugauaaccgaauuacuacaaaaagaauacauggaucgacaaggaaaaacaccauuaggauuaguagaccuauucguauucucaacaucauucuaccuaauauccauauuucuacaccuaguaaaaaucccaacacauagacaugucauuggaaaacccugcccaaaaccacaccgacuaaaccauaugggaauauguuccugcggccuuuacaaacauccuggaguacccguaaaauggaaaagauaa

SEQ ID NO: 5705 - RNA, 1473 nt, Artificial Sequence
  derived and/or modified protein sequence (opt6) from LASV(Lassa virus/H.sapiens-wt/NGA/2018/ISTH_1079;Clade II)__AVV65107__GPCstabilized
augggacaaauaaucaccuuuuuccaagaaguaccacacguaauagaagaaguaaugaacauaguacucauagcacuaagccuacuagcaauacuaaaaggaauauacaacguagcaacaugcggauuauucggauuaguagcauuccuacuccuaugcggaagaucaugcucuacaacauacaaaggaguuuacgaacuucaaacacucgaacuagacauggcaucucuaaacaugacaaugccacuauccugcaccaaaaacaauucacaccauuauauaaugguaggaaacgaaacaggacuagaauuaacacuaacaaauacaucuauaauaaaccacaaauucugcaaucuaucagacgcacacaagaaaaacuuauacgaccacgcacuaaugucaauaauaucaacauuccaccuaucaauaccuaacuucaaucaauaugaagccauguccugcgacuuuaauggaggaaaaauauccguacaauauaacuuaucacacacuuacgcaguagacgcugcuaaucauugcgguacaauagcaaacggaguacuacaaacauucaugcgaauggcauggggaggcucauacauagcuuuagacucaggaugcggaucaugggacugcauaaugacauccuaucaauacuuaauaauacaaaauaccacaugggaagaccauugccaauuuucaagaccuucaccaauaggcuaccuuggauuacucucacaaagaacaagagauauauacauaucaagacgaagacgaggaacauuuacauggacccuaucagacucagaaggaaacgaaacacccggcggcuacugccuaacacgauggauguuaaucgaagcagaacuaaaauguuucgguaauacagcagucgccaaaugcaacgaaaaacacgaugaagaauuuugcgacauguuaagacucuucgauuucaacaaacaagcaauacgaagacuaaaaacacccgcccaaaugucaauacaauuaauaaacaaagcaguaaaugcacuaauaaaugaccaacuaauaaugaaaaaccacuuaagagacauuaugugcaucccauacugcaacuacuccaaauacugguaccucaaccauacagucacaggaagaacuucccuaccaagaugcuggcuaguauccaacggaaguuaccucaaugaaacacacuucucagaugacauagaacaacaagcagacaauaugauaacagaacuacuacaaaaagaauacauggacagacaaggaaaaacaccacuuggauuaguagaccuauuuguauuuucaacaucauucuaccuaauaucaauauucuuacauuuaauaaaaauaccaacacacagacauguaauaggcaaaccaugucccaaaccacaucgauuaaaccacaugggaauaugcagcuguggacuauacaaacaucccggaguaccaguaaaauggaaacgcuaa

SEQ ID NO: 5706 - RNA, 1473 nt, Artificial Sequence
  derived and/or modified protein sequence (opt6) from LASV(Lassa virus/H.sapiens-wt/NGA/2018/ISTH_1177;Clade II)__AVV65101__GPCstabilized
augggacaaauaauaacauucuuccaagaaguaccucacguaauagaagaaguaaugaauauaguauuaauagcacuaucauuacuagcaauacuuaaaggcauauacaacguagcaacaugcggauuauuuggacuuguuucauuccuauuacuaugcggacgaucuugcucaacaacauauaaaggaguauacgaauuacaaacuuuagaacuggauauggcaucacuaaacaugacaaugccauuaucuugcacaaaaaauaauucacaccacuauauaagaguaggaaacgaaacaggucuugaacuaacauuaacaaacacaucaaucauugaccacaaauucuguaacuuauccgacgcacacaaaaaaaaucuauacgaccacgcauuaaugucaauaauaucaacauuucaccuuucaauacccaacuucaaucaauacgaagccauguccugugacuuuaauggaggaaaaauaucaguccaauacaaucuaucacacacuuacgccguagaugcagcaaaccauugcggaacuauagcaaacgguguacuacaaaccuuuaugagaauggcuuggggcggauccuauauagcccuagauuccggauguggaucaugggacugcauaaugacuucuuaccaauaccuaauaauucaaaauacaacaugggaagaccacugucaauucaguagaccaucaccaauaggcuaccuaggccuccucucucaaagaacaagagacauauacauaucacguagaagaagaggaacauucacauggacuuuauccgauucagaaggaaacgaaacacccggaggauacugucuaacaagauggaugcuaauagaagcagaacuaaaaugcuucggaaacacagcagucgcaaaaugcaacgaaaaacaugaugaagaauucugcgauaugcuuagauuauuugacuuuaacaaacaagcaauaagaagacuaaaaacaccagcacaaaugucaauacaacuaauaaauaaagcaguaaacgcuuuaauaaacgaccaacuuauaaugaaaaaccauuuaagagacauaauguguauaccauacugcaacuacucaaaauauugguaccuaaaccauacaauaacaggaagaacaucacuacccagauguuggcucguaucaaacggcucauacuuaaacgaaacacacuuuucagaugacaucgaacaacaagcugauaacaugauuacagaauuacuacaaaaagaauacauggauagacaaggcaaaacuccacuaggauuagucgaccuauucguauucuccaccucauucuaucuaauaucaaucuuuuuacaccucguaaaaauacccacacacagacacgucauaggaaaaccaugccccaaaccacacagacuuaaucacaugggaauaugcucaugcggcuuauauaaacacccaggagucccaguaaaauggaaaagauaa

SEQ ID NO: 5707 - RNA, 1473 nt, Artificial Sequence
  derived and/or modified protein sequence (opt6) from LASV(Lassa virus/H.sapiens-wt/NGA/2018/ISTH_1375;Clade II)__AVV65115__GPCstabilized
augggacaaaucauaacauucuuucaagaaguaccccacguaauagaagaaguaaugaauauaguacucauugcauuaucauuacuagcaauacucaaaggaauauacaacauagccacaugcggauuauucggacuagucucauuccucuuacuaugcggaagaaguugcucaacaacauauaaaggaguuuacgaauuacaaacacuagaacucgacauggcaucacuaaacaugacaaugccacuaucauguacuaaaaacaacucacaccacuacaucaugguaggcaacgaaacaggauuagaacuaacccuaacuaacacaucaauaauaaaccacagauucugcaacuuauccgacgcccacaaaaaaaaucuauacgaccacgcacuaaugucaaucauaucaaccuuccacuuaucuauccccaauuuuaaccaauacgaagcaaugucaugcgacuuuaauggaggcaaaauaucaguacaauacaaccuuucccacgcauacgccguagaugcagcaaaccacuguggaaccauagcaaacggaguucuacaaacauucaugcgaauggccuggggcggaucauauaucgcacuagacuccggcugcggaucaugggacugcauaaugaccucauaccaauaccuaauaauacaaaacacaacgugggaagaucacugccaauucaguagaccaagccccaucgguuauuuaggacuacucucacaaagaacaagagacauauauaucagcagaagaagaagaggaacauucacauggacauuaucagacagcgaaggcaacgaaacaccugguggauacugcuuaacacgauggaugcuaauagaagcagaauuaaaaugcuucggcaauacagccguugccaaaugcaacgaaaaacaugacgaagaauucugcgauaugcuuagacuauucgacuucaacaaacaagcaauaagaagacuaaaaacgccagcacaaauguccauacaauuaauaaacaaagcaguaaaugccuuaauaaacgaucaacuaauaaugaaaaaucaccuacgcgacauaaugugcauucccuacugcaacuacuccaaauauugguaccuaaaucacacuguaaccggaaaaacaagucuaccaagaugcugguuaguaucaaacggcucauaccuaaaugaaacacauuuuucugaugacauagaacaacaagccgacaacaugauaacagaauuauuacaaaaagaauauauagauagacagggaaaaacaccccucgggcuaguagacuuauucgucuucucuacuaguuuuuaucuaauaucuauauuccuccaucuaguaaaaauacccacacacagacacguuauaggaaaaccaugcccaaaaccacacagauuaaaucauauggguauaugcucaugcggacuuuacaaacacccaggaguaccagucaaauggaaaagauaa

SEQ ID NO: 5708 - RNA, 1473 nt, Artificial Sequence
  derived and/or modified protein sequence (opt6) from LASV(Lassa virus/H.sapiens-wt/NGA/2018/ISTH_1381;Clade II)__AVV65111__GPCstabilized
augggacaaauaguaacauucuuucaagaaguaccacacguaaucgaagaaguaaugaauauaguuuuaauagcccucucauuacuagccauccuaaaagguauauacaauguugcaacaugcggacuuuucggacuaguaucuuucuuacuauuaugcgguagauccuguucaacaacauacaaaggagucuacgaauuacaaacauuagaacucgauauggcuucacuaaacaugaccaugccauuaucauguacaaaaaacaacucccaccacuauaucauggucggaaacgaaacaggacuagaacuaacacuaacaaacaccucuaucauuaaucauaaauucugcaauuuaucagaugcacacaaaaaaaacuuauacgaucacgcauuaaugucuaucauaucaacuuuucauuuaucaauuccaaacuuuaaccaauacgaagccaugagcugcgacuuuaacggaggaaaaauaucuguacaauacaaccuaucacacaccuaugcaguagacgcagcaaaucacuguggcacaaucgccaacggaguacuacaaacauucaugagaauggcauggggcggguccuacauagcucuugacucaggaugcggcucaugggacuguauaaugacaucauaccaauaccucauaauucaaaauacaacaugggaagaucacugucaauucucacgaccauccccaauaggauaccuaggacuacuaucacaaagaacucgagacauauacauuucaagaagacgacgaggaaccuucacauggacuuuauccgauuccgaaggaaacgaaacaccaggaggauacuguuuaacaagauggauguuaauagaagcagaacucaaaugcuucggaaacaccgccguagcuaaaugcaacgaaaaacacgacgaagaauuuugcgauauguuaagauuauucgacuucaacaaacaagccauaagacgauuaaaaacaccagcacaaaugucuauacaacugauaaacaaagcaguaaaugccuuaauaaacgaucaauuaauaaugaaaaaucacuuaagagacauaauguguauaccauauuguaacuacucaaaauacugguacuuaaaucacacagucacaggaaaaacaucccuaccaagaugcuggcucguaucaaacggcucuuaucuaaacgaaacacauuucucagacgacaucgaacaacaagcugacaauaugauaacagaauuacuccaaaaagaauauauggacagacaaggaaaaacaccacuaggucuaguagaucuauucguauucucuacauccuuuuacuuaauauccauuuuucuacaucuaguaaaaauacccacucacagacauguaguuggaaaaccaugucccaaaccacaucgauuaaaccauaugggcauauguucaugugguuuauauaaacaccccggaguaccaguaagauggaaaagauaa

SEQ ID NO: 5709 - RNA, 1473 nt, Artificial Sequence
  derived and/or modified protein sequence (opt6) from LASV(Lassa virus/H.sapiens-wt/NGA/2018/ISTH_1643;Clade II)__AVV65119__GPCstabilized
augggacaaauuauaacauucuuucaagaaguaccucacguuauagaagaaguuaugaauaucguccuaaucgcauuaucacuauuagcaauccucaaagguaucuacaacguagcaacaugcggccuauucggacuaguaucauuccuacuacuaugcggaagaucaugcuccacaacauacaaaggagucuaugaauuacaaacacuagaauuagacauggccucacuaaauaugacaaugccccuauccugcacaaaaaauaacucucaucacuauauaauggucggaaacgaaacaggacucgaacucacacuaacaaacacuucaauaauaaaucauaaauucugcaaccuaucagacgcccacaaaaaaaacuuauacgaccacgcacuaauguccauaauaucaacauuccaccuauccauaccaaacuucaaucaauacgaagcaaugucaugcgacuucaacggaggcaaaauauccguacaauauaaccuaucccacacauaugccguagacgcugcaaaccacugcggaacaauagcaaauggcguccuacaaacauucaugagaauggccuggggaggauccuauauagcacuagacuccgguuguggcaguugggacugcauaaugacauccuaucaauaucucaucauacaaaacacaucaugggaagaccacugccaauuuucccgcccaucuccaaucgguuacuuaggauuacucucacaaagaacaagagacauuuauauaucccgccgaagaagaggaacauucacauggacacuaucagacucagaagguaaugaaacaccaggaggauacugcuuaacacgauggaugcuuauagaagcagaacuaaaaugcuucggaaauacagcaguagcaaaauguaacgaaaaacacgacgaagaauuuugcgacaugcuacgauuauucgauuuuaauaaacaagcaauaagaagacuaaaaacuccggcacaaaugucuauacaacuaauaaacaaagcuguaaacgcccuaauaaacgaccaauuaauaaugaaaaaccaccuaagagacaucaugugcauuccauacuguaacuacuccaaauacugguaucuaaaccauacuguaacaggcaaaacauccuuaccuagaugcuggcucguaucaaacggaacauaucuaaacgaaacucacuuuucagacgacauagaacaacaagcugauaauaugaucacagaauuacuacaaaaagaauacauagauagacaaggaaaaacaccuuuaggccucguagaccuauucguauucucaaccucauucuaucuaauaagcauauucuuacacuuagucaaaauaccaacccacagacauguaaucggcaaaccauguccaaaaccacaccgcuuaaaccacaugggaauaugcucaugcggacuuuacaaacacccaggagucccaguuaaauggaaaagauaa

SEQ ID NO: 5710 - RNA, 1473 nt, Artificial Sequence
  derived and/or modified protein sequence (opt6) from LASV(LASV003-NIG-2008;Clade II)__AIT17580__GPCstabilized
augggacaaauaauaacauuuuuccaagaagucccacacguaauagaagaaguaaugaacaucguccuaauagcauuaucauuacuagcaauucuaaaaggaauauacaauguagcaacuuguggccuauucggccuaguaucauuccuauuauuauguggccgaagcugcucaacaaccuacaaagguguauacgaacuacaaacccuagaauuagacauggcaucacuaaauaugacaaugccacuauccugcaccaaaaacaacucccaucacuacauaaugguaggcaacgaaacaggcuuagaacuaacacuaacaaacacuucaauaauaaaccacaaauucugcaaccuauccgacgcccacaagaaaaauuuauaugaccacgcauuaaugucaauaauaucaacauuccacuuauccauacccaauuucaaccaauacgaagcaaugucaugugauuucaacggagguaaaaucagcguacaauacaauuuaucacauacauaugcaguagacgcagcaaaccauuguggcacaauagcaaacggaguauuacaaacauucaugagaauggcuuggggaggaucauacauugcacucgacucaggaugcggaucaugggauugcauaaugacaucauaccaauaccuaauaauacaaaacacaaccugggaagaucacugccaauucuccagaccaucaccaaucgguuauuuaggacuacuaucacaaagaacaagagacauauauauaucacgaagaagacgaggaacauuuaccuggacccuaucagauucagaaucaaaugaaacaccaggcggauacugccuaacaagauggauguuaauagaagcagaauuaaaaugcuuuggaaauacagcaguagcaaaauguaacgaaaaacacgaugaagaauuuugcgauaugcuacgacuauuugacuucaacaaacaagcaauaagacgacuaaaagccccugcacaaaugucaauacaauuaauuaauaaagcaguuaaugcauuaauaaaugaccaacuaauaaugaaaaaccacuuaagagacaucauguguauaccauauugcaacuauagcaaauacugguacuuaaaccacacaguuacaggaagaacaagccuaccccgauguuggcucguauccaacggaucauaccuuaacgaaacacacuuuucagaugacauagaacaacaagcagauaacaugauaacagaauuauuacaaaaagaauacauggaccgacaaggcaaaacaccacuaggccuaguagaccuauuuguauuuuccaccuccuucuaccuaauaucaauuuucuuacacuuaguaaaaaucccuacacaccgacacguaauaggaaaaccaugcccaaaaccacaccgauuaaaccacaugggaauauguucauguggauuauacaaacacccaggaguaccagucaaauggaaaagauaa

SEQ ID NO: 5711 - RNA, 1473 nt, Artificial Sequence
  derived and/or modified protein sequence (opt6) from LASV(LASV006-NIG-2008;Clade II)__AIT17584__GPCstabilized
augggacaaauaauaacauuuuuccaagaaguaccacaaguaauagaagaaguaaugaacauaguauuaauagcauuaucccucuuagccauacuaaaaggcauuuauaacgucgcaacaugcggacuauucggccuuguaucauuucuacucuuaugcggacgcucuugcucuacaaccuauaaaggaguauaugaacuccaaacccucgaacuugacauggccucauuaaauaugacaaugccacuaucuugcacaaaaaauaacucucaucacuacaucaugguuggaaacgaaacaggauuagaacuaacccuaacuaaucaaucaauaauuaaccacaaauucugcaaucuauccgacgcacauaaaaaaaaccuauacgaucacgcccuaaugucuauaaucucaaccuuccauuuaucaauacccaacuucaaucaauacgaagccaugucaugcgauuuuaacggaggaaaaaucucuguacaauacaaccucucacacucauucgccguugacgccgcaaaucacugcggaacaauagcaaauggaguacuucaaaccuucaugagaauggcuuggggcggaucauacauagcauuagacuccggaugcggaucaugggauuguauaaugacaagcuaucaauacuuaaucauacaaaacacaaccugggaagaccacugccaauuuucacgucccucucccauaggcuaccuaggacucuuaucccaacgcacacgcgacauauauaucucaagacgaagacguggcacauuuacauggacacucuccgacuccgaaggaaaugaaacaccagguggcuauuguuuaacaagauggaugcucauagaagcagaauuaaaaugcuucgguaacacagcuguagcaaaaugcaaugaaaaacacgacgaagaauuuugcgauaugcuacgucuauuugacuucaacaaacaagcaaucagacgcuuaaaaacaccagcacaaaugucaauacaacuaauuaacaaagcagucaacgcccuuauaaacgaucaacucaucaugaaaaaccaucucagagacaucaugugcauaccauauugcaacuacucuaaauauugguaucuuaaucacacaaaaacaggcaaaacaagucucccaagaugcuggcuagucucuaacgguucauaccuaaacgaaacccacuucagcgacgacauagaacaacaagcagacaauaugauuacugaacuacuacaaaaagaauacauggauagacaaggaaaaacaccacuaggacuaguagacuuauucgucuuuucaacauccuuuuacuuaauaucaauauuuuuacaccuaguuaaaauaccuacacacagacauguaauugguaaaccauguccaaaaccacauagacuaaaccauauggguauaugcucaugcggacuauacaaacaccccggcguacccguaaaauggaaaagauaa

SEQ ID NO: 5712 - RNA, 1473 nt, Artificial Sequence
  derived and/or modified protein sequence (opt6) from LASV(LASV035-NIG-2009;Clade II)__AIT17588__GPCstabilized
augggacaaauaauaaccuuuuuccaagaaguaccacacguaauagaagaaguaaugaacauaguacuuauagcauuaagccuccuugcuauuuuaaaaggaauauacaauguagcaacauguggacuauucggacuaguaucauuucuuuuauuaugcggaagaucauguuccacaacauacaaaggaguuuacgaauuacaaacauuagaacuagacauggcaucauuaaacaugacaaugccacuauccugcacaaaaaacaacucacaucauuacaucaugguaggaaaugaaacaggauuagaacuuacacuaacaaacacaagcauaauaaaccacaaauucugcaaccuaucagacgcacacaaaaaaaaucuauaugaccacgcacuaaugucaauuauauccacauuucacuuaucaaucccaaacuucaaccaauacgaagcaaugucaugcgacuuuaauggaggaaaaauuucuguacaauauaaccuaucacaugccuacgcuguagaugcugcaaaccacugcgguacaaucgcaaauggaguauuacaaacauucaugagaauggcuuggggaggaucauacauagcauuagacucaggaugcggcucaugggacuguauaaugacaucuuaccaguaucuaauaauacaaaacacaaccugggaagaucacugccaauucucacgacccucaccaauuggauacuuagguuuacuaucacaaagaacccgcgauauauacaucuccagaagacgcagaggaacauuuaccuggacauuaagcgacuccgaaggaaaugaaacaccuggaggauacugcuuaacuagauggauguuaauagaagccgaacuuaaaugcuucggaaauacagcuguugcuaaaugcaacgaaaaacacgacgaagaauucugcgacaugcuaagauuauucgacuucaacaaacaagcuauaagaagacuaaaagcaccagcacaaaugucaauacaauuaauaaauaaagcaguuaacgcauuaauaaacgaucaacuuauuaugaaaaaccaccuaagagacauaaugugcauaccauacuguaacuacucaaaauauugguacuuaaaccacacaguaacaggaaaaacaucacucccaagauguugguuaguaagcaacggcuccuaccuaaacgaaacacauuucagugacgauaucgaacaacaagccgauaauaugaucacagaacuacuacaaaaagaauauaucgauagacaaggaaaaacacccuuaggacuaguagaccucuucguauucucaacauccuucuacuuaauauccauauucuuacaccuaguaaaaauaccaacacauagacacguaauaggaaaaccauguccaaaaccucacagacuaaaccacaugggaauuuguuccuguggacuauauaaacaccccggcguaccaguaaaauggaaacgauaa

SEQ ID NO: 5713 - RNA, 1473 nt, Artificial Sequence
  derived and/or modified protein sequence (opt6) from LASV(LASV042-NIG-2009;Clade II)__AIT17592__GPCstabilized
augggacaaauaaucacauucuuccaagaaguaccacaugucauagaagaaguaaugaacauaguacuuauagccuuaucccucuuagcaauccuaaaaggaaucuauaacgucgccacauguggacuauucggauuaguaucauuccuauuacuaugcggaagaucaugcucaacaacauacaaaggaguauaugaacuacaaacccucgaacuagacauggcaucccuaaauaugaccaugccccuaucaugcaccaaaaacaacucccaucauuacauuaugguagguaacgaaaccggccuugaacuaacucucacaaacacaucaauaauaaaccacaaauuuugcaaccuaucagacgcccauaaaaaaaauuuauacgaucacacauuaaugaguauaauaucaacauuucacuuaucaauaccuaacuucaaccaauacgaagcaaugucaugcgacuucaacggaggaagaauaagcguacaauauaacuuaucacacgcauacgcaguagaugcagccaaccacugcggaaccaucgcaaacggagucuuacaaacauucaugcguauggcauggggaggaucauauauugcacuagacuccggaugcggaucuugggacugcaucaugacuucuuaucaauaccuaaucauacaaaauaccacaugggaagaccauugccaauucaguagaccaucaccaaucggcuaucuaggauuacucucccaaagaacuagagacauauacauaucaagaagacgacgaggcaccuucacauggacucuaucagacucagaaggaaacgaaacaccaggcggauauugccucacaagauggauguuaauagaagcagaacuaaaauguuucggaaacacagccguagccaaauguaacgaaaaacacgaugaagaauucugcgacauguuaagacuauucgacuucaacaaacaagcaauaagaagauuaaaaaccccugcacaaaugaguauucaacucauuaauaaagcaguaaacgcauuaauaaacgaccaacuaauaaugaaaaaccacuuaagagacauaaugugcauaccauacugcaacuauuccaaauacugguaccuuaaucacaccaucaccggaaaaacuucauuaccaagaugcuggcuaguaucaaauggcagcuaccuaaaugaaacccacuucucagacgacauagaacaacaagcagacaacaugaucacagaacuacuucaaaaagaauacauagacagacaaggaaaaaccccauuaggacuagucgacuuauucguauucucaacauccuucuaccucaucucaauuuuccuccaccucguuaaaauacccacacaccgacacguagucggcaaaccaugcccaaaaccccaccgacuaaaucacaugggcauaugcuccuguggacuauacaaacacccaggcgucccuguaaaauggaaacgauaa

SEQ ID NO: 5714 - RNA, 1473 nt, Artificial Sequence
  derived and/or modified protein sequence (opt6) from LASV(LASV045-NIG-2009;Clade II)__AIT17596__GPCstabilized
augggccaaauaauaacauucuuccaagaaguaccacaugucauagaagaaguaaugaacauaguacuaaucgcacuaucauuauuagcaauauuaaaaggaauauacaacgucgcaacaugcggacuauuuggccucguaucuuucuuacuucuaugcggcagaucaugcucaacaacuuacaaagguguauacgaauuacaaacacuagaauuagauauggcaucucucaacaugaccaugcccuuaucaugcacaaaaaacaauucacaccauuacauaaugguaggaaacgaaacaggauuagaacuaacacuaacaaacacaucaauaauaaaccacaaauucuguaacuuauccgaugcccacaaaaaaaaucuauaugaccaugcacuaauguccauaaucaguacuuuccaccuaucuauaccaaacuuuaaccaauacgaagcuaugucaugugauuucaaugguggaaaaauaucuguacaauacaaucuuucacacacauacgcagucgacgcagcaaaccacugcggaacaaucgcaaauggcguauuacaaacauucaugagaauggcuuggggaggcucauacauagcacuugauucaggaugcggaucuugggauuguauuaugacauccuaucaauaccuuauaauacaaaauacauccugggaagaccacugucaauucagcagaccaucuccaauaggauaccuaggacuacuaucacaaagaacaagagauauauauauaucuagaagaagacgcggaaccuucacauggacccuuucagacucagaaggaaaugaaaccccaggagguuacugccuaacaagauggaugcuaauagaagcagaacuaaaaugcuuuggaaauacagcagucgcaaaaugcaacgaaaaacacgacgaagaauuuugcgacauguuaagacuauuugauuucaauaaacaagcaauacgacgauuaaaaacaccagcccaaaugucaauucaacucauaaacaaagcaguaaaugcacuaauaaacgaccaacuaauaaugaaaaaccaucuccgagacauaaugugcauccccuacugcaacuauucuaaauauugguaucuaaaccacacaguaacaggaaaaacaucccuaccuagaugcuggcuaguuucaaacggaucauaccucaacgaaacacauuuuucagacgacauagaacaacaggccgacaacaugauaacagaauuacuacaaaaagaauacauagacagacaaggaaaaacuccauuaggauuaguagaucuuuucguuuucucaacauccuucuacuuaauuucaauauucuuacauuuaguuaaaauaccaacacacagacauguaauaggaaaaccaugcccaaaaccacauagacucaaccacaugggcaucugcucaugcggacuauacaaacacccaggagucccaguaaaauggaaaagauaa

SEQ ID NO: 5715 - RNA, 1473 nt, Artificial Sequence
  derived and/or modified protein sequence (opt6) from LASV(LASV046-NIG-2009;Clade II)__AIT17600__GPCstabilized
augggucaaauuauaacauucuuucaagaaguaccucacgucauagaagaagucaugaacauaguacuuaucgcacucucacuauuagcuauccuuaaaggaauauauaacguagcuaccugcggacuauucggauuagucuccuuccuauuacuuugcggaagaucuugcaguacaacauauaaaggaguuuaugaauuacaaacacuagaacuagacauggcaucucuaaauaugaccaugccauuauccugcacaaaaaacaacucacaccauuauauaaugguaggaaaugaaacaggauuagaauuaaccuuaacaaacacaucaauaaucaaccauaaauuuuguaaucuaucugaugcacacaaaaaaaacuuauacgaccaugcccuaaugucaaucaucucaacauuucaccuuucaaucccaaacuucaaucaauacgaagccaugagcugcgacuucaacggaggcaaaauaucaguacaauauaaccuaucucaugcauacgccggagacgcagcaaaccacugcggaacaaucgcaaacggaguacuacagacauucaugagaauggcuuggggaggauccuauauagcauuagauuccggaugcggaucaugggauugcauaaugaccucauaucaauacuuaauaauacaaaacacaaccugggaagaucacugccaauucucacgccccucaccaauaggauaccucggauuacuaagucaaagaacacgagauaucuacauuucaagaagaagaagagguacuuucacauggacuuuaucugacucagaaggaaaugaaacaccaggcggcuacugccuaacaagauggaugcuaauagaagcagaacuaaaauguuuuggaaauacagcaguagcuaaaugcaacgaaaaacacgacgaagaauucugugauaugcuaagacuuuucgacuucaauaaacaagcaaucagaagacucaaaaccccagcacaaaugucuauacaacuaaucaacaaagccguaaacgcauuaauaaacgaucaauuaauaaugaaaaaccaccuccgagacauuauguguaucccauauugcaacuauucaaaauacugguaccuaaaucacacaguaacaggaaaaacaucacuaccacgauguuggcuaguauccaacggaucauauuuaaaugaaacacauuucucagacgacauugaacaacaagcugacaacaugauaacagaauuauuacaaaaagaauacauagacagacaaggaaaaacaccacuaggcuuagucgacuuauucguauucucaacauccuucuaccuaauaucaauauuucuccacuuaguaaaaauaccaacacacagacauguaauaggcaaaccaugucccaaaccacacagauuaaaccacaugggaauaugcucaugcggcuuauacaaacaucccggaguaccaguaaaauggaaaagauaa

SEQ ID NO: 5716 - RNA, 1473 nt, Artificial Sequence
  derived and/or modified protein sequence (opt6) from LASV(LASV049-NIG-2009;Clade II)__AIT17604__GPCstabilized
augggacaaauaauaaccuuuuuucaagaaguaccacauguaauagaagaaguaaugaauauaguucucauugcacuaucacuacucgccauacuaaaaggaaucuacaacguagcaacuugcggacucuuuggauuaguaucuuuuuuacuauuaugcggacgaucauguucaacaacauacaaaggaguuuacgaacuacaaacucuagaacuagauaugacaucucucaauaugacaaugccauuaucaugcacaaaaaacaacucacaucauuacauaaugguaggaaacgaaacaggacuagaacuaacacuaacaaacacauccauaauuaaccauaaauucugcaacuuauccgacgcacacaaaaaagaccuauaugaccaugcauuaauguccauaauaucaacauuccacuuaucaauccccaauuucaaucaauacgaagccaugucaugcgacuucaacggaggaaaaauauccguacaauacaaccuaucacacacauacgcuguagacgccgcuaaacauugcggaaccauagcaaacgguguccuacaaacauuuaugcgcauggcuuggggcgguucauauauagcacucgacucaggauguggauccugggacugcauaaugacuucauaccaauaucuaauaauccaaaauacaacuugggaagaccacugccaauuuucuagacccuccccagucggauaucuaggacucuuaagccaaagaaccagagacauuuauauaucaagaagacgaagaggcacauucacauggacauuaucagacucagaaggaaacgaaacacccggcggcuacuguuuaacaagauggaugcuaauagaagcagaacuaaaauguuuuggaaacacagccguagcaaaaugcaacgaaaaacaugaugaggaauucugcgauauguuaagacuuuucgacuucaauaaacaagcaauaagacgacuaaaaacaccagcacaaaugucaauacaacuaauaaacaaagcagucaacgcauuaauaaacgaucaauuaauaaugaaaaaccauuuacgagauauuaugugcauaccauacuguaauuacuccaaauacugguaccuaaaucacacagucaccggaaaaacuucucuuccaagauguuggcuaguaucaaaugguuccuauuuaaaugaaacacacuuuucagaugacauugaacaacaagcagacaacaugauaaccgaacucuuacaaaaagaauauuuagacagacaaggaaaaacuccucuaggucucguagaucuauucgucuucucaaccucauucuaccuaauaucaaucuucuuacaccuuguaaaaauacccacucaccgacauguaauaggaaaaccaugcccaaaaccccaccgacuaaaccacaugggcauaugcucauguggacuauacaaacaccccggcguaccaguaaaauggaaacgauaa

SEQ ID NO: 5717 - RNA, 1473 nt, Artificial Sequence
  derived and/or modified protein sequence (opt6) from LASV(LASV052-NIG-2008;Clade II)__AIT17608__GPCstabilized
augggacaaauaauaacauucuuccaagaaguaccacacguaauagaagaaguaaugaacauagucuuaauagcacucagcuuacuugcaauucuaaaaggaauauacaacguagcaacaugcggacuauucgguuuagucucauuucuacuacucugcggaagauccugcuccacaacauacaaaggaguauacgaacuacaaacauuagaauuagacauggccucccuaaauaugacaaugccacuaucaugcacuaaaaacaacucacaccauuacauaaugguaggaaaugaaacaggauuagaauuaacauuaacaaauacaucaauuaucaaucacaaauucuguaaucuauccgacgcccauaaaagaaaucuauacaaucaugcauuaaugagcauaauauccacauuccaccucucaauaccaaacuucaaccaauaugaagccaugucuugugauuucaacggcggcaaaauaucuguacaauacaacuuaucccacacauacgcuguagacgcagcaaaccacugcggaacaauagcaaauggaguccuacaaacauucaugagaauggccuggggcggaucuuacauugcccuugauucuggaugcggauccugggacugcauaaugacaagcuaccaauauuuaauaauacaaaauacaaccugggaagaccacugccaauuuucaagaccaagcccaauugguuauuuaggacuauuaucacaaagaaccagagacaucuauaucucaagacgacgucgcggaacauucacauggacauuaucagauuccgaaggcaacgaaacaccaggaggauacuguuuaacaagauggauguuaaucgaagcagaacuaaaauguuucggaaacacagcaguugcaaaauguaaugaaaaacacgaugaagaauuuugcgauaugcuacgauuauucgauuucaauaaacaagccauaagaagauuaaaaacacccgcacaaaugaguauccaacuaauaaacaaagcaguaaaugcauuaauaaacgaccaauuaaucaugaaaaaccaccuaagagauauaaugugcauaccauacugcaauuacucaaaauauugguaccucaaccacacugucaccggaaaaacuucucuaccacgaugcugguuaguaucaaacggaucuuaccuaaaugaaacacacuucagcgaugacauagaacaacaagccgacaacaugaucacagaacuacuccaaaaagaauacauugaccgacaaggcaaaacaccauuaggccuaguagaccuauuuguauuuucuacuuccuuuuaucuuauaucaauauuccuacaccuaguaaaaauaccaacacaccgacacauaauuggaaaacccugcccaaagccucacagauuaaaccauaugggaauauguucaugcggacuauacaaacacccaggcguaccaguaaaauggagaagauaa

SEQ ID NO: 5718 - RNA, 1473 nt, Artificial Sequence
  derived and/or modified protein sequence (opt6) from LASV(LASV056-NIG-2008;Clade II)__AIT17612__GPCstabilized
augggacaaauaauaacauucuuccaagaaguaccacacgucaucgaagaaguaaugaacaucgucuuaauagcacuaucauuacucgcuauccuaaaaggaaucuauaacguagcaacaugcggauuauucggccucgucucauuucuacuacucuguggcagaucauguucaacaacguauaaaggagucuacgaacuacaaacucucgaauuagauauggccucauuaaacaugacaaugccccuaucauguaccaaaaauaacucucaccacuacauaagaguaggcaacgaaaccggacuagaauuaacauuaacaaacacaucaauaaucaaccauaaauucugcaaccuuucagaugcacacaaaaaaaaccuauaugaccauucacuaaugucaauaauaucaacauuccaccuuucaauaccaaauuucaaucaauaugaagcaaugucaugcgauuucaacggaggaaaaauaucuguacaauacaaccuaucacauacauacgcaguagaugccgcuaaccauugcgguacaauagccaacggaguucuacaaacauucaugagaauggcauggggaggauccuauauagcacuugacucagguuguggaaauugggacugcauaaugacaucauaucaauaccuaaucauacaaaauacaacaugggaagaccauugccaauucucaagacccucaccaauaggcuacuuaggacuacuaucacaacgcacaagagacauauacauaucacgcagaagaagaggcaccuucacauggacccuaucagauucagaaggaaaugaaacaccaggaggauauugucuaacccgauggaugcuaauagaagcagaauuaaaauguuuuggaaacacagccguagcaaaaugcaaugaaaaacacgacgaagaauucugugacaugcuaagacuauuugacuucaauaaacaagcaauaagacguuuaaaaacucccgcacaaaugucaauacaauuaauaaauaaagcaguaaacgcacuaauaaaugaccaauuaauaaugaaaaaccaccucagagacauaauguguauaccauacuguaacuacucaaaauacugguauuuaaaccacacagucacaggaaaaacaucacuaccaagaugcugguuagucuccaauggaucauaccuaaaugaaacacacuucucagacgacauagaacaacaagcagacaacaugauaacagaacuauuacaaaaagaauacauagacagacaagguaaaacuccauuaggucuaguagaccuauucguauucucaacuucauuuuaccuaauauccauauuucuucaucuaguaaaaauaccaacacaucgacacguaguaggaaaaccaugcccaaaaccacacagauuaaaucacauggguaucuguucauguggauuauacaaacaucccggaguccccguaaaauggaaaagauaa

SEQ ID NO: 5719 - RNA, 1473 nt, Artificial Sequence
  derived and/or modified protein sequence (opt6) from LASV(LASV058-NIG-2008;Clade II)__AIT17616__GPCstabilized
augggacaaauuauaaccuucuuucaagaagucccccacguaauagaagaagucaugaacaucguuuuaauagccuuaucucuacuagcaauauuaaaaggaauauacaauguugcaaccugcggcuuauucggccuaguaucauuccuauuacuaugcggaagaucauguucaacaacauacaaaggaguauacgaacuacaaacauuagaacuagacauggcaucacuaaacaugacaaugccccuaucaugcaccaaaaacaacucccaucacuacauaaugguaggaaaugaaacaggauuagaacucacacuaacaaauacauccauaauaaaccauaaauucuguaacuuaucugaugcacauaagaaaaaccuauaugaccacgcacucaugagcauaauauccacauuccacuuauccauaccaaauuucaaccaauacgaagcaaugucaugcgauuuuaacgguggcaaaauaucaguucaauacaacuuaucacacgcauacgcaguugacgcggcaaaccacugcggaaccauagcaaauggaguccuccaaacauuuaugcgaauggcauggggaggaucauacauagcauuagacucaggcuguggaucuugggauugcauaaugacaaguuaucaauaccuaauuauacaaaacacaacaugggaagaucacugccaauucucacgccccucaccaauaggauaucuaggccuccuaucacaaagaacaagagauauuuacauuucaagaagacgcagaggaacuuucacauggacacuaucagacucagaaggaaacgaaacaccaggaggauacugccuaacaagauggaugcuaauagaagcagaauuaaaaugcuuugguaacacagcaguagcaaaauguaacgaaaaacacgacgaagaauuuugcgauaugcuaagauuauucgauuuuaauaaacaagcuauucgccguuuaaaaacaccagcacaaaugaguauacaacuaauaaacaaagcaguaaaugcccucauaaaugaccaauuaauaaugaaaaaucaccuuagagacauuauguguauuccauacugcaacuacuccaaauacugguaccuaaaucacacaguaacagguaaaacaucauuaccacgaugcugguuaguuuccaacggaucauaccuaaaugaaacucacuucucugacgacauagaacaacaagcagacaacaugauaacagaauuacuacaaaaagaauauaucgauagacaaggaaaaacaccucuaggccuagucgaccuuuuuguauuuucaacaucauuuuaucuaaucucaauauuccuucaccuuguuaaaauaccaacacacagacacguaaucggaaaaccauguccaaaaccacacagauuaaaccacaugggcauauguucaugcggauuauacaaacacccaggagucccagucaaauggaaaagauaa

SEQ ID NO: 5720 - RNA, 1473 nt, Artificial Sequence
  derived and/or modified protein sequence (opt6) from LASV(LASV063-NIG-2009;Clade II)__AIT17620__GPCstabilized
augggacaaauaaucacauucuuccaagaaguaccucacguaauagaagaaguaaugaacauaguacuaaucgcacuaucacuacuagcaauacucaaaggaauauauaacguagcaacauguggacuauucggacuaguaucauuuuuacucuuaugcggcagaucauguuccaccacuuauaaaggaguauaugaacuucaaacauuagaacuagacauggcaucacuaaacaugacaaugcccuuauccugcacaaaaaacaacucacaucacuacauuaugguaggaaacgaaaccggucuagaacuaacacucacuaacacaagcaucauuucacacaaauucugcaaccucucugacgcacauaaaaaaaaucuauacgaccaugccuuaaugucaauaauaagcacauuucaccucucaauaccaaacuucaaccaauacgaagcaaugucaugcgacuucaacggcggaaaaauaucaguucaauacaaccuaucucacgcauacgcuauagacgcagcaaaccacugcggaacaguagcaaacgguguacuacaaacauucaugagaauggcauggggaggaucauacauagcucuagacucaggaugcggaucaugggacuguauaaugacaucauaccaauacuuaaucauacaaaacacaacaugggaagaccacugucaauucagccgaccaucacccauaggauauuuaggauuacuaagucaaagaacaagagacauauauauaucacgccgacgaagaggaacauucacauggaccuuaucagacucagaaggaaacgaaacacccggcggauacugcuuaacaagauggaugcuaauagaagcagaacuaaaaugcuuuggaaacacagcagucgcaaaaugcaacgaaaaacacgacgaagaauuuugcgacaugcuucgacuauuugacuucaacaaacaagcuauaagaagacuaaaagccccugcacaaaugucaauccaauuaauaaacaaagcaguaaacgcauuaauaaacgaucaauuaauuaugaaaaaccacuuacgagacauaauguguauaccauacugcaacuacucuaaauacugguaccucaaucauaccguaacaggcaaaacauccuuaccaagaugcuggcuaguaucuaacggaucauaccuaaacgaaacacacuucuccgacgacaucgaacaacaagcagacaacaugaucaccgaauuacuccaaaaagaauauauggacagacaaggaaaaacaccucuaggccuaguagacuuauucguauucucaacgucauucuacuuaauaucaauauuucuacaccuaguaaaaaucccuacacaccgacacgucaucggcaaaccaugcccaaaaccacauagauuaaaucauaugggaauaugcucaugcggacuauacaaacaccccggaguaccagucaaauggaaaagauaa

SEQ ID NO: 5721 - RNA, 1473 nt, Artificial Sequence
  derived and/or modified protein sequence (opt6) from LASV(LASV1000-NIG-2009;Clade II)__AIT17782__GPCstabilized
augggacaaauaauaaccuucuuccaagaaguaccacacguaauugaagaaguaaugaauauaguucuaauagcacucucacuauuagccauacuuaaaggcauauauaauguagcaacaugcggauuauucggauuaguaucauuucuauuacuaugcggacgauccuguagcacaacauacaaaggaguauacgaacuacaaacauuagaauuagauauggcaucacuaaauaugacaaugcccuuaucuuguaccaaaaacaacucacaccacuacauaaugguuggaaacgaaacaggacuagaauuaacacuaacaaacacaucaauaauaaaucacaaauucugcaaccuaucagacgcucauaagaaaaaccuauacgaccacgcccuaauguccauaauaucaaccuuucaccuaucaauacccaauuuuaaccaauacgaagcuaugucaugcgauuucaacggcggaaaaauauccguacaauacaauuuaucacauacauaugcaguugaugccgcaaaucacugcggaacaauagcaaauggcguucuacaaacauuuaugagaauggcuuggggcggaucauacauagcacuugauucuggcugcggaucaugggauugcauaaugacauccuaccaauacuuaauaauacaaaacaccaccugggaagaccacugccaauucucaagaccaucaccuauaggcuacuuaggacuauuaucacaaagaacccgagacauauacauauccagaagacgaagaggcaccuucacauggacacuaucagauucagaaggaaacgaaacaccagguggcuauugcuuaaccagauggaugcuaauagaagccgaauuaaaaugcuuuggaaacacagcaguagcaaaaugcaacgaaaaacaugacgaagaauuuugcgauaugcuuagauuauucgauuuuaauaaacaagcaauaaaacgucuaaaaacaccagcacaaaugagcauucaauuaauaaacaaagccgucaacgcucuaauaaaugaccaacuaauaaugaaaaaccacuuaagagacauaaugugcauaccuuauuguaacuacucaaaauauugguaccuaaaccauacugucacaggaaaaacaucauuacccagaugcuggcuaguaucaaauggaucuuaucuaaaugaaacacacuucucagacgacauagaacaacaagcagacaacaugauaaccgaacuacuucaaaaagaauacauagacagacaaggaaaaacaccauuaggccuaguagaccuauucguauucucuacauccuuuuauuuaauaagcauauuucuacaucuaguaaaaauaccuacacauagacauguaguaggcaaaccaugcccaaaaccacacagacucaaccacaugggaauauguagcuguggauuauacaaacaucccggcguucccguuaaauggaaaagauaa

SEQ ID NO: 5722 - RNA, 1473 nt, Artificial Sequence
  derived and/or modified protein sequence (opt6) from LASV(LASV1008-NIG-2009;Clade II)__AIT17786__GPCstabilized
augggacaaaucauaacauucuuccaagaagucccccacguaauugaagaaguaaugaauauaguauuaauugcauuaucauuacuagcaauccuaaaaggaauuuauaauguagcuacauguggcuuauucggccuaguaucauuucuccuacuaugcggaagauccugcucuacaacauauaaagguguauacgaacuucaaacacuagaauuagacauggcaucacuaaauaugacaaugccauuaucaugcaccaaaaacaacucucaccacuauauaauggucggaaaugaaaccggacuagaacuaacacucacaaacacauccauaaucaaccauaaauucugcaauuuaucagacgcccacaaaaaaaaucuguacgaccaugcucuaaugucuauaauaucuaccuuucaucuaucaauaccaaacuucaaccaauacgaagcaaugucaugugauuucaacggaggaaaaaucucaguccaauauaaccuaucucacgcauacgcuauagaugcagcagaccacuguggcaccauagcuaacggaguccuacaaacauucaugagaauggcauggggagguucauacauugcccuagacucaggaugcggaucaugggacuguauaaugaccucauaccaauaccucauaauacaaaacacaacuugggaagaccauugccaauucucucgaccaagcccaauaggauaccuaggacuauuaucacaaagaacucgagacauauauauaucacgacgacguagaggaacauucacauggaccuuaucagacucugaaggcaacgaaacaccaggaggauacugccuaacacgcuggaugcuaauagaagcagaacuaaaaugcuucggaaacacagcuguagcaaaauguaacgaaaaacaugacgaagaauucugcgauaugcuaagacucuucgacuuuaacaaacaagcaauacgaagauuaaaaacaccugcacaaaugagcauacaacuaauuaacaaagcagucaaugcauuaaucaacgaccaacuaauaaugaaaaaccaccuacgagauauaaugugcauaccuuacugcaacuacucaaaauacugguaucuaaaccacacaguaacaggaaaaacaucucuaccccgaugcuggcuaguaucaaacggaucuuaccuaaaugaaacucauuucucagaugauaucgaacaacaagcagacaacaugauaacugaauuacuacaaaaagaauacauggauagacaaggaaaaacaccauuaggacuaguagaccuauucguauuuuccacaucauucuaccuaaucucuauauuccuacacuuaguaaaaauaccaacacacagacauauuacaggcaaaccaugcccaaaaccacacagacuaaaccauaugggaauauguucauguggauuauacaaacacccaggaguaccaguaaaauggaaaagauaa

SEQ ID NO: 5723 - RNA, 1473 nt, Artificial Sequence
  derived and/or modified protein sequence (opt6) from LASV(LASV1011-NIG-2009;Clade II)__AIT17790__GPCstabilized
augggccaaauaaucacauuuuuccaagaaguaccgcacguaauagaagaagucaugaauauaguacucaucgcccuaucacuacuagcaauacuaaaaggaauauauaacguagcaacaugcggacuauucggacuagucucauuuuuauuacuaugcggacgcuccugcucaacaaccuauaaaggcguauaugaacuacaaaccuuagaauuagacauggccuccuuaaacaugacaaugccacucucaugcaccaaaaauaauucacaucauuacauaaugguaggaaacgaaacaggauuagaauuaacacuaacuaauacaagcauaauuaaccacaaauuuuguaauuuaucagacgcacacaaaaaaaacuuauaugaccacgcacuaauguccauaauaucaacauuccacuuaucaauacccaacuuuaaucaauaugaagcaaugagcugugauuucaacggcggaaaaaucucaguccaauacaaucucagccauacuuacgcaguagaugccgcuaaccacugcgguacaauagcaaacggaguauuacaaacauucaugcgaauggcauggggcggcucauacauagcacuagacucaggauguggaucaugggauugcauuaugacauccuaucaauaucucauaauacaaaacaccacaugggaagaccauugccaauucucaagaccaaguccaauaggauaccuaggacuccuuucacaaagaacuagagacauauacauaagccgaagaagaagagguaccuuuacauggacacuaucagacucagaagguaaugaaacccccggaggauacugucuaacaagauggauguuaauagaagcugaacuaaaauguuuuggaaacaccgcagucgccaaaugcaacgaaaaacacgaugaagaauucugcgacauguuaagacuuuucgacuuuaauaaacaagcaauaagaagauuaaaaacaccagcacaaaugucaauacaacuaauaaacaaagcaguaaacgcuuuaauaaacgaccaacucauaaugaaaaaccauuuacgagauaucaugugcauaccauauuguaauuauucaaaauacugguauuuaaaucacaccguaacaggcaaaacaucacuaccaagaugcugguuaguaaguaacggcucuuauuuaaacgaaacacacuucagcgacgacaucgaacaacaagcagacaacaugaucacagaacuucuccaaaaagaauauauggacagacaaggaaaaacaccacuaggccuaguagaccucuuuguauucucuacauccuucuauuuaauauccauauuucuacaccuaguaaaaauccccacacaucgacacauaacaggaaaaccaugcccaaaaccacacagauuaaaccacauggguauauguucuugcggccuauacaaacaccccggaguacccguaaaauggaaacgauaa

SEQ ID NO: 5724 - RNA, 1473 nt, Artificial Sequence
  derived and/or modified protein sequence (opt6) from LASV(LASV1016-NIG-2009;Clade II)__AIT17798__GPCstabilized
augggacaaaucauaacauucuuucaagaagucccucauguuauagaagaaguaaugaacauaguauuaauagcacuaucacuacuagcaauacuuaaaggaauauacaacguagcaacgugcggcuuauuuggucuaguauccuuucuauuacuuugcggaagaagcugcucaacuacuuauaaaggaguauacgaacuacaaacucuagaauuagacauggcaucauuaaacaugacaaugccauuaucuuguaccaaaaacaauucccaucacuauaucaugguaggaaacgaaaccggacuagaacuaacauuaacaaacacaucaaucauaaaucauaaauuuuguaaucuaucagaugcacauaagaaaaaucuauacgaccacgcacuaaugucaauaaucuccacuuuccauuuaucuauaccaaauuucaaucaauacgaagcaauguccugcgacuucaacggaggaaaaauauccguacaauauaaccuaucacacaccuacgccguagaugccgccaaccacuguggaaccauagcaaacggaguacuacaaacauucaugcgcauggcauggggaggaagcuacauagcucucgauuccggaugcggauccugggauuguauaaugaccucauaccaauacuuaaucauacaaaauacuacuugggaagaucacugccaauucucacgacccucaccaauaggauaccuaggauuacucucacaaagaacaagagacauauauauauccagacgaagaagaggaacauucacauggacuuuaucagacagugaaggaaacgaaacaccaggcggauacugcuuaacaagauggaugcuaauagaagcagaacuaaaaugcuucggaaacacagcaguagcaaaaugcaaugaaaaacaugacgaagaauuuugcgacauguuaagacuauucgacuuuaauaaacaagcuauaaugagacuaaaaacaccagcccaaaugucuauacaacuaauaaacaaagcaguaaacgcacuaauaaacgaucaacuaauaaugaaaaaccaucuaagagacauuauguguauaccauacugcaauuacagcaaauacugguaccuaaaucacacuguaacaggaaaaacuucacuaccacgauguuggcuaguaucaaauggcucauaucuaaacgaaacucauuucuccgacgacauagaacaacaagcagacaauaugauaacagaaaugcuacaaaaagaauaccuagauagacaaggcaaaacaccauuaggucuaguagaccucuucguuuucucaacaucauucuaucuaauaucaauauuccuacaccuaguaaaaauaccaacacauagacacauaauaggaaaaccauguccaaaaccccacagauuaaaccauaugggaauaugcucaugcggauuauauaaacacccaggaguaccaguaaaauggaaaagauaa

SEQ ID NO: 5725 - RNA, 1473 nt, Artificial Sequence
  derived and/or modified protein sequence (opt6) from LASV(LASV221-NIG-2010;Clade II)__AIT17624__GPCstabilized
augggccaaaucauaaccuuuuuccaagaaguaccucauguaauagaagaaguaaugaacauaguucucaucgcacuaucacuccuagcaauacuaaaaggaauauacaacguugcaaccuguggauuauuuggauuaguaucauuuuuauuacucugcggcagaucuuguucaacaacauauaaaggaguauacgaauuacaaacauuagaauuagacauggcaucacuuaacaugaccaugccacuaucuugcacuaaaaacaauucacaccacuauaucaugguaggaaaugaaacaggauuagaauuaacauuaacaaacacaucaauaauaaaccacaaauucugcaaucuauccgacgcacacaagaaaaacuuauaugaccaugcacuuaugagcauaauaucuacauuucaccuaucaauaccaaauuuuaaccaauacgaggcaaugucuugcgacuuuaacggaggcaaaauaucaguccaauacaaccuaucacacaccuacgcaauagacgcagcaaaccacugcggaacaaucgcuaauggaguauuacaaacauucaugagaauggccuggggcggaagcuacaucgcauuagacucaggaugcggaucaugggacuguaucaugacaucauaccaauaccuuauaauacaaaacacaacaugggaagaccacugccaauucucacgaccaucccccauaggauaccuaggacuacuaucucaaagaacaagagacauauacauaucacgaagacgucgcgguacuuuuacauggacacucucagauuccgaaggcaacgaaacaccaggagguuacugccuaacaagauggaugcuuauagaagcagaauuaaaaugcuuuggaaauacagcuguagcaaaaugcaacgaaaaacacgaugaagaauuuugcgacaugcuaagauuauucgacuuuaauaaacaagcaauaagaagacuaaaaacaccagcccaaaugucaauacaacuaauaaacaaagcuguaaacgcccucauaaacgaccaauuaauaaugaaaaaucacuuaagagacauaaugugcaucccauauuguaacuauucaaaauacugguaucuaaaccauacaguaacaggaaaaaccagcuuaccaagaugcuggcuaguauccaacggaucauacuuaaacgaaacacacuuuucagacgacauagaacaacaagcugacaauaugauaacagaaaugcuucaaaaagaauauauggaccgacaaggaaaaacaccauuaggauuaguagaucucuucguauucucaacaucauucuacuuaauaucaauauuccuacaccucgucaaaauacccacacauagacauguaauaggcaaaccauguccaaaaccacacagacucaaccauaugggaauauguucaugcggucuauauaaacacccaggagucccaguaaaauggaaaagauaa

SEQ ID NO: 5726 - RNA, 1473 nt, Artificial Sequence
  derived and/or modified protein sequence (opt6) from LASV(LASV224-NIG-2010;Clade II)__AIT17626__GPCstabilized
augggacaaauaauaaccuucuuucaagaaguaccacacguaauagaagaagucaugaauauaguacuaauagcccuaagccuacuagcaauauuaaaaggcguauacaacgucgcaacaugcggacuauucggcuuagucagcuuccuacuuuuaugcggacgaucuuguagcacaacuuacaaagguguauacgaauuacaaacacuagaauuagauauggcaucuuuaaacaugacaaugccacuaaguugcacuaaaaacaacagccaccacuacauaaugguaggaaacgaaacaggauuagaacuaacacuaacaaauacauccaucauacaacacaaauuuuguaacuuaucagaugcacacaagaaaaaccuauaugaucaugcauuaaugucaauaaucucuaccuuccaucuaucaauaccaaacuucaaucaauacgaagcaauguccugcgauuucaauggaggaaaaauaacaguacaauacaauuuaucacacucuuacgccauagacgcagcaaaucacugcggcacaauagcaaacggaguacuacaaacauucaugagaauggcauggggcggaucauauauagcacuugacucaggaugcggcucaugggauugcaucaugacaucauaccaauaccuaauaauacaaaauacaacaugggaagaccacugucaauucucacgaccauccccaauagguuaccuaggauuauuaagccaacgcacaagagacaucuacauuucacgaagacgacgaggaaccuucacauggacuuuauccgacucagaagguaacgaaacaccagguggauacugcuuaaccagauggaugcucauagaagcugaacucaaaugcuuuggaaacacagccguagcuaaaugcaacgaaaaacaugacgaagaauuuugugacauguuaagauuauuugauuucaacaaacaagccauaagaagacuaaaaacuccagcacaaauguccauacaauuaauaaacaaagcaguaaaugcauuaauaaacgaucaauuaauuaugaaaaaccaccuacgagacauaaugugcaucccauacugcaauuacucuaaauauugguacuuaaaccacaccguuaccgguagaacaucauuaccuagaugcuggcuaguauccaauggaucauacuuaaaugaaacacacuuuuccgacgacauagaacaacaagcagauaacaugaucacagaacuacuacaaaaagaauacauggaucgacaaggcaaaacaccauuaggacucguagaccuauucgucuucucaacaucauucuacuuaauaucaauauuuuuacaccuaguaaaaaucccaacccacagacauauaauaggaaaacccugcccaaaaccacauagauuaaaucacaugggaguaugcucaugcggacuauauaaacauccaggagucccaguaaaauggaaaagauaa

SEQ ID NO: 5727 - RNA, 1473 nt, Artificial Sequence
  derived and/or modified protein sequence (opt6) from LASV(LASV225-NIG-2010;Clade II)__AIT17630__GPCstabilized
augggacaaaucauaacauucuuccaagaaguaccacacgucaucgaagaaguaaugaacauaguacucauagcauuaucacuucuagcaauucuaaaaggaauauacaauguagcaacuugcggauuauuuggauuauuaucuuuccuauuauuaugcggaagaucuugcucaaccacauauaaaggcguauacgaacuacaaacacucgaacuagacauggcaucucuaaacaugacaaugccauuaucaugcacuaaaaacaauucacaccacuacaucaugguaggaaaugaaacaggccuagaacuaacccuaacaaauacauccauaauaaaucauaaauucugcaaucuauccgacgcacauaagaaaaauuuauaugaccacgcacucaugucaauaauaucaacauuccauuuaucaauaccuaacuuuaaccaauacgaagcaaugucaugugauuucaacggaggcaaaauuucaguacaauauaaucuaucucacgccuaugccguagacgcagcagaacacugcggaacaaucgcaaauggaguauuacaaaccuucaugagaauggcauggggaggaucuuacauagcauuagacucaggaugcggaaguugggacuguguaaugacuagcuaccaauaucuaaucauccaaaauacuucuugggaggaccauugucaauuuucuagaccaucaccaauaggauaucuaggccuacuuucacaaagaacaagagacaucuacaucucacgacgcagaagaggcacauucacauggacauuaucagacagcgaaggcaacgaaacucccggaggcuacugcuuaacaagauggaugcuaauagaagcagaacuaaaaugcuuuggaaacacagcaguugcaaaaugcaacgaaaaacacgaugaagaauuuugcgacaugcucagacuauuugacuuuaacaaacaagcaaucagaagacuaaaaaccccagcacaaaugucuauacaacuuaucaacaaagcaguaaacgcacuaaucaaugaccaacuaauaaugaaaaaucacuuacgagacauaaugugcaucccauacugcaauuacucuaaauauugguaucucaaccacacaguuacuggaaaaacaucacuaccuagaugcuggcuagucucaaacggaagcuaccucaacgaaacacacuucuccgacgacauugaacaacaagcagacaauaugauaaccgaguuacuacaaaaagaauacauagaccgccaaggaaaaacaccauuaggucuaguagaccuauuuguauucucaacaaguuuuuacuuaauaagcauauuucuacaccuaguaaaaauacccacacauagacaugucauaggaaaaccauguccaaaaccacacagauuaaaccacaugggcaucuguaguuguggacuauauaaacacccaggcgucccaguuaaauggaaaagauaa

SEQ ID NO: 5728 - RNA, 1473 nt, Artificial Sequence
  derived and/or modified protein sequence (opt6) from LASV(LASV229-NIG-2010;Clade II)__AIT17634__GPCstabilized
augggacaaauuauaacauucuuucaagaagucccacauguaauagaagaagucaugaauauaguacuaauagcacuaucauuacuagcaauauuaaaagguauauacaacguagcaaccugcgguuuauucggauuagucagcuucuuacuacuauguggcagaucaugcuccacaauauacaaagauguauacgaauuacaaacacuagaauuagacauggcaucacuaaacaugaccaugccacuaucuugcaccaaaaauaacucacaccauuacauaaugguaggaaacgaaacuggauuagaacucacauuaacaaacaccucaaucaucaaccacaaauucuguaaccuaucagaugcacauaaaaaaaaucucuacgaccaugcacuaaugucuauaauaucaaccuuucauuuauccauccccaacuucaaucaauacgaagcaaugucaugcgacuuuaacggaggaaaaauaucaguacaauacaaucuaucacacacauacgcaauagacgcagcaaaccacugcggaaccauagcaaacggcguccuucaaacauuuaugagaauggccuggggaggauccuacauugcccuugacucuggaugcggaaguugggacuguauaaugacuagcuaucaauaccuaauaauacaaaauacaacaugggaagaccacugucaauucuccagaccaucccccauaggauaccuaggcuuacuaucacaaagaacacgugacauauauaucucaagacgucgcagaggaacauucacauggacucuaucagacucagaaggcaacgaaacacccggaggauauugucuaacaagauggaugcugauagaagcagaacuaaaaugcuuuggaaacacagcuguagcaaaaugcaacgaaaaacacgaugaagaauucugcgacaugcuaagacuauucgauuucaauaaacaagcaauaagacguuuaaaaacaccagcacaaaugucaauacaauuaaucaauaaagcagucaacgcacuaauaaacgaucaacucauaaugaaaaaucauuuaagagacauaaugugcauacccuauugcaacuacucucguuacugguaccuaaaccauacagucacaggaagaacuucacuaccaagaugcuggcuaguaucaaacggaucauaccuaaaugaaacacacuucuccgaugauauagaacaacaagcagacaacaugauaacagaacuauuacaaaaagaauacauggacagacaaggaaaaacuccccuaggauuagucgacuuauucgucuuuucuacaucauucuacuuaauaucaauauuucuucaucuaguaaaaaucccaacacaccgacacguaauuggaaaaccaugucccaaaccacauagauuaaaccauaugggaauauguucauguggccucuacaaccacccaggaguacccguaaaauggaaaagauaa

SEQ ID NO: 5729 - RNA, 1473 nt, Artificial Sequence
  derived and/or modified protein sequence (opt6) from LASV(LASV237-NIG-2010;Clade II)__AIT17638__GPCstabilized
augggacaaauaauaacuuucuuccaagaaguaccacacguaauagaagaagucaugaauauaguccuaauagcacucucauuacuagcaauacuaaaaggaauauacaacguagccaccugcggacuauucggauuaguaucauuccuucuuuuaugcgguagaucuugcucaacaacauacaaaggaguuuacgaauuacaaacacuagaacuagauauggcuucacuaaauaugacuaugccacuauccugcacaaaaaacaacucacaucacuacauaauggucggaaacgaaaccggucuagaauuaacauuaacaaacacaucaauuaucaaccauaaauuuugcaaucucuccgacgcacauaaaaaagaccuauacgaucacgcacuaaugucaauuaucucaacuuuccaccuaucaauaccaaauuuuaaucaauacgaagcaaugucaugcgauuuuaauggaggaaaaauaucuguacaauauaacuuaucacacaccuacgcaguagacgcagcaaaccauugcggaacaauagcaaacggaguuuuacaaacuuucaugagaauggcauggggaggauccuacauagcauuagacucaggaugcggaaguugggauuguauaaugacuucauaccaauaccucauaauacaaaauaccacuugggaagaccacugccaauucucacgaccuucaccaaucggauacuuaggucuccuaucacaaagaaccagagacauauacauaucaagacgaagacgcggaacuuucacauggacacuaucagauucugaaggaaacgaaacuccaggaggauacugcuuaacaagauggauguuaauagaagccgaacuaaaaugcuucggaaacacagcaguagcaaaauguaacgaaaaacacgacgaagaauuuugcgacauguuaagacucuucgacuucaauaaacaagcaauaagaagacuaaaaacaccagcacaaaugucuauacaacuaauuaauaaagcaguaaacgcauuaauaaaugaccaacuaauuaugaaaaaccaucuacgcgacauaaugugcauaccauacugcaacuauucuaaauauugguauuuaaaccacacaguaacaggaaaaacaucccuacccagguguugguuaguaagcaauggaucauacuuaaaugaaacacauuucucugaugacaucgaacaacaagcagacaauaugauaacagaacuacuucaaaaagaauacauggacagacaaggaaaaacaccauuaggucuaguagauuuauucgucuucucuacaucauuuuaucuaauaucaaucuucuuacaucuaauaaaaauaccaacccacagacauauaacaggcaaaccaugcccaaaaccucauagacuaaaccacaugggaauaugcucauguggccuauacaaacacccaggcgucccagucaaauggaaaagauaa

SEQ ID NO: 5730 - RNA, 1473 nt, Artificial Sequence
  derived and/or modified protein sequence (opt6) from LASV(LASV239-NIG-2010;Clade II)__AIT17642__GPCstabilized
augggucaaauaauaacauucuuccaagaaguaccucacguaaucgaagaaguaaugaauaucguccucauugcccuuucacuacuugcaauacugaaaggcguauacaauguagccacaugcggacuauuuggauuagucucauucuuacuauuaugcggaagaucauguucuacaaccuacaaagguguauacgaacuacaaacacucgaauuagauauggcaucgcuaaauaugacaaugccauuauccuguaccaaaaacaacucucaccauuacauaaugguaggaaacgacacaggccucgaacuaacacuuaccaacacaucaauaauaaaccauaaauucugcaaucuaucagacgcucauaagaaaaaucucuacgaucacgcacucaugucaauaauaucaacuuuccaccuaucuauaccaaacuuuaaucaauacgaagccaugucaugugacuucaacggaggaaaaauuagcguacaauacaacuuaucccaugcguacgcuguagaugcagcuucacauuguggaacaauagcaaauggaguuuuacagacauucaugcgaauggcaugggguggaucauacauagcacuagauucuggauguggaucaugggacugcaucaugaccaguuaccaauaccuaaucauacaaaacacaacuugggaagaucacugccaauuuucaagacccucaccaauaggauacuuaggccuacuaucccaaagaacaagagacauauacauaucaagacgaagaagaggaacauuuaccuggacccuaucugacucagaaggaaacgaaacacccggaggauacugucuaacucgauggauguuaauagaagccgaacucaaaugcuuuggaaacaccgcgguagcaaaaugcaacgaaaaacacgacgaagaauuuugugauauguuaagacuauucgauuucaacaaacaagcaauaagaagacuaaaaacaccagcacaaaugucuauacaauuaauaaacaaagcaguaaacgcacuaaucaacgaccaauuaauaaugaaaaaucaccuaagagacauaaugugcauaccauauuguaacuacucaaaauauugguacuuaaaccacacaguuacaggaaagacaucacucccaagaugcuggcuaguauccaacgggucauaucuaaaugaaacacacuucucagacgacaucgaacaacaagcagauaacaugaucacagaacuauuacaaaaagaauauauggacagacaaggaaaaaccccauuaggucuagucgacuuauuuguauucaguacaucuuucuaucuaauuucaaucuuccuccaucuaguaaaaauacccacacauagacacauaauaggaaaaccaugcccaaaaccacacagacuaaaucacauggguauauguucaugcggacucuacaaacauccaggaguaccuguaaaauggaaacgauaa

SEQ ID NO: 5731 - RNA, 1473 nt, Artificial Sequence
  derived and/or modified protein sequence (opt6) from LASV(LASV241-NIG-2011;Clade II)__AIT17646__GPCstabilized
augggacaaauaauaaccuucuuccaagaaguaccacacgucauagaagaaguaaugaauauaguacuuauagcccuaucacuauuagcuauccuaaaaggaaucuacaacguagccaccugcggacuauuuggacuaguaucauuccuccuacuaugcgggaggucuugcaguacaaccuacaaaggaguauacgaacuacaaacauuagaacuagauauggccucacuaaacaugacaaugccacucuccuguacaaaaaacaacucacaccacuacaucaugguaggaaacgaaacaggauuagaacuaacacuaacaaauacauccauaaucaaucacaaauucugcaaccuaucagaugcacacaaaaaaaaucuauacgaucaugcacuuaugucaauaauuucaaccuuccaccuuucaauaccuaacuuuaaccaauacgaagcaauguccugcgauuucaauggaggaaaaauaucaguacaauauaaccuaucccacgcauaugcaguagacgcagcaucacauugcggaacaguagccaacggagucuuacaaacauuuaugcgcauggcauggggcgguucauacaucgcuuuagacuccggaugcggcucaugggacugcauaaugacaucauaccaauaucuaauaauacaaaacacaacaugggaagaucauugucaauucucaagaccaucaccaauaggauaucuaggacuauuaucccagagaaccagagauauauauauaucacgaagaagacgaggcacuuuuacuuggacauuaucagacucagaaggcaacgaaacacccggcggauacugucuaacaagauggaugcuaauagaagcagaacuaaaauguuucggaaacacagcagucgccaaauguaacgaaaaacacgaugaagaauucugugauaugcuaagacucuucgacuucaacaaacaagcaaucagaagacuaaaaacaccagcacaaaugucaauacaauuaauaaauaaagcaguuaacgcuuuaauaaaugaccaacuaauaaugaaaaaucauuuaagagacauaauguguauaccauacugcaauuauucaaaauauugguacuuaaaccacacaguaacaggaaaaacaucacucccacgaugcugguuaguuucaaacggaucauaucuaaacgaaacccacuuuuccgacgacauagaacaacaagcagacaacaugauaaccgaauuacuacaaaaagaauacauggacagacaaggaaaaaccccacuuggucuaguagauuuauucguuuucucuacaucauucuaccuaauaucaauauuccuucaccucguaaaaauaccaacucaccgacauguaaucggaaaaccaugcccaaaaccacacagguuaaaccauaugggaauaugcucaugcggauuauacaaacauccaggaguaccaguaaaauggaaacgauaa

SEQ ID NO: 5732 - RNA, 1473 nt, Artificial Sequence
  derived and/or modified protein sequence (opt6) from LASV(LASV242-NIG-2010;Clade II)__AIT17650__GPCstabilized
augggccaaauaauaacauucuuccaagaaguaccacauguaauugaagaaguaaugaacauaguauuaauugcacuuucacuccuugcuauccuuaaaggaauauacaacguugcuaccugcggacucuuuggauuaguaucuuucuuauuauuaugcggacgauccugcucaacuacauacaaaggaguauacgaauuacaaacuuuagaacucgacauggccucacucaauaugacaaugccacuaucaugcaccaaaaacaacagccaccauuacaucauggucggaaacgaaacaggacuagaacuaacacuaacaaacaucucaauaauaaaccacaaauucugcaaccuaucagaugcccacaagaaaaacuuauaugaccaugcacuaaugucuauaauaucaacauuccacuuaucuauaccuaacuuuaaccaauacgaagcaaugucaugcgacuuuaauggaggaaaaauuucaguacaauacaaccucucucacacauacgccguagacgcagcuaaccauugcggaacaaucgcaaauggaguucuacaaacauuuaugcgaauggcuuggggaggaucauacauagcacuagacucaggauguggaagcugggauuguauaaugaccucuuaucaauaccuaauaauacaaaauacaacaugggaagaccacugccaauuuucacgaccaucccccauaggauacuuaggacucuuaucacaaagaacacgcgacauauauauaucaagaagaagaagagguacauucaccuggacuuuaucagauucagaaggaaaugaaacacccggaggauacuguuuaacaagauggaugcuaauagaagcagaacuuaaauguuucggaaauacagcuguagcaaaaugcaaugaaaaacaugacgaagaauuuugcgacauguuacgacuauuugacuuuaauaaacaagccauuagaagacuuaaagcaccagcacaaaugucuauacaauuaauaaacaaagcuguaaacgcacuaauaaaugaccaacuaaucaugaaaaaccaucuaagagacauaaugugcauacccuauugcaauuacucaaaauacugguaucucaaccauacaguaacaggacgcaccucacugccaagauguuggcuaguaucuaacggauccuaucuaaacgaaacacacuucucagacgacaucgaacaacaagcagacaacaugauuacagaauuauuacaaaaagaauacauagacagacaaggaaaaacaccacuaggucuagucgaccucuucgucuucucaaccucauuuuaccuaauaucaauauuucuacacuuagucaaaauaccuacacauagacauauaauaggaaaaccauguccaaaaccucauagacucaaccacaugggaauaugcucaugcggacuauacaaacauccuggaguacccguaaaauggaaaagauaa

SEQ ID NO: 5733 - RNA, 1473 nt, Artificial Sequence
  derived and/or modified protein sequence (opt6) from LASV(LASV246-NIG-2010;Clade II)__AIT17658__GPCstabilized
augggacaaauaaucacauucuuccaagaaguaccacauguaauagaagaaguaaugaauauaguacuaauagcauuaagucuauuagcaauacuaaaaggaguauacaauguagcaaccugugguuuauucggauuaguaucuuucuuacuacuaugcggcagauccugcucaaucacauacaaaggagucuacgaauuacaaacauuagaauuagauauggcgaaucuaaacaugacaaugccccuauccugcacaaaaaacaacucacaccacuauauaauggucggaaacgaaaccggauuagaacucacccuaaccaauaccucaaucauaaaucacaaauucugcaaccuaucagacgcacacaaaaaaaaccuauacgaucaugcacuaaugucaauaauaucaacauuucaucuaucaauaccaaacuuuaaccaauacgaagcaaugucaugugacuuuaacggagguaaaaucucaguucaauacaauuuaagccauacauacgcaggagacgcugcagaucauuguggcacaauugcuaacggaguacuacaaacauucaugagaauggcauggggaggauccuacauagcacuugacucaggauguggaucaugggacugcauuaugacaagcuaccaauaucuaaucauacaaaacaccacaugggaagaucacugucaauucucacguccaucucccaugggauacuuagguuuauuaucacaaagaacuagagauauauacauauccagaagaagacggggaaccuucacauggacucuauccgacuccgaaggcaacgaaacaccaggaggcuacuguuuaacaagauggaugcucauagaagccgaacuaaaauguuucggaaacacagcagucgcaaaaugcaaugaaaaacaugaugaagaauucugcgacauguuacgacuuuucgacuucaacaaacaagcuauccgaagacuaaaaaccccagcacaaaugucuauucaauuaauaaacaaagcaguaaacgcccuaauaaaugaccaacuaauaaugaaaaaccaccucagagacauuauguguauaccuuauugcaacuauuccaaauacugguaucucaaccacaccauaacaggaaaaacaucacuaccaagauguugguuaguaucuaacggaaguuacuuaaaugaaacacauuucuccgacgacaucgaacaacaagcagacaauaugauaacagaacuacuacaaaaagaauacauugacagacaaggaaaaaccccacuuggacuaguagacuuauuuguauucucuacaucauuuuaccuaaucucaauauuuuuacauuuaguaaaaauaccaacccaucgacauauaacaggaaaaccauguccaaaaccucacagacuaaaccacaugggaauaugcucauguggccuauacaaacaccccggaguaccaguaagauggaaacgauaa

SEQ ID NO: 5734 - RNA, 1473 nt, Artificial Sequence
  derived and/or modified protein sequence (opt6) from LASV(LASV251-NIG-2010;Clade II)__AIT17666__GPCstabilized
augggacaaauugucacauucuuccaagaaguaccacaugucauagaagaaguuaugaacauaguauuaauagcacuuagccuccuagcaauacuaaaaggcauuuacaacguagcaacaugcggacuuuuuggacucguaucauuccucuuauuaugcgguagaucuugcucaacaacauauaaaggcguuuacgaacuacaaacauuagaauuagauauggccucacucaauaugacuaugccacuaucaugcacuaaaaacaacucccaccacuacauaaugguaggaaacgaaacaggucuagaacuaacacuaacaaacacaucaauaauaaaccacaaauuuugcaacuuaucagacgcacacaaaaaaaacuuauacgaucaugcucuaaugucuauaauauccacauuucauuuaucaauaccaaacuucaaccaauacgaagcaaugaguugcgacuucaacggaggcaaaauauccguacaauacaaccuaucacacacauacgccguagacgcagccaaccacugcggcacaaucgcaaacggcguucuacaaacauucaugcgaauggcauggggcggaucuuacauagcacuagacucaggauguggaucaugggacugcaucaugacaucauaccaauacuuaauaauacaaaauaccacaugggaagaucacugccaauucucaagaccauccccaauaggauaccuuggacuacuaucacaaagaacuagagacauauacauaucacgaagaagaagaggaacauucacauggacauuauccgauucagaaggaaacgaaacacccggcggauauugccuaacaagauggaugcuaauagaagcagaauuaaaauguuucggcaacacagccgucgcuaaaugcaacgaaaaacacgaugaagaauucugcgacaugcuaagauuauucgacuucaacaaacaagcaauccgaagacuaaaaaccccagcacaaaugucaauucaacuaauaaauaaagccguaaacgcacuuauaaacgaccaacuaaucaugaaaaaccaucuacgcgacauaauguguauaccauauugcaauuacucaaaauacugguacuuaaaccacacaguaacuggaaaaacuucccuaccaagaugcuggcuaguaucuaacggaucauacuuaaacgaaacacacuuuucagacgauaucgaacaacaagcagacaacaugaucacggaacuccuacaaaaagaauauauggacagacaaggaaaaacaccacuaggauuaguugauuuauucguauucucuaccuccuuuuaccuaauaucuauauuccuacaccuaguaaaaauaccaacacauagacacauaacuggaaaaccaugcccaaaaccacacagauuaaaccacaugggaauaugcucaugcggacuuuauaaacacccugguguaccagucaaauggaaaagauaa

SEQ ID NO: 5735 - RNA, 1473 nt, Artificial Sequence
  derived and/or modified protein sequence (opt6) from LASV(LASV253-NIG-2011;Clade II)__AIT17670__GPCstabilized
augggccaaauaauaacauucuuucaagaaguaccacacguaauagaagaaguaaugaauaucguacuaauagcucucucacuccuagcaauacuaaaaggaauauacaacguagcuaccugcggccuauuuggccuugucuccuuccuacuccuaugcggacgaucaugcucaacaacauauaaaggagucuacgaacuucaaacauuagaacuagacauggcaucacuaaacaugacaaugccccuaucauguacaaaaaauaauucucaccacuauaucaugguagguaacgaaacaggccuagaacuaacccucacaaacaccucaauaauuaaccacaaauucugcaauuuauccgacgcacauaaaaaaaaccucuaugaccacgcacuaauguccauaauauccacauuccaucucucaauacccaacuucaaccaauacgaagcaaugucaugugacuucaauggaggaaaaauuucaguacaauacaaccucucacauacauacgccguugacgcagcaaaccacugcggcacaauagcuaacggcguccuacaaacauucaugagaauggccuggggaggaucauauauugcuuuagauucaggauguggauccugggauugcauaaugacaucauaccaauaccuuauaauacaaaacacaacaugggaagaccauugccaauucucaagaccaucacccauaggauaccuaggacuauuaucacaacgcacacgagacaucuauauaucaagaagaagacgaggaacauucacauggacacucuccgacuccgaaggaaaugaaacaccaggaggauacugucuaaccagauggauguuaaucgaagcagaacuaaaaugcuucggaaacacagcaguagcaaaaugcaacgaaaaacaugaugaagaauucugcgacaugcuacgauuauucgauuucaauaaacaagccauaagacgacucaaagcaccagcacaaaugucaauacaacuaauaaauaaagcaguuaacgcacuaauuaacgaucaacuaauaaugaaaaaucacuuaagagauauaaugugcauaccauacuguaacuacuccaaauacugguacuuaaaccauacaguaaccggaagaacaagccuaccaagaugcuggcuagugucaaacggaucauaucucaacgaaacacauuucucagacgauaucgaacaacaagcagacaauaugauaacagaauuauuacaaaaagaauacaucgacagacaaggaaaaacuccauuaggauuaguagaucuauuuguauucucaacuucauucuauuuaauaucaauauucuuacacuuaguaaaaaucccaacacacagacacauaauaggcaaaccuugcccuaaaccacacagauuaaaccauaugggaaucugcucaugcggauuauauaaacacccaggagucccagucaaauggaaacgauaa

SEQ ID NO: 5736 - RNA, 1473 nt, Artificial Sequence
  derived and/or modified protein sequence (opt6) from LASV(LASV254-NIG-2011;Clade II)__AIT17674__GPCstabilized
augggacaaauaaucacauucuuucaagaaguaccacacguaauagaagaaguaaugaacauaguccuaauagccuuaagucuccuagcaauauuaaaaggaaucuauaauguugcaacaugcggcuuauucggucuaguaucauuucuauuacuaugcggaagaucauguuccacaaccuauaaaggaguauacgaauuacaaacccuggaacuagacaugacaaacuuaaauaugacaaugccacuuaguugcaccaaaaauaauucacaccacuacauaauggucggaaacgaaacaggauuagaauuaacacuaacaaacacaucuauaauaaaccacaaauucugcaauuuaucagaugcucacaagaaaaaccuauacaaucacgcauuaauguccauaauauccaccuuccaucuaucaaucccaaacuuuaaccaauacgaagcaauguccugcgacuuuaacggaggaaaaauaucaguacaauauaacuuaucccacucauaugcaguagaugccgccaaucacugcggaacaauagcaaacggaguacuacaaacauucaugagaauggcuuggggaggaagcuacauugcccuagacucaggauguggaaauugggauuguaucaugacauccuaucaauaccuaauaauacaaaauaccacaugggaagaucacugccaauucucacgaccaucaccaauaggauauuuaggacuccucucccaacgaacucgagacauuuauauuucacgaagacgaagaggaacuuucacauggacucuaucagauagcgaaggaaaugaaacacccggaggauauugccuaacaagauggaugcugauagaagcagaacuaaaauguuucggaaauacagcaguagcaaaaugcaaugaaaaacaugacgaagaauuuugcgauauguuaagauuauucgacuucaacaaacaagcaauacgcagacuuaaaacaccagcacaagcaaacauacaacuaauaaacaaagcaguaaaugcauuaauuaacgaccaacuaauaaugaaaaaccaucuaagagacaucaugugcauaccauauuguaacuauucaaaauauugguaccuaaaucacacaguaacaggaaaaaccucacuaccuagguguugguuaguaucaaacggaagcuaccuaaacgaaacacauuucuccgacgacauagaacaacaagcagacaacaugauaacugaacuauuacaaaaagaauauauggacagacaaggaaaaacgcccuuaggacuuguagacuuauucguauucucaaccucauuuuaccuaauaucaauauuccuacaccucguaaaaauaccaacacacagacaugucauaggaaaaccuugcccaaaaccucacagacuaaaccacaugggaauaugcuccugcggccuauacaaacauccaggaguaccuguaaaauggaaaagauaa

SEQ ID NO: 5737 - RNA, 1473 nt, Artificial Sequence
  derived and/or modified protein sequence (opt6) from LASV(LASV256-NIG-2010;Clade II)__AIT17678__GPCstabilized
augggccaaauaauaacauucuuucaagaaguaccccacguaauagaagaaguaaugaauaucguauuaauaaccuuaucucuacuagcaauacuaaaaggaauauacaauauugccacauguggacuauucggacucguauccuuucuacuacuaugcgguagaucauguucaacaacuuacaaaggaguauacgaguuacaaacucuagaacuagacaugacuucacuaaacaugacaaugccccucucaugcacaaaaaacaacucucaccacuacauaaugguaggaaacgaaacaggacuagaauuaacacucacaaacacaucaauaauaaaccacaaauucugcaaccuaucagaugcacacaaaaaaaaccuauacgaccacgcacucaugucaauaaucucaacauuccaccuauccauaccaaacuuuaaucaauaugaagcuaugucaugugauuucaacggaggaaaaauaucaguacaauacaacuuaucacacacauacgcaguagaugcagcuaaccacugcggaacaauagcaaauggcguucuacaaaccuuuaugcguauggccuggggaggaaguuauauagcacuagacucaggcugcggaucuugggacugcauaaugaccaguuaccaauaccucauaauacaaaacacaacaugggaagaccacugucaauuuucaagaccaucaccuauuggauaucuaggacucuuaucacaacgaacaagagacauauacauaucaagaagacgacgaggcacauuuaccuggacauuauccgauucagaaggaaacgaaacuccaggaggauacugucuaacaagauggaugcuaauagaagcagaacuaaaaugcuucggaaacacagcuguagcaaaaugcaaugaaaaacacgacgaagaauucugcgacaugcuuagacuuuuugauuucaauaaacaagcaaucagaagacuaaaaacaccagcacaaaugucaauccaacucauaaauaaagccguuaacgcacuuauaaacgaccaauuaauuaugaaaaaucaccuucgagauauaauguguaucccauacuguaacuacucaaaauacugguaccuaaaccacacaguaacaggaaaaacaagcuuaccuagaugcugguuaguaucaaauggcuccuaccucaacgaaacacacuuuucagacgacauagaacaacaagccgauaacaugauuacagaacucuuacaaaaagaauacauagacagacaaggaaaaacaccacuaggauuaguagaccuauucguauucucuaccagcuucuaucuaauaucuauauuccuacaccuaguaaaaauaccuacacauagacacauaauaggaaaaccaugcccaaaaccacacagauuaaaccacaugggcauaugcucaugcggccuuuacaaacacccaggaaucccaguaaaauggaaacgcuaa

SEQ ID NO: 5738 - RNA, 1473 nt, Artificial Sequence
  derived and/or modified protein sequence (opt6) from LASV(LASV267-NIG-2010;Clade II)__AIT17686__GPCstabilized
augggucaaaucauaacuuucuuccaagaaguaccccauguaauagaagaaguaaugaacaucguacuuauagcacuaucucuacuagcaauacuuaaagguaucuauaaugucgcaacaugcggacuauucggacuaguauccuuccuuuuacucuguggccgaagcugcucaacaaccuacaaaggaguauaugaacuacaaacacuagaauuagauauggcauccuuaaacaugacaaugccacuaucauguaccaaaaacaacucccaccacuauauaaugguaggaaacgaaacaggauuagaauuaacccuuacaaauacaucuauuauaaaccacaaauucugcaaccuaucugacgcccacaaaaaaaaucuuuaugaucacgcauuaaugucaauaauaucuacauuucaccucucaauacccaauuucaaccaauacgaagcaaugucaugugacuuuaacgguggaaaaauaagcguacaauacaacuuaucacacacauacgcaguagaugcagccaaccacugcggaaccauagcaaacggcguacuacaaaccuucaugagaauggcuuggggagguucauacauagcacuagacuccagaugcggauccugggacuguauaaugacaucauaucaauaccucauuauccaaaacacaacaugggaagaccauugccaauuuuccagacccucuccaauaggauaucucggacuucuaucacaaagaaccagagacauauacauaucaagacgaagaagagggacauucaccuggacacuauccgacuccgaaggcaacgaaacaccaggaggauacugucuaaccagauggaugcucauagaagcagaacucaaaugcuucggaaacacagcagucgcaaaaugcaaugaaaaacacgacgaagaauuuugugacaugcucagacuauucgacuucaauaaacaagcuauacgcagacuaaaaacaccagcacaaaugucuauacaacuaauaaauaaagcaguaaacgcauuaaucaacgaccaauuaauaaugaaaaaucacuuaagagauauaauguguauacccuacuguaacuacucaaaauacugguacuuaaaucacacuguaacaggaaaaacaucauuacccagaugcugguuaguauccaacggauccuaccuaaacgaaacacacuucucagaugacaucgaacaacaagcagauaacaugauaacagaauuacuucaaaaagaauacauggacagacaagguaaaacaccucuaggacuaguagacuuauucguuuucucaaccucauucuaccuaauuucaauauucuuacaucuaauaaaaauacccacccacagacacguaauaggaaaaccuugcccaaaaccacaucgauuaaaccacaugggaauauguucaugcggucuauauaaacacccaggaguaccagucaaauggaaacguuaa

SEQ ID NO: 5739 - RNA, 1473 nt, Artificial Sequence
  derived and/or modified protein sequence (opt6) from LASV(LASV271-NIG-2010;Clade II)__AIT17690__GPCstabilized
augggacaaauaauaacuuucuuccaagaaguaccacacguaauugaagaaguaaugaacauaguauuaauagcacucucucuacuagcaauacuaaaaggaauauacaacgucgcuaccugcggccuauucggauuaguaagcuucuuauuacucugcggaagaucaugcucaacaacauauaaaggaguauacgaacuucaaacauuagaacuugacauggcaucuuuaaauaugacaaugccccuuucaugcacaaaaaauaacucacaccacuauauaaugguaggcaaugaaaccggacuagaacuaacacuaacaaauaccucaauaaucaaucacaaauucugcaaucuuagugacgcacauaaaaaaaaccuauacgaccacgcacuaauguccauaaucucaacuuuccacuuaucaaucccaaauuuuaaucaauaugaagcaauguccugcgacuuuaacggaggaaaaaucucaguacaauacaaccuaucacacgcauaugccguagacgccgcuagucacugcggaacaguagccaacggaguauuacaaacauuuaugagaauggcauggggaggcuccuacaucgcacuagauucaggaugcggauccugggauugcauaaugacaucauaccaauaccucauaauacaaaacacaacaugggaagaccauugucaauuuuccagaccaucaccaauuggcuacuuaggacuacuaucacaaagaacaagagacauauauauaucaagaagacgacgaggaacauucacuuggacacuaucagauucagaaggaaaugaaacuccuggcggauacugccucacccgauggaugcuuauagaagcagaacuaaaaugcuucggaaauacagcaguagcaaaaugcaaugaaaaacaugacgaagaauucugugacaugcuaagacuguucgacuucaacaaacaagcaauaagacgacuaaaaacacccgcccaaaugucaauacaacuaauaaacaaagcaguaaacgcuuuaauuaacgaccaacuaauaaugaaaaaucacuuaagagacauaauguguaucccauacugcaacuacucaaaauauugguacuuaaaucacaccguaacaggcagaacaucacuaccaagaugcugguuaguaucaaacggaucuuaccuuaacgaaacacauuuuucagacgacaucgaacaacaagcagacaauaugauaaccgaauuauuacaaaaagaauacauggauagacaaggaaaaacaccauuaggucuagucgauuuauucgucuuuucuacauccuuuuaccuaauaucaaucuucuuacaccuaguuaaaauaccuacccaucgacacguaauaggaaaaccaugcccuaaaccacauagacuuaaccacaugggaauaugcagcugcggccuauauaaacaccccggagucccaguaaaauggaaaagauaa

SEQ ID NO: 5740 - RNA, 1473 nt, Artificial Sequence
  derived and/or modified protein sequence (opt6) from LASV(LASV274-NIG-2010;Clade II)__AIT17694__GPCstabilized
augggacaaauaauaacauucuuccaagaaguaccacacguaauagaagaagucaugaauauaguccuaaucgcacuauccuuacuagcaauccuaaaagguaucuacaauguagcaacuugcggauuauucggacuagucagcuucuuacuacucugcggacgaucaugcuccacaaucuauaaaggaguauacgaauuacaaaccuuagaacuagacauggcaucucuaaacaugacaaugccucuaucaugcacaaaaaacaauucacaucacuacauaaugguaggaaacgaaacagguuuagaacuuacacuaacaaacacaucuauaauaaaucacaaauucugcaaccuaucagacgcucauaaaaaaaacuuauaugaccacgcuuuaaugucaauaauaucaacauuccaucuauccauaccaaacuucaaccaauacgaagcaaugucaugugacuuuaauggcggaaaaauaucuguacaauacaacuuaucacacacauaugcugucgacgcagcaaaccacuguggcacaauagcaaacggagucuuacaaacauuuaugagaauggccuggggcggaucauacauagcauuagacucaggcugcggaucaugggauugcauaaugaccucauaucaauaccuaaucauucaaaacaccacaugggaagaucauugucaauucucaagaccaucacccauaggauaccuaggccuucuaucacaaagaaccagagacauauacauuucacgacgaagaagaggaacuuuuacuuggaccuuaucugacucagaaggcaaugaaacacccggaggauacugccuuacacgauggaugcuaauagaagcagaacuaaaauguuucggaaacacagcaguagcaaaauguaacgaaaaacaugacgaggaauuuugcgacaugcuacgauuauucgacuucaacaaacaagcaauccgucgacuuaaaacaccagcacaaaugucaauacaacuaauaaacaaagcaguaaacgcauuaauaaacgaucaacuaauaaugaaaaaccaccuccgagauauaaugugcauaccauauugcaauuacuccaaauacugguaucuaaaccacacuguaacuggaaaaacaucauuacccagaugcuggcuaguguccaacgguucuuacuuaaaugaaacacauuucucagaugacauagaacaacaagcggacaauaugauaacagaauuauuacaaaaagaauacauagacagacaaggaaaaacaccauuaggacuaguagauuuauucguauucucaacaaguuucuacuuaauauccauauuccuacaucuagucaaaauaccaacacacagacacguaguaggaaaaccaugcccaaaaccacaccgacugaaccacaugggaaucugcuccugcggacuuuauaaacaccccggaguucccgucaaauggaaaagauaa

SEQ ID NO: 5741 - RNA, 1473 nt, Artificial Sequence
  derived and/or modified protein sequence (opt6) from LASV(LASV719-NIG-2009;Clade II)__AIT17704__GPCstabilized
augggucaaauaauaaccuucuuccaagaaguaccacacgucaucgaagaaguaaugaacauaguccuaauagcacuaucauuauuagcuauacuuaaaggaauauacaauguagcaacauguggacuauucggacucguaucuuuucuacuacuuugcggaagaucuuguucaacaacauacaaaggaguauacgaauuacaaacauuagaauuagauauggcaucacuaaacaugacaaugccuuuauccugcacaaaaaacaauucccaucacuacauaaugguaggaaacgaaaccggacucgaacuuacacuaacaaacacaucuauaauaaaccacaaauucugcaacuuaucagacgcucauaaaaaaaaucuauacgaccaugcccuaauguccauaauaucaacauuccaccuauccauaccaaauuucaaucaauacgaagccaugucaugcgauuuuaacggaggcaaaauaucuguacaauacaaucucucacacacauacgcuguagacgcagcaaaccacugcggaacaauagcaaacggagucuuacaaacauuuaugagaauggccuggggcggcucauacaucgcauuagacucaggcugcggaucaugggacugcauaaugaccucuuaccaauaccuaauaauacaaaacacuacaugggaagaccacugccaauuuuccagaccuucaccaaucggauaucuaggauuacuaucacaaagaacccgugauauuuacauauccagacgcagaagaggaacuuucacauggacacuaucugacagcgaaggaaacgaaacacccggaggauauugucuaacacgauggauguuaauagaagccgaacuaaaaugcuucggaaauacagccgucgcaaaaugcaaugaaaaacacgacgaagaauucugcgacauguuaagacucuucgacuucaauaaacaagcaauaagacgacuaaaaacacccgcacaaaugucaauacaauuaaucaauaaagccguaaacgcccuaauuaaugaccaacuaauaaugaaaaaucaucuccgagacauaaugugcaucccauauugcaacuauucuaaauacugguaucuaaaccacacaguaacaggaaaaacaucacucccaagauguuggcuaguaucaaacggaucauaccuaaacgaaacccauuuuucagaugacauagaacaacaagcagacaacaugaucacagaacuacuacaaaaagaauacauagacagacaaggaaaaacaccccucggcuuaguagaucuauucgucuuuucuacaucauuuuauuuaaucucaauauuuuuacaccuuguaaaaauaccaacacacagacauguuauaggaaaaccaugcccaaaaccacacagacucaaccauauggguauaugcuccugcggauuauacaaacacccagguguaccagucaaauggaaacgcuaa

SEQ ID NO: 5742 - RNA, 1473 nt, Artificial Sequence
  derived and/or modified protein sequence (opt6) from LASV(LASV738-NIG-2009;Clade II)__AIT17712__GPCstabilized
augggacaaauaauaacauuuuuccaagaaguaccucacgucauagaagaaguaaugaauaucguccuaauagcacuaucuuuacuagcaauuuuaaaaggaauauauaacguagcaacuugcggccuauuuggccucgucuccuuccuacuacuaugcggaagaucaugcuccacaaccuauaaaggaguauaugaauuacaaacacuagaauuagacauggcaucccucaacaugacaaugccccuauccuguacaaaaaauaacucacaccauuauauaaugguuggaaacgaaacuggacucgaacuaacacuaaccaauacuucaauaaucaaccacaaauuuugcaaccuaucagaugcacauaaaaaaaaccucuacgaucacgcuuuaaugaguauaauaucaacauuccaccuaucaauaccaaauuucaaccaauaugaagcaaugaguugcgacuucaacggcggaaaaauaucuguccaauacaaucuuucacacaccuaugcaguagaugcagcaaaccacugcggaacaauagcaaacggaguacuacaaacauucaugagaauggccuggggcggcucauauaucgcacuagauuccggcuguggagcaugggacugcaucaugacaucuuaccaauaccuaauaauacaaaacacaaccugggaagaccauugccaauuuucaagaccauccccaauaggauaucuaggacucuuaucccaaagaacacgagacauauacaucucucgucgcagaagaggcacauuuacuuggacacuaucagacuccgaaggaaacgaaacacccgguggcuacugucucacaagauggauguuaauagaagcagaacucaaauguuucggcaauaccgcaguugcuaaaugcaacgaaaaacacgacgaagaauucugcgacaugcuaagacuauucgauuucaacaaacaagcaauaaugagacuuaaaacaccagcacaaaugucaauacaauuaauaaauaaagcaguaaacgcauuaauaaaugaucaacuaauaaugaaaaaccauuuaagagacaucaugugcauaccauauugcaacuacucuaaauauugguaccuaaaccacacagucacuggaaaaacaucacuaccaagaugcugguuagucucuaauggcucuuauuuaaacgaaacacacuucuccgacgacauagaacaacaagcugacaacaugaucacagaaaugcuucaaaaagaauacauagacagacaaggaaaaaccccauuaggacuaguagauuuauucguauucucaacaucauucuaccucauaucaauauuuuuacaccuaguaaaaauaccaacucacagacacguaauagguaaaccaugcccaaaaccacacagauuaaaccacaugggaaucugcaguugcggccuauacaaacacccaggaguaccagucagauggaaaagauaa

SEQ ID NO: 5743 - RNA, 1473 nt, Artificial Sequence
  derived and/or modified protein sequence (opt6) from LASV(LASV966-NIG-2009;Clade II)__AIT17718__GPCstabilized
augggacaaaucauaacauucuuucaagaagucccccauguaauagaagaagucaugaacauaguacuaaucgcauuaaguuuacuagcaauuuuaaaaggaauauacaacguagcaacauguggacuauucggacuaguaucauuccuacuuuuaugcgguagaagcuguuccacaacuuacaaaggugucuacgaacuacaaacacucgaacuagacauggcauccuuaaacaugacaaugccacuaucuugcaccaaaaauaauucacaucacuauauaagaguuggcaacgaaaccggacucgaacucacauuaacaaacgcauccaucauaaaccacaaauucugcaacuuaucagacgcccauaaaaaaaaccucuacgaccacgccuuaaugucaauaaucucuaccuuccaccuaaguauuccaaacuuuaaucaauacgaagcaaugucuugugacuuuaacggaggaaaaaucucuguacaauacaauuuaagccacgcauacgcuauagacgccgccaaccacuguggaacuguagcaaacggaguauuacaaacuuucaugagaauggccuggggcggcucauauauagcauuagacucuggaugcggaaacugggauugcauaaugacaucuuaccaauaccuaauaauacaaaacacuacuugggaagaccauugccaauuuucucgcccaucacccauaggauauuuaggacucuuaucacaacgaacaagagauaucuauauaucaagaagacgcagaggcacauuuaccuggacauuaucagauucugaaggcaaugaaacaccuggcggauacugcuuaacaagauggaugcuaauagaagcagaacuaaaaugcuucggaaacaccgcaguagcaaaaugcaaugaaaaacacgacgaagaauucugcgauaugcuaagauuauucgauuuuaauaaacaagcaauacgccgccuaaaaacaccagcccaaaugucaauccaacucauaaacaaagcaguaaaugcacuaauaaaugaucaauuaaucaugaaaaaucacuuacgcgauauaaugugcaucccuuacugcaacuacuccaaauacugguaucuaaaccacacaguaacaggaaaaacaucacuacccagaugcuggcuaguauccaacggaucauaccucaaugaaacacacuucucagaugauauagaacagcaagcagacaacaugaucacugaacuacuccaaaaagaauacauggaccgacaaggaaaaaccccacucggacuaguagaccucuucguauucuccacaucauucuaccuaauaucuaucuuccuacaccuaguaaaaauaccaacacacagacauguaauagguaaaccaugcccaaaaccccacagacucaaccacaugggaaucugcucaugcggcuuuuauaaacaucccggaguaccaguaaaauggaaacgauaa

SEQ ID NO: 5744 - RNA, 1473 nt, Artificial Sequence
  derived and/or modified protein sequence (opt6) from LASV(LASV969-NIG-2009;Clade II)__AIT17724__GPCstabilized
augggacaaauaauaacauuuuuccaagaagucccucauguuauagaagaaguaaugaauauaguauuaauagcacuaucacuacuugcaauacucaaaggaauauacaauguagcaacaugcggacuauucggacucguaucuuuccuacuauuauguggccgcucaugcucaacaacauacaaaggaguauacgaguuacaaacacuagaacuagauauggcaaaccuaaauaugacaaugccuuuaucauguaccaaaaauaacucacaccacuacauaaugguaggaaacgaaaccggacucgaauuaacauuaacaaacacaaguauaauaaaccacaaauuuugcaaucuaucagacgcacauaaaaaaaauuuauaugaucacgccuuaaugucaauuauaucaacauuucauuuauccauaccuaacuucaaucaauaugaagcaaugucaugcgacuuuaacggcggaaaaauauccguacaauacaaucuaucucauacauacgcaguagacgcagcaaaccacugcggaacaguugcaaacggaguacuucaaacauucaugagaauggcauggggaggaucauacauagcccuugacucuggauguggaucaugggacugcauaaugacaucuuaucaauaucuaauaauacaaaauacaaccugggaagaucauugucaauucucccgcccaucacccauaggcuaccuaggucuucuaucacaacgaacacgagacauauauauauccagacgaagaagaggaacauuuacauggacacuaucagacuccgaaggaaaugaaacuccaggaggauacugccuuacaagauggauguuaaucgaagcagaauuaaaaugcuucggaaauacagccgucgccaaaugcaacgaaaaacacgacgaagaauuuugcgauaugcuaagauuauuugauuuuaacaaacaagcaauaagaagauuaaaaacaccagcucaaaugucuauccaauuaauaaacaaagcagucaaugcauuaauaaacgaccaacuaaucaugaaaaaucacuuaagagacauaauguguauacccuauugcaauuacucaaaauacugguaccuaaaccauacuguaacaggaaaaacaucucuaccuagaugcugguuaguaucaaacggaucuuaccuaaacgaaacccacuucucagacgacauugaacaacaagcugacaauaugauaaccgaacuauuacaaaaagaauacauggaccgacaaggaaaaacccccuuaggacuaguagaccuauuugucuucucaacaucauucuauuuaauaaguauauuccuccaccuaguaaaaauacccacacacagacauaucauggguaaaccuugcccaaaaccacaccgacuaaaccauaugggcaucuguucaugcggccucuacaaacauccaggaguaccaguuaaauggaaaagauaa

SEQ ID NO: 5745 - RNA, 1473 nt, Artificial Sequence
  derived and/or modified protein sequence (opt6) from LASV(LASV971-NIG-2009;Clade II)__AIT17728__GPCstabilized
augggacaaauaauaaccuucuuucaagaaguuccacauguuauagaagaaguaaugaauaucguauuaauagcauuaagccuacuagcaauacuuaaaggaauauacaacguagcaacauguggauuauuuggccuaguaucauucuuacuauuauguggaagauccuguucuacaacauacaaaggaguauaugaacuacaaacacuagaacuagauaugggaucccuaaacaugacaaugccacuuaguugcacuaaaaacaacucacaccacuauauaaugguaggaaaugaaacuggacuagaacuaacccuaacaaauacaucaauaauaaaccacaaauucugcaaccuaucugaugcccauaaaaaaaaccuuuacgaccacgcacuaaugucaauaauaucaacuuuccaccuuucaauacccaacuuuaaucaauaugaagcaauguccugcgacuucaaugguggaaaaauaaguguccaauacaaccucucacauacuuacgccguagacgcagcaaaccacugcggaacaauagcaaacggaguacuacaaaccuuuaugagaauggcuuggggcggaagcuacauagcacuagauucaggaugcggaucaugggacugcauaaugacaucauaucaauaccuaaucauacaaaacacuacaugggaagaccauugccaauucucacgaccaucaccaauaggauacuuaggacuauuaucacaacgaacccgagacauauauauaucucgcagacgacgaggcacauuuacauggacacuuuccgacucugaaggaaacgaaacaccaggagguuacugccuaacaagauggauguuaaucgaagcugaacuaaaaugcuuugguaacacagcaguagcaaaaugcaacgaaaaacacgacgaagaauuuugcgacaugcuaagacuauucgauuuuaacaaacaagcaauacgaagacuaaaaacaccagcacaaaugucaauacaacuaauaaacaaagcaguaaacgcauuaauaaacgaucaacuaauaaugaaaaaucacuugagagauaucaugugcauaccauacugcaauuauuccaaauauugguaccuaaaucacaccguaacuggaaaaacuucuuuaccaagaugcuggcucgucaguaacggaucauauuuaaacgaaacacacuucucagaugauaucgaacaacaagccgacaacaugauuacagaauuacuacaaaaagaauacauggaccgacaaggaaaaacaccacuaggacucguugaccuauuuguauucucaacaucuuuuuaccuaauaucuauauucuuacaucucguaaaaaucccaacacauagacauguuauaggaaaaccaugcccaaaaccccacagauuaaaccauauggguauaugcucauguggacucuacaaacaucccggaguucccguaaaauggaaaagauaa

SEQ ID NO: 5746 - RNA, 1473 nt, Artificial Sequence
  derived and/or modified protein sequence (opt6) from LASV(LASV975-NIG-2009;Clade II)__AIT17732__GPCstabilized
augggccaaaucauaaccuucuuucaagaaguaccacauguaaucgaagaagucaugaauauagucuuaaucgcuuuaucccuacuagcaauacuaaaaggaauauauaacguagcaacauguggacuauuuggacuaguaucuuuuuuauuacuaugcggaagaucuuguuccacaaccuacaaagguguauacgaauuacaaacauuagaacucgacauggcaucauuaaacaugacaaugccauuauccugcacaaaaaacaacucacaucauuauauaaugguuggcaacgaaacaggauuagaacucacacuaacaaacacgucgauaaucaaccauaaauucuguaaucucuccgacgcacauaaaaaaaaccuauacgaucacgcacucaugucuauaauaucaaccuuucaccucuccauaccaaacuuuaaucaauacgaagccaugaguugcgacuuuaacggaggaaaaauaucaguacaauacaaccuaucucacacauacgcagucgacgcugcaaaucauuguggaacaauagccaacggaguacuacaaacauucaugagaauggcuugggguggaucauacauagcucucgauucaggaugcggcucaugggacugcauaaugaccaguuaccaauaccuaauaauacaaaacacaacaugggaagaccauugccaauuuucuagaccaucaccaauaggcuaccuaggccuauuaucacaacguacuagagauaucuacaucucacgaagaagaagaggaacauuuacauggacacuauccgacucagaaggcaacgaaaccccaggaggauacugccuuacaagauggauguuaauagaagcagaauuaaaaugcuucggaaacaccgcaguagcaaaaugcaacgaaaaacacgacgaagaauucugugacaugcuuagauuauucgauuuuaacaaacaagcaaucagaagauuaaaaacaccugcucaaaugucuauacaauuaaucaacaaagcagucaacgcucuaauaaaugaccaacuaauaaugaaaaaccaccuaagagacauaauguguauaccauacugcaacuauucaaaauacugguaccucaaucauacaguaacaggaaaaacaucacuaccaagauguuggcuaguaucaaauggaucauacuuaaacgaaacacacuucucagacgauauagaacaacaagcagacaacaugaucacugaacuacuacaaaaagaauacauagaucgucaaggaaaaacaccauuaggacuuguagacuuauucguauucucaacaucauuuuacuuaauauccaucuuccuacacuuagucaaaauaccaacccaucgacauauaguaggaaaaccaugcccaaaaccccauagacucaaccacauggguauaugcucaugcgguuuauauaaacauccaggaguaccagucaaauggaaaagauaa

SEQ ID NO: 5747 - RNA, 1473 nt, Artificial Sequence
  derived and/or modified protein sequence (opt6) from LASV(LASV976-NIG-2009;Clade II)__AIT17736__GPCstabilized
augggccaaauaguaacauucuuucaagaaguaccacacguaauagaagaaguaaugaauauaguacuaauagcccuuucuuuauuagcuauauuaaaaggaaucuacaacguugcaacaugcggauuauucggauuagucucauuucuauuacuauguggaagaucuugcucaacaacauacaaaggcguuuacgaacuacagacacuagaauuagauauggcaucacuaaacaugacaaugccacucucuugcacuaaaaauaacucacaucacuacaucaugguaggaaacgaaacaggauuagaacuaacuuuaacaaacacaucaaucauaaaccacaaauucugcaaucuaucugaugcacacaagaaagauuuauacgaccacgcacuaaugucaauuauaucaacauuccaccucuccauacccaacuucaaccaauacgaagcaaugucaugcgacuucaauggaggaaaaauauccguacaauauaauuuaucacauacauacgcaguugacgccgcuaaccacugcggaacaauagccaacggaguauuacaaacauuuaugcgcauggcauggggaggcuccuacauagcuuuagacucaggcuguggcucaugggacuguaucaugacaucauaucaauaccuaauuauacaaaauaccacaugggaagaucacugccaauucucuagaccaucacccauaggauaccuaggauuauuaucacaaagaacaagagacauauauauaucaagacgaagaagaggcaccuucaccuggacauuaucagacucagaaggaaacgaaacaccaggaggauacugcuuaaccagauggaugcuaauagaagcagaacucaaaugcuucggaaauaccgcaguagccaaaugcaaugaaaaacaugacgaagaauuuugcgacaugcuacgacuauucgacuucaauaaacaagccauaaugagacucaaaacacccgcacaaauguccauacaacuaauaaacaaagcaguaaacgcauuaauaaacgaucaauuaauaaugaaaaaccacuuaagagacauaauguguauaccauacugcaacuacuccaaauacugguaccucaaccacacaguaacaggcaaaacauccuuaccccgaugcuggcuagucucaaauggcucauaucuaaaugaaacuagauuuucagacgacauagaacaacaagcagacaacaugauaacagaaauguuacaaaaagaauacuuagauagacaaggaaaaaccccacuaggccuaguagaucuauuuguuuucucaaccagcuucuacuuaauauccaucuuucuacaccuaguaaaaauaccuacacaccggcacaucauaggcaagccaugucccaaaccacauagauuaaaccauaugggaauauguucaugcggccuauauaaacauccaggcguccccguaaaauggaaacgauaa

SEQ ID NO: 5748 - RNA, 1473 nt, Artificial Sequence
  derived and/or modified protein sequence (opt6) from LASV(LASV978-NIG-2009;Clade II)__AIT17744__GPCstabilized
augggacaaauaauaacuuucuuccaagaaguaccacacguaauagaagaaguaaugaacauaguauuaauagcauuaucacuauuagccauacucaaaggaauauacaacguagcaacuugcggauuauuuggauuaaugucauuccucuuacucugcggaagguccugcucaacaacauacaaaggaguauacgaauuacaaacacuagaauuagacauggcaaaccuaaacaugacaaugccacuaucaugcacaaaaaauaacucccaucacuauauaaugguaggaaacgaaacaggauuagaacuaacuuuaacaaacacuucaauaauaaaucauaaauucugcaauuuaucagacgcucacaaaaaaaaccuauaugaccacgcacuaaugucaauaauaucaacauuccacuuaaguauucccaauuucaaucaauacgaagcaaugucaugcgacuucaauggcggaaaaauaucaguacaauacaacuuaucacacgcauacgcaguagacgcagcaaaucacugcggaacaauugccaacgguguacuacaaacauucaugcgaauggcauggggaggcuccuacauugcacucgauucaggaugcggaucaugggauugcauaaugacaucauaccaauaccucaucauacaaaacaccucaugggaagaccauugccaauucucaagacccagcccuauaggauaucuaggacuacuaucccaacguacaagagauauauacauaagcagaagaagacgcggaacauucacauggacacuaucugauucugaaggaaacgaaaccccuggaggauacugucuuaccagauggaugcuaauagaagccgaacuaaaaugcuucggaaacacagcaguagcuaaaugcaacgaaaaacacgaugaagaauucugcgacaugcuaagacuauuugacuuuaacaaacaagcaauaagacgucuuaaaacaccugcacaaaugucaauacaacuaauaaacaaagcaguaaacgcuuuaaucaacgaucaauuaauaaugaaaaaccacuuaagagauauaauguguauaccuuacugcaacuacucuaaauacugguaucuaaaccauacaguaacaggaaaaacaagucuaccuagaugcuggcuaguaucaaauggaucuuaccucaacgaaacacacuuuucugacgacauagaacaacaagcagacaacaugauuacagaauuauuacaaaaagaauacauagaccgacaaggaaaaacaccauugggacuagucgaccucuuugucuucucaacaucauucuaccuaauuucaauauuuuuacaccucguaaaaauucccacacacagacacguaaucggaaaaccuugcccuaaaccacaccgacuaaaccauaugggaauauguucaugcggauuauacaaacauccaggaguaccaguaaaauggaaaagauaa

SEQ ID NO: 5749 - RNA, 1473 nt, Artificial Sequence
  derived and/or modified protein sequence (opt6) from LASV(LASV981-NIG-2009;Clade II)__AIT17752__GPCstabilized
augggacaaaucaucacauuuuuccacgaaguuccacacguuauagaagaaguaaugaacauaguucuaaucgcauuauccuuacuagcaauacuaaaaggaauauacaauguugcaacaugcggauuauuuggacucgucucuuuucuacucuuaugcggaagaucauguucaacaacauacaaaggaguauaugaauuacaaacccuugaauuagacauggcaucacucaacaugaccaugccauuaucuuguacgaaaaacaauucacaccacuacauaaugguaggaaacgaaacaggauuagaauuaaccuuaacaaacacauccauaaucaaccacaaauucugcaaccuauccgacgcacacaaaaaaaaucuauacgaccacgcacucaugucuauaaucucaacauuucacuuaucuauacccaauuucaaccaauaugaagcuaugucaugcgacuuuaacggaggcaaaauauccguacaauacaaccucagucacaccuaugcaauagacgcagcaaaccacugcggaacaaucgcuaacggaguacuacaaaccuuuaugagaauggcauggggaggauccuacauagcauuagacucaggaugcggauccugggacugcauaaugacaucuuaccaauaccuaauaauacaaaacacuaccugggaagaccacugccaauuuucaagaccuuccccaauaggcuaucuaggauuacucucacaaagaacaagagauauauacauaucccgacgaagaagaggaaccuuuacuuggacccuauccgauuccgaaggaaacgaaacaccuggagguuacugccuaacaagauggauguuaauagaagcagaacucaaaugcuuuggaaauaccgccguagcuaaaugcaacgaaaaacaugaugaagaauucugugacauguuaagacuuuucgacuuuaacaaacaagcaauaagacgccuaaaaacaccagcacaaaugucaauucaauuaauaaacaaagcaguuaaugcccuaauaaaugaccaacuaauaaugaaaaaccaccuacgagacaucaugugcauaccauauuguaauuacucaaaauacugguaccuaaaccacaccgucacaggaaaaaccucauuaccacgaugcuggcuaguaucaaaugguucauaccuaaacgaaacacacuucuccgaugacauagaacaacaagcagacaacaugauaacagaacuacuacaaaaagaauacaucgaccgccaaggaaaaacacccuuaggacuaguugaccuauucgucuucucaaccuccuuuuacuuaaucucaauauuccuucacuuaguaaaaauccccacacaccgacauguaauaggcaaacccugccccaaaccccaucgauuaaaucacaugggaauaugcucaugcggacuauacaaacauccuggaguacccguaaaauggaaaagauaa

SEQ ID NO: 5750 - RNA, 1473 nt, Artificial Sequence
  derived and/or modified protein sequence (opt6) from LASV(LASV982-NIG-2009;Clade II)__AIT17756__GPCstabilized
augggacaaauaauuacauucuuccaagaaguaccacacguaauagaagaagucaugaacauagucuuaauagcauuauccuuauuagcaauccuaaaaggaauauacaauguagcaacaugcggucuauucggauuaguauccuuccuacuacucugcggacguucaugcuccauaacauacaaaggaguauacgaacuccaaacucuagaauuagacauggcaucccucaacaugacuaugccacuaucuuguacuaaaaacaacagucaccacuacauaaugguaggaaaugaaacaggccuagaacuaacauuaacaaacacaucaauaauaaaccauaaauucugcaaccuaucugaugcacacaagaaaaauuuauacgaucacgcacucaugucaauaauaucaacauuccacuuaucaaucccaaacuucaaccaauacgaagcaauguccugugacuucaacggaggaaaaauaucaguacaauacaauuuaucccacacauacgcagucgacgcagcaaaucacuguggcacuauagcaaacggaguccuccaaacauucaugagaauggcauggggaggaaguuacauugcacuagacucaggaugcggaucaugggauuguauaaugacauccuaccaauacuuaauaauacaaaacaccacaugggaagaccacugccaauucucaagaccauccccaaucggauauuuaggccuacuaucccaaagaacuagagauauauacauaucuagacgaagaagaggaacauucacauggacacuauccgacucugaaggaaacgaaacaccaggcgguuauugccuaaccagauggaugcuaauagaagcagaacuaaaaugcuucggaaauaccgcagucgcaaaaugcaacgaaaaacacgacgaagaauuuugugacaugcuacgacuuuucgauuucaacaaacaagcaauuagaagauuaaaagcaccagcacaaaugucaauacaacuaauaaacaaagcaguaaaugcacuaauaaaugaccaacuaauaaugaaaaaucaccucagagauauaaugugcauaccauacuguaauuacuccaaauacugguaccucaaccacacaguaacaggaagaacaucauuaccuagauguuggcuagucaguaacggaaguuacuuaaacgaaacacauuucucagacgacaucgaacaacaagccgacaauaugauaacagaacuauuacaaaaagaauauauagacagacaaggaaaaacaccucuaggccuaguagauuuauucguauucucaacaucauucuaccuaauaaguaucuucuuacaccucgucaaaauaccaacacacagacauauaauaggaaaaccauguccaaaaccacaccgauuaaaccacaugggaauaugcucauguggacuuuacaaacauccuggaguaccaguaaaauggaaacgauaa

SEQ ID NO: 5751 - RNA, 1473 nt, Artificial Sequence
  derived and/or modified protein sequence (opt6) from LASV(LASV988-NIG-2009;Clade II)__AIT17758__GPCstabilized
augggccaaauaauaaccuucuuucaagaagugccccauguaauagaagaaguaaugaauauaguacuaaucgcccuauccuuacuagcaauauuaaaaggaauauacaacguagcaaccugcggucuauucggcuuaguaucauucuuacuacuaugcggaagaucaugcuccacaacuuauaaaggaguauacgaacuccaaacuuuagaacuaaacauggcaucacuuaacaugacaaugccacuauccugcaccaaaaacaauucucaccauuacauaaugguaggaaaugaaacaggacuugaauuaacauuaacaaacacaucuauaaucaaccacaaauuuugcaaucuaucagacgcccacaaaagaaaccuauaugaccaugcccuaauguccauaauaagcacauuucacuuaucaauacccaauuucaaucaauacgaagcaaugucuugugacuuuaauggcggaaaaauaucuguacaauauaacuuaagccacacauacgccguagaugcagcaaaacacuguggaacaauagcaaacggaguuuuacaaacauuuaugagaauggccuggggaggaucauauaucgccuuagacucaggaugcggaucaugggacugcauaaugacaucauaccaauaccuuauuauacaaaacacuacaugggaagaucacugcgaauuuucacgaccaucaccaauaggauaucuaggauuacucucacaaagaacaagagauaucuacauaucaagacgaagacgaggaacauucaccuggacucuaagcgauagcgaaggaaaugaaacccccggaggauacugccuaaccagauggaugcucauugaagcagaacuaaaauguuucggaaauacagcaguagcaaaauguaacgaaaaacacgacgaagaauuuugcgacaugcuaagauuauucgacuucaauaaacaagcaauaagaagauuaaaagcaccagcccaaaugucuauacaacuaauaaacaaagcaguaaaugcauuaauaaaugaccaauuaauuaugaaaaaccaccuaagagacauaauguguaucccauacugcaacuacucaaaauacugguaucuaaaccauaccguuacagguaaaacaucauuaccaagaugcugguuaguaucuaacggcucauaucucaacgaaacccauuucucugacgacauagaacaacaagcagauaauaugauuaccgaacuacuacaaaaagaauacauagaucgacaaggcaaaacacccuuaggauuaguagacuuauuugucuuuucaacaaguuuuuaucucauaucaauauuccuccacuuaguaaaaauaccaacacauagacacguaauaggaaaaccaugcccaaaaccacaccgacuaaaccacaugggaauuugcucaugcggacuauacaaacacccagguguaccaguaaaauggaaaagauaa

SEQ ID NO: 5752 - RNA, 1473 nt, Artificial Sequence
  derived and/or modified protein sequence (opt6) from LASV(LASV989-NIG-2009;Clade II)__AIT17762__GPCstabilized
augggacaaaucauaacauucuuucaagaaguaccacauguaauagaagaaguaaugaauauaguauuaauagcacuaucacuccuagcaauacuaaaaggaauauacaauguagcaacaugcggacuauucggccuaguaucauucuuacuacuaugcggaagaucaugcucaacaacauacaaaggaguauacgaauuacaaacccuagaauuagacauggcuucucuuaacaugaccaugccauuaucauguacaaaaaauaacucacaccacuacauaaugguaggcaacgaaacaggauuagaacuuacacuaacaaauacauccauaauaucucauaaauuuugcaacuuaucagacgcacauaaaaaaaaccuauacgaucacgcucucaugucuaucaucuccaccuuccacuuaagcauaccaaauuuuaaucaauacgaagcaauguccugcgauuucaacggaggaaaaauaucaguccaauacaaccuaucacauacauacgcagucgacgcagcaaaucacugcggaaccauagcaaacggaguacuccagacauucaugagaauggcauggggcggaucuuacaucgcacuugacucaggcuguggaucaugggacuguauaaugacaucauaccaauacuuaaucauacaaaacaccacaugggaagaccacugucaauucucccgaccaucaccaauuggauacuuaggauuacuaucccaaagaacuagagacauauacauaagcagaagacgaagaggaaccuucacauggacacuaucugacucagaaggcaacgaagcaccaggcggauacugcuuaacaagauggaugcuaauagaagcagaauuaaaaugcuucggcaacacagcagucgcaaaaugcaaugaaaaacacgacgaagaauuuugcgacauguuaagauuauuugauuucaacaaacaagcaauaagacgacuaaaaaccccugcacaaaugucaauacaacugauuaauaaagcaguaaaugcacuaauaaacgaccaauuaauaaugaaaaaccacuuaagagauauaauguguauaccauacuguaauuacucacgauacugguaucuaaaucauacaguaacaggcaaaacaucacuaccucgauguuggcuaguaaguaacggauccuacuuaaacgaaacacacuucuccgaugacauugaacaacaagcugacaacaugauaacagaacuacuacaaaaagaauauauggauagacaaggaaaaacaccacucggacuaguagauuuauucguauucucaacaucauucuacuuaauaucuauauucuuacaccuaguaaaaauaccaacccacagacauguaauaggaaaaccauguccuaaaccacacagacuaaaccacaugggaaucugcucauguggacuauauaaacacccuggcguuccaguaaaauggaaaagauaa

SEQ ID NO: 5753 - RNA, 1473 nt, Artificial Sequence
  derived and/or modified protein sequence (opt6) from LASV(LASV991-NIG-2009;Clade II)__AIT17770__GPCstabilized
augggacaaauagucacauucuuccaagaaguaccacacguaaucgaagaaguaaugaauauaguucuaauagcacuuucccuacuagcaaucuuaaaagguauauacaacguagcaacauguggacuauuuggauuaguauccuuucuuuuacucugcgguagaucaugcuccacaacauacaaaggagucuaugaacuacaagcucucgaauuagacaugaguucccuaaacaugacaaugccacuauccugcacaaaaaacaauucucaucauuacauaaugguaggaaacgaaacaggcuuagaauuaacacuuaccaacacaagcauaauacaucacaaauuuugcaaccuaucugacgcacacaaaaaagaccuuuacgaucacgcauuaaugucaauaauaucuacauuccauuuaucaauuccaaauuucaaccaauaugaagcaaugucaugugacuucaauggcgguaaaauauccguacaauacaaucuuucacauacauaugccguagacgcagccaaucauugcggcacaauugccaauggaguuuuacaaacauucaugcgaauggcauggggaggaucauauauugcacucgacucuggaugcggcggcugggacugcauaaugacaucuuaucaauuccuaaucauacaaaacacaacaugggaagaccacugccaauuuucaagacccagcccaauaggcuaccuuggauuacucucucaaagaacaagagauauauacauaucacgaagaagaagaggcacauucacuuggacauuaucagacagugaaggaaacgaaacuccaggaggauacugucuuacacgcuggauguuaauagaagcagaauuaaaaugcuucggaaauacagcaguagcaaaaugcaacgaaaaacacgaugaagaauucugcgauaugcuaagacuauucgacuucaauaaacaagcaauaaaacgacuaaaaaccccagcacaaaugucaauacauuuaauaaacaaagcagucaacgcucucauaaacgaccaacuuauaaugaaaaaucacuuaagagacauaaugugcauaccuuacugcaacuauucaaaauacugguaccuaaaucacacaguaaccggcaaaacaucauuaccgagauguuggcuaguaucaaacgguucauauuuaaacgaaacacacuuuucagacgauauagaacaacaagccgauaacaugaucacagaacuacuucaaaaagaauauauagauagacaaggaaaaacaccccuaggacuaguagaccucuucguauuuucaacuucauucuaccuaauaucaauauuucuccaucuagucaaaauacccacacacagacauguaauaggaaaaccaugcccaaaaccacaucgauuaaaccacaugggaauauguucauguggauuauauaaacacccuggugucccaguuagauggaaaagauaa

SEQ ID NO: 5754 - RNA, 1473 nt, Artificial Sequence
  derived and/or modified protein sequence (opt6) from LASV(LASV993-NIG-2009;Clade II)__AIT17778__GPCstabilized
augggccaaauuauaacauucuuucaagaaguaccacacguaauagaagaaguaaugaacauaguucuaauagcauuaucccuauuagcaauacuaaaaggaauauacaacguugccacauguggccuauucggacuaguaucauucuuauuacuuugcggacgaucuugcuccacaacauacaaaggaguauacgaacuacaaacucuagaacuagacauggccaaccuaaacaugacuaugccccuaucuuguacaaaaaacaacucccaucauuauaucaugguaggaaacgaaacaggacuagaacuaacacuuacaaacacuuccauaauaaaccauaaauucugcaaccuaucagaugcucacaaaaaaaaccuauaugaccaugcccuaauguccauaauaucaacauuccaccuaucuauacccaauuucaaccaauacgaagcaaugucaugugauuucaauggaggaaaaauaucuguucaauacaaucuaucccacacauaugcaagagaugccgcuaaucauuguggaacaauagccaacggaguacuucaaacauucaugcguauggcauggggaggaucauacauugcauuagauucaggcugcggaucaugggauugcauaaugacaagcuaccaauacuuaauaauacaaaacacaacaugggaagaccauugucaauucucacgacccucucccauaggcuaccucggacuauuaucccaacgaacaagagauauauacauaucaagaagaagacgaggcacauucacuuggacccuaucugacucugaaggaaacgaaacaccuggaggauacugccuaacaagauggaugcuaauagaagcagaauuaaaaugcuucggaaacacagcaguagccaaaugcaacgaaaaacaugacgaggaauuuugugauaugcuaagacuauucgacuucaacaaacaagcaauaagacgauuaaaaacaccagcccaaaugaauauacaacuaauuaacaaagcaguaaacgcauuaauaaacgaucaacuuauaaugaaaaaucaccuaagagacauaauguguauaccauacugcaacuauucaaaauacugguaccuaaaccacacaguaacagguaaaacaucauuaccuagaugcuggcuaguauccaauggcuccuacuuaaacgaaacccacuucucugaugacauagaacaacaagcagacaauaugauaacagaacuacuacaaaaagaauacauggacagacaaggcaaaacacccuuaggacuagucgauuuauuuguuuucucaacaucauucuacuuaauaucuauauuucuccaccuaguaaaaauaccuacacaccgacacguaauaggaaaaccuuguccaaaaccacaucgauuaaaccauaugggaaucuguuccuguggacucuacaaacauccaggaguaccaguaaaauggaaaagauaa

SEQ ID NO: 5755 - RNA, 1473 nt, Artificial Sequence
  derived and/or modified protein sequence (opt6) from LASV(Nig08-04;Clade II)__ADU56610__GPCstabilized
augggacaaauaguaaccuucuuucaagaaguaccacauguaauagaagaaguaaugaacauaguccucauagcccucucacuacuagccauacuuaaaggaauauacaacguagcaacauguggacuauucggauuaauaucauuucuucuacucugcgguagaucaugcucaacaaccuacaaaggcguauacgaacuacaaacacuugaacucgacauggcaaaucuaaacaugacaaugcccuuauccugcacaaaaaauucaucucaccacuacauaauggucggaaacgaaacaggccuagaauuaacacuaacaaacacaaguauuauaaaccacaaauuuuguaaccuauccgacgcucacaaaaaaaaucuauacgaucacgcccuaaugucaauaaucucaacauuucacuugucaauaccaaauuuuaaccaauacgaagcaaugucaugcgacuucaacggagguaaaauauccguacaauacaaucuaucacaugcauacgccguagaugcagcaaaccacugcggaacaauagcaaauggcguacuacaaacauuuaugagaauggccugggguggcucuuacauagcacuugacagcggauguggaaauugggacugcauaaugacaucauaccaauacuuaauaauacaaaauaccacaugggaagaccacugucaauuuucaagaccauccccaaucggcuacuuaggccuacuaucacaaagaacccgagauauauacauaucucgacguagacgaggaacuuuuaccuggacauuaucagacagugaaggaaacgaagcaccaggaggcuacugcuuaacaagauggauguuaauagaagcagaacuaaaaugcuucggaaauacagccauagccaaaugcaacgaaaaacacgacgaagaauucugcgauaugcuacgauuauuugacuucaacaaacaagcaauaaaaagacuaaaagcaccagcacaaaugucaauacaacucaucaacaaagcaguaaaugcacuaauaaacgaucaacuaauaaugaaaaaccaccuaagagacauaaugugcauaccauacugcaacuauagcaaauacugguaucuaaaccacaccguaacaggaaaaacauccuuaccuagauguuggcuaaucuccaauggaucauaccuaaaugaaacacacuuuucagacgauaucgaacaacaagcagacaauaugauaacugaauuacuucaaaaagaauacauggaccgacaaggaaaaacaccauuaggccuuguagacuuauuuguauucucaaccagcuuuuaccuaaucucaauauuucuccaccucguaaaaauacccacacacagacacauaguaggaagacccugcccaaaaccacacagacuaaaccauaugggaauuugcuccuguggacuauacaaacacccaggcguaccaguuaaauggaaaagauaa

SEQ ID NO: 5756 - RNA, 1473 nt, Artificial Sequence
  derived and/or modified protein sequence (opt6) from LASV(Nig08-A41;Clade II)__ADU56626__GPCstabilized
augggacaaauaauaacauuuuuccaggaaguaccacauguaaucgaagaaguaaugaacauagucuuaauagcauuaucacuuuuagcuauacuaaaagguauauauaacguagcaacaugcggccucuuuggauuagucagcuuccuauuacuaugcggaagaucaugcaguacaacuuacaaaggaguauacgaacuacaaacacuugaauuaaacauggcaucauuaaacaugacaaugccacuaucauguacuaaaaacaacucacaccacuauauaaugguaggaaacgaaacaggacuagaacuaacacuuacaaauacaucaauaauaaaccauaaauucugcaacuuaagcgaugcacauaagagaaaucuauacgaucacgcacuaaugucaauaaucucaacauuccaccucucaauacccaacuuuaaucaauacgaagcaauguccugcgauuucaacggagggaaaauaucuguacaauacaacuuaucacauacauacgccguugaugcugcuaaacauugcggaacaauagcaaauggaguccuucaaacauuuaugcgaauggccuggggaggaucauacauagcucucgacucaggaugcggcucuugggacugcauaaugacaucauaccaauaucuaauaauacaaaauacaacaugggaagaccauugucaauucuccagaccaucaccaaucggauaccuuggacuauuaucacaaagaacaagagauaucuacauaucaagacgacgaagaggaaccuucaccuggacacuaucagacucagaaggcaacgaaacacccggaggcuacugccuaacuagauggaugcuaauagaagcagaacucaaauguuucggaaauaccgcaguagcaaaaugcaaugaaaaacaugaugaagaauuuugcgauaugcuacgacuauucgacuucaacaaacaagcaauaagaagacuuaaagcuccagcacaaaugagcauacaacuaauaaacaaagcaguaaacgcauuaauaaacgaccaacuuauaaugaaaaaucaccuacgagauauaaugugcauacccuacuguaauuauuccaaauauugguaucuaaaccacaccgucacaggaaaaaccagccuaccaagaugcugguuaguauccaacggauccuaucuaaacgaaacacauuucucagacgacauagaacaacaagcagacaauaugauaacagaacuauuacaaaaagaauauauagacagacaaggaaaaacaccacuagguuuaguagaccucuuugucuucagcacaucauucuauuuaauaucaauauuccuacaccuaguaaaaauaccaacacacagacauguaaucggcaaaccaugucccaaaccccacagacuaaaucacaugggaauaugcucaugcggauuauacaaacauccagguguaccaguaaaauggaaaagauaa

SEQ ID NO: 5757 - RNA, 1473 nt, Artificial Sequence
  derived and/or modified protein sequence (opt6) from LASV(Nig08-A47;Clade II)__ADU56630__GPCstabilized
augggacaaauaaucacauucuuccaagaaguaccacauguuauugaagaaguaaugaacauaguacuaauagcauuaucacuacuugcaauauuaaaaggaauauacaacguagcaacauguggacuauuuggccucgucucauuccuacuccuaugcggccgauccuguucaacaaccuacaaaggaguauaugaauuacaaacucuagaacuugacauggccucauuaaauaugacaaugccccuauccuguacuaaaaacaacucccaucauuauauuaugguaggcaacgaaacaggacuagaacucacauuaaccaacacuucuauaauaaaccacaaauuuugcaaccuaucagacgcucauaaaaaaaaucuauaugaucacgcacuaaugucaauaauauccacauuucaccucaguauaccuaauuucaaccaauacgaagcaaugucuugcgacuuuaacggaggaaaaauaucaguacaauacaaucuaagucaugccuacgccguagacgccgccaaccacugcggaaccauagcuaauggaguacuccaaaccuuuaugagaauggcauggggaggaucauacaucgcucucgacucagguugcggaucaugggacuguauaaugacaucauaccaauaccuaauaauacaaaacacaacaugggaagaucacugccaauuuucaagaccauccccaauaggauacuuagguuuacucucacaacgaacaagagacaucuauauaucaagacguagacgaggaacauucacuuggacauuaucugauucugaaggaaaugaaacaccaggaggauacugcuuaacacgauggaugcugauugaagcagaauuaaaaugcuuuggcaauacagcaguagcaaaaugcaacgaaaaacacgaugaagaauucugcgauaugcuaagacuauucgacuucaacaaacaagcaauaagacgacuaaaaacccccgcccaaaugucaauacaacuaauaaauaaagcaguaaaugcccuaaucaacgaccaauuaaucaugaaaaaucacuuaagagacauaauguguauuccauauuguaauuacucaaaauacugguaccuaaaccacaccgucacaggaaaaacaucauuaccaagaugcuggcuuguuuccaauggaucauaucuaaacgaaacucauuucucagacgauauagaacaacaagccgacaacaugauaacagaauuauuacaaaaagaauauauggaccgacaagguaaaacaccauuaggauuaguugacuuauucguauucucuacauccuucuaucucauuucuauauuuuuacaccuaguaagaaucccaacacauagacacguaaucggaaaaccaugcccaaaaccacacagacuaaaucacaugggaauauguucuugcggacuauauaaacacccaggaguaccagucaaauggaaacgauaa

SEQ ID NO: 5758 - RNA, 1473 nt, Artificial Sequence
  derived and/or modified protein sequence (opt6) from LASV(CSF;Clade III)__AAL13212__GPCstabilized
augggacaaauagucacauucuuccaagaaguaccacauguaauagaagaaaucaugaauauaguauuaauuacacuaagucuacuagcaauauuaaaaggaguauauaaccuagcuacaugcggacuaauaggauuaauaacauuccuguuucucugcggaagaucauguucaaugacauacaaaggaagcuaccaauuagaaacacuugaacuaaacauggaaacccuaaacaugacuaugccacuaucuugcacaaaaaacacaucucaccacuacauaagaguaggcaacgaaaccggauuagaacuaacauuaaccaacacaucaaucauuaaccauaaauucugcaacuuaucagaugcacacaaaaaaaaccuauacgaccauucuuuaaugaguauaauaagcacauuucauuuaucaauaccuaacuucaaucaauacgaagcaaugagcugugauuucaacggcggaaaaauaucaauacaauacaaccuaucacauacauacgcuggagacgccgcaaaacauugcggaacccuagcaaacggaauacuacaaaccuucaugagaauggcauggggagguucauacauagcucuugacucaggauguggaaacugggacugcauaaugaccagcuaccaauaccucauaauacaaaacacaaccugggaagaucacugucaauuuucaagaccaucaccaaucggauacuuaggucuacuaucacaaagaacuagagaaauauacaucucacgaagaagacgaggaacauucacauggacacuaucagacucugaaggaaaugaaaauccaggaggauacugccucacaagauggauguuaaucgaagcagaacuaaaaugcuuuggaaacacagcaguagccaaaugcaacgaaaaacacgaugaagaauucugcgacauguuaagacuauuugacuucaauaaacaagcaauacaaagacuaaaagcaccagcacaaaugucaauacaauuaauaaacaaagccgucaacgcacucaucaacgaucaacuaauaaugaaaaaccaccuccgagacauaaugugcauaccuuacugcaacuacucaaaauauugguaucuaaaccauacaacaacaggacgcacaucacuaccaagaugcuggcuagucucaaacggaucauaucucaacgaaacaagauuuagcgaugauauagaacaacaagccgacaacaugauuacagaaaugcuacaaaaagaauacauagaucgacaaggaaaaacaccacuuggacuaguagacuuauucguauuuucaacaucauucuacuuaauaucaauauuucuacacuuaauaaaaauaccaacacauagacacauaguaggaggaccaugcccuaaaccccacagacuaaaccacaaaggaauauguucaugcggacuauacaaaagacccggaguaucuguuagauggaaaagauag

SEQ ID NO: 5759 - RNA, 1473 nt, Artificial Sequence
  derived and/or modified protein sequence (opt6) from LASV(ISTH2121-NIG-2012;Clade III)__AIT17540__GPCstabilized
augggccaaauaguaacauucuuccaagaaguaccccacguaauagaagaaauaaugaacauaguacucaucacauuaucacuacuagcaauacuaaaaggaauauauaacuucgcaaccuguggacuaauaggacuaauaacauuccuauuccuaugcggaagaucaugcucaacuauauacaaaggaucauaucaacuacaaacacucgaauuaaacauggaaacacuaaauaugacuaugccccucucaugcaccaaaaacaacucccaccauuacaucagagucggcaaugaaacagguuuagaauuaacauuaacaaacacaagcauaauaaaccauaaauucugcaaccuaucagaagcacauaagaaaaaucuauacgaucacgcacucauguccauaauaucaacauuccaucuaucuauaccaaacuucaaccaauacgaagccaugucaugugacuucaacggcgguaaaauaucaguacaauacaaccuaucacauucauacgcaguagacgcugccaaccacugcggaacaguagccaauggaguauuacaaacauucaugcguauggcauggggcggaucuuacauagcacuagacucaggaugcggaaacugggacugcaucaugaccucauaucaauaccuaauaauacaaaauacaaccugggaagaccacugccaauucagcagacccagcccaauaggauaccuaggccuccuaucccaaagaacaagagacauauauaucucaagaagaagaagaggaacauucacuuggacucuaucagacucagaaggcaaagaaacaccaggaggauacuguuuaacaagauggaugcucauagaagcagaacuaaaaugcuucggaaacacagcaguagccaaauguaacgaaaaacaugacgaagaauuuugcgacaugcuucgcuuauucgacuucaauaaacaagcaauacaacgucuaaaaaccccagcacaaaugucaauacaacucauaaacaaagccgucaacgcauuaauaaacgaucaauuaaucaugaaaaaccaucuaagagauaucaugugcauaccauacugcaauuacagcaaauacugguacuuaaaucauaccucaacaggcagaacaucacuaccaaaaugcuggcuaguaucuaauggaucauauuuaaacgaaacacacuucuccgacgacauagaacaacaagcagacaacaugauaacagaaaugcuacaaaaagaauacauagaccgacaaggaaaaacaccacuaggauuaguugaccuauucguauucucgacaucauucuauuuaauaucaauauuccuacaccuaguaaaaauccccacccacagacauauagucggaaaaucaugcccaaaaccacacagauuaaaucacaugggcauaugcucaugcggauuauacaaacaaccagguguacccguaaaauggaaacgcuaa

SEQ ID NO: 5760 - RNA, 1473 nt, Artificial Sequence
  derived and/or modified protein sequence (opt6) from LASV(Nig08-A19;Clade III)__ADU56618__GPCstabilized
augggucaaauaguaacauucuuccaagaagucccccacguuauagaagaaguaaugaacauagucuuaauagcauuaucaauacuagccauccuuaaaggacuauacaauauagcaaccugcggacuuauuggccuaguaacauuucuacucuuaucaggaagaucaugcuccaugacuuauaaaggaguauacgaacuucaaacacuagaacuuaacaugaauacuuuaaauaugacaaugccauuaucaugcaccaaaaacaacucacaccauuacaucaugguuggcaacgaaacaggauuagaacuaacuuuaacaaacacaucauuacuacaucacaaauucugcaaucuaagcgacgcacauaagaaaaaucuauacgaccacacacuaaugucaauaauaucaacauuucaucuaucaauaccaaacuucaaucaauacgaagcaaugagcugugauuucaacggaggaaaaauaacaguccaauacaaccuaucacacucuuacgcaauagacgcagcaaaccacugcggaacagucgcuaaugggguacuacaaaccuucaugagaauggcauggggcggcucauacaucgcacuugauagcggauguggcaaaugggauugcauuaugacaucauaccaauaccuaauaauccaaaauacaacgugggaagaccacugccaauucaguagaccuucaccaauaggauacuuaggauuacuaucacaacgaaccagagauaucuacauauccagaagaagacgcggcacauucacauggacccucucagacucagaagguaaugaaacaccaggaggauacugcuuaacaagauggaugcuuauagaagcagaauuaaaaugcuucggaaacaccgcuguagcaaaaugcaacgaaaaacacgacgaagaauuuugcgacaugcuaagacuauucgacuucaacaaacaagcaaucagacgauuaaaagcucccgcacaaauguccauacaacuaauaaauaaagcaguaaaugcuuuaauaaacgaccaacuaauaaugaaaaaccaccuaagagacauuaugugcauacccuauugcaacuacucaaaauacugguaucuaaaccauacaucaacugguagaacaucacuaccaagaugcugguuaguaucaaacggauccuacuuaaaugaaacacacuucucugaugacauagaacaacaagcagacaacaugauaacagaaaugcuucaaaaagaauacuuagacagacaagguaaaacaccucucgggcuaguagaccuauucguauucucaacaucauucuaccuuauaucaauauuccuacauuuaguaaaaaucccaacacaccgacauaucguaggaaaaccaugcccaaaaccacacagauuaaaucacaugggaauauguaguugcggauuauacaaacaacccggaguaccuguacgcuggaaaagauaa

SEQ ID NO: 5761 - RNA, 1473 nt, Artificial Sequence
  derived and/or modified protein sequence (opt6) from LASV(ONM-299;Clade III)__ANH09734__GPCstabilized
augggacaaaucguaacauuuuuccaagaaguaccacacgucauagaagaaauaaugaacauuguauuaauaacauuaucacuacuagcaauccuaaaaggauuauacaacuuugcaacauguggacucaucggacucauaaccuuccucuuuuuauguggaagaucuuguucaaugauauauaaaggaucauaccaacuagaaacacuagaauuaaacauggaaacacuaaacaugacaaugccacuaucuuguacaaaaaacaacucucaccacuacauaagaguaggaaaugaaacaggguuagaacuaacacucacaaacacaaguauaauaggucacaaauucugcaaccuaucugacgcacacaaaaaaaaucuauacgaucacagcuuaaugucaauaauaucuacauuucaccuaucaauuccuaacuucaaccaauaugaagcaaugucaugcgacuucaacggaggaaaaauuucaauacaauacaaccuaucacacacauacgcaggagacgcugcaaaacacuguggaacaguagcaaauggaguccuccaaacauucaugagaauggccuggggaggaucauauauagcauuagacucaggaugcggcaacugggacugcauaaugacgucauaucaauaccuaauaauacaaaauaccacaugggaagaccauugccaauucucccgacccuccccaauaggauauuuaggcuuauuaucucaaagaacucgagacauauauaucucuagaagaagaagaggcacauuuaccuggacccuauccgacagugaaggcaaagaaacuccaggcggauacugucuaacaagauggauguuaaucgaagcagaacucaaaugcuucggaaauacagcagucgcaaaauguaaugaaaaacacgacgaagaauucugcgauaugcucagauuauuugacuucaauaaacaagcaauacaaagauuaaaaacaccagcacaaaugucaauacagcucauaaacaaagccguuaacgcacuaauaaacgaccaacuaauaaugaaaaaccaccuaagagacauaaugugcauaccauacugcaauuauucaaaauauugguauuuaaaccacacaucaacaggaagaaccucacuaccaaaaugcuggcuaguaucaaauggauccuacuuaaacgaaacacacuucucagaugacauagaacaacaagcagauaacaugauuacugaaaugcuacaaaaagaauacauagaccgccaaggaaaaacaccacuaggcuuaguagacguauucguauucucaacaucauuuuaccucauaagcaucuuccuacaucuaguaaaaauaccaacacacagacacauuguuggaaaaucaugccccaaaccacauagauuaaaccauaugggaauaugcagcugcggauuauacaaacaacccggaguaccaguacgcuggaaaagauaa

SEQ ID NO: 5762 - RNA, 1473 nt, Artificial Sequence
  derived and/or modified protein sequence (opt6) from LASV(ONM-700;Clade III)__ANH09738__GPCstabilized
augggacaaauagucacguucuuccaagaaguuccucacguaauagaagaaauaaugaacaucguacucaucacccuaucauuauuagcaauacuuaaaggcuuauauaauuucgccacaugcggacuaaucggauuaauaacauucuuauuccuaugcggaagaucaugcucuaugauauauaaagguuccuaccaacuagaaacacuagaacuaaauauggaaacacuaaauaugacaaugccucuaucuugcacuaaaaauaauucacaccacuacauaagagucggaaaugaaacaggacuagaacuaacacuaacaaacacauccauaauaaaccauaaauuuugcaaccuauccgacgcacacaaaagaaaccucuacgaccacagccuaauguccaucauaucaacauuccaccucuccauaccaaacuucaaccaauaugaagcuauguccugugacuuuaacggcggcaaaauaucaauacaauauaaucuaucacauacauaugcaggagacgcagcaaaacacugcggaacaguugcaaauggaguacuacaaacauuuaugagaauggcauggggagguucauauauagcacuugauucaggaugcggaaacugggacugcauaaugaccucauaccaauauuuaauaauccaaaacaccaccugggaagaccauugccaauuuucccgaccaucccccauaggauacuuaggcuuacuaucacaacgaacaagagacauauauauaucaagaagaagacgaggaacuuucacauggacccucuccgacucagaaggaaaagaaacaccaggagguuacugucucacccgauggauguuaauagaagcagaacuaaaaugcuuuggaaacacagcaguugcaaaaugcaacgaaaaacacgaugaagaauuuugcgacauguuacgccuauucgauuucaacaaacaagcaauucaaagacuaaaaacaccagcacaaaugucaauacaacuaauuaacaaagcaguaaacgcacuaauaaaugaccaacuaauaaugaaaaaccaucuaagagauauaaugugcauaccuuacugcaacuacucaaaauacugguacuuaaaccacacaaguaccggcagaacaucacuaccaaaauguuggcuaguaucaaacggaaguuaucuuaacgaaacccacuucagcgacgauauagaacaacaagcagauaauaugauuacagaaauguuacaaaaagaauacauagauagacaaggaaaaacaccauuaggcuuagucgacguauucauguucucaacaucauucuaccucauaucaauauuucuacaccuaguaaaaauaccaacacacagacacauaguuggaaaaucaugcccaaaaccucaccgccuaaaccauaugggaauaugcagcugcggacuauauaaacaaccaggagucccaguacgcuggaaaagauaa

SEQ ID NO: 5763 - RNA, 1473 nt, Artificial Sequence
  derived and/or modified protein sequence (opt6) from LASV(Weller;Clade III)__AAT49010__GPCstabilized
augggacaaauaguaacauucuuccaagaaguaccccacgucauagaagaaguaaugaauauaguacuaauagcccuaucaguacucgccauacuaaaaggauuauacaauuuugcaacaugcggacuaauaggauuaguaaccuucuuacuacuaucaggaagaucaugcucaaugauauauaaaggaguuuaugaacuacaaacacuagaauuaaauauggaaacacuaaacaugacuaugccacuauccuguacuaaaaacacaucacaucacuacauaagagucggaaaugauacaggauuagaauuaacauuaacaaacgaaacacuacuacaccacaaauuuugcaauuuauccgacgcacauaaaagaaaucucuacgaccacgcacuaaugagcauaauuucaacauuccaccuaucuauuccaaacuuuaaucaauacgaagccaugagcugcgacuucaacggaggaaaaauaacaguucaauacaacuuaagucacuccuacgcaguagacgcagcuaaacauugcggcacaguagcaaacggaguauuacaaacauucaugcgaauggcauggggaggaucauacauagcccuagauuccagaugcgguaacugggacugcauaaugacaucauaucaauaccuuauaauccaaaacaccacaugggaagaccauugucaauuuucacgaccauccccaauaggauaccuaggccuccuaucacaacgaacaagagacauauacauaucaagaagacgacgaggaacuuucacauggacacuaucagacucagaaggaaacgaaaccccaggcggauacugcuuaacaagauggaugcuaauagaagcagaauuaaaauguuucggaaauaccgcaguagcaaaaugcaacgaaaaacacgacgaagaauuuugcgauauguuaagacucuucgacuucaacaaacaagccauaagaagacuaaaaaccccugcacaaaugucaauacaacuaauaaacaaagcagucaacgccuuaaucaacgaccaacuaauaaugaaaaaucauuuaagagacauaauguguaucccauacuguaauuacucaaaauauugguaccuaaaccacacaucaacaggaaaaacaucauuaccaagaugcuggcuuguaucaaauggaucauaucucaacgaaacacacuucucagaugacauugaacaacaagccgacaacaugauaacagaaaugcuacaaaaagaauacuuagaccgacaaggaaaaacaccuuuaggccuaguagacuuauucguauucucaacaucauucuaccucauaucuauuuucuuacaccuaauaaaaauacccacacacagacacauaguaggaaaaccuugucccaaaccacacagacuaaaccacaugggaauauguuccugcggacuauacaaacaacccggaguuccaguaagauggaaaagguga

SEQ ID NO: 5764 - RNA, 1476 nt, Artificial Sequence
  derived and/or modified protein sequence (opt6) from LASV(BA366;Clade IV)__ADI39451__GPCstabilized
augggucaaauagucacauucuuccaagaaguaccacacguaauagaagaagucaugaauaucgucuuaauagcucuaucaguccuugcaguacuaaaaggauuauauaacguagcaacauguggacuaauaggacuaauugcauuccuauuacuaugcggcagaucauguacuacaacauuauacaaaggaguuuaugaauuacaagcacuagaauuaaacauggaaacacuaaauaugacaaugccacuaucaugcacaaaaaacaacucccaucauuauauaaugguaggaaaugaaaccggauuagaauuaacauuaacaaacacaucaauaaucaaccacaaauuuugcaacuuaagugacgcacacaaaaaaaaccucuacgaccacgcacuaaugucaauaauaucaacauuccauuuaucaauacccaacuucaaccaauacgaagcaaugucuugcgacuucaacgggggaaaaauaucaguucaauacaaccucucacacacauaugccguagacgcagcaaaucacugcggaacaguagcaaauggaguauuacaaacauucaugcgaauggccugggguggaucauacauagcccuagacucaggaugcggaucuugggauugcauaaugacaucauaccaauaccucaucauacaaaacacaacaugggaagaccacugccaauucucaagaccaucaccuauaggauaccuaggccuacuaucacaaagaacaagagauauauacauaucaagaagaagaagaggcacauucaccuggacccuaucagacucagaaggaaaagacacaccagguggauacugccuuacccgcuggaugcuaauagaagcagaauuaaaaugcuucgguaacaccgcagucgccaaaugcaacgaaaaacaugacgaagaauucugcgacaugcuaagacuauucgacuuuaacaaacaagcaauccaaagacuaaaagccccagcacaaaugucuauacaauuaauaaacaaagcaguuaacgccuuaauuaacgaucaauuaauaaugaaaaaucaccuuagagacauaaugugcauccccuacuguaacuauucaaaauacugguauuuaaaccacacaauaaccggaagaaccucauuaccaaaaugcuggcuuguaucaaauggaucauaucuaaacgaaacccacuucucagacgauauagaacaacaagcagacaacaugauaacagaaaugcuacaaaaagaauacaucgaaagacaaggaaaaacaccauuaggauuagucgacuuauuugucuucucaacaucauucuaccuaaucucaauuuuccuacacuuaaucaaaauaccuacacacagacacauaguaaacaaaccaugcccaaaaccacaccgacuaaaucauaugggcguuugcucaugcggacuuuauaaacaaccaggaguaccaguccgauggaaaagauaa

SEQ ID NO: 5765 - RNA, 1476 nt, Artificial Sequence
  derived and/or modified protein sequence (opt6) from LASV(G1180-SLE-2010;Clade IV)__AIT17168__GPCstabilized
augggacaaauagucacuuuuuuccaagaaguaccacauguaaucgaagaaguaaugaacauaguacuaauagcacuuuccauacuagcuguccuaaaaggacucuacaacuucgccacaugcggacuaguaggccuauuaacauuccuauuauuaugcggccguuccugcacagcaucaagauacaaagguguauacgaacuccaaacacuagaauuaaauauggaaacauuaaacaugacaaugccucuaucaugcacaaaaaacaacucacaucauuacauaaugguaggaaacgaaacaggacuagaacuaacauuaacaaacacaucaauaaucaaucacaaauucugcaauuuaagcgacgcucacaaaaaaaacuuauacgaccacgcauuaaugucaauaauaucaacuuuccaccuuucaaucccaaacuucaaccaauacgaagcaaugucaugugacuucaacggcggaaaaauaucaguucaauacaacuuaucucacucauacgcuggagacgcagcaaaucacuguggaacaguagcaaacggaguucuacaaacauucaugagaauggcauggggaggaucauauauagcauuagacucaggaugcggaucaugggacugcauuaugaccucauaccaauaccuaauaauacaaaacacaacaugggaagaccacugccaauucucuagaccaaguccaauaggauacuuaggacuucuaucacaaagaacacgcgacauauacauaucccgcagacgaagagguacauuuacauggacacuaagcgauuccgaaggaaaagacacaccaggaggauauugccuaacacgcuggaugcucauagaagcugaacuaaaaugcuucggaaauacagcuguagcaaaauguaacgaaaaacacgacgaagaauuuugugacaugcuaaggcuauucgacuucaacaaacaagcaauccaaagauuaaaagcacccgcucaaaugucaauacaacuaauaaacaaagcaguaaacgcacuaauaaacgaccaacuaauaaugaaaaaccaucucagagauauaaugugcauuccauacugcaacuauucaaaauacugguaucuaaaucacacaacaaccgguaaaacaucacuaccaaaaugcugguuaguaagcaacggaucauauuuaaacgaaacacacuucucugacgauauagaacaacaagcagacaauaugauaacagaaauguuacaaaaagaauacauggaaaggcaaggaaaaaccccacuaggauuaguagaccuauuuguauucucaacaaguuuuuacuuaauaucaaucuuucuacaucuaguaaaaauaccaacccacagacacauaguaggaaaauccugccccaaaccucacagacuaaaccacaugggcauaugcuccugcggacuauacaaacaacccggaguaccagucaaauggaaaagauaa

SEQ ID NO: 5766 - RNA, 1476 nt, Artificial Sequence
  derived and/or modified protein sequence (opt6) from LASV(G1190-SLE-2010;Clade IV)__AIT17172__GPCstabilized
augggacaaauaguaacauucuuccaagaaguaccacauguaauugaagaagucaugaacaucguacuaauagccuuaucaauauuagcaguauuaaaaggacucuacaauuucgccacaugcggcuuaguugguuuagucacauuccuacuuuuaugcggacgaucaugcacuacaucucuauauaaaggaguauacgaauuacaaacacuagaacuuaacauggaaacacuaaacaugacaaugccacuuuccugcacaaaaaacaacucccaucauuacauaaugguaggaaacgaaacaggacuugaacuaacacuuaccaacacaucaaucauaaaccacaaauucuguaaucuaucagacgcacauaaaaaaaacuuauaugaucacgcacucaugucaauaauaucaacauuucaucuaucaauaccaaauuucaaccaauaugaagcaaugucuugcgacuucaauggaggaaaaauaucaguacaauacaaucuaagucacuccuacgcaggcgacgcagcaaaccauugcggaacagucgcaaacggcguacuacaaacauucaugagaauggcauggggaggaucauauaucgcacuugacucagguuguggaagaugggacugcauaaugacaucauaccaauaucucauaauacaaaacacaacaugggaagaccacugccaauucucccgaccaucaccaauaggcuacuuggguuuauuaucacaaagaacacgagacauauacauaucccguagaagacgaggaaccuucacauggacacucucagauuccgaaggcaaagacacacccggcggauacugccuaacaagauggaugcuaauagaagccgaauuaaaaugcuucggaaauacagcaguagcaaaauguaaugaaaaacacgaugaagaauucugcgauauguuacgacucuuugacuucaacaaacaagcaauacaacgauuaaaagcacccgcacaaaugucaauacaauuaauaaacaaagcaguaaacgcauuaauaaacgaccaauuaauaaugaaaaaucaucuuagagacauaaugugcaucccauauugcaauuacucaaaauacugguaccucaaccacacaacaaccggaaaaacaucccuaccaaaaugcuggcuaguaucuaacggaucauaccucaaugaaacccacuuuucagaugacauagaacaacaagcggacaacaugauaacugaaaugcuacaaaaagaauacauggaaagacaaggaaaaacaccacucggacuaguugaucuauucgucuuuucaacaagcuucuaccuaauaucaauauuccuccaccuagucaaaauaccuacacacagacauauaguaggcaaaccauguccaagaccacauagauuaaaccacaugggcaucugcuccugcggacuauauaaacaaccaggaguacccgucaaauggaaaagauaa

SEQ ID NO: 5767 - RNA, 1476 nt, Artificial Sequence
  derived and/or modified protein sequence (opt6) from LASV(G1200-LIB-2010;Clade IV)__AIT17176__GPCstabilized
augggccaaauaguaacauucuuccaagaaguuccacacgucauugaagaaguaaugaauauaguauuaauagccuuaagccuacuagcaguacuaaaaggacuauacaauguugccaccuguggauuaaucggacuaauaacauucuuacuccuauguggaagaucauguacaacaaauuuauauaaaggaguauaugaauuacaagcauuagaacuaaauauggaaacacuaaacaugacaaugccacuaucuugcaccaaaaacaacucacaccacuacauaaugguuggaaaugaaaccggauuagaacuaaccuuaacaaauacauccauaaucaaccacaaauucuguaauuuaucagacgcacauaaaaaaaacuuauaugaucaugcacuaaugucaauaauaucaacauuucauuuaucaauacccaacuucaaccaauacgaagcaaugucaugugauuucaacgguggacgaauaucaguacaauauaaccuaucacacucauacgccggagacgcugcaucacauugcggcacaauagcaaacggcguauugcaaacauuuaugcgaauggcauggggaggaucauacauagccuuagacuccggcuguggaggcugggacugcaucaugacaucauaccaauaucuaauaauucaaaauacaacaugggaagaccauugccaauucucuagacccucaccaaucggauacuuaggucuacucucccaaagaaccagagacauauacaucaguagaagaagaagaggaacauuuaccuggacccuauccgacucagaaggcaaagauacuccaggaggcuacugucuaacacgauggaugcuaauagaagcagaacuaaaaugcuuuggaaacacagcagucgccaaaugcaaugaaaaacacgacgaagaauucugcgacaugcuaagauuauuugacuucaauaaacaagcaauucaacgacuaaaagcaccagcacaaaugucaauacaacuaauaaacaaagcaguaaacgcauuaaucaacgaucaacuuaucaugaaaaaccaccucagagacaucaugugcauaccauacugcaauuauucaaaauacugguaucuaaaccacacuguaacaggaaaaacaucacuuccuaaaugcuggcuaguuuccaaugguucauaucucaaugaaacccauuuuucagacgacauagaacaacaagccgacaacaugauaacagaaauguuacaaaaagaauacauggaacgccaagggaaaacacccuuaggacuaguagaccuauuuguauuuucaacaucauucuacuuaauaucaaucuuccuccaccuaguaaaaauaccaacacaccgacauguaguaggaaaaccaugcccaaaaccacacagacucaaccacaugggcauaugcucuugcggcuuauauaaacaaccaggagucccuguacgauggaaaagauaa

SEQ ID NO: 5768 - RNA, 1476 nt, Artificial Sequence
  derived and/or modified protein sequence (opt6) from LASV(G1442-SLE-2011;Clade IV)__AIT17180__GPCstabilized
augggacaaauaguuaccuuuuuccaagaaguaccucauguaauagaagaagucaugaauauaguccuaauagcauuaucaauauuagcaguauuaaaaggacuuuacaacguagcaaccuguggacuaauaggucuaguaacauuucuacucuuaugcggaagaucauguacuacaacacuauacaaaggaguauacgaauuacaaacucuagaacuaaauauggaaacacuaaacaugacaaugccacucucauguaccaaaaacaacucacaucacuacauucgaguaggaaaugaaacaggucuagaauuaacauuaacaaacacaucaauaauaaaccauaaauucugcaaccucucagacgcacacaagaaaaacuuauacgaccaugcauuaaugucaauaauuuccacauuccauuuauccauaccaaauuuuaaucaauacgaagcaauguccugcgacuucaacggaggaaaaauauccguucaauauaauuuaagucacucuuaugcaggagacgcagcaaaucacuguggaacaguagccaacggagucuuacaaacauucaugagaauggcauggggagguucauacaucgcccuagacucaggcugcggaaauugggauugcauaaugacauccuaucaauaccuaauaauacaaaacacaaccugggaugaccacugucaauucucaagaccaucuccaauaggauauuuaggauuacuaucacaaagaacaagagacguauacauaagcagaagaagaagaggaacauuuacauggacuuuaucagauucagaaggaaaagacacacccggcggcuacugccugaccagauggaugcuaauagaagcagaauuaaaauguuucggcaacacagcaguagcaaaaugcaaugaaaaacacgacgaagaguucugcgauaugcuaagacuuuucgacuucaauaaacaagcaauucaacgauuaaaagcuccagcacaaauguccauacaacuuauaaacaaagccguaaacgcccuaauuaaugaucaauuaauaaugaaaaaccaccuaagagacauaauguguauaccuuacuguaauuacaguaaauacugguacuuaaauaauacugccacaggaaaaacaucauuaccaaaaugcugguuaauaucaaacggaucauacuuaaacgaaacacacuucucagaugacaucgaacaagaagcugacaacaugauuacagaaauguuacaaaaagaauacauggaaagacaaggaaaaacaccuuuaggucuaguagaucuauucgucuucuccacaucauucuaucucauaucuaucuuucuacaccuaguaaaaauaccaacacacagacacauagucggaaaauccugcccaaaaccacacagauuaaaccacaugggaauuugcucaugcggacuauacaaacaaccaggaguaccaguaagauggaaaagauaa

SEQ ID NO: 5769 - RNA, 1476 nt, Artificial Sequence
  derived and/or modified protein sequence (opt6) from LASV(G1529-SLE-2011;Clade IV)__AIT17184__GPCstabilized
augggacaaauaguaacauuuuuccaagaaguaccacacguaaucgaagaaguaaugaacaucguacuaauagcauuaucaauauuagcaguuuuaaaaggacuauacaacguagcaacuuguggauuaauaggccucguaacauuccuacuauuaugcgguagaucaugcacaacaacucuauacaaaggaguauacgaacuacaagcauuagaacucaacauggaaacucuaaacaugacaaugccacuauccugcaccaaaaacaacucucaccauuacauacgcguaggaaaugaaacagguuuagaacuaacacuuaccaauacauccauuaucgaucauaaauuuuguaaucuaucugaugcucauaaaaagaaccuguaugaccacgcauuaauguccauaauuuccacauuucaccuauccauaccaaacuuuaaucaauacgaagcaaugucaugugauuucaauggaggaaaaauaagcguccaauacaacuuaucacauuccuacgcaggagacgcagcaaaucacugcggcacaguagcaaacggcguacuacaaacauuuaugagaauggcauggggagguucauacauagcgcuagacucaggaugcaacggaugggacugcauaaugaccucauaccaauauuuaauaauacaaaauacaacaugggacgaucacugccaauucucucgaccaagcccaauaggauacuuaggccuauuaucccaaagaacacgagauauauacauaucaagacgccgaagaggcacauucacauggacauuaucagacucagaaggaaaagauaccccaggcggauauugccuaacuagauggaugcuaauagaagcagaacuaaaaugcuucggaaacacagccguagcaaaaugcaacgaaaaacaugacgaagaauuuugugacaugcuaaggcuauucgacuucaauaaacaagcaaucagaagauuaaaagcccccgcacaaaugucaauacaauuaauaaauaaagccguuaacgcacuaauaaaugaccaauuaauaaugaaaaaucacuuaagagacaucaugugcauaccauauugcaacuacucaaaauacugguaccucaauaauaccgcaacaggaaaaacaucucuaccuagaugcugguuagugucaaacggaucauacuuaaacgaaacacacuuuuccgacgacauagaacaacaagcagauaacaugaucacugaaauguuacaaagagaauacauggaaagacaaggaaaaacaccacuaggauuagucgauuuauuuguuuucucaacauccuuuuauuuaauuaguauauuccuacaucuuguaaaaauaccuacucacagacacauaguagguaaaccaugcccaaaaccacauagacucaaccauaugggaauauguucaugcggacucuauaaacaaccaggagucccaguuaaauggaaaagauga

SEQ ID NO: 5770 - RNA, 1476 nt, Artificial Sequence
  derived and/or modified protein sequence (opt6) from LASV(G1618-SLE-2011;Clade IV)__AIT17188__GPCstabilized
augggacaaaucguaaccuucuuccaagaaguaccacacguaauagaagaaguaaugaacauaguccuaaucgcacuauccauacuagccguacucaaaggacuauauaacuucgcuaccuguggauucgucgguuuaguaucauuuuuacuacuaugcggcagaucauguacaaccucauuauauaaaggcguuuacgaacuacaaacacuagaauuaaacauggaaacacuaaacaugacaaugccucuaagcugcacaaaaaacaacucccaccauuacaucauggucggaaaugaaacaggauuagaacucacacucacaaacacaucaauaaucaaucacaaauucugcaaucuuucugaugcacacaaaaaaaaucucuacgaccaugcacucaugucaauaauaucaacuuuucaccuaucuauaccaaauuuuaaccaauacgaagcaaugucaugcgacuuuaauggaggaaaaauaucaguacaauacaaccuaucacauagcuaugcaguagacgcagcuaaucacuguggaacagucgcaaauggaguucuacaaacauucaugcgaauggccuggggcggauccuacauagcauuagacuccggaugcgguaguugggacugcauaaugaccucauaccaauacuuaauaauacaaaacacaacgugggaagaccacugccaauucucaagaccaucaccuauaggauauuuaggccuauuaucacaaagaaccagagacaucuacauaagcaggagacgaagaggaacuuuuacauggacucuaagcgacucugaagguaaagacacaccaggagguuacugcuuaaccagauggaugcuaauagaagcagaacuaaaaugcuuuggaaauaccgcaguagccaaaugcaacgaaaaacacgacgaagaauucugcgacaugcuaagauuauucgacuucaacaaacaagcaauucaaagacuaagagcaccagcacaaaugucaauacaacucauaaacaaagcagucaacgcucuaauaaacgaucaauuaauaaugaaaaaccaucucagagauauaaugugcaucccauacugcaauuacagcaaauacugguaccuaaaccacacaacaacaggacgaaccucauuacccaaauguuggcuaguaucuaacggaucauaccuaaacgaaacucauuucucagacgacauagaacaacaagcagacaauaugauaacagaaaugcuccaaaaagaauacauggaaagacaaggaaaaacaccuuuaggcuuaguugaccuauucguauucucaacaucauuuuauuuaauaucaauauucuuacaccuaguuaaaauccccacacaccgacauauaguaggaaaaucauguccaaaaccacauagauuaaaucacaugggaauaugcucauguggacuauauggacaaccaggagucccaguaaaauggaaaagauaa

SEQ ID NO: 5771 - RNA, 1476 nt, Artificial Sequence
  derived and/or modified protein sequence (opt6) from LASV(G1646-SLE-2011;Clade IV)__AIT17192__GPCstabilized
augggacaaauaguaacauuuuuccaagaaguuccacauguuaucgaagaagucaugaauauaguacucauagcacuaucaauacuugccguauuaaaaggacuauacaacuuugcaacaugcggauuuauaggauuaguaucauuuuuacuacucugcggaagaucaugcacaacaucacuauacaaaggaguauacgaacuacaaacacuagaacucaacauggaaaccuuaaacaugacaaugccccuaaguugcacaaaaaacaacagucaccacuacauaaugguagguaacgaaacaggauuagaacuaacacuaacaaacacaucaauaauaaaccacaaauucuguaaucuaagugacgcacacaaaaaaaaccuauacgaccacgcguuaaugucaaucauaucaacauuucauuuauccauaccaaacuucaaccaauuugaagcuauguccugcgauuucaacggugguaaaauaagcguacaauacaauuuaucacacucauaugcaguugaugcagcaaaucacuguggcacaguugcaaauggaguucuacaaacauucaugcgaauggcauggggagguucuuacaucgcacuagauagcggaugcggauccugggacugcauaaugacuucauaccaauacuuaauaauacaaaauacaacaugggaagaucauugccaauucucuagaccuucaccaaucggauaccucggauuauuaucucaaagaacaagagauauauacaucucaagacgcagaagaggcacauuuacauggacacucucagauagugaagguaaagauacaccaggaggcuacugucuaacaagauggaugcucauugaagcagaacucaaaugcuuuggaaacacagcaguagcaaaaugcaacgaaaaacacgacgaagaauucugcgauauguugagacuauuugacuuuaacaaacaagccauacaaagauuaaaagcaccagcccaaaugucaauacaauuaauaaacaaagcgguuaacgcacuaauaaacgaccaauuaauuaugaaaaaucaccucagagacauuauguguauuccauacuguaauuacuccaaauacugguaccuaaaccauaccacaaccggaagaacaagcuuaccuaaaugcugguuaguaucaaacggaucauacuuaaacgaaacacacuucucagacgacauagaacaacaggcagacaacaugauaacagaaaugcuacaaaaagaauacauggaacgacaaggaaaaacaccacuaggacuagucgacuuauucgucuucuccacaucauucuacuuaaucucaauauuccuacaucuaguaaaaauaccaacacacagacacauagucggaaaaucauguccaaaaccacaccgauuaaaccacaugggaauaugcucaugcggauuauauggacaaccagguguuccaguaaaauggaaaagauaa

SEQ ID NO: 5772 - RNA, 1476 nt, Artificial Sequence
  derived and/or modified protein sequence (opt6) from LASV(G1647-SLE-2011;Clade IV)__AIT17196__GPCstabilized
augggacaaaucguaacauucuuccaagaagucccccauguuauagaagaaguaaugaauauaguacuaaucgcauuaucaauacucgcaguucuaaaaggacuauacaaucuagcaacaugcggucuagucggccuaguuacauuccuauuacuuuguggacgauccugcacaacaucacuauacaaaggaguauacgaauuacaaacacuagaauuaaacauggaaaccuuaaauaugacaaugccccuaagcugcaccaaaaacaacucacaccacuacauaauggucggaaacgaaacaggccuagaacucacauuaacaaacacauccauaaucaaccacaaauucuguaacuuaucagacgcacacaagaaaaaccuuuacgaccacgcacucaugucaauaaucucaacauuucaccucucuauacccaacuucaaccaauacgaagcaaugucaugugauuucaacggcggaaaaauaucuguacaauacaacuuaucacacucuuacgcaggagaugcagcuaaccacugcggcacaguagcaaauggaguccuacaaacauucaugagaauggcauggggcggaucauacauagcacuagacucaggauguggacgaugggacugcauuaugacaucauaccaauauuuaauaauacaaaacacuacaugggaagaccacugccaauuuuccagaccaucacccauaggcuacuuaggccuacuaucacaaagaacaagagacaucuacauaucuagacgaagaagaggcaccuuuacuuggacccuaucagacucagaaggaaaagacacaccugggggcuauuguuuaacaagauggaugcucauagaagcagaacucaaaugcuuuggaaauacagcaguagcaaaaugcaacgaaaaacacgacgaagaauuuugcgauaugcuaagacuauucgacuucaacaaacaagcaauccaacgacuaaaagcaccagcacaaaugaacauacaacucauaaacaaagccguaaacgcuuuaauaaaugaccaacucaucaugaaaaaccaucuaagagacauaauguguauaccauacuguaacuauucaaaauacugguacuuaaaccacacuacaacaggaaaaacaucacuaccaagaugcuggcuaguaagcaacggaucauaccucaacgaaacacacuuuucugacgacauagaacaacaagccgacaauaugauaacagaaaugcuacaaaaagaauacauggaaagacaaggaaaaaccccacuaggccuaguagaccuauuuguuuucaguacauccuuuuaccucauaucaauauucuuacaccuagucaaaauaccaacccaucgacauauaguaggaaaaccaugcccaaaaccacauagauuaaaucacaugggaaucugcaguugcggcuucuauaaacaaccaggaguuccaguaaaauggaaaagauaa

SEQ ID NO: 5773 - RNA, 1476 nt, Artificial Sequence
  derived and/or modified protein sequence (opt6) from LASV(G1774-SLE-2011;Clade IV)__AIT17204__GPCstabilized
augggccaaauaguaacauuuuuucaagaagucccacaugucauagaagaagucaugaacauaguauuaauagcacuauccauuuuagcuguccucaaaggacucuacaaccuagccacauguggauuaguaggauuaguaacauuucuauuacucugcggaagaucauguacaucaucauuauacaaaggaguauaugaacuccaaacacuagaacucaacauggaaacucucaacaugacaaugccacuauccuguacuaaaaauucaucccaccacuauauucgaguuggaaacgaaacaggacuagaacuaacacuaacaaacacaucaauaauuaaccauaaauucugcaaccuaucagacgcccacaaaaaaaauuuauaugaccacgcacuaaugucaauaaucucaaccuuccauuuaucuauaccaaacuucaaccaauacgaagcaaugucaugcgacuucaacgguggaaaaaucuccguacaauacaaccuaucacauucauacgcaggagacgcagcaaaccacugcggaacaguugccaacggaguacuacaaaccuucaugagaauggcauggggaggaucauacauagcacuagacucaggaugugaccguugggacugcauuaugaccucauaucaauaucuaaucauacaaaacacaacaugggaagaccauugccaauucucacgcccauccccaauagguuacuuaggauuacuaagucaacgaacuagagauauauacauaucucgaagaagacgaggcacauuuacuuggacacuauccgauagcgaaggaaaagauacacccggaggauacugccucaccagauggaugcuaauugaagcagaacuaaaauguuucgguaacaccgcugucgcuaaaugcaacgaaaaacacgacgaagaauuuugcgauauguuaagacuauucgacuuuaacaaacaagcaauacaaagacuaaaagcaccagcccaaauguccauccaacucauaaauaaagcuguaaaugcacuaaucaacgaccaauuaauaaugaaaaaucacuuaagagauauaaugugcauaccauacugcaacuacuccaaauauugguauuuaaaccacacaauaacaggaaaaacaucacuuccaaaaugcuggcucguaucaaacggaucauaccuaaacaaaacacauuucucagacgauaucgaacaacaggcagacaacaugauaacagaaaugcuucaaaaagaauauauggaaagacaagguaaaacacccuuaggacuaguagaccuauucguuuucucaacaucuuucuaccuaauaucuauauuccuacaccucauaaaaauaccaacacaucgacacauaguaggcaaaccuugcccaaaaccacaccgauuaaaccacaugggaaucugcucauguggacuauauaaacaaccuggagucccaguaaaauggaaacgauaa

SEQ ID NO: 5774 - RNA, 1476 nt, Artificial Sequence
  derived and/or modified protein sequence (opt6) from LASV(G1792-SLE-2011;Clade IV)__AIT17208__GPCstabilized
augggacaaauaguaacauucuuucaagaaguaccacauguaauagaagaagucaugaacauuguacuaauagcucuaucaauucucgccguauuaaaaggccucuauaauuuugcaacaugcggacuaauaggauuaguaacauuuuuacuacuaugcggaagaucaugcacaacaagccuauacaaaggcguauaugaacuccaaacucuagaauuaaauauggaaacauuaaacaugacaaugccauuauccugcacuaaaaacaacucucaccacuacauaaugguaggaaacgaaacaggccuagaacuuacacucacaaacacaucuaucauuaaccacaaauucuguaaccucucagaugcacacaagaaaaaccucuacgaucacgcauuaaugucaaucaucucaacauuccaccuaucaauaccaaauuucaaccaauacgaagcaaugucaugugacuuuaauggaggaaaaauaucaguacaauacaaucucucacacucauacgcaggagacgcagcaaaucauuguggaacaguagcaaauggaguacuacaaacauuuaugcgaauggcauggggaggaucauauauagcacuagacuccggaugcggacaaugggacuguauaaugacaucauaccaauacuuaauaauacaaaacacaacuugggaagaccauugccaauucucaagacccuccccaauugguuaccuaggauuacuaucacaaagaacaagagacauauacauauccagaagaagacguggaacauuuacauggacauuaagcgauuccgaaggaaaagacacaccaggaggcuauugcuuaacacgauggauguugauugaagcagaauuaaaaugcuucggcaacacagcaguagcaaaaugcaaugaaaaacacgacgaagaauuuugugacaugcuacgauuauuugacuuuaacaaacaagcaauacaacgacuaaaagcaccagcccaaaugucaauacaacuaauaaacaaagcaguaaaugcauuaauaaaugaccaacuuaucaugaaaaaccacuuaagagauauaaugugcaucccauauugcaacuacucaaaauauugguaccuaaaccauacaaccacaggcaaaaccucauuaccuaaauguuggcuaguaucaaaugguucauaucuaaaugaaacacauuuuuccgacgauauagaacaacaagccgacaacaugauaacagaaauguuacagaaagaauauauggaaagacaaggaaaaacgcccuuaggauuaguagaccuuuucguauucuccaccucauucuacuuaaucucuauauuccuccacuuaguaaaaauaccaacacaccgacauauaguaggaaaaucauguccaaaaccacauagacuaaaucacaugggaauauguuccugcggauuauauaaacaacccggaguuccaguaaaauggaaaagauaa

SEQ ID NO: 5775 - RNA, 1476 nt, Artificial Sequence
  derived and/or modified protein sequence (opt6) from LASV(G1897-SLE-2011;Clade IV)__AIT17210__GPCstabilized
augggacaaauagucacauucuuccaagaaguaccacacguaauagaagaaguaaugaauauaguacuaauagcccuaucaauacuugccguacuaaaaggacuuuacaauuuagcuacaugcggacuuguaggucuaguaacauuuuuauuacuauguggaagauccugcaccacuucacuauacaaaggaguauacgaacuacaaacacucgaauuaaauauggaaacauuaaacaugacaaugccccuaaguugcacuaaaaauaacagccaucacuacauaaugguaggaaacgaaacaggacuagaauuaacacuaacaaacacaucuauaaucaaucacaaauucugcaacuuaagcgacgcacauaagaaaaaccuauaugaccacgcauuaaugucaauaaucucaacauuccaccucucuauaccaaacuucaaccaauaugaagccaugucaugugacuucaauggaggaaaaauaaguguacaauacaaccuaucacacucuuaugccggagaugcagccaaccauuguggaaccgucgcaaauggaguauuacaaacuuucaugagaauggccuggggaggaucuuacauagcacuagauuccggaugcgacagaugggacugcauaaugacaucauaccaguaucuaauuauacaaaacacaacaugggaagaccauugccaauuuucaagaccaagcccgauaggauaccuaggccuacuaucacaaagaacuagagacauauacauaucacgaagaagacguggaacauuuaccuggacauuauccgacagcgaaggaaaagauacacccggcggauauugccuaaccagauggauguuaaucgaagcagaauuaaaaugcuucgguaacacagcaguagcaaaaugcaacgaaaaacacgacgaagaauuuugugauauguuaagacuauucgauuucaacaaacaagcaauccaaagauuaaaagcaccagcgcaaaugagcauacaauuaauaaacaaagcuguuaacgcacuaauaaacgaccaauuaauaaugaagaaccaccuaagagacauaaugugcauaccauacugcaauuauaguaaauacugguaccuaaaccacacaacaaccgguaaaacauccuuaccuaaauguuggcuaguaucaaaugguucauauuuaaacgaaacccacuucucagacgauauagaacaacaagcagacaauaugauaacagaaaugcuacaaaaagaauacauggaaagacaaggaaaaacaccccuagggcuaguugaccuauucguauucuccacaucauuuuaccuaauaucaauauuccuaaggcuaguaaaaauccccacccauagacacauagucggaaaaccaugcccaaaaccacacagauuaaaccacaugggaauaugcucaugcggacuauacaaacagcccggagucccaguaaaauggaaaagauaa

SEQ ID NO: 5776 - RNA, 1476 nt, Artificial Sequence
  derived and/or modified protein sequence (opt6) from LASV(G1932-SLE-2011;Clade IV)__AIT17212__GPCstabilized
auggggcaaauaguaacauuuuuccaagaaguaccacacgucauagaagaaguaaugaacauagucuuaauagcacuaucuauacuagcaguuuuaaaaggacucuauaaccuagcaacuugcggccuaguagguuuaguaacauucuuauuacuaugcggaagaucaugcacaacaucauuauacaaaggaguauacgaacuucaaaccuuagaacucaauauggaaacauuaaauaugacaaugccacuauccugcaccaaaaauaacucacaccacuauauaaugguaggaaacgaaaccggacuagaacuuacacuuacaaacacauccaucauaaaccauaaauuuuguaaccuauccgaugcccauagaaaaaaccuauacgaccaugcccuaaugucaauuauaucaacuuuucaccuaagcauaccaaacuucaaccaauacgaagcaaugucaugugacuucaacggaggaaaaauuucaguacaauacaaucuaucccacuccuacgcuggagacgcagcaaaccacugcggaaccguagcaaacggaguuuuacaaacauuuaugagaauggcauggggaggaagcuauauugcauuagacucaggcugcggaaaaugggacugcauaaugacaaguuaucaauaccuuauaauacaaaacacaacaugggaagaucacugccaauucucuagaccgucuccaauaggauauuuaggauuacuaucacaacgaacaagagauauauauauaucacgacgaagacgaggaaccuucacauggaccuuaucagacagugaaggcaaagauacacccgggggauauuguuuaacaagauggaugcucauagaagcagaacuaaaauguuuuggaaauacagcaguugcaaaaugcaaugaaaaacacgaugaagaauucugcgacaugcuacgacuauucgacuuuaacaaacaagcaauucaaagacuuaaagcacccgcacaaauguccauacaacuaauaaacaaagcaguaaacgcucuaauaaacgaccaauuaauaaugaaaaaccaccucagagacauaaugugcauaccauacugcaauuacucaaaauacugguaucuaaaucacacaacaacagguaaaacaucacuaccuagguguugguuagucucaaacggaucauacuuaaaugaaacucauuucucagacgauauagaacaacaagcagacaacaugauaaccgaaauguuacaaaaagaauauauggaaagacaaggcaaaacaccauuaggauuaguugaccuauuuguauucucaacaagcuucuauuuaaucucaauauucuuacaucuaguaaaaauaccaacacacagacacauaguagguaaacccugcccaaaaccacauagauuaaaccacauggguauauguuccuguggacuauacaaacaacccggaguaccagucaaauggaaacgcuaa

SEQ ID NO: 5777 - RNA, 1476 nt, Artificial Sequence
  derived and/or modified protein sequence (opt6) from LASV(G1959-SLE-2011;Clade IV)__AIT17216__GPCstabilized
augggccaaauaguaacauucuuucaagaaguuccacacguaauagaagaaguaaugaacauaguacucauagccuuaucaauauuagcaguacuaaaaggacuauauaacuucgcaacaugcggauuaguaggauuagucacauuuuuauuacuauguggaagaucaugcaccacaucucucuacaaaggcguuuacgaauuacaaacucucgaacuuaacauggaaacacuaaacaugaccaugccccuaucauguaccaaaaacaacucccaucauuacauuaugguaggaaaugagacaggauuagaacucacauuaacaaauacaucaauuauaaaccauaaauucugcaaucucucagacgcacauaagaaaaaucuauacgaccacgcacuuaugucaauaaucucuacauuccaccuaucaauaccaaacuucaaccaauacgaagcaaugucaugcgacuucaacggcggaaaaauaucuguacaauauaaucuaucccacucauacgcaggagacgcugcaaaccacugcggaacaguagccaacggcguacuccaaacauucaugcgaauggccuggggaggaucauacauagcauuagacagcggaugcggacgaugggacugcaucaugaccucauaccaauaccucauuauacaaaacacaacaugggaagaccacugccaauucucaagaccaucaccaauaggcuaccuaggccuacuaucucaaagaacaagagacauauacauaucaagaagaagaagaggaacauucacauggacauuaucagacucagaaggaaaagauacaccaggaggauacuguuuaacuagauggaugcucauagaagcagaacuaaaaugcuucggaaacacagcagucgccaaaugcaaugaaaaacacgacgaagaauuuugcgacauguuaagacucuuugacuuuaacaaacaagcaauccaaagacuaaaagccccagcacaaaugagcauacaacuaauaaacaaagcaguaaaugcauuaauaaaugaucaacuaaucaugaaaaaccaucuaagagauauaaugugcauaccauacuguaacuacaguaaauacugguaccuaaaccacaccacaacaggaaaaacaucucuacccaaaugcugguuagucucaaacggaucauaccuaaacgagacccacuuuucagacgacauagaacaacaagcagauaacaugauaacagaaaugcuacaaaaagaauauauggaacggcaaggaaaaacaccucuaggccuaguugaucuauuugucuuuucaacaucauucuauuuaauaucaauauucuuacacuuaguaaaaauacccacccaccgccacauaguuggaaaaccaugucccaaaccacacagauuaaacuacaugggaaucugcucauguggacucuacaaacaaccaggaguaccaguaagauggaaaagauaa

SEQ ID NO: 5778 - RNA, 1476 nt, Artificial Sequence
  derived and/or modified protein sequence (opt6) from LASV(G2141-SLE-2011;Clade IV)__AIT17224__GPCstabilized
augggacaaauaguaacauucuuucaagaaguaccacaugucauagaagaaguaaugaacaucguacuaauagcacuaaguauacuagcaguacuaaaaggacuauacaacguagccacauguggacuaauaggacuaguuaccuucuuauuauuaugcggaagaucaugcacaacaacauuauacaaaggaguauaugaauuacaggcccuagaacuaaauauggaaacucuaaacaugaccaugccacucucaugcacaaaaaauaacucccaccacuauauaagaguugguaacgacacaggacuagaacuaacauuaacuaauacauccauaauacaacacaaauucuguaauuuaucugacgcccacaaaaaaaacuuauacgaucacacacuaaugucaaucauaucaacuuuccaucuauccauacccaauuuuaaccaauacgaagcaaugucuugcgacuucaauggaggaaaaauuagcguacaauauaaucuaucccacucauaugcaggagaugccgcaucacacugcggaacaguugcaaacggaguccuacaaacuuuuaugagaauggcauggggaggaucauacauagcccuagacucaggaugcggaaacugggacugcauaaugacaucauaccaauaccucauaauacaaaacacaacaugggaagaucacugccaauucucaagaccaucaccaauaggauacuuaggcuuacuaucacaacgaaccagagacauauacauaucaagaagaagacguggaacauuuacauggacucuauccgacucagaaggccgagacacaccaggugguuauugcuuaacuagauggauguuaaucgaagccgaacuaaaauguuucggaaacacagcaguagcaaaaugcaaugaaaaacacgacgaagaauuuugcgauaugcuacgauuauuugacuucaacaaacaagcaauacaaagacuaaaaacaccagcacaaaugaguauccaacucauaaacaaagcagucaacgcccucaucaaugaucaacucaucaugaaaaaccaccuaagagacauaaugugcauacccuacugcaauuauuccaaauauugguacuuaaauaacacaaucacagguaaaagcucucucccaaaaugcugguuaguauccaacggaucauauuuaaacgaaacacauuuuucagaugacaucgaacaagaagcagauaauaugauaaccgaaaugcuccaaaaagaauacauggaaagacaaggaaaaacaccacuaggacucguagaccuauucguauucucaacauccuucuaccuaauaucaauauucuuacaucuaguaaaaauuccaacccauagacacauaguaggcaaacccuguccaaaaccacacagauuaaaccacauggguguaugcucaugcggauuauauaaacaaccuggaguaccaguaagauggaaaagauaa

SEQ ID NO: 5779 - RNA, 1476 nt, Artificial Sequence
  derived and/or modified protein sequence (opt6) from LASV(G2147-SLE-2011;Clade IV)__AIT17228__GPCstabilized
augggacaaauaguaacauucuuccaagaaguaccacauguaauagaagaaguaaugaacauaguacuaaucgcauuaucuauacuagcaguauuaaaaggacucuacaacuuugcaacaugcggauuaguuggacuacuaacauuccuauuacuauguggacgaucguguacaacaucucuuuauaaaggcguauacgaacuccaaacacuagaacuuaacauggaaacauuaaacaugacaaugccuuuaagcugcaccaaaaacaacucccaucacuacauaaugguaggaaacgagaccggacucgaacuaacacuuacaaauacaaguauaauagaccacaaauucugcaaccucucagacgcacacaaaaaaaacuuauacgaccacgcacuaaugucaaucauuucaacauuccacuuaucaauaccaaauuuuaaucaauacgaagcaaugucaugugacuucaacggaggaaaaauauccguacaauauaaucucucacacuccuacgcuggagacgccgcaaaccacuguggaacaguagcaaacggaguacuacaaacauucaugcgaauggcuuggggaggaucauacauagcacuagacucaggaugcggaggaugggauugcauuaugacuucauaucaauaccuaauaauacaaaacacuacaugggaagaucacugucaauucucacguccaucaccaauaggauaccuaggccuccuaucacaacguacuagagacauauacauaucaagacguagacgaggaaccuucacauggacacuaagcgacucagaaggaaaagacacuccuggaggauacuguuuaaccagguggaugcuaauagaagcagaauuaaaaugcuucggcaacaccgcaguagccaaauguaaugaaaaacacgaugaagaauuuugcgauauguuaagacuauuugacuucaacaaacaagcuauccaaagauuaaaagcacccgcacaaaugucaauacaauuaauaaauaaagcaguaaacgcauuaauaaaugaucaacuaauaaugaaaaaccaccuaagagauaucaugugcauaccauacugcaacuauuccaaauacugguaccuaaaccacacaaccacaggaaaaacaucccuaccaaaaugcuggcuuguaaguaacggcucauacuuaaacgaaacccacuucucagacgacauugaacaacaagccgacaacaugauuacagaaauguuacaaaaagaauauauggaaagacaaggaaaaacaccauuaggauuagucgaucuuuucguauucucuacaagcuuuuaccuaaucagcauauuccuccaucuaguaaaaauaccaacccacagacacauaguaggaaaaucauguccaaaaccacauagacuaaaccacaugggaauauguucaugcggauuauauaaacaaccaggcgucccaguaaaauggaaaagauaa

SEQ ID NO: 5780 - RNA, 1476 nt, Artificial Sequence
  derived and/or modified protein sequence (opt6) from LASV(G2165-SLE-2011;Clade IV)__AIT17232__GPCstabilized
augggacaaauuguuaccuuuuuccaagaaguaccccacgucauagaagaaguaaugaauauaguacuaauugcacucucaauacuagcaguacuaaaaggacuauacaauuucgccacaugcggacucgucggacuaguaacauuuuuacucuuauguggacgaagcugcacaacaucacuauacaaaggcguauaugaacuccaaacacuagaauuaaauauggaaacucuuaacaugacaaugccacuauccugcacaaaaaacaacucacaccacuauauaagaguuggaaacgaaaccggacuagaauuaaccuuaacuaauacauccauaauaaaccacaaauucugcaaccucucagacgcacacaaaaaaaacuuauacgaucaugcacuaaugucaauaaucuccaccuuccaccuaucaauacccaauuuuaaccaauacgaagcaaugucaugcgacuucaaugaaggaaaaauaucaguccaauauaacuuaucucacucauacgcaggagacgcugcaaaccacugcggaacaguagcaaacggaguccuacaaacauuuaugcgaauggcauggggagguucauacauagcauuagauuccggaugcggaaaaugggacuguaucaugacaucauaccaauaccuaauaauccaaaacacaacaugggaagaccacugucaauucuccagaccaaguccuauaggauaccuaggacuacuaucccaaagaacaagagacaucuauauaucuagacgaagaagaggcacauucacauggacacuaucagacucagaaggcaaagacacaccaggaggauacugccuaacaagauggauguuaauagaagcagaacuuaaaugcuucggaaacaccgcaguugcaaaaugcaacgaaaaacacgaugaagaauucugcgauaugcucagacuauucgacuucaacaaacaagcaauugaacgauuaaaagcacccgcacaaaugucaauacaacuaauaaacaaagcaguuaacgcacuuauaaacgaccaauuaauaaugaaaaaccacuuaagagauauaaugugcauaccauacugcaacuacuccaaauacugguauuuaaaucacaccaccacagguaaaaccucccuacccaaauguuggcucguaucaaacggauccuaccuaaacgaaacccacuucucagacgacaucgaacaacaagcugacaacaugauaacagaaauguuacaaaaagaauacauggaaagacaaggaaaaacaccauuaggacuugucgaucuuuucguauucuccacaucauucuaucuaauaucaauauuccuccacuuaguaaaaaucccaacacacagacacauaguaggaaaauccugcccaaaaccacauagacuaaaccacaugggcauauguagcuguggauuauacaaacaacccggagucccagucaaauggaaaagauaa

SEQ ID NO: 5781 - RNA, 1476 nt, Artificial Sequence
  derived and/or modified protein sequence (opt6) from LASV(G2184-SLE-2011;Clade IV)__AIT17236__GPCstabilized
augggacaaaucgucacauucuuccaagaaguaccacacguaauagaagaaguaaugaacauaguacuuauagcacucucaauacuagccguguuaaaaggacuauacaacuucgccacaugcggccuaguuggccuagucaccuuccuacuauuaugcggaagauccugcacaacuucauuauacaaaggagucuacgaacuacaaacucuugaacuaaacauggaaacauuaaacaugaccaugccacuaucaugcaccaaaaauaacucacaccacuacaucauggucggaaacgaaaccggauuagaacuaacacuaacaaacacaucaauaauaaaccacaaauucugcaaucuauccgacgcacacaaaaaaaaccuauacgaccacgcccuuaugucaauaauuagcaccuuucaucuaucuauuccaaacuuuaaccaauaugaagcaaugucaugcgauuucaacggaggaagaauauccguacaauauaaccucucucacucauacgcaggagaagcagccaaccacugcggcacaguagccaacggaguauuacaaacauucaugagaauggccuggggaggauccuacaucgcacucgauuccggaugcggaaaaugggacugcauaaugacaucauaccaauaccucauaauacaaaacaccacaugggaagaccacugccaauucucaagaccauccccaauaggauaccuaggucuacuaucucaaagaacaagagacauauacauaucaagaagacgacgaggcacauucacauggacacucucagacagugaaggaaaagacacacccggaggauacuguuuaacaagauggauguuaauagaagcagaacuuaaaugcuucggaaacacagcaguagcaaaaugcaaugaaaaacacgacgaagaauucugugacaugcuacgacuauucgauuuuaauaaacaagcaauacaaagauuaaaagcaccugcacaaaugucaauccaauuaauaaacaaagcaguaaaugcuuuaauaaacgaccaacuaauaaugaaaaaucacuuaagagacauuauguguauccccuauugcaacuacucuagauacugguaucuaaaccacacuacaacgggaaaaacaucccuaccaaaaugcuggcuaguaucaaacggguccuauuuaaacgaaacacacuucuccgacgacauagaacaacaagcagauaauaugauuaccgaaaugcuacaaaaagaauacauggaaagacaaggaaaaacuccauuaggauuaguagacuuauucguauucucaacauccuuuuaccuaaucucuauauuucuacaccuaguaaaaaucccaacccauagacauauaguaggaaaaucaugcccaaaaccccaucgacuaaaucacaugggaauaugcagcugcggacuauacaaacaaccaggcguaccaguuaaauggaaacgcuaa

SEQ ID NO: 5782 - RNA, 1476 nt, Artificial Sequence
  derived and/or modified protein sequence (opt6) from LASV(G2197-SLE-2011;Clade IV)__AIT17240__GPCstabilized
augggucaaauuguaaccuuuuuucaagaaguaccacacgucauagaagaaguaaugaacauuguacuaauagcacuauccauacuugcugucuuaaaaggacuuuauaacuuagcaacauguggcuuaguaggacuaguaacuuuccuacuauuaugcggccgauccugcacaacaucauuauauaaaggauucuaugaacuacaaacauuagaacuuaacauggaaacauuaaacaugacaaugccccuaucaugcacaaaaaauaacagccaucacuacauaagggucggaaacgaaacuggauuagaauuaacacuaacaaacacaucaauaauagaucacaaauucugcaaucuaagugacgcccacaaaaaaaacuuguacgaucacgcccuuaugucaaucauaucaacauuccauuuauccauaccaaacuuuaaucaauacgaagcaaugucaugcgacuucaauggaggaaaaaucagcguucaauacaaccuaagccacucauacgccggagacgcggcuaaucacugcgguaccguagcaaacggaguuuuacaaacauucaugagaauggcauggggaggguccuauauagcacuagauucuggcuguggaagaugggacuguauaaugacaucuuaucaauacuuaaucauacaaaacacaacaugggaagaccacugccaauucuccagaccauccccaauaggauaucuaggucuuuuaucacaaaaaaccagagacaucuauauaagcagacgucgaagaggaacuuucacauggacacuauccgacucagaaggaaaagacacaccaggaggcuauugccuaacaagauggauguuaauagaagccgaacucaaauguuucggaaauacagccguagcaaaaugcaaugaaaaacacgaugaagaauucugugacauguuaagacuauuugauuucaacaaacaagccauacaaagauuaaaagcuccagcacaaaugagcauacaacuaauaaacaaagccguaaacgcacuaaucaaugaccaauuaauaaugaaaaaccaccuuagagacauaauguguaucccauauugcaacuauuccaaauauugguaccucaaucacacaacaacaggaaaaacaagucuaccaaagugcugguuaguaagcaauggaucauaccuaaacgaaacacacuucucagacgacauagaacaacaagcagauaacaugauaacagaaauguuacaaaaagaauauauggaaagacaaggaaaaaccccccuaggacuaguugaccuauucgucuucucaacuucauuuuacuuaauaucaaucuucuuacauuuaguaaaaauacccacacacagacacaucguaggaaaaucauguccaaaaccacacagacuaaaucacaugggaauaugcucaugugggcuauacaaacaaccaggaguaccaguaaaauggaaaagauaa

SEQ ID NO: 5783 - RNA, 1476 nt, Artificial Sequence
  derived and/or modified protein sequence (opt6) from LASV(G2222-SLE-2011;Clade IV)__AIT17244__GPCstabilized
augggacaaauagucaccuucuuccaagaagucccacauguaauagaagaaguaaugaacauaguauuaauagccuuauccauauuagcuguacuaaaagguuuauacaacuuagcaacauguggauuaguaggacucguaacauucuuacuauuaugcggcagaucaugcacaacaaaucuauacaaaggaguuuacgaacuacaaacacuagaacuaaacauggaaacacucaauaugacuaugccccuaagcugcaccaaaaauucaucacaccacuacauaagaguaggaaaugaaacagguuuagaauuaaccuuaacaaacacaucaaucauagaucacaaauuuugcaaccuaagcgaugcucacaaaaaaaaccuauacgaucaugcauuaauguccauaaucaguacauuccacuuaagcauaccaaacuucaaccaauaugaagcaaugucaugcgacuuuaauggcggaaaaauuucaguacaauacaacuuaucacacuccuacguaggagacgcagcagaccauugcggcacaguagcaaaugguguucuacaaacguucaugcgcauggcauggggcggauccuauauagcauuagacucaggaugcggcaaaugggauugcauaauaacuucauaccaauaucucauaauacaaaauaccacaugggaagaucacugccaauucucuagaccaucaccaaucggauacuuaggacuucuaucacaaagaaccagagacaucuacauaucaagacguagacgcgguacauucaccuggacacuaucagacagcgaaggaaaagacacaccuggcggauauugccuaacacgauggauguuaauagaagcagaauuaaaauguuuuggaaacacagcaguagcuaaaugcaaugaaaaacaugaugaagaauuuugcgacaugcuacgacuauucgacuucaauaaacaagcaauacaaagauuaaaagcaccagcucaaaugaguauccaacuaaucaacaaagcaguuaacgcacuaauaaacgaccaacucauaaugaaaaaccaccuaagagacauaauguguauaccauacugcaauuauuccaaauacugguauuugaaucauacuauaacaggaaaaacaucauuaccaagaugcugguuagucucaaacggaucauaccuaaaugaaacaagauuuucagaugauauagaacaacaagcagacaacaugauaacugaaaugcuacaaaaagaauacauggaaagacaaggaaaaacaccauuaggacuaguagaccucuucguauucagcacaucuuucuacuuaaucucaauauuccuucacuuaguaaaaauaccuacacauagacacauaguaggaaaaccaugcccaaaaccacacagacuaaaucacaugggaauaugcucaugcggacuauacaaacaaccaggcguaccagucaaauggaaaagauaa

SEQ ID NO: 5784 - RNA, 1476 nt, Artificial Sequence
  derived and/or modified protein sequence (opt6) from LASV(G2230-SLE-2012;Clade IV)__AIT17246__GPCstabilized
augggacaaauaguaaccuucuuccaagaaguaccacauguaauagaagaaguaaugaacauaguacucauagcacuaucacuacucgcaguccucaaaggacuauacaacguagcaacaugcggacuaaucggacuaauaacauucuuacuacuauguggaagaucaugcacaacaaacuuauacaaaggagucuacgaacuacaaacucuagaacuaaacauggaaacucuuaacaugacaaugccacuaucaugcaccaaaaauucaucacaucacuacauuaugguaggaaacgaaaccggacuagaacuaacauuaacaaacacaagcauaauaaaccacaaauucugcaaccuaagcgacgcacauaaaaaaaaucuauacgaccauacacuuaugucaaucaucucaacauuccaccucucaauaccaaauuucaaccaauacgaagcuaugucaugcgauuuuaacgguggcaaaaucuccguacaauauaaccuaucacacucauaugcuguagaugcagccaaccacugcggcacaguagcaaacggaauauuacaaacuuucaugagaauggcauggggaggauccuacauagcauuagauagcggauguggaaauugggacugcauaaugacaucauaucaauaccucauaauacaaaauacaacaugggaagaucacugccaauucucccgcccaucaccaaucggauaccuuggauuacuuucacaaagaaccagagacaucuacaucucaagaagacgaagaggcacauucacauggacucuaucagacucagaaggaaacgacacuccagguggauacugccuaacaagauggauguuaauagaagcagaacuaaaaugcuucgguaacacagcaguagcaaaaugcaacgaaaaacaugacgaagaauucugugauaugcuaagauuauucgacuucaacaaacaagccauccaacgcuuaaaagccccagcacaaaugucaauacaacuaauaaauaaagcaguuaaugcuuuaauaaacgaccaacuuauaaugaaaaaccauuuaagagacauaaugugcauccccuacugcaacuauuccaaauacugguaccuaaaccauaccacaacaggaaaaacaucacuaccaaaauguugguuagucagcaacggaucauaucuaaacgaaacucauuuuucagaugacauagaacaacaagcagacaauaugauaacagaaaugcuacaaaaagaauacauggaacgacaaggaaaaaccccacuugguuuagucgaccuauucguuuuuaguacaucauuuuaccuaauauccauauuccuccacuuaguaaaaaucccaacacacagacacauaguagggaaaccauguccaaaaccucaccgucuaaaccacaugggcauauguucauguggacuauacaaacaaccaggaguucccgucagauggaaacgauaa

SEQ ID NO: 5785 - RNA, 1476 nt, Artificial Sequence
  derived and/or modified protein sequence (opt6) from LASV(G2259-SLE-2012;Clade IV)__AIT17250__GPCstabilized
augggacaaaucguaacauucuuccaagaaguaccccacgucauagaagaaguaaugaauauaguauuaauagcuuuaucacuauuagcaguccuaaaaggacuauacaacguagcaaccugcggacuaauaggacuaguaacuuuccuacuauuaugcggaagaucauguacaacaaaccuauauaaaggaguauaugaauuacaaacauuagaacuaaacauggaaacuuuaaauaugacuaugccacuuuccuguaccaaaaauaauucacaucacuacauaaugguagguaacgaaacaggccuagaauuaaccuuaacaaauacaucaaucaucaaucacaaauucugcaacuuaucugacgcacacaaaaaaaauuuauacgaccacacacuaaugucaauaauaucuacauuccaucuuucuauaccaaacuucaaccaauacgaagccauguccugugauuuuaacggaggaaaaauauccguacaauacaaccuaucacacuccuaugcagucgacgcagccaaucacuguggaacagucgcaaacggaguacuucaaaccuucaugagaauggcauggggaggaucauacauagcccucgauucaggaugcggaaacugggacugcaucaugacaucauaccaauaucuaauaauccaaaauacaacaugggaagaccauugccaauuuucacgcccuucaccaaucggauauuuaggacuauuaucacaacgaacaagagacauauauauauccagaagaagaagaggaacauucacauggacauuaucugacuccgaaggaaacgauaccccuggaggcuacugcuuaacaagauggaugcuaauagaagcagaacuaaaauguuuuggaaauacagcaguagccaaaugcaaugaaaaacaugacgaagaauuuugcgacaugcuacgauuauucgacuucaauaaacaagcaauacaaagacuaaaagcaccagcccaaaugucuauacaacuaauaaacaaagccgucaacgcucuaauaaaugaccaauuaauaaugaaaaaccauuuaagagauauuauguguauaccauacuguaacuauuccaaauacugguauuuaaaccacacaacaacagguaaaacaucacuaccaaaauguuggcucguauccaauggauccuaccuaaaugaaacacauuuuucagacgacaucgaacaacaagcagacaauaugaucaccgaaauguuacaaaaagaauauauggaaagacaaggaaaaaccccauuaggacuugucgacuuauuuguauucucaacaucauucuaccuaauuuccauauuucuccacuuaguaaaaauaccuacacaucgucacaucgucggaaaaccauguccaaaaccccauagacuaaaucacaugggaauauguucaugcgggcuauacaaacaacccggcguaccaguaagauggaaacgauga

SEQ ID NO: 5786 - RNA, 1476 nt, Artificial Sequence
  derived and/or modified protein sequence (opt6) from LASV(G2263-SLE-2012;Clade IV)__AIT17254__GPCstabilized
augggacaaauaguuacuuucuuucaagaaguaccacacguaauagaagaaguaaugaauauaguacuuauagcacuuuccauacuagcaguacuaaaaggccuauacaauuucgcaacuugcggaauaguuggccuagucaccuuccuacuccuaugcggacguucuugcaccacuucacuauacaaaggaguuuaugaauuacaaacauuagaauuaaauauggaaacucucaacaugaccaugccacuauccuguacuaaaaauaauucacaucauuacauaauggucggaaacgaaacaggauuagaacuuacacuuacaaauaccucuauaauaaaucauaaauuuugcaaccuaagcgaugcacacaagaaaaaccuauacgaucacgcacuaauguccauaauaucaaccuuucaccuaucaaucccaaacuucaaucaauacgaagccauguccugcgacuucaacggaggcaaaaucucaguucaauacaaccuaucccacucauacgcaggcgacgcagcaaaucacugcggaacaguagcaaauggcguauuacaaacauucaugagaauggcauggggcggaagcuacauagcacuagacucaggaugcgacagaugggacugcauaaugacauccuaccaauaucuaauaauucaaaacacaacaugggaagaccacugucaauucucaagaccaagcccaauagguuaccuaggacugcuaucucaaagaacuagagacauauacaucucaagaagacgaagaggcacuuucacuuggacauuaucagacucagaagguaaaaauacaccuggaggcuacugccuuacacgauggaugcuaauagaagcagaauuaaaaugcuuuggaaacacagcaguagcaaaauguaacgaaaaacacgacgaagaauuuugugacaugcuaagacuuuuugauuucaacaaacaagcaauacaaagauuaaaagcaccagcacaaaugucaauuucacuaauaaauaaagcagucaacgccuuaauaaacgaccaauuaaucaugaaaaaccaucucagagauauaauguguaucccuuauuguaauuacucaaaauacugguacuuaaaucacaccacaacaggaaaaacaucacuaccaagauguuggcuaguaucaaauggaucauacuuaaacgaaacacacuuuucugacgauauagaacaacaagcagacaacaugauaacagaaauguuacaaaaagaauacauggacagacaaggaaaaacaccauuaggccuaguagauuuauuuguauucucaaccaguuuuuauuuaaucuccauauuucuacaccucguaaaaauaccaacccacagacauauaguugguaaaacaugcccaaaaccacacagacugaaccacaugggaauaugcucauguggacucuacaaacaaccaggaguaccaguaaaauggaaaagauaa

SEQ ID NO: 5787 - RNA, 1476 nt, Artificial Sequence
  derived and/or modified protein sequence (opt6) from LASV(G2280-SLE-2012;Clade IV)__AIT17258__GPCstabilized
augggccaaauaguaacuuucuuucaagaaguaccacauguaaucgaagaaguaaugaacaucguccuaauagcacuaucaauccuagcaguauuaaaaggacucuauaacauagccacaugcggacuaguaggucuaguaacauuuuuacuauuaugcggacgaucauguacaacaagucucuauaaaggaguuuacgaacuacaaacacuagaacuaaauauggaaacauuaaacaugaccaugccacuaucaugcaccaaaaacaacucccaccacuauauaaugguaggaaacgaaacaggacuagaacuaacacuuacaaacacauccauaauaaaccacaaauucugcaacuuauccgaugcacacaaaaaaaauuuauacgaccacgcucuaaugucaauaguauccacauuucaccuaucaauaccaaacuucaaccaauacgaagcaaugucaugugacuucaauggcggaaaaauaucaguccaauauaaccuaucacacaguuacgcaguagacgccgcaaaucacugcggaaccguagcaaacggcguauuacaaacauucaugagaauggcauggggcggaucauacauagcacuagacucuggcugcggcggcugggacugcauaaugacaucauaccaauacuuaaucauacaaaacguuacaugggaagaccacugucaauucucaagaccaucaccaauaggauaccuaggacuacuaucucaaagaacaagagauguauacauaucaagaagacgacgaggaacauucacauggacacuaucagacuccgaaggaaacgacacaccaggaggauauugccuaacaagguggaugcuaaucgaagcagaauuaaaauguuucggcaacacugcuguagcgaaauguaacgaaaaacacgacgaagaauuuugcgacaugcucagacuauucgacuucaauaaacaagcaauacaaagauuaaaagcacccgcacaaaugucuauccaauuaauaaauaaagcugucaacgcccuaauaaacgaccaacuaauaaugaaaaaccaucuaagagacauaaugugcauaccauacuguaacuacagcaaauacugguaucucaaccauacaacaacuggcaaaacaucccucccaaaaugcuggcucguaaguaacggauccuaccuaaacgaaacacacuucucagacgacauagaacaacaagcagauaauaugauuacagaaaugcuacaaaaagaauacauggaaagacaaggaaaaacaccacuaggcuuaguagacuuauuuguauucagcacauccuuuuaucuaauaucaauuuucuuacaucuugucaaaauaccaacccacagacauauuguaggaaaaccaugcccaaaaccacaccgcuuaaaccacaugggaauaugcucuugcggacucuacaaacaaccuggaguacccguaaaauggaaaagguaa

SEQ ID NO: 5788 - RNA, 1476 nt, Artificial Sequence
  derived and/or modified protein sequence (opt6) from LASV(G2295-SLE-2012;Clade IV)__AIT17262__GPCstabilized
augggacaaauuguaacauucuuccaagaaguaccacacguaauagaagaaguaaugaacauaguacuaaucgcuuuaucaauauuagcaguacucaaaggauuauacaaccuagccacaugcggcuuaguaggauuagucaccuuccuacuccuaugcggaagaucauguacaacaucacuauacaaaggagucuacgaauuacaaacauuagaacuaaacauggaaacacuuaauaugacuaugccacuaucaugcacaaaaaacaacucccaucacuacauaaugguaggaaacgaaacaggauuagaacuaacacucacaaauacaucaaucauaaaccacaaauucugcaacuuaucagacgcccacaaaaaaaaccuauacgaccacgcucuaaugucaauaaucucaacauuccaccuaucaauaccaaacuucaaucaauacgaagcaaugucaugcgacuuuaacggaggaaaaauaucaguacaauacaacuuaucccacuccuacgcuggcgacgcagcaacacacuguggaacaguagccaacggaguucuccaaacuuucaugagaauggcuuggggagguucauacauagcacucgauucaggaugcggaaaaugggauuguaucaugacaucauaucaauaccucauuauacaaaacaccacaugggaagaccacugucaauucucaagaccaucaccaauugguuaucuaggccuauuaucccaacgaacaagagauauauacaucucaagaagacgacgaggaacauucacauggacacuaucagauucagaaggaaaagauacaccaggaggauauugccuaacaagauggaugcuaauagaagcagaauuaaaaugcuucggaaauacagcuguagcaaaaugcaaugaaaaacacgaugaagaauucugcgacaugcuaagauuauucgauuucaacaaacaagcaauacaaagacuaaaaacaccugcucaaaugucuauacaauuaauaaacaaagcagucaacgcauuaaucaacgaccaauuaauaaugaaaaaucaccuaagagacauuaugugcaucccauacuguaauuacuccaaauacugguaccuaaaucauacaaccacuggaaaaacuucucuucccagauguuggcuaguuuccaauggauccuaccuaaacgaaacacauuucucugaugacauagaacaacaagcagacaacaugauuacagaaaugcuacaaaaagaauacauggaaagacaaggaaaaaccccccuaggauuaguagacuuauucguauuuuccacaucuuucuaucuuaucucuauauuccuacauuuagucaaaauccccacacacagacacauaguaggaaaaccauguccaaaaccucacagauuaaaccauaugggcauaugcuccugcggcuuauauaaacaaccagguguaccaguaaaauggaaaagauaa

SEQ ID NO: 5789 - RNA, 1476 nt, Artificial Sequence
  derived and/or modified protein sequence (opt6) from LASV(G2315-SLE-2012;Clade IV)__AIT17266__GPCstabilized
augggacaaauaguaacauuuuuccaagaagucccucacguaauagaagaaguaaugaauaucguauuaauugcacuaucaauacuagccguauuaaaaggucuauauaauuuagcaacuugcggauuaguaggacuaguaacauucuuacucuuaugcggcagaucaugcacuacaucacucuacaaaggagucuacgaacuacaaacacuugaacuaaacauggaaacacuaaauaugacaaugccacugucuuguacaaaaaauaauucacaccauuacauaaugguaggaaacgaaacaggauuagaacuaacacuaacaaacacaagccuaaucaaccacaaauucuguaaccuaucagaugcacacaaaaaaaacuuauacgaucacgcauuaaugucaauaauaucaaccuuccacuuaucaauuccuaauuucaaccaauacgaagcaaugucaugcgacuuuaauggaggaaaaauaucaguacaauacaaccuaucacauucuuacgccguagacgcggcuaaucacugugguacugucgcaaauggaguauuacaaacauucaugagaauggcauggggaggaucauauauagcauuagauagcggaugcggaggaugggauugcauaaugacaucauaccaauacuuaauaauccaaaacacaacuugggaggaucauugccaauuuucaagaccaagcccaaucggauaucuaggauugcuaucacaaagaacacgagauauauauauaucaagaagaagaagaggaaccuucacuuggacacuaucagacucugaaggaaaagauacaccaggaggcuauugucuaacuagauggaugcuaauagaagcagaacuaaaaugcuuuggcaauaccgccguagccaaaugcaacgaaaaacacgacgaagaauucugcgauauguuacgacuauucgacuucaauaaacaagccauacaacgacuaaaagcaccagcacaaaugucuauacaacucauaaacaaagcaguaaacgccuuaaucaaugaucaacuaauaaugaaaaaucaccuacgagacauaaugugcauaccauauugcaauuacuccaaauauugguacuuaaaucacacaaccacaggaagaacaucauuaccacgaugcuggcucguaucaaacggcuccuaccucaacgaaacacacuucucagacgauauugaacaacaagcagauaacaugauaacagaaaugcuacaaaaagaauauauggaaagacaaggaaaaacaccacuaggucuaguagaccuauuuguauucucaacaucauucuacuuaauauccauauucuuacaucuagugaaaauaccaacacacagacauauaguaggaaaaucaugucccaaaccacacagacuuaaucacaugggaauauguuccugcggacuauacaaacaacccgggguaccgguaaaauggaaacgauaa

SEQ ID NO: 5790 - RNA, 1476 nt, Artificial Sequence
  derived and/or modified protein sequence (opt6) from LASV(G2318-SLE-2012;Clade IV)__AIT17270__GPCstabilized
augggacaaauuguuacauucuuccaagaagucccccauguaauugaagaaguaaugaacauagucuuaauagcauuauccgucuuagcaguacuaaaaggacuauacaacuuugcaacaugcggauuaguaggacucguaacauuccuacuauuaugcggccgaucaugcucaacaucaguauacaaaggaguauacgaauuacaaacacuagaacuaaauauggaaacauuaaauaugaccaugccauuaucaugcaccaaaaacaacucacaccacuacauaaugguaggcaacgaaacaggauuagaacuaacacuaacaaacacaucuauaauaaaucacaaauucuguaaccuuuccgacgcccacaaaaaaaaccuauacgaucacgcacuaaugucaaucauaucaacuuuccacuuaucaauacccaacuuuaaucaauaugaagcaaugucaugcgacuucaacggaggcaaaauaucaguacaauauaacuuaucacauucauacgcaguagaugcagccaaccauugcggcaccguagcaaacggaguauuacaaaccuuuaugcgaauggcauggggaggcagcuauauagcucuagacucaggaugcgguggaugggacugcauaaugacuaauuaccaauauuuaauaauacaaaacacaaccugggaagaccauugccaauucucaagaccaagcccuauuggcuauuuaggacuauuaucucaaagaacaagagacauauauauaucaagaagaagaagaggcacauuuacauggacacuaucagacucagaaggaaaagacacaccagguggauauugcuuaacucgcuggaugcuaauagaagcagaauuaaaaugcuucggcaacacagcaguagcaaaaugcaacgaaaaacaugaugaagaauucugcgauaugcuacgacuuuucgacuuuaauaaacaagcaauacaaaggcuaaaagcacccgcacaaaugucaauacaacuaaucaacaaagcagucaacgcccuaauaaacgaccaacuuaucaugaaaaaccaucuaagagacauaaugugcauaccauacuguaauuacucaaaauacugguaucuaaaccacacaaccacaggaagaaccucauuacccaaaugcugguuaguuucaaauggcuccuacuuaaaugaaacccauuucucugaugauaucgaacaacaagcagauaacaugaucaccgaaaugcuacaacgcgaauacauggaaagacaaggaaaaacaccacugggccuggucgaccuauucguauuuucaaccagcuucuacuuaauaucuauauuucuacacuuaguaaaaauacccacacauagacacauaguaggaaaaucaugcccaaaaccacacagacuaaaccacaugggaauaugcucuuguggacuauacaaacaaccuggugucccaguaaaauggaaaagauaa

SEQ ID NO: 5791 - RNA, 1476 nt, Artificial Sequence
  derived and/or modified protein sequence (opt6) from LASV(G2363-SLE-2012;Clade IV)__AIT17274__GPCstabilized
augggacaaauaguaacauucuuccaagaaguuccacaugucauagaagaagucaugaacauaguacuaauagcauuaucaauauuagccguacuaaaaggccuauacaacguagcuacaugcggacuaacaggauuaguagcuuuccucuuacuaugcggaagaucaugcacaaccaccuuauacaaaggaguauaugaauuacaagcucuagaacuaaacauggaaacucucaacaugaccaugccucuuagcugcacaaaaaacaauucucaucacuauauccgaguaggaaaugaaacagguuuagaacuaacacuaacaaacaccagcauuauagaacaucgauuuugcaaccuaucagacgcacacaaaaaaaacuuauacgaccacgcacuaauguccauaauaucaacauuccaucuaucuauaccaaacuuuaaccaauacgaagcaauguccugcgacuuuaacggaggaaaaauaagcguacaauacaaucucucacacuccuaugccguagacgcagcaaaccacugcggcacaguagcaaacgguguauuacaaacauucaugagaauggcauggggcggaaguuacaucgcacuugacucaggaugcaacggaugggauugcauaaugacaucauaucaauaucuaaucauacaaaacaccacaugggaagaccauugccaauucucacgaccaucccccauaggauauuuaggcuuauuaucacaaagaacacgcgacauauacauaucaagaagaagacgaggaaccuuuacauggacacuuagugacagugaaggcaaagauacaccaggaggauauuguuuaacuagauggaugcuuauagaagcagaauuaaaauguuucggaaauaccgcagucgcaaaauguaaugaaaaacacgacgaagaauuuugugacauguuacgacucuuugacuuuaauaaacaagcaauucaaagacuaaaagcaccagcacaaaugucuauacaacuaauaaacaaagcaguaaacgcauuaauaaaugaccaauuaauaaugaaaaaccacuuaagagauauaaugugcaucccauauugcaacuauaguaaauacugguauuuaaauaauacagcgacagguaaaacaagcuuaccaagauguugguuaguaucaaacggaucauacuuaaacgaaacacacuucucagaugauauugaacaacaagcagauaauaugaucacagagaugcuacaaaaagaauacauggaaagacaaggaaaaacaccacuaggacuagucgaucucuuuguauucucaacaucauucuacuuaaucucuauauuccuacaucuagucaaaauacccacacacagacacauaguaggaaaaccauguccaaaaccacauagacuaaaucacauggguauaugcuccugcggucuauacaaacaacccggcgcaccaguaagauggaaaagauaa

SEQ ID NO: 5792 - RNA, 1476 nt, Artificial Sequence
  derived and/or modified protein sequence (opt6) from LASV(G2384-SLE-2012;Clade IV)__AIT17276__GPCstabilized
augggccaaaucguaacuuucuuucaagaaguuccacacguaauagaagaagucaugaacauaguauuaaucgcacuaucaauacuagcaguauuaaaaggccuauacaacuuugccacaugcggauuaguaggacuaguaacauucuuacuucuaugcggacgaucaugcacaacaucacuauacaaaggaguuuacgaacuacaaacacuagaacucaauauggaaacccuaaacaugaccaugccacuaucaugcacaaaaaacaacucacaucacuauauaaugguuggcaacgaaacuggacuagaacuaacauuaacaaauacaucuauaaucaaccacaaauucugcaauuuauccgacgcacauaaaaaaaaucucuaugaccaugcacuaaugucuauaauaucaacuuuucaucuaucaauaccaaacuuuaaccaauacgaagcaaugucaugcgauuuuaacggaggcaaaauaagcguccaauacaacuuaucacacuccuacgcaggagacgcagccaaucacugcggaacaguagcaaauggaguuuuacaaacauucaugagaauggcauggggaggcaguuacauugcauuagauucaggaugcggaaaaugggacugcauaaugaccuccuaucaauaucuaauaauacaaaacaccacaugggaagaucacugccaauuuucacgacccaguccaauaggcuaucuaggucuacucucccaaagaaccagagacauauacauuucacgaagaagaagaggaacauucacauggacauuaucagacucagaaggaaaagacacaccaggaggauauugccuuacaagauggaugcuaauagaagcagaauuaaaaugcuucggcaacacagccguagccaaauguaacgaaaaacacgacgaagaauucugugacaugcucagauuauucgacuucaauaaacaagccauacaaagacuuaaagcuccagcacaaauguccauucaacuaauuaacaaagcagucaacgcacuaauaaacgaccaacuaauaaugaaaaaucaccuaagagacaucauguguauaccauacugcaacuacagcaaauauugguaucuuaaccacaccacaacaggaaaaaccagccuaccaaaauguuggcuaguaucuaacggaucauacuuaaacgaaacacacuucucagacgauauugaacaacaagcagacaauaugauaacugaaaugcuacaaaaagaauauauggaaagacaaggaaaaacacccuuaggacuagucgaccuauucguauucuccacaucauucuaccuaaucaguauuuuccuacaccuaguuaaaaucccaacacauagacacauugucggaaaaagcugcccuaaaccucacagauuaaaccacaugggaauaugcucaugcggauuauacaaacaaccuggaguaccaguucgauggaaacguuaa

SEQ ID NO: 5793 - RNA, 1473 nt, Artificial Sequence
  derived and/or modified protein sequence (opt6) from LASV(G2392-SLE-2012;Clade IV)__AIT17280__GPCstabilized
augggacaaauaguuacauuuuuccaagaaguuccacacguuaucgaagaaguaaugaauauuguacuaauagcauuaagcauacucgcaguacuaaaaggacuauacaacuucgcaacauguggacuagucggacuaguaacuuucuuacuacuuugcggacgaucaugcacaacaucccuauauaaaggugucuaugaauuacaaacucuugaacuaaacauggaaacauuaaauaugaccaugccauuaucaugcacaaaaaauaacucacaccauuauauacgaguagguaacgaaacaggcuuagaacuuacacuaacaaauacaucaauaauagaccacaaauucuguaaccuaucagacgcccacaaaaaaaaccuauacgaccaugcauuaaugagcauuaucucaacuuuucaccucucaaucccaaacuucaaucaauacgaagcaauguccugcgauuuuaauggaggaaaaauuucaguacaauacaaccuuucacacucauacgccggagacgcagcaaaccacugcggaacaguagcaaacggaguauuacaaacauucaugagaauggcauggggaggaagcuacauagcccucgacucgggaugcgaaugggacuguauaaugacuagcuaccaauacuuaauaauccaaaacacuacaugggacaaucacugccaauucagcaggccauccccaauaggauauuuaggauuacuaucacaaagaacaagagacaucuauauaucaagacgaagaaggggaaccuuuacuuggacccuaagcgauucagaagguaaagacacaccaggcggauacugccucacaagauggaugcucauagaagccgaacuaaaauguuuuggaaauacagcaguagcaaaauguaacgaaaaacacgaugaagaauucugcgauauguuacgacuauuugacuucaacaaacaagcaauccaaagacucaaaguaccagcacaaauguccauccaacuaauuaauaaagcaguaaacgcucuaauaaaugaucaauuaauaaugaaaaaucaccuaagagacaucauguguaucccuuauugcaacuacucaaaauauugguaccuaaaccacacaacaacaggcaaaacaucccuacccaaauguugguuaguaucaaacggcuccuaccuaaaugaaacacauuucucagacgacauugaacaacaagcagacaauaugauaaccgaaaugcuacaaaaagaauacauggaacgacaaggaaaaacaccacuaggauuaguagaccuauucguauucucaacaucuuucuaccuaauaucaauauuccuucaucuaguaaaaauaccaacacacagacauauaguuggaaaaucauguccuaaaccucauagacuaaaucacaugggaauaugcucauguggauucuacaaacaaccaggagucccaguaaaauggaaacgauaa

SEQ ID NO: 5794 - RNA, 1476 nt, Artificial Sequence
  derived and/or modified protein sequence (opt6) from LASV(G2405-SLE-2012;Clade IV)__AIT17284__GPCstabilized
augggacaaauaguaacauucuuucaagaagucccacacguaauagaagaaguaaugaauaucguacuuauagcucuaucaguacuagcaguauuaaaaggccuauauaauuucgcaacaugcgguauaguaggauuaguaacauuccuccuauuauguggcagaucuugcacuacaucguuauauaaaggcguauacgaacuacaaacacuagaacuaaacauggaaacauuaaacaugacaaugccauuauccugcacaaaaaacaacagccaccacuacauuaugguaggaaaugacacuggucuagaacuaacauuaacaaauaccucaauaaucaaucacaaauucugcaaccucucagaugcacacaaaaaaaauuuauacgaccacgcacuaaugaguauaauuuccacuuuccaccuaucuaucccaaacuuuaaccaauacgaagcaaugucaugcgauuucaacggcggaaaaauaagcguccaauauaaccuaagccauucauacgcaggcgacgcagcagaccauuguggaacaguagcaaaugguguuuuacaaacauucaugagaauggccuggggaggauccuauauagcucucgacuccgguugcggaagaugggacugcaucaugacaaguuaccaauauuuaauaauucaaaauacaacaugggaagaccauugccaauucucacgaccaucccccauuggauaccuaggacuacuaucccaaagaacaagagacauauauauaagcagacgaagaagaggaacauuuacauggacacuaagugacuccgaaggaaaagacaccccaggaggauacugccuaacacgauggauguuaauagaagcagaacuaaaaugcuuuggaaacacugcaguugcuaaauguaacgaaaaacaugaugaagaauucugcgauaugcuacgacuauuugacuucaauaaacaagcaauacaaagauuaaaagcacccgcucaaaugucaauacaauuaauaaacaaagcaguaaacgccuuaauaaacgaucaacucauaaugaaaaaccaccuaagagacauaaugugcauaccauauugcaauuauagcaaauauugguacuuaaaccacacuacaaccgggaaaacaucauuaccaaaaugcugguuaguuuccaauggaucuuaucucaacgaaacacauuuuucagacgauauagaacaacaggcagauaauaugauaacugaaaugcuacaaaaagaauauauggaaagacaaggaaaaacaccacuaggccuaguagauuuauucguauucuccaccuccuuuuaccucaucucuauauuccuacauuuaguaaaaauacccacacacagacacauaguaggaaaacccuguccaaaaccacacagacuaaaccacaugggcaucugcucaugcggacuauauaaacaaccagguguuccaguaaaauggaaaagauaa

SEQ ID NO: 5795 - RNA, 1476 nt, Artificial Sequence
  derived and/or modified protein sequence (opt6) from LASV(G2427-SLE-2012;Clade IV)__AIT17288__GPCstabilized
augggacaaaucgucacauucuuucaagaagucccacacgucauugaagaaguaaugaacauaguacuaauagcccuauccauacuugcaguacuuaaaggauuauauaacuucgcaacaugcggacucguaggacuaguaacuuuuuuacuauuaugcggacgcucauguacuacaucacuauacaaaggcguauacgaacuccaaacacuagaacucaacauggaaacacuaaacaugacaaugccacuaucaugcacaaaaaacaauucacaccauuacauaauggucggaaacgaaacuggcuuagaacuuacacuaacaaauaccucuauaauuaaccacaaauuuugcaaccuauccgacgcacacaaaaaaaaccucuaugaccacgcauuaaugucaauaauaucgacuuuccaccuaagcauacccaacuucaaccaauacgaagccaugucaugcgacuuuaacggcggaaaaaucuccguacaauacaaucuaucucacucauacgcaguagacgcagcuaaucacuguggaacaguagcaaacggaguacuacaaacauucaugagaauggcauggggcgguggauauauagcacuagacucaggaugcggcaauugggauugcauaaugacaucauaccaauaccucaucauccaaaauacaacaugggaagaccacugccaauuuucaagaccuucaccaauaggauaccuaggacuacuaucucaaagaacgagagauauauacauaucacgacgacgaagagguacauucacauggacacuaagugacuccgaagguaaagauacuccaggagguuacugcuuaacaagauggauguuaauagaagcagaacuaaaauguuucggaaacacugcaguagcaaaaugcaaugaaaaacacgacgaagaauuuugcgacaugcuaagacucuuugauuucaacaaacaagcuauacaacguuuaaaagcaccagcacaaaugagcauacaauuaauaaacaaagcaguaaacgcacucaucaacgaccaacuuauaaugaaaaaccauuuaagagacauaauguguauaccuuacugcaauuauucaaaauacugguaucuaaaccacacaguaaccggaaaaacaucacuaccaaaauguuggcuaguaaguaauggaucauaccuaaaugaaacacacuuuucagacgacauagaacaacaagccgacaauaugauaacagaaauguuacaaaaagaauauauggaaagacaaggaaaaacuccacuaggauuaguagaucucuucguauucuccacaucauucuaccucauaucaaucuucuuacaccucgucaaaauaccaacccacagacacauaguaggcaaauccuguccaaaaccccaccgacucaaccauaugggaauaugcucaugcggauuauacaaacaaccaggaguacccguaagauggaaaagauaa

SEQ ID NO: 5796 - RNA, 1476 nt, Artificial Sequence
  derived and/or modified protein sequence (opt6) from LASV(G2431-SLE-2012;Clade IV)__AIT17292__GPCstabilized
augggccaaauaguaacuuuuuuucaagaaguuccacauguuauagaagaaguuaugaacauaguacuaauagcauuaucaauaauggccguauuaaaaggacuauauaacauagccacaugcggacucguaggacuaguaacauuucuacuauuaugcggaagaagcuguacaacaacacuauacaaaggagucuaugaacuacaaacauuagaauuaaauauggaaacacuaaauaugacuaugccuuuaucauguacaaaaaauaacagucaccacuacauaaugguaggcaacgaaacaggacucgaauuaacacuuacaaacacaucaauaauaaaccacaaauucugcaaccuaagcgacgcccauaaaaaaaaccuauaugaccaugcucuaaugucaauaauaucaacauuccacuuaucaauaccaaauuucaaucaauacgaagcuaugucaugcgacuucaauggagggaaaauaucaguccaauacaauuuaucccacaguuaugcaggagacgcagcaaaucauugcggaacaguagcuaacgguguacuacaaacauucaugagaauggcauggggcggaagcuacauagcacuagacucaggaugcggugguugggacuguauaaugacuucauaccaauaucuaauaauacaaaacacuacaugggaagaccauugccaauucacuagaccaucaccuaucggauaccuaggucuauuaucccaacgaaccagagauauauacauauccagacgcagaagaggcaccuuuacauggacacuaucugacuccgaagguaaugacacccccggaggauauugcuuaacacgcuggauguuaauagaagcagaauuaaaauguuucggaaacaccgccguugcaaaaugcaacgaaaaacaugacgaagaauuuugcgacaugcuuagauuauucgacuucaauaaacaagcaauacaaagacuacgagccccagcacaaaugucaauacaacuuauaaauaaagccguaaacgcacuaauaaacgaccaauuaauaaugaaaaaucacuuaagagacauaaugugcaucccauacuguaacuacucaaaauauugguaccucaaccauacaaccaccggaagaacaagccucccaagauguugguuaguauccaacggaucuuaccucaacgaaacacacuuuuccgacgacauagaacaacaagcagacaauaugauaaccgaaauguuacaaaaagaauacauggaaagacaaggaaaaacaccauuaggacuaguagacuuauuuguauucucaacaucauucuaucuaauaucuauauuucuacaucuaaucaaaauaccaacacacagacauauuguaggaaaaccauguccaaaaccucacagacuaaaccacaugggaguauguucaugcggacuauacaaacaaccagggguuccaguaagauggaaaagauaa

SEQ ID NO: 5797 - RNA, 1476 nt, Artificial Sequence
  derived and/or modified protein sequence (opt6) from LASV(G2511-SLE-2012;Clade IV)__AIT17294__GPCstabilized
augggacaaauaguaaccuucuuucaagaaguaccacacguaauagaggaaguaaugaauauaguacuaauagcacuaagcauauuagcagucuuaaaagggcuauacaacuuagcaacaugcggauuaguaggccuagucacauuucuacuccuaugcggaagaucauguacaacaucccuauacaaaggaguuuacgaauuacaaacauuagaacuaaauauggagacacuaaauaugacaaugccucuaucauguaccaaaaacaauucccaccauuacauuaugguaggaaaugaaacaggacuagaauuaacacucacaaacacaucaauaaucgaucauaaauuuugcaaccuaucugacgcccacaagaaaaaccuauaugaucacgcucuaaugucaauaauauccacuuuccacuuauccauaccaaacuucaaccaauacgaagcaaugagcugugacuuuaauggcggaaaaauaucuguacaauauaacuuaucacauucuuacgcaggagacgcagcaaaccacugcggaacaguagccaacggcguacugcaaacauuuaugagaauggcuuggggaggauccuauauagcacuagacucaggauguggaggaugggacugcauaaugacaucauaccaauaccuaauaauacaaaauacaacaugggaagaccacugucaauucucaagaccaucaccaguaggauaccuaggauuacuaucacaaagaacuagagacaucuacauaucaagacgaagaagaggaaccuucacauggacacuaucagacucagaaggaaaagacacacccggaggauauugcuuaacaagauggaugcucauagaagcagaacuaaaaugcuucggaaauacagcaguugccaaaugcaacgaaaaacacgacgaagaauuuugugacaugcuacgacuuuuugacuucaauaaacaagcaauacaacgacuaaaaacaccagcacaaaugucaauccaacuaauuaacaaagccguaaaugcacuaauaaacgaccaacuaauaaugaaaaaucaccuaagagauauaaugugcauaccauacugcaacuacucaaaauauugguauuuaaaucacacaacaaccggaaaaacaucacucccacgauguuggcuaguaucaaauggcuccuauuuaaacgaaacccauuucucugaugauauugaacaacaagcagacaauaugauaacagaaaugcuacaaaaagaauacauggaaagacaaggaaaaacaccccuaggauuaguagaucucuucgucuuuucaaccuccuucuauuuaauaucaauauuucuacaucuaguaaaaauacccacucaccgacauauaguuggaaaaccuugucccaaaccacacagauuaaaccauaugggaauaugcucaugcggacuauacaaacaacccggcguaccaguaaaauggaaaagauaa

SEQ ID NO: 5798 - RNA, 1476 nt, Artificial Sequence
  derived and/or modified protein sequence (opt6) from LASV(G2554-SLE-2012;Clade IV)__AIT17298__GPCstabilized
augggacaaauaguuaccuuuuuccaagaaguaccacacguaauagaagaaguaaugaacauaguauuaaucgcacuaucaauauuggcaguacuaaaaggucuauauaauauagcaaccugcggacucuuagguuuaguaugcuuccuacuauuaugcggcagaucaugcacaacuucacucuacaaaggaguauaugaacuacaaacauuagaacuaaacauggaaacauuaaacaugaccaugccacuaagcugcacaaaaaacaacucacaccacuacauaauggucggaaacgaaacuggacuagaauuaacauuaacaaacaccuccauaauaaaccacaaauucugcaaccucucugacgcucacaaaaaaaacuuauacgaccacgcguuaaugucaauuauaucuacauuccaccuauccauacccaacuuuaaucaauacgaagcaaugucaugugacuucaacggaggaaaaauaucaguacaauauaauuuaagccacuccuacgcaguagacgcagcaucucacugugguaccauagcaaacggagucuuacaaacauuuaugcgcauggccuggggaggaucauacauagccuuagacucaggaugcggaggcugggauugcauaaugacaucauaccaauaucuaauaauacaaaauacaacaugggaagaucacugccaauuuucaagaccaucuccaaucggauacuuaggacucuuaucacaacgaacaagagacauauauauaaguagaagaagacguggaacauucacauggacacuaucagauucagaaggcaaagacaccccaggaggauauugcuuaacuagauggaugcuaauagaagcagaacuaaaaugcuucggaaacacagcaguagcaaaaugcaacgaaaaacaugacgaagaauucugcgacaugcucagacuauuugacuuuaacaaacaagcuauucaaagacuaaaagccccagcacaaaugucaauucaauuaauuaacaaagccguaaacgcccuaauaaaugaccaacuaauaaugaaaaaucaccuacgagauauaaugugcauacccuacugcaauuauucaaaauacugguacuuaaaccacaccacaacaggaaaaacuucacuaccaaaauguugguuaguaucaaacggaucauaccuuaacgaaacacacuuuuccgacgacaucgaacaacaagcagacaacaugauuacagaaaugcuacaaaaagaauacauggaaagacaaggaaaaacaccucuaggacuaguagaucuauuuguauucuccacuucauucuauuuaauauccauuuuccuacaccuagucaaaauacccacacauagacauguaguaggaaaaccaugcccaaaaccacacagacuaaaccauaugggaauaugcucaugcggcuuauacggacaacccggagucccaguaaaauggaaaagauaa

SEQ ID NO: 5799 - RNA, 1476 nt, Artificial Sequence
  derived and/or modified protein sequence (opt6) from LASV(G2557-SLE-2012;Clade IV)__AIT17302__GPCstabilized
augggacaaauaguaacauucuuccaagaagucccacacguaauagaagaaguaaugaacauaguauuaauagcacuaucuuuacuagcaguauuaaaaggauuauacaauguugcaacauguggccuaauaggauuaguaacauucuuacuacuaugcggaagaucaugcacaacaaaucuauacaaaggaguauacgaacuucaaacauuagaacuaaacauggaaacccuaaacaugaccaugccauuauccuguacuaaaaacaauucacaccacuacauaaugguaggcaaugaaacaggauuagaauuaacucuaacaaacacaucaauaauaucacauaaauuuugcaauuuaucagacgcacacaaaaaaaacuuauacgaccauacauuaaugucuauaaucucaacauuccaucuaucaauaccaaauuucaaccaauaugaagcaaugucuugugacuucaacggaggaaaaauaucaguacaauauaacuuaucacacucuuacgcaguugacgcagccaaccacugcggcacaguugcaaauggaguauuacaaacguucaugcgaauggcauggggaggcucauacauagcacuagacucaggcugcggaaacugggauugcauaaugacaucauaccaauacuuaauuauacaaaacacaacaugggaagaccacugucaauucucaagaccaucuccuaucggauaccuaggcuuacuaucacaaagaacaagagacauauauauaucaagaagaagacgaggaacauucaccuggacacuaucagacagcgaaggcaacgauacaccaggagguuacugcuuaacaagauggauguuaauagaagcagaacucaaaugcuucggaaacaccgcaguagccaaaugcaaugaaaaacaugacgaagaauucugcgauaugcucagacuauucgacuuuaauaaacaagcaauacaaagacucaaagcuccagcccaaaugucaauucaacuaauaaauaaagcagucaacgccuuaauuaacgaccaauuaaucaugaaaaaucacuuaagagacauaaugugcauaccauacuguaauuacucaaaauauugguaccuaaaccacacuacaacaggcaaaacaucacuaccaaaaugcuggcuaguaucaaacgguucauaccuaaaugaaacacacuucucagacgauaucgaacaacaagcagacaacaugauaaccgaaauguuacaaaaagaauauauggaaagacaaggaaaaacuccacucggauuagucgaccuuuucguauuuaguacaucauucuacuuaauauccauuuuccuccaccuagucaaaaucccaacucauagacacauaguggguaaaccaugcccaaaaccccauagacucaaccacaugggcauaugcuccuguggauuauacaaacaaccaggaguaccagucagauggaaacgauaa

SEQ ID NO: 5800 - RNA, 1476 nt, Artificial Sequence
  derived and/or modified protein sequence (opt6) from LASV(G2587-SLE-2012;Clade IV)__AIT17310__GPCstabilized
augggacaaauaguaacuuucuuccaagaaguuccacacguaauagaagaaguuaugaacauaguacucauagcacucucaauccuagcaguacucaaaggacuauauaaccuagcaacaugcggccuaguaggacucgucacauucuuacuccuaugcggaagaucuugcaccaccucacuauacaaaggcguauacgaacuacaaacauuagaacuuaacauggaaacucucaacaugacaaugcccuuauccugcaccaaaaacaauucacaccauuauauaaugguaggaaaugaaacuggucuagaacuaacauuaacaaacacaucaauaauaaaccauaaauucugcaaucucucagacgcacacaagaaaaacuuauacgaccaugcucuaaugucaaucaucucaacuuuccaccuauccauaccaaauuucaaccaauaugaagcaaugucaugcgacuucaacggcgggaaaauauccguacaauacaauuuaagccacucuuacgccggcgaugccgccacucacuguggaacaguagccaacgggguccuccaaacauucaugagaauggcaugggguggauccuacaucgcauuagacucaggauguggaaaaugggacugcauaaugacaagcuaucaauaccuaauaauacaaaauacaacaugggaagaucauugucaauucucaagaccaucuccaauaggauaucuaggccuauuaucacaaagaaccagagacauauacauaucaagaagaagaagaggaaccuucacauggacacuaucagacucagaaggaaaagacacucccgguggauauugccucaccagguggaugcuaauagaagcagaacuaaaaugcuucgguaacacagcugucgcaaaaugcaacgaaaaacacgaugaagaauuuugugacaugcuuagacuuuucgacuucaacaaacaagcaauacaaagacuaaaaacacccgcacaaaugucaauacaacuaauaaacaaagcaguaaaugcauuaauaaaugaucaacuaauaaugaaaaaccaucucagagacauaauguguaucccauauugcaacuacucaaaauacugguaccugaaccauaccacaacuggaaaaacaucccuacccagaugcuggcuagucuccaacggaucauaccuaaacgaaacucauuucucagacgacauagaacaacaagcugacaacaugauaacagaaauguuacaaaaagaauacauggaaagacaaggcaaaacaccauuaggccuuguagaccuauucguauucucaacaucauucuaucucauauccauauucuuacaccuaguaaaaauacccacacauaggcacauagucggaaaacccugccccaaaccacacagauuaaacuacaugggcauauguucaugcggccuauauaaacaaccaggaguaccaguaaaauggaaacgauaa

SEQ ID NO: 5801 - RNA, 1476 nt, Artificial Sequence
  derived and/or modified protein sequence (opt6) from LASV(G2612-SLE-2012;Clade IV)__AIT17314__GPCstabilized
augggacaaauaguaacauuuuuccaagaaguaccacacguaauugaagaagucaugaacauaguacuaauaacccuauccauauuagcaguucuaaaaggacucuacaacguugccaccugcggacuaguaggccucguaacguucuuacucuuaugcggucgauccugcacaacaucacucuacaaaggaguauacgaacuacaaaccuuagaacuaaauauggaaacauuaaacaugacaaugccacuaucauguacaaaaaacaacucacaucauuauaucauggucggaaacgaaacaggucuagaauuaacauuaacaaacacaucaauuauaaaccauaaauucugcaaccuuagcgacgcacauaaaaaagaucuauacgaccaugccuuaaugagcauaauauccaccuuccaccucucuauucccaauuucaaucaauaugaagcaaugucaugcgacuucaacgguggcaaaauaucaguacaauacaacuuaucacauuccuaugcaguagacgcagcaaaccauugcggaacaguagcaaacggaguauuacaaacauuuaugagaauggcauggggagguuccuacauagcauuagauagcggaugcggugguugggauuguauaaugacaucauaccaauaccucauuauacaaaacacaacaugggaagaucacugccaauucucaagaccaucaccaauaggauaccuaggacuauuaucacaaagaacaagagacaucuacauaucaagacgaagaagaggaacauuuacauggacacuaucugauucagaaggaaaugacacgccaggaggauacugccuaaccagauggaugcuaauagaagccgaauuaaaaugcuucggaaacacagcaguagccaaaugcaacgaaaaacaugacgaagaauuuugcgauaugcuaagauuauuugacuuuaauaaacaagcaauucaacgccuaaaagcaccagcacaaaugucaauacaacuaaucaauaaagcaguaaaugcacuaauaaacgaucaacuaauaaugaaaaaccaccuaagagacauaauguguauaccuuacuguaauuauagcaaauauugguaccuaaaccauacaacaacaggcaaaacaagcuuacccaaaugcugguuaguaucaaacggauccuacuuaaacgaaacucacuucucagacgacauagaacaacaagcugauaauaugaucacugaaaugcuacaaaaagaauauauggaaagacaaggcaaaacaccacuagguuuagucgaccuauuuguauuuucaacaucauucuaccuaauaucaauauuccuucaccucguaaaaauaccaacacaccgacacauaguaggaaaaccaugcccaaaaccacacagauuaaaucacaugggaauaugcucaugcggauuauacaaacaaccaggaguacccguuaaauggaaaagauag

SEQ ID NO: 5802 - RNA, 1476 nt, Artificial Sequence
  derived and/or modified protein sequence (opt6) from LASV(G2615-SLE-2012;Clade IV)__AIT17318__GPCstabilized
augggacaaauaguaacauucuuccaagaaguaccacacguuaucgaagaaguaaugaacauuguauuaauagcucucagucuauuagcaguacuaaaaggacuauacaacguagcaacaugcggccucauaggucucguaacauuucuacuacuaugcggaagaucauguacaaccaacuuauauaaaggaguauaugaauuacaaacacucgaacuaaacauggaaacacuaaacaugaccaugccauuaucaugcaccaaaaacaacucacaccacuacauuaugguaggaaacgaaacuggauuagaacuaacauuaacaaauaccuccaucauaaaccacaaauucugcaaccuaucugacgcacacaaaaaaaaccuauacgaucaugcauuaauguccauaauaucaaccuuccaccucucaauaccuaauuucaaucaauacgaagcaaugucuugugauuucaacggaggaaaaaucucaguacaauauaaccuaucccacucuuacgcaguagacgccgcaaaccacugcggaacagucgcuaacggaguauuacaaacauuuaugagaauggcauggggcggcucauacaucgcacuagacagcggaugcggaaacugggacugcauaaugaccucauaccaauacuuaaucauacaaaacauaaccugggaagaucacugucaauucucacgaccauccccaauaggauaccucggacuacuaucccaacgaacaagagacauauauauaucaagaagaaggagagguacauucacuuggacccuaucagauucagaaggaaacgacacaccagguggcuacugccuaacccguuggaugcuuauagaagcagaacuaaaaugcuuugguaacacugcaguagccaaauguaacgaaaaacacgacgaagaauucugcgauauguuaagacuauuugacuuuaacaaacaagcaauccaaagacuaaaagcaccagcacaaaugagcauacaacuaauaaacaaagccguaaaugcccuaauaaacgaccaacuaauaaugaaaaaccauuuaagagacauaaugugcauaccauauugcaacuauucuaaauacugguauuuaaaccauacaacaacaggaaaaacuuccuuacccaaauguuggcuagucucaaacgguucauacuuaaaugaaacacauuucucagacgacauagaacaacaagcagacaacaugauaacagaaauguuacaaaaagaauacauggaaagacaaggaaaaacgccacuaggacuaguagacuuauuuguauucucaacuucuuuuuacuuaaucucaauauuucuacauuuaguaaaaauaccaacccacagacauauaguaggaaaaccaugcccaaaaccacaccgacucaaucacaugggcauaugcucauguggauuauacaaacaaccaggagucccaguaagauggaaacgauaa

SEQ ID NO: 5803 - RNA, 1476 nt, Artificial Sequence
  derived and/or modified protein sequence (opt6) from LASV(G2723-SLE-2012;Clade IV)__AIT17322__GPCstabilized
augggacaaaucguaacauuuuuccaagaagucccccacguaauagaagaaguaaugaacauaguacuaauagcuuuaucacuauuagcaguacuaaaagguuuauauaacguugccacauguggucuaauagguuuaguaacauuccuucuauuaugcggacgaagcugcacuacuaaucuauacaaaggagcauacgaacuccaaacacucgaacuaaacauggaaacacuaaacaugacaaugccauuaucaugcacaaaaaacaacucacaucacuauauaauggucgguaacgaaacuggauuagaauuaacccuaacaaacacaucaauaaucaaccauaaauucugcaaccuauccgacgcacacaaaaaaaacuuauacgaccacacacuaaugucaauaauaucaacauuccacuuaucaauacccaauuuuaaccaauacgaagcaaugucaugcgauuuuaacggaggaaaaauaucaguacaauacaaccucucacacucauaugccgucgacgcagcaaaucauugcggaaccguagcaaacggcguccuacaaacauucaugagaauggcauggggaggaucauacauagcacuagauucaggcugcggaaauugggacugcauaaugacaucauaccaauaucucauaauacaaaacacaacaugggaagaucacugucaauuuucuagaccauccccaauaggauaccuaggacuauuaucacaacgaacaagagacauauacaucucacgaagacgaagaggaacuuucaccuggacccuaagugacucagaagguaacgauacaccaggagguuacugccuaacacgauggauguuaauagaagccgaauuaaaauguuucggaaacacagcaguagccaaaugcaaugaaaaacacgaugaagaauucugcgacauguuaagauuauuugacuuuaacaaacaagcaauacaaagauugaaagcaccagcccaaaugucuauacaacuuauaaauaaagcagucaaugcccuaauaaacgaucaacuaauaaugaaaaaccaucuaagagacauaaugugcauaccauacugcaacuauucuaaauacugguaccuaaaccacacaacaacaggaaaaaccucauuacccaaauguugguuaguauccaauggcucauaucuuaacgaaacacacuucuccgaugauauagaacaacaagcagacaacaugauaacagagauguuacaaaaagaauacauggaaagacaaggaaaaacuccacuaggauuagucgacuuauuuguuuuuuccacaucuuucuaucuaauaucaauauuccuacacuuaguaaaaauaccaacacacagacacauagucggcaaaccaugucccaaaccacacagauuaaaccauaugggcauauguagcugcgguuuauacaaacaaccaggaguaccaguaagauggaaaagauaa

SEQ ID NO: 5804 - RNA, 1476 nt, Artificial Sequence
  derived and/or modified protein sequence (opt6) from LASV(G2868-SLE-2012;Clade IV)__AIT17328__GPCstabilized
augggacaaauaguaacauucuuccaagaaguaccacacguaauagaagaaguaaugaacauaguacuaauaacacuaucuauacucgcaguccuaaaagguuuauauaauauagccaccugcggauuagucggacuaguaacauuccuacuauuaugcggcaaauccugcacaacuucauuauacaaaggaguauaugaacuacaaacacuugaauuaaacauggaaacacuaaacaugaccaugccacuaucuugcacuaaaaacaacucacaccacuacauccgaguaggaaaugaaacuggccuagaacucacacuaaccaacacaucaauaaucaaccauaaauucugcaaucuauccgacgcccauaaaaaaaaccuauacgaccaugcacuaaugucaauuaucucaacauuccaucuaucaauaccaaauuucaaccaauacgaagccaugucaugcgauuucaauggaggcaaaauaucaguacaauacaacuuaucacauuccuacgccguagaugcugcaaaucacugcggcacuguagcaaacggaguccuacaaacauuuaugcgaauggcauggggcggaucauauauagcacuagauucaggauguggaaacugggacugcauaaugaccuccuaccaauacuuaauaauacaaaacacaaccugggaagaccacugucaauucucaagaccaucaccaauaggauaccuaggcuuacuaucacaaagaacacgagacauauauaucucaagaagaagacguggaacauucacauggaccuuaucagacucagaaggcaacgaugcccccggaggauacugccuaacaagauggauguuaauagaagcagaacuuaaaugcuucggaaacacagccguagccaaaugcaacgaaaaacacgaugaagaauucugugacaugcuaagauuauucgacuuuaauaaacaagcaauacaaagauuaaaagccccagcccaaaugucaauacaauuaauaaauaaagcuguaaaugcauuaauaaacgaucaauuaauaaugaaaaaccaccucagagauauaauguguauaccauauuguaacuauuccaaauauugguaccuaaaccacacaacaacaggaaaaacaucacucccaaaaugcuggcuaguaaguaacggaucauaccuaaacgaaacacauuucucagacgacauagaacaacaagccgacaacaugauaacagaaaugcuacaaaaagaauacauggaaagacaaggcaaaacaccauuaggccuaguagaccuauucgucuucucaacuuccuuuuaccuuauaucuauauucuuacaccuaguaaaaauacccacacacagacacguuguaggaaaauccuguccaaaaccacacagacuaaaucacaugggaauauguucaugcggccuauacaaacaacccgggguuccaguaaaauggaaacgauaa

SEQ ID NO: 5805 - RNA, 1476 nt, Artificial Sequence
  derived and/or modified protein sequence (opt6) from LASV(G2903-SLE-2012;Clade IV)__AIT17332__GPCstabilized
augggacaaauaguaacauucuuccaagaaguuccacauguuauagaagaaguaaugaacauaguacuaauagcacuaucaauacuagcaguacuaaaaggauuauacaaccuagccacaugcggauuaguuggccucgucacauuuuuauuauuaugcggacgcucauguaccacaucacucuauaaaggagucuacgaacuacaaacacucgaacuaaacauggaaacucuaaacaugaccaugccucuaucaugcaccaaaaacaacucacaucauuacauuagaguaggaaacgaaacaggacuagaacuaacucuaacaaauacaaguauaaucaaccacaaauucugcaaucuauccgacgcucauaaaaaaaaccuauacgaucaugcccuaaugucaauaauuucaacuuuccacuuaucaauaccaaacuucaaucaauaugaagcaaugucaugcgacuucaacggaggaaaaauaucaguacaauacaacuuaucacauuccuacgcagucgacgcagccaaccacugcggaacagucgcaaauggaguacuccaaacauucaugagaauggcauggggcggaucauacauagcacuagauucaggaugcggacgaugggacugcauaaugacaucauaucaauacuuaaucauacaaaacacuacaugggaagaccacugcuuauucuccagaccuucaccaaucggauacuuaggacuacuaucacaaagaacaagagacauauauauauccagaagacgcagaggcacauucacuuggacacuaucagacucugaaggcagagauacaccaggaggauauugccuaacacgauggaugcuaauugaagcagaacuaaaaugcuucgguaauacagcaguugcaaaaugcaaugaaaaacaugacgaagaauucugugauaugcuaagacuauuugauuucaacaaacaagcaauacaaagacuuaaagcaccagcacaaaugucaauacaauuaaucaacaaagccgucaaugcauuaaucaacgaccaauuaaucaugaaaaaccaccuuagagacauaaugugcauaccauacugcaacuacucaaaauacugguaccuaaaccacaccacaaccggaagaacaucacuacccagauguuggcuaguaucuaacggcuccuaccuaaacgaaacacacuucuccgaugacauagaacaacaagcugacaacaugauaacugaaaugcuacaaaaagaauauauggaaagacaaggcaaaaccccccuaggacucguagacuuauucguuuucucaacaucuuucuaccuaauaucaauauucuuacaucuuguaaaaauacccacacacagacauauagucggaaaaucaugcccaaaaccucaucgacuuaaccauaugggaauauguuccuguggccuuuacaaacaaccuggaguaccaguaaaauggaaacgauaa

SEQ ID NO: 5806 - RNA, 1476 nt, Artificial Sequence
  derived and/or modified protein sequence (opt6) from LASV(G2944-SLE-2012;Clade IV)__AIT17340__GPCstabilized
augggacaaauaguaacauucuuccaagaaguaccacaugucauagaagaaguaaugaacauaguacuuauagcacuaucaauauuagcaguacuaaaaggauuauauaacuucgcaacaugcggauuaguaggcuuaguaacauuuuuacuacuauguggacgcuccuguaccacaucccuauacaaaggaguauaugaauuacaaacucucgaacuaaacauggaaacucucaacaugacaaugccacuuucuugcacuaaaaacaauucacaucacuauauaaugguaggaaacgaaacaggccucgaauuaacucucacaaacauauccauaauaaaccacaaauuuugcaacuuauccgaugcucacaagaaaaaucuauaugaccacgcauuaaugucaauuauaucaacauuucaccucucuauaccaaauuucaaccaauacgaagcaaugucaugcgacuucaacgguggaaaaauaucaguacaauauaaccucucccacucguacgcaggcgacgcugccaaucacuguggaacaguagccaacggaguauuacaaacauucaugcgcauggcauggggaggaucauacauagcacuagauucaggaugcggagaaugggacuguauaaugacaucauaucaauacuuaauaauacaaaacaccaccugggaagaccauugccaauuuucaagaccguccccaaucggauauuuaggucuacuaucacaaagaaccagagacauauauauaucacgacgacgcagaggaacuuucacauggacccuaucagauuccgaaggcaaagacacacccggcggauacugucuaacacgauggaugcuaauagaagcagaacucaaauguuucggaaauacagcaguagcaaaaugcaacgaaaaacacgacgaagaauuuugcgacauguuaagauuauucgacuucaauaaacaagcuauacaaagauuaaaagcaccagcacaaaugucaauacaauuaauaaacaaagcagucaacgcauuaauaaacgaucaacuaauaaugaaaaaucaccuaagagauauaauguguauaccauauugcaacuacagcaaauauugguaccuaaaucacacaacaacaggaaaaacaucacuaccuaaauguuggcuaguaucaaauggaucauauuuaaacgaaacacacuucucagacgacauagaacaacaagcagacaauaugauaacagaaauguuacaaaaagaauacauggaaagacaaggcaaaacaccacuaggauuagucgaccuauuuguauucuccaccucauuuuacuuaauaucaauauuucuacaccuaguaaaaauuccaacacacagacacauaguaggaaaaccaugccccagaccccacagauuaaaccauaugggaauauguucaugcggacuauauaaacaaccuggcguaccaguuaaauggaaaagauag

SEQ ID NO: 5807 - RNA, 1476 nt, Artificial Sequence
  derived and/or modified protein sequence (opt6) from LASV(G3010-SLE-2013;Clade IV)__AIT17344__GPCstabilized
augggucaaaucguaacauuuuuccaagaaguaccacacgugaucgaagaaguaaugaauauaguacucauagcauuaaguauauuagcuguacuaaaaggccuauauaacuucgccacaugcggucuaguaggucuaguaacauuucuacuauuaugcggaagauccugcacaacaucccuauacaaaggagucuacgaauuacaaacauuagaauuaaacauggaaacacugaacaugacaaugccauuaucaugcaccaaaaacaacucacaccacuacaucauggucggaaaugaaacaggacuagaacuaacacuaacaaacacauccauaauaaaccacaaguuuugcaacuuaucagacgcacauaagaaaaaccucuauaaucacgcacuuauguccauaauauccacauuccaccuauccauaccaaacuucaaccaauacgaagcaaugucaugcgacuucaacggaggaaaaauuucaguacaauacaacuuaucacacucauacgcgggagacgcagcaucucauugcggaacaguagcaaacggaguauuacaaacauuuaugcgaauggcuuggggaggcucauauauagcacuagacucaggaugcggaaaaugggacugcauaaugacauccuaccaauaccuaauaauccaaaauacaacaugggaagaucauugucaauucuccagacccucaccaauaggauaccuuggacuacuaucacaaagaacaagagacauauacauaucaagaagaagacgaggaacauuuaccuggacacuaucagacucugaaggaaaagacacaccaggaggcuauugccuaacaagauggauguuaauagaagcagaacuaaaauguuucggaaauacagccguagcaaaauguaacgaaaaacaugacgaagaauuuugugauauguuacgacuauucgacuucaauaaacaagcaauacaaagacuaaaaacaccagcacaaaugucaauacaauuaauaaacaaagcaguuaacgcacuaauuaaugaucaacuaauaaugaaaaaccauuuaagagacauaauguguauaccuuauugcaauuacucaaaauacugguauuuaaaccacacaacaaccggcaaaacuucuuuaccaaaaugcuggcuaguaucuaacggaucauaucuuaacgaaacacacuucucagaugacauagaacaacaagcagacaacaugauuacagaaauguuacaaaaagaauauauggaaagacaaggaaaaacaccauugggcuuaguugauuuauuuguauucucaaccagcuucuacuuaauaucaauauuccuacaccuaguaaaaauaccuacacaccgacacauaguaggaaaaucaugccccaaaccacacagacuaaaucacaugggaauauguuccuguggacuauauaaacaaccaggaguaccaguaagguggaaaagauaa

SEQ ID NO: 5808 - RNA, 1476 nt, Artificial Sequence
  derived and/or modified protein sequence (opt6) from LASV(G3016-SLE-2013;Clade IV)__AIT17348__GPCstabilized
augggccaaauaguaacauucuuccaagaaguaccacacguaauagaagaaguaaugaacauaguauuaauagcacuaaguauacuagcaguucuaaaaggauuauauaacauagcaacuugcggcuuaauaggauuagucacauuccuacuauuaugcggaagaucauguacaacuucacuauacaaaggaguauaugaacuccaaacacucgaacuaaacauggaaacacuaaauaugacaaugccccuguccugcacaaaaaauaacucacaucauuauauaauggucggaaacgaaacuggacuagaacuaaccuuaacaaacacaucaauaauaaaccacaaauuuugcaauuuaucagacgcacacaaaaaaaauuuauacgaucacgcccuaaugucuauaauaucaacauuccaucuaucaauaccaaauuucaaccaauaugaagccauguccugugacuuuaauggcggcaaaauaucuguacaauacaaccucucacacucauacgcaggagacgcagcuaaucauuguggaacugucgcaaacggcguccuucaaacuuucaugagaauggcauggggaggauccuacauagcauuagacuccgguuguggcagaugggauugcauaaugaccuccuaucaauaccuaauaauacaaaauacuacaugggaagaucacugucaauuuucccgaccaucaccaauaggauauuuaggacuacuaucccaaaggacaagagacauuuacaucucaagacgaagaagaggaacauuuacauggacguuaucagacuccgaaggcaacgacacaccaggaggauauuguuuaacccguuggauguuaaucgaagcagaauuaaaaugcuucggcaacacagcaguagcaaaaugcaacgaaaaacacgacgaagaauucugcgauauguuaagauuauucgacuuuaacaaacaagccauacaaagacuaaaagcucccgcacaaaugucuauacaacuaaucaauaaagcaguaaacgcauuaauaaacgaccaacuuauaaugaaaaaccaccuacgagacauuauguguauaccauauuguaacuauucaaaauauugguacuuaaaccacacuacaaccggaaaaaccucacuacccaaaugcugguuaguaucaaacggcucauacuuaaaugaaacacacuuuucagacgacauugaacaacaagcagacaacaugauaacugaaauguuacaaaaagaauacauggaaagacaaggcaaaacaccucuaggcuuagucgaccuauucgucuucucaacaucauucuaccuaaucucaauuuucuuacaucucguaaaaauaccaacacacagacacauaguaggaaaaccaugccccaaaccucacagauuaaaccauaugggaauaugcucaugcggucuauacaaacaaccaggaguaccuguuaaauggaaaagauaa

SEQ ID NO: 5809 - RNA, 1476 nt, Artificial Sequence
  derived and/or modified protein sequence (opt6) from LASV(G3034-SLE-2013;Clade IV)__AIT17350__GPCstabilized
augggacaaauaguuacauucuuccaagaagucccucauguaauagaggaaguaaugaacauaguacuaauagcauuaucaauauuagcaguucuaaaagggcuauacaacguugcaaccugcggacuaauaggacuagucacauucuuauuauuaugcggaagaucaugcacaacaacacuauacaaaggaguauacgaauuacaagcccuagaacuaaacauggaaacccuaaauaugacuaugccacuuagcuguacaaaaaacaacucacaccacuacauaaugguaggaaacgaaacagguuuagaacuaaccuuaacuaauacaagcauaaucgaccauaaauucugcaaucuaucagacgcacauaaaaaaaauuuauaugaccacgcacuaaugucuauaauuucaacauuucaucuaucaauuccaaacuuuaaccaauaugaagcaauguccugugacuucaacggagguaaaauaucaguacaauacaauuuaucacauagcuacgcaggagaugcagcaaaacacugcggaacaguagccaacggaguauuacaaacauuuaugagaauggcauggggaggauccuacauagcacuagacagcggauguaacggaugggauugcguuaugacauccuaccaauaccuaauaauacaaaacacaacaugggaagaccacugccaauuuucacgucccuccccaauaggauaucuaggauuacuaucacaacgaaccagagacauauacauaucaagaagaagacgaggaacauucacauggacacuaucagauucagaaggaaaagauacaccagguggauauugccuaaccagauggaugcucauagaagcagaauuaaaaugcuucggaaacacagccguagcaaaauguaacgaaaaacacgaugaagaauuuugugacaugcuaagacuauucgacuucaauaaacaagcaauacaacgacuaaaaacaccagcccaaaugaguauccaacuaauaaauaaagcaguaaacgcauuaauaaaugaccaauuaauaaugaaaaaccaccuacgagauauaaugugcaucccauacuguaacuacucaaaauacugguaccuaaaccacacaguaaccggaaaaacaucauuaccaagaugcuggcuuguaagcaauggaucauaccuaaaugaaacacauuuuucagacgauauugaacaacaagcagacaauaugauaacagaaauguuacagaaagaauacauagaaagacaaggaaaaacaccacuaggauuagucgacuuauuuguauucagcacuaguuuuuaccuaauaucaauauuccuacaccucguaaaaauaccaacccaccgacacaucauaggaaaaccauguccaaaaccacacagauuaaaccacaugggaauauguucaugcggauuauauaaacaaccaggaguacccguaagauggaaaagauaa

SEQ ID NO: 5810 - RNA, 1476 nt, Artificial Sequence
  derived and/or modified protein sequence (opt6) from LASV(G3101-SLE-2013;Clade IV)__AIT17354__GPCstabilized
augggacaaaucgucacauucuuccaagaaguaccacauguaauugaagaagucaugaauauaguauuaaucgcacuaucaauauuagcaguccuaaaaggcuuauauaacuucgcaacauguggccucguaggccucguaaccuuccuauuacuauguggaagaucaugcaccacaucauuauauaaaggaguauacgaacuacaaacacuagaauuaaacauggaaacauuaaacaugaccaugccucuaucaugcaccaaaaauaauucacaccacuauauaauggucggaaacgaaacaggacuugaauuaacucuaacaaacauaagcauaauaaaccauaaauucugcaacuuaucagaugcacacaaaaaaaaccuuuacgaccacgcauuaaugucaauaauaucaacuuuccacuuaucaauacccaauuuuaaccaauacgaagcaaugaguugcgacuuuaauggaggaaaaaucucaguacaauauaaccuaucucacucuuacgcaggagacgcagcaaaucacugcggaacagucgccaauggaguacuacaaacauucaugcgcauggcauggggcggaucauacauagcauuagacucaggaugcggaggcugggauugcaucaugacaaguuaccaauaccuaauaauucaaaacacaacaugggaagaccacugccaauucuccagacccucaccaauaggauauuuaggauuacuaucacaacgaacacgagacauauauauaucuagacgcagaagaggaacauucacauggacacuauccgacucugaaggcaaagacacacccggaggauacugcuuaaccagauggaugcuaauagaagcagaauuaaaaugcuucggcaacacagcagucgcaaaauguaacgaaaaacacgaugaagaauuuugcgacaugcuuagacuauucgacuucaacaaacaagcaauccaacgacuaaaagcacccgcacaaauguccauacaauuaauaaauaaagcagucaacgcacuaauaaacgaccaacuaauaaugaaaaaccaccucagagacauaaugugcauaccauauugcaauuauucaaaauauugguauuuaaaccacaccacaacagguaaaacaucauuaccaaaauguuggcuaguaagcaauggaucauaccuaaacgaaacacauuuuucagacgacauagaacaacaagcugauaacaugauaaccgaaaugcuacaaaaagaauacauggaacgacaagguaaaacaccauuaggacuaguagaccucuuuguauucucaacaucuuucuaccuaaucucaauauucuuacaccuaguaaaaauaccaacacacagacacauaguaggcaaaccaugccccagaccacacagacuuaaccauaugggaauauguucaugcggacuauauaaacaaccaggugucccaguaaaauggaaaagauaa

SEQ ID NO: 5811 - RNA, 1476 nt, Artificial Sequence
  derived and/or modified protein sequence (opt6) from LASV(G3110-SLE-2013;Clade IV)__AIT17360__GPCstabilized
augggacaaauagucacauucuuucaagaaguaccacacguaauagaagaaguaaugaauaucguauuaauagcacuauccaucuuagccguccuaaaaggacuauacaauuucgccacauguggucuagucggauuaguaacauuccuauuacucugcggaagaucauguacaacuagccuauauaaaggaguauacgaacuacaaacacuagaacucaauauggaaacacuaaacaugacaaugccauugucaugcacaaaaaacaacucacaccacuacauacgaguaggaaacgaaacaggcuuagaauuaacauuaacgaauacaucaauaauaaaucacagauucugcaacuuaucugaugcacacaaaaaaaacuuauacgaucacgcauuaaugucaauaauaucaaccuuccaucuuagcauaccaaacuuuaaccaauacgaagcaaugucaugugauuuuaacgguggaaaaauaucuguccaguacaaucuaagccacuccuaugcaggggacgcagcuaaucacugcggaacaguagcaaacggaguccuacaaacauucaugagaauggccuggggaggaucauacauagcauuagauucuggcugcggaaaaugggauuguauaaugacaucauaucaauaucuuauaauucaaaauacaacaugggaugaccacugucaauuuagucguccauccccaauaggauaucuaggucuacuuucccaaagaacaagagauauauauaucucaagaagaagaagaggaacauucaccuggacacuuucagauucagaaggaaaagauacccccggaggauacugucuaaccagguggaugcuaauagaagcugaacuaaaaugcuuuggcaauaccgccgucgcaaaaugcaacgaaaaacacgaugaagaauucugugacauguuaagacuauuugauuucaauaaacaagcaauuagaagacuaaaagcaccagcacaaaugaguauacaauuaaucaacaaagccguaaaugcacuaaucaacgaucaauuaauuaugaaaaaucacuuaagagauauaaugugcauuccauauugcaacuacucaaaauacugguaccuaaaucacaccacaacagggaaaacauccuuaccaagauguugguuaguaaguaacggaucauaucuaaacgaaacacacuucucagaugacauagaacaacaagcagacaacaugauaacagaaaugcuacaaaaagaauauauggaacgacaaggaaaaacaccacuaggccuagucgaucuauucguauuuuccacaucauucuaccuaauaucaauauuccuacaccuuguaaaaaucccaacacauagacacauaguaggaaaaucauguccaaaaccacacagauuaaaccauaugggaauauguucaugcggauucuacaaacaacccgguguacccguaaaauggaaacgauaa

SEQ ID NO: 5812 - RNA, 1476 nt, Artificial Sequence
  derived and/or modified protein sequence (opt6) from LASV(G3148-SLE-2013;Clade IV)__AIT17364__GPCstabilized
augggacaaauaguaacauuuuuccaagaaguaccacauguaaucgaagaagucaugaacauaguucuaauagcccuuuccauacuugcaguauuaaaaggucucuacaacuucgcaaccuguggauuagucggccuaguuacauuccuacuacuaugcggacgcucauguacaaccuccuuauacaaaggaguauacgaacuccaaacacucgaauuaaacauggaaacauuaaacaugacaaugccauuaucuuguaccaaaaacaauucacaccacuacaucaugguaggaaacgaaacuggauuagaacuaacacuaacaaacacaucaauaauaaaccacaaauuuugcaaccuaucagacgcucauaagaaaaaccuauaugaccaugcauuaaugucaauaauaucaaccuuccaucucuccauucccaauuucaaccaauaugaagccaugucaugcgacuuuaauggaggcaaaaucucaguacaauacaacuuaucacauuccuacgcuggugacgcagcaaaucacugcggaacaguagcaaauggcguauuacaaacauucaugcgaauggcuuggggaggaucauacaucgcccuagauucaggcugcgauagaugggauuguauaaugacaucauaccaauaucucauaauccaaaacacaaccugggaagaucacugccaauuuucaagaccuuccccuauaggauaccuaggucuauuaucacaaagaaccagagacauauacauaucaagaagacgaagaggaacauucaccuggaccuuaucugacagugaaggcaaagauacaccuggcggauacugccucaccagauggaugcuuauagaagcagaacuuaaaugcuucggaaauacagcuguagcaaaauguaacgaaaaacacgaugaagaguucugugacaugcucagauuauucgacuucaauaaacaagcaauccaacgauuaaaagcaccagcacaaaugucaauacaacuaauaaacaaagcaguaaacgcauuaauaaacgaccaauuaauaaugaaaaaccaccuaagagacauaauguguauaccauacuguaacuacucaaaauauugguacuuaaaccacacaacaaccggaaaaacaucacuaccaaaaugcuggcuugucucaaaugguuccuaccuaaacgaaacacacuuuagugaugacauagaacaacaagcagacaacaugauuacagaaauguuacaaaaagaauauauagaaagacaaggaaaaaccccauuaggccuaguagaccuauucguauuuucaacaucauuuuaccuaauaucaauauucuuacaucuaguaaaaauccccacucacagacacauuguaggaaaacccugcccaaaaccacaccgacuaaaucauaugggaauauguucaugcggacuuuacaaacaaccuggaguaucaguaaaauggaaaagauaa

SEQ ID NO: 5813 - RNA, 1476 nt, Artificial Sequence
  derived and/or modified protein sequence (opt6) from LASV(G3151-SLE-2013;Clade IV)__AIT17368__GPCstabilized
augggacaaauaguaacuuucuuucaagaagucccacauguaauagaagaagucaugaauauaguacuuauagcauuaucuauacuagcagucuuaaaaggcuuauacaauuucgcaacuugcggacuuguaggacuagucacauucuuauuauuaugcggaagaucuugcacaaccucauuauacaaaggagucuacgaauuacaaacauuagaauugaauauggaaacucuaaacaugacaaugccccuaucaugcacaaaaaacaacucacaccauuacauaaugguaggaaaugaaacaggcuuagaacuaacccuaacaaacacaucaauaauuaaccacaaauuuugcaaccucagcgaugcacacaaaaaaaacuuauaugaccacgcauuaaugucuaucaucucuacauuucaccuaucuauacccaacuuuaaccaauuugaagccauguccugcgauuucaacgguggaaaaauaucaguacaauacaaccuaagccacuccuacgccggagacgccgcaaaucauugcggaacaguagcaaauggcguauuacaaacauucaugcgaauggcaugggguggaagcuacaucgcacuagacucaggaugcuccaaaugggauuguauuaugacauccuaccaauaccuaauaauccaaaauaccacaugggacgaucauugccaauucucaagaccauccccuauaggauaccuaggccuacuaucacaaagaacaagagacauauacauaucaagacgaagaagaggaacauuuacuuggacacucucagauucagaaggaaaagauaccccaggcggauacugccuaacuagauggauguuaauagaagcagaauuaaaauguuucggaaacacagcaguagcaaaaugcaaugaaaaacaugacgaagaauucugugacaugcuuagacuauuugacuuuaacaaacaagcaauacaacgccucaaagcaccagcacaaaugucuauacaacuaauaaauaaagcaguaaaugcacuuauaaaugaccaauuaauaaugaaaaaccauuuaagagauauaaugugcauaccauacugcaacuacucaaaauacugguaucuaaaccacacaacaaccggcaaaacuucauuacccaaaugcuggcucguaucaaauggcucauaccuaaaugaaacacauuucuccgacgacauugaacaacaagcagauaauaugauaacagaaaugcuacaaaaagaauacauggaaagacaaggaaaaacaccucuaggacuaguagaccucuuuguauucucaacauccuucuaccuaauauccauauuuuuacaccuaguaaaaauuccaacacaccgacauauagucggaaaaucaugcccaaaaccacacagacuaaacuauaugggaauaugcucauguggauucuacaaacaacccgguguaccaguaaaauggaaaagauaa

SEQ ID NO: 5814 - RNA, 1476 nt, Artificial Sequence
  derived and/or modified protein sequence (opt6) from LASV(G3157-SLE-2013;Clade IV)__AIT17370__GPCstabilized
augggacaaauaguuaccuucuuccaagaaguaccacaugucauagaagaaguaaugaacauaguacucauagcuuuaucaauacucgcaguauuaaaaggacuauacaacuucgcaacaugcggacuaguuggucuagucacauuccuuuuacucugcggaagguccuguacaaccucacuauauaaaggaguguacgaauuacaaacacuagaauuaaacauggaaacauuaaacaugacaaugccacuaucauguacuaaaaacaauucucaccacuacauaauggucggaaaugaaacaggacuugaauuaacccugaccaacaccucaauaauuaaccacaaauuuugcaaccuuuccgacgcacauaaaaaaaaccuauacgaccaugcacuaaugucaauuaucuccaccuuucauuuaucaauaccaaauuucaaucaauacgaagcaaugucaugugacuuuaacggaggaaaaauaucuguacaauauaauuuaucucauucauacgccggagacgcagcaaaucacugcggaacaguagcaaacggaguauuacaaacauuuaugagaauggccuggggaggaucauauauagcccuagacuccggaugugauagaugggauuguauaaugacaucuuaucaauaucuuaucauacaaaacacaacuugggaagaucacugucaauucucacgaccaucaccaauagguuaccuaggacucuuaucacaaagaacuagagacauauacauaucaagaagaagaagaggcacuuucacauggacauuaucugacucagaaggcaaagacacaccagguggauacuguuuaacaagauggaugcuaauagaagcagaacuaaaaugcuuuggcaacacagcaguagcaaaauguaacgaaaaacacgacgaagaauucugugacaugcuccgauuauucgacuuuaacaaacaagcaauccaaagacuaaaagcacccgcacaaauguccauucaauuaauuaauaaagccguaaaugcauuaauaaaugaccaacuaauaaugaaaaaccacuuacgagacaucaugugcauaccauacuguaauuacuccaaauacugguaccuaaaucacacaaccacaggaaaaaccucucuaccaaaaugcuggcucguaucaaacggaucauaucuaaacgaaacccacuucuccgacgacaucgaacaacaagcagauaacaugauaacagaaaugcuccaaaaagaauacauggaaagacaaggcaaaaccccacuaggauuaguagaccucuucgucuucaguaccuccuuuuacuuaauauccaucuuccuucaccuagucaaaauaccaacacacagacacaucgucggcaaaccuuguccaaaaccacacagacucaaccauaugggaauaugcucaugcggcuuauacaaacaaccaggagucucaguaaaauggaaaagauaa

SEQ ID NO: 5815 - RNA, 1476 nt, Artificial Sequence
  derived and/or modified protein sequence (opt6) from LASV(G3206-SLE-2013;Clade IV)__AIT17378__GPCstabilized
augggacaaaucguaacauucuuucaagaaguaccacacguaauugaagaaguaaugaacaucguacuaauagccuuauccauacuugcaguauuaaaaggauuauauaacuuagcaaccuguggccuaguaggauuaguaacauuccuacuacuaugcggacgaucaugcacaacaucacuauacaaaggaguuuacgaacuacaaacacuugaacucaacauggaaacacuaaacaugacaaugccacuuuccuguacaaaaaauaacucacaucauuacauaaugguaggcaacgaaacaggacuagaacuaacauuaacuaacacuucaauaauuaaccauaaauucugcaacuuauccgacgcacacaaaaaaaaccuauaugaccacacacucaugucaauuauaucaacauuucacuuaucaauaccaaacuucaaccaauaugaagccaugucaugcgacuucaacggagguaaaauaucaguacaauauaaccuaucucauucauacgcaguagacgcagccaaccacugcggaacugucgcaaacggaguccuacaaacauucaugcgaauggcauggggcggaucauacauagcacuagacucagguugcucuggaugggacuguauuaugacaucauaucaauaucuaguaauacaaaauaccacaugggaagaucauugucaauucucacgcccuucacccaucggauaucuaggauuacuuucacaaagaacacgagacauuuauauaucacgaagaagacgcggaacauucaccuggacacuaucagauucugaaggaaaaaacacaccaggaggcuacugucuaacaagauggaugcuaaucgaagcagaacugaaaugcuucggaaacacagccguagcaaaaugcaacgaaaaacaugacgaagaauuuugcgacauguuacgacuauuugacuuuaacaaacaagcaauacaacgucuaaaagcaccugcucaaaugucaauacaacuaauaaacaaagcugucaaugcacuaauaaacgaucaauuaauaaugaaaaaucaccuacgagauaucauguguauaccauacugcaauuacucaaaauacugguacuuaaaccacacaacaacaggccgaacaagucucccacgaugcugguuaguaucaaacgguucauaccuaaaugaaacacacuuuucagacgacauagaacaacaagcagacaacaugauaacagaaauguuacaaaaagaguacauggaaagacaaggcaaaacaccuuuagguuuagucgaccuauucguauucaguacaucuuuuuaccuaauaucaauauuccuacaucuaguaaaaauaccaacacauagacacauaguaggaaaaucauguccuaaaccucacagacuaaaccauaugggaauauguucaugcggauuuuacaaacaaccaggaguaccaguaaaauggaaacgauaa

SEQ ID NO: 5816 - RNA, 1476 nt, Artificial Sequence
  derived and/or modified protein sequence (opt6) from LASV(G3234-SLE-2013;Clade IV)__AIT17388__GPCstabilized
augggacaaauaguaacauucuuucaagaaguaccccacguaauagaagaaguaaugaacauagucuuaauugcauuaucaauacuagcaguacuuaaaggacuauauaauguagcaacaugcggacucauuggauuagucacauucuuacuacuaugcggaagaucaugcacaaccacauuguauaaaggagucuacgaacuacaagcccuagaacuuaauauggaaacacuaaacaugacaaugccacuauccuguaccaaaaacaacucacaucacuauauaagaguuggaaacgaaacaggucuagaauuaacacuaacaaacacaucaauuauaaaccacaaauucugcaacuuaucagacgcacacaagaaaaaccuuuaugaccacgcacuaaugagcaucaucuccacauuccaucuaucuauacccaacuuuaaccaauacgaagcaaugucaugugacuucaacggagguauaauauccguccaauacaaccuaucccacucauacgcaggagacgcagcgaaccacugcggaacaguagcaaauggaguacuacaaacuuuuaugcgaauggcauggggaggaucauacauugcauuagacuccgguugcaacggcugggacugcauaaugacaucauaccaauauuuaauuauacaaaacacaacaugggacgaucacugccaauucucucgcccaaguccaauaggcuaccuaggacucuuaucucaaagaacuagagacauauacauaucgagaagacgaagaggaacuuucacauggacuuuaucagacuccgaaggcaaagacacaccaggaggauauuguuuaacaagauggaugcuaauagaagccgaauuaaaaugcuuuggaaacacagcuguagcaaaauguaaugaaaaacacgacgaagaauuuugcgacauguuaagauuauucgacuucaacaaacaagccauacaaagauuaaaaacaccagcacaaaugaauauacaacucauaaacaaagcaguuaacgcacuaauaaaugaccaauuaauaaugaaaaaccaccuaagagacauaauguguauccccuacuguaacuacucaaaauauugguaccuaaacaacacagcaacaggaaaaacaucacuccccagaugcugguuaguaucaaauggcucauaucuaaacgaaacacauuucucagacgauauagaacaacaagccgauaacaugauaacagaaauguuacaaaaagaauauauggaaagacaaggaaaaacaccacuuggcuuaguugauuuauucguauucucaacaaguuucuaccuaauaucaauauuccuacauuuagucaaaauacccacgcacagacacauagucggaaaaccauguccaaaaccacauagacuaaaccacauaggcauauguucauguggacuauacaaacaaccaggaguaccaguaaaauggaaaagauaa

SEQ ID NO: 5817 - RNA, 1476 nt, Artificial Sequence
  derived and/or modified protein sequence (opt6) from LASV(G502-SLE-2009;Clade IV)__AIT17126__GPCstabilized
augggacaaauaguaaccuucuuccaagaaguaccacacguaaucgaagaagucaugaauauaguucuaauagcacucagcaucuuagcaguccuaaaaggacuauacaauuuugcaacaugcggucuaguaggacuacuuacauuccuucuauuauguggaagauccugcacaacaggacuauauaaaggaguauaugaauuacaaacacucgaauuaaacauggaaacacuaaacaugacaaugccacuaucaugcacuaaaaauaacucacaucauuauaucaugguuggaaaugaaacagguuuagaacuaacacuaacaaauacaagcauaaucaaucacaaauucugcaacuuaucugaugcucacaagaaaaacuuauaugaccacgcacuaaugagcaucauaucaacauuucacuuaucaaucccaaauuucaaccaauaugaagcaaugucaugcgauuucaacggaggaaaaauaucaguacaauacaaccucucacauucuuaugcuggagaugcagcagaucacugcggaacaguagcaaacggaguauuacaaacauucaugcgaauggcauggggaggaucauacauagcucucgacuccggaugcggaagaugggauugcauaaugacauccuaucaauaccuuauaauacaaaacacaacaugggaagaccacugccaauucucaagaccaaguccaauaggauaccuaggacuauuaucacaacgaacaagagacauuuacauaucucgacgcagaagaggaaccuucaccuggacauuauccgacucagaaggaaaagauacaccaggaggauacugcuuaacaagauggaugcuaauagaagccgaacucaaaugcuucggaaauacagcaguagccaaaugcaacgaaaaacacgaugaagaauuuugugacaugcuaagacuauucgacuucaacaaacaagcuauacaaagauuaaaagcacccgcccaaauguccauccaacuaauaaauaaagcuguaaacgcacuaaucaaugaccaacucguaaugaaaaaucaucuaagagacauaauguguauacccuacuguaacuacucacgauacugguaccuaaaccauacaacaacaggaagaacaucacuuccaaaaugcugguuagucucuaauggaucauaccuaaacgaaacacacuuuuccgacgauauagaacaacaagcagauaauaugauaacugaaauguuacaaaaagaauacauggaaagacaaggaaaaacuccccuaggucuaguagaccucuucguauuuucaacaucuuuuuaucuaaucucaauauucuuacaccuaguaaaaauaccaacacacaggcauauagucggaaaauccuguccaaaaccacacaggcuaaaccacaugggaauaugcucuuguggacuauacaaacaaccaggagucccaguaaaauggaaaagauaa

SEQ ID NO: 5818 - RNA, 1476 nt, Artificial Sequence
  derived and/or modified protein sequence (opt6) from LASV(G503-SLE-2009;Clade IV)__AIT17130__GPCstabilized
augggacaaauaguaacuuucuuccaagaagucccacacgucauagaagaaguaaugaacauaguauuaauugcacucucaauacuagcaguccuaaaaggccuauacaauuuugcaacaugcggauuuguaggacuaguaacauuuuuacuacuaugcggaagaucaugcacuacaucauuauauaaaggaguauacgaacuacaaacucucgaacucaauauggaaacacucaauaugacuaugccucucucuugcacuaaaaacaauucucaccacuacauaagaguaggaaacgauacaggacuagaacucacacucacaaauaccucuaucauaaaucauaaauuuuguaauuuaucagacgcacacaaaaaaaaccuauacgaccacgcucuaauguccauaauaucaacauuucaucucucaauaccaaauuucaaccaauacgaagcaaugucaugcgauuuuaacggagggaaaaucucaguacaauacaauuuaucacacucauacgcaguagaugcagccucacacugcggaacaauagcuaacggaguauuacaaacauucaugagaauggcauggggaggauccuauauugcacuagauucuggaugcgaccguugggacuguauaaugacauccuaucaauacuuaaucauacaaaauacaacaugggaagaccacugucaauucucaagacccagcccaauaggcuacuuaggauuacuaucacaacguacccgugauauauauaucuccagaagaagaagaggaacauucacauggacauuaucagacuccgaaggaaaagauacaccagguggauacugucuaacaagauggauguuaauagaagccgaacuaaaaugcuuugguaacacagcaguagcuaaauguaaugaaaaacacgacgaagaauuuugcgacauguuacgccucuuugauuuuaacaaacaagcaauacaaagauuaaaagcaccagcacaaaugucaauacaauuaauaaacaaagcagucaacgcuuuaauaaacgaucaacuaauaaugaaaaaccaccuaagagacauuaugugcauaccauacugcaacuacucuaaauauugguaccuaaaccacacaacaacaggaaaaacaucacuaccaaaauguugguuaguauccaacggaucauacuuaaacgaaacccacuuuucagaugacauagaacaacaagccgauaacaugauuacagaaaugcuccaaaaagaauacauggaacgucaaggaaaaacaccauuaggacuaguagaccuauucguauucuccacaucauucuaccuaauaucaauauuccuucacuuaguaaaaauaccaacacacagacacauaguaggaaaaucaugcccuaaaccccauagauuaaaccacauggguauaugcaguugcggacuauacaaacaacccggagucccaguaaaauggaaacgauag

SEQ ID NO: 5819 - RNA, 1476 nt, Artificial Sequence
  derived and/or modified protein sequence (opt6) from LASV(G610-SLE-2009;Clade IV)__AIT17134__GPCstabilized
augggacaaauaguaacauucuuccaagaaguuccacacguuauagaagaaguaaugaauauaguacuaauagcacuauccauacuagcaguccuaaaaggacuauauaacuuugcaacaugcggacuaguaggacuaguaacauucuuacucuuauguggaagaucaugcacaacaucacuauacaaaggaguauacgaacuacaaacucuagaacuaaacauggaaacacuaaacaugacaaugccuuuaucauguaccaaaaauaacucacaucacuacaucauggucggaaacgaaaccggauuagaacuaacacucacaaacacaaguauaauaaaccacaaauucuguaaccuaucagaugcacacaaaaaaaaccuauacgaucacgcacuaaugucaauaauaucaacauuucaccucucuauaccaaauuucaaucaauaugaagcaaugucuugcgacuuuaacggaggaaaaaucucaguacaauacaaucucucucacucauacgcaggcgacgcggcaaaucauuguggaacuguagccaauggaguauuacaaacauuuaugcgcauggccuggggaggaucuuacauugcacuagauucuggaugcggaagaugggacuguauaaugacaucauaucaauaccucauaauacaaaacaccacaugggaagaccacugccaauuuucacgaccuaguccaauaggcuaccuaggauuacuuucacaaagaacacgggacauauacauaucccgacgaagacgaggaacauuuacauggacacuaucagacuccgaaggaaaagacacaccaggaggauauugucuaacacguuggauguuaauagaagcagaauuaaaauguuuuggaaacacagcaguagcuaaaugcaacgaaaaacacgacgaagaauucugcgauaugcuaagacucuucgauuuuaauaaacaagcaauacaacgccuaaaagcacccgcacaaaugucuauacaacuaauaaacaaagccguaaacgcauugaucaacgaucaauuaaucaugaaaaaccacuuaagagauauaaugugcauaccauacugcaacuacuccaaauauugguaucuaaaucauacaacaacaggaaaaaccucacuaccaaaauguuggcuagucucaaacggauccuaccuaaacgaaacacauuucuccgacgacauugaacaacaagcagacaauaugauaacagaaaugcuccaaaaagaauauauggaaagacaagguaaaacaccuuuaggauugguagacuuauucguauucuccacauccuucuaccucauaagcauauuccuacaucuagucaaaauaccaacacaccgucacauaguaggaaaaucaugucccaaaccacacagacucaaccacaugggaauaugcucauguggccuauacaaacaaccaggagucccaguaaaauggaaaagauaa

SEQ ID NO: 5820 - RNA, 1476 nt, Artificial Sequence
  derived and/or modified protein sequence (opt6) from LASV(G636-SLE-2009;Clade IV)__AIT17138__GPCstabilized
augggacaaauaguaacauucuuucaagaaguaccucacguaauagaagaaguaaugaacauaguucuaauagcucuaucuauacucgcaguauuaaaaggacuuuauaaccuagcuacaugcggacuuguaggccuaguaacuuuccuauuacuauguggaagaucaugcacaacaagucuauacaaaggcguauacgaacuacaaacacuagaacuaaacauggaaacacuaaacaugacaaugccucuguccugcacaaaaaacaacucucaucacuacaucaugguaggaaacgaaacaggauuagaacuaaccuuaacaaauacaucauuaauaaaucacaaauucuguaaucuuucagaugcacacaaaaaaaacuuauacgaccacgcauuaauguccauaauauccacuuuccaccucucaauuccaaacuucaaccaauacgaagccaugucaugugacuucaacggaggaaaaauaucaguacaauacaaccuaucucacuccuacgcaguagaugcagcaucccacuguggaaccguagcaaauggaguacuacaaacauuuaugcgaauggcauggggaggaucuuacauagcauuagacucaggaugcggaggaugggacugcauaaugacaucauaucaauauuuaaucauacaaaacacuacaugggaagaccacugccaauuuucacgacccucaccaauaggauaccuaggacuguuaucacaaagaacuagagacauauacauaucuagaagaagaagaggcacauucacauggacacucucagauucagaaggaaaagauacacccggaggcuacugccuaacuagauggaugcuaauagaagcagaacuaaaaugcuucggaaacacggccguagcaaaaugcaacgaaaaacaugacgaagaauucugcgacaugcuaagauuauucgauuucaauaaacaagcaauacaacgucuaaaagccccagcacaaaugagcauacaauuaauaaacaaagccguaaacgccuuaauaaacgaccaauuaauaaugaaaaaccaccucagagacaucaugugcaucccauauugcaacuacucgaaauauugguaccuaaaccauacuacaacgggacgaacaucauuaccaagaugcuggcuaguaucaaacggaucauaccuaaacgaaacccacuucucagacgauauagaacaacaagccgacaauaugauaaccgaaaugcuacaaaaagaauauauggaacgacaaggaaaaaccccacuaggucuaguugaucuauucgucuuuucaacaagcuucuaccuaauauccauauuccuacaccuaguaaaaauccccacacacagacacauaguaggaaaaucaugucccaaaccccaccgauuaaaccacaugggaauuugcagcuguggucuauauaaacaaccaggaguaccaguaaaauggaaaagauaa

SEQ ID NO: 5821 - RNA, 1476 nt, Artificial Sequence
  derived and/or modified protein sequence (opt6) from LASV(G692-SLE-2009;Clade IV)__AIT17146__GPCstabilized
augggacaaauaguaacauuuuuccaagaaguaccacaugucaucgaagaaguaaugaacauaguucuaauagccuuaucaauacuagcaguccuaaaaggucuauacaacuuagcuacauguggcuuaguaggccuaguaaccuuccuuuuauuauguggaagaucauguaccaccucccucuacaaaggaguauacgaacuacaaacauuagaauuaaacauggaaacuuuaaacaugacaaugccacuauccugcacaaaaaauaacucacaucacuauaucaugguaggaaacgaaacuggacuugaacuaacauuaacaaacacaucaauaauaaaccacaaauucuguaauuuaagugaugcacauaaaaaaaaccucuaugaccacgcauuaaugucaauaauaucaacauuccaucuaaguauaccaaacuucaaucaauacgaagccauguccugugacuucaacggagguaaaaucuccguacaauacaaucucucucacucauaugcaggcgaugccgcaaaccacugcggaacagucgcaaauggaguacuacaaacauucaugcgcauggcauggggaggaucuuauauagcacuagacuccggaugcggacgaugggacugcaucaugacaucauaucaauacuuaaucauacaaaacacaacaugggaagaccauugcucauucucuagaccauccccaaucggcuaccucggauuguuaucacaacgaacacgugacauauacauaucccgaagaagaagaggaacauucacauggacacuaucagauuccgaaggaaaagacacacccggaggauacugucuaacaagauggaugcucauagaagcagaauuaaaaugcuuuggaaacacugcaguagcaaaauguaacgaaaaacacgaugaagaauuuugcgacauguuaagacucuucgacuucaauaaacaagcaauacaacgauuaaaagcaccagcucaaaugucaauacaauuaauaaacaaagcagucaacgcauuaauaaaugaccaacuuauaaugaaaaaccaccuaagagacaucaugugcauaccauacugcaacuauucuaaauauugguaucuaaaucacacuacaacaggaaaaacaucucuaccaaaaugcuggcuaguaucaaacggaucauauuuaaacgaaacacacuucucugaugacauagaacaacaagcagacaauaugauaacagaaaugcuacaaaaagaguacauggaaagacaaggaaaaacaccacuaggacuagucgacuuauuuguauuuucaacaucuuuuuaucuaauaucgaucuucuuacauuuagucaaaauacccacacaucgacacauaguaggaaaauccuguccaaaaccacacagauuaaaccauaugggaauaugcucaugcggauucuauaaacaacccggaguccccgucaaauggaaacgauaa

SEQ ID NO: 5822 - RNA, 1476 nt, Artificial Sequence
  derived and/or modified protein sequence (opt6) from LASV(G733-SLE-2010;Clade IV)__AIT17154__GPCstabilized
augggacaaauaguaaccuucuuccaagaaguaccucacguaauagaagaaguaaugaauauaguauuaauagcauuauccauccucgcaguacuuaaagguuuauacaacuuugcaaccugcggcauagucggucuaguauccuuucucuuauuaugcggaagaucauguacaacauccuuauacaaaggaguauacgaacuacaaacauuagaauuaaacauggaaacucucaacaugacaaugccauuaucauguaccaaaaacaauagccaucauuauauaaugguaggaaacgaaacaggacucgaacuaacacuaacaaacacaucaauaauaaaccacaaauucugcaaccuuucagacgcacacaagaaaaaccuauacgaucacgcacuaaugucuauaauaucaacauuccaccuaagcauaccaaauuucaaucaauacgaagccauguccugugacuucaauggaggaaaaauaucaguacaauacaaccuaucacauuccuacgcaggagacgcagcaaaccauugcggaacaauagcaaacggaguucuacaaacauucaugagaauggcauggggaggaagcuacauagcacuagacucaggcugcgaccgaugggauugcauaaugacauccuaccaauaccuaauaauacaaaacacaacaugggaagaccauugccaauucucccgcccaucaccaauaggauacuuaggacuacuaucacaaagaacaagagacauuuauauaucuagacgaagaagaggaacauuuacauggacacuaucagauuccgaaggaaaagacacaccuggcggcuauugucuaaccagauggauguuaauagaagcagaacucaaaugcuuuggaaacacagcaguagccaaaugcaacgaaaaacacgacgaagaauuuugcgacauguuaagacucuucgauuuuaacaaacaagcaauacaaagauuaaaagcacccgcacaaaugucaauacaauuaauaaauaaagcuguaaacgcacuaauaaacgaccaauuaaucaugaaaaaccaucucagagauauaauguguauaccauacuguaauuauucuaaauacugguauuuaaaccacacaaccaccggaaaaacaucauuaccuaaaugcuggcuaguaagcaacgguucuuaucuaaacgaaacacacuuuucagacgacauagaacaacaggcagauaauaugauaaccgaaauguuacaaaaagaauacauggaaagacaaggaaaaacaccauuaggucuaguagaucuauucguauucucaacuagcuucuaccuuauaucaauuuuccuacauuuaguaaaaauacccacacauagacauguaguaggaaaaucauguccaaaaccacacagauuaaaccauaugggaaucuguucuugcggacuauacggacaaccagguguuccaguaaaauggaaaagauaa

SEQ ID NO: 5823 - RNA, 1476 nt, Artificial Sequence
  derived and/or modified protein sequence (opt6) from LASV(G771-SLE-2010;Clade IV)__AIT17158__GPCstabilized
augggucaaauagucaccuuuuuucaagaaguuccccacguaauagaagaaguaaugaacauugucuuaauagcccuuucaauacuagcaguucucaaaggauuauacaacuuugccacuuguggacuaguaggacuaguaacauuucuacuccuaugcggaagaagcuguaccacaucacucuauaaaggagucuaugaacuacaaacacuagaacuaaauauggaaacacuuaacaugacaaugccacuauccuguacaaaaaacaacucccaucauuauaucaugguuggaaacgaaacaggacuagaacuuaccuuaacaaauacaucaaucaucaaccauaaauuuugcaaccuaagcgaugcacauaaaaaaaaccuauaugaccacgcacuaauguccauaauaucaacuuuccacuuauccaucccaaacuuuaaccaauaugaagcuaugucaugugacuucaacggaggcaaaauaucaguacaauacaaucuaucacacucauaugcaggagaugccgcaaaccacugcggaacaguagcaaauggcguccuacaaacauucaugagaauggcauggggaggaucauacauagcacuugacuccggaugcgaccgcugggacuguauaaugaccucauaccaauaccuaauaauacaaaacacaacaugggaagaccacugucaauucucuagacccucacccaucggauaucuaggauuacucucacaaagaacaagagauauauauauaucccgaagaagaagaggcacauucacauggacauuaucagacuccgaaggcaaagacacaccaggagguuacugccuaacaagauggauguuaauagaagcagaacuaaaauguuucggaaauacagcaguagcaaaaugcaacgaaaaacaugacgaagaguucugcgacaugcucagacuuuucgacuucaauaaacaagcaauacaaagacuaaaagccccagcacaaaugucaauacaacuaauaaacaaagccguaaaugcauuaauuaacgaccaacuaauaaugaaaaaccaccuacgagacauaauguguauaccauacugcaacuauaguaaauacugguaucuaaaucauacaaccacaggaaaaacaucccuaccaaaauguuggcuagucucaaacgguucauaucuaaacgaaacccauuucucagacgacaucgaacaacaagccgauaacaugauaacagaaaugcuucaaaaagaauacauggaacgacaaggaaaaacaccacuaggccuuguagacuuauucgucuucucaacuucauucuacuuaaucucaauauuucuucaccuaguaaaaaucccaacacacagacauauaguaggaaaaucaugcccuaaaccacauagauuaaaucauaugggaaucuguucauguggauuauacaaacaaccaggaguuccaguaaaauggaaacgauaa

SEQ ID NO: 5824 - RNA, 1476 nt, Artificial Sequence
  derived and/or modified protein sequence (opt6) from LASV(G808-SLE-2010;Clade IV)__AIT17164__GPCstabilized
augggacaaauaguuacauucuuucaagaaguaccacaugugaucgaagaaguaaugaacauaguacucauagcacucuccauacuagcuguacuaaaaggacuauauaauuucgcaacauguggacuuguaggacuagucacauucuuacuacuaugcggaagaucaugcacaucuucacuauauaaaggaguauacgaauuacaaacacuagaacuaaauauggagacguuaaauaugacuaugccacuaucauguacaaaaaacaauucucaccauuauauaagaguuggaaaugaaaccggauuagaacuaacacuaacaaauacaucaauaauagaccauaaauucugcaaccuaucagacgcacauaaaaaaaacuuauaugaucaugcccuaaugucuauaauaucaacauuccaucuaucaauaccaaacuucaaucaauacgaagcaaugucaugugacuucaacggcggaaaaauaagcguccaauacaaucucucacauucauacgcaggagaugcagcaaaacauuguggaacagucgccaacggaguauuacaaacauuuaugagaauggcauggggcggaucauacauagcacuugacucaggaugcggaaacugggacugcauaaugacaucauaccaauaccuaauaauacaaaauaccaccugggaagaccauugccaauucuccagaccaucucccaucggauacuuaggacuccucucacaaagaacaagagacauauauauaucuagaagacgacgaggaaccuucacauggacacuaucagacuccgaaggcaaugacgcaccagguggcuacugcuuaacacgauggaugcuaauacaagcagaauuaaaaugcuucgguaacacugccguagcaaaaugcaacgaaaaacaugaugaagaauucugcgacauguuaagauuauucgacuucaacaaacaagcaauacaaagauuaaaagccccagcacaaaugucaauacaacuaauaaauaaagccguaaacgcacuaauaaaugaccaauuaauuaugaaaaaccaccuaagagacauaauguguauuccauacugcaacuacuccaaauacugguauuuaaaucacaccaccaccggaagaaccucccuaccacgauguuggcuaguaucuaauggauccuaccuaaacgaaacacacuuuuccgacgauauagaacaacaagccgacaacaugaucacagaaauguuacaaaaagaauacauggaacgccaaggaaaaacaccucuaggacuaguagaucuauucguauucuccacaucauucuaccuaaucuccauauuucuccaccuaguuaaaauuccaacacaccgucacauaguaggaaaaucaugcccaaaaccacauagauuaaaccacaugggaauaugcucaugcggcuuauucaaacaaccaggaguaccaguaaaauggaaaagauaa

SEQ ID NO: 5825 - RNA, 1476 nt, Artificial Sequence
  derived and/or modified protein sequence (opt6) from LASV(Guinea Faranah;Clade IV)__AMZ00381__GPCstabilized
augggacaaaucguaaccuuuuuccaagaagucccacacguaauagaagaagucaugaacauaguuuuaaucgcauuaucuaucuuagcaguacuaaaaggcuuauacaacguagcaacuugcggccucauaggauuaauagcauuccuacuacuaugcggacgcucauguacaucaacccucuauaaaggaguauacgaacuacaagcauuagaacuaaacauggaaaccuuaaacaugacaaugccacuaucauguacuaaaaauaacagucaccacuauauuaugguuggaaacgaaacaggccuagaacuaaccuuaaccaacacaucaauaauaaaucacaaauucugcaaccuaucagacgcacauaaaaaaaacuuauauaaccaugcacuuauguccauuauuucaacauuccaccuaucuauaccuaauuucaaucaauacgaagcaaugucuugcgacuucaacggcggaaaaaucucaguucaauacaaccuaucccauuccuaugcaguagaugcagccaaccacuguggaacaguagcaaacggaauacuacaaacauucaugagaauggcauggggaggaagcuacauagcacuagacaguggaugcggaggaugggacugcauaaugucuucauaucaauauuuagucauacaaaacaccacaugggaagaccacugucaauucuccagaccaaguccaaucggauaccuaggacuccuaucacaaagaacucgagacauauauauaucaagaagacgaagaggcacauuuacauggaccuuaagcgauucagaaggaaaagauaccccuggaggauacugccuaacacguuggaugcuuaucgaagcagaauuaaaauguuucggaaacacugcuguagcaaaaugcaacgaaaaacaugacgaagaauucugcgacaugcuacgacuauuugauuucaauaaacaagccauacaacgauuaaaagcaccagcucaaaugucuauacaacuaauaaauaaagcaguaaacgcacuaauaaacgaucaguuaauaaugaaaaaucaccuuagagauauuauguguaucccauacugcaauuacucgaaauacugguaccuaaaucauacaauaaccggaagaaccucucuaccaaaaugcuggcuaguaucaaauggaucuuauuuaaacgaaacacauuuuucagaugacaucgaacaacaagcugacaauaugauaacugaaaugcuacaaaaagaauaccuagagagacaaggaaaaacaccacuaggacuaguagaccuauucguauuuuccacaucauucuaucuaauaucaauauuccuacaccucauaaaaauaccaacacaucgacauauaguaggaaaaucaugcccuaaaccacaccgccucaaccacaugggaguuugcucauguggacuuuacaaacaacccggaguacccguaagauggaaaagauaa

SEQ ID NO: 5826 - RNA, 1476 nt, Artificial Sequence
  derived and/or modified protein sequence (opt6) from LASV(GUINEA Z-185a;Clade IV)__AMZ00377__GPCstabilized
augggucaaauaguaacauucuuucaagaaguaccccacguaauagaagaagucaugaacauaguacuuauagcccuaucuauacuagcaguacuuaaaggacuauacaauguagcaacaugcggccuaauaggauuaguaacauuuuuauuccuaugcggcagauccugcucaacaucauuauacaaaggaguauacgaacuacaaacacuagaauuaaacauggaaacauuaaacaugacaaugccacuaucauguaccaaaaauaacucacaccacuauauaaugguaggaaacgaaacaggacuagaacuaacccuuacaaacacaucuauaauuaaucacaaauucugcaaucuauccgacgcacauaaaaaaaaucuauacgaccacacauuaaugucaaucauauccacauuucacuuaucaauacccaacuuuaaccaauacgaagcaaugucaugugacuucaauggaggaaaaaucucuguacaauauaaucucucacacucauacgccguugacgccgcuaaccacugcggcacaguagcaaauggagucuuacaaacauuuaugagaauggcauggggaggaucuuacauagcacucgacucaggcugcggaaacugggacugcauuaugacuucauaccaauaccuaguaauacaaaacacaacaugggaagaccacugccaauucucacggccaucaccaaucggauaccucggccucuuaucucaaagaacaagagacaucuacauaucucgaagaagaagaggaacauucaccuggacauuaucagacucagaaggaaaagauacaccuggaggauauugcuuaaccagauggauguuaauugaagcagaacuuaaauguuucggaaauacagcaguugcaaaaugcaaugaaaaacaugacgaagaauucugcgacauguuaagacuauucgacuuuaauaaacaagcaauacaaagacuaaaagccccagcacaaaugucaauacaacuaaucaauaaagcagucaaugcccucauaaacgaccaauuaauaaugaaaaaccaccuaagagacauaaugugcauuccauacugcaauuauucaaaauauugguacuuaaaucacacaguaaccggaaaaaccucucuuccaaaauguuggcuaguaucaaauggaucauauuuaaacgaaacacauuuuucagaugauauagaacaacaagccgacaaucuaauaacagaaaugcuccaaaaagaauacauggaaagacaaggaaaaacaccauuaggacuuguagaccuauucguuuucucaaccucauucuaccuaauaucaauuuuucuccaccuaguaaaaauaccaacacacagacauauaguaggaaaaccauguccaaaaccacacagauuaaaccauauggguauaugcucauguggagucuacaaacaacccggaguacccguaagauggaaacgauaa

SEQ ID NO: 5827 - RNA, 1476 nt, Artificial Sequence
  derived and/or modified protein sequence (opt6) from MOPV/LASV reassortant(IGS-1;Clade IV)__AFY05576__GPCstabilized
augggccaaaucguaaccuucuuucaagaaguaccucauguaauugaagaaguaaugaauauaguucuuauagcacuaucaguauuagcaguucuaaaaggauuauauaacuucgccacauguggucuaguaggccuaguaaccuuuuuacuacuauguggaagaucaugcaccacaucauuauauaaaggaguauacgaacuucaaacccuagaacuaaauauggaaacacuaaacaugacaaugccauuaucaugcacgaaaaauaacucccaccacuacauuaugguaggaaacgaaacaggucuagaauuaacacucacaaauacaucaauuauaaaccacaaauuuugcaaucucuccgaugcgcacaagaaaaauuuauaugaccacgcacuaaugucaauaauaucaacauuucaccuaagcauaccaaacuucaaccaauaugaagccaugucaugcgauuucaacggaggaaaaaucucaguacaauacaaccuaucccauucauacgcaggagaugcagcaaaucacugcggcacaguagcaaacggcguacuacaaacauuuaugcgcauggccugggguggcucauacauagcucuagauucugguugugguaauugggauuguauaaugacaucuuaccaauaucuaauaauccaaaauacaacaugggaagaccacugccaauucucaagaccaucaccaauaggauauuuagguuuauuaucacaaagaacaagagacaucuauaucucacgaagaagacgaggaacauucacauggacacucucagacucugaaggugaagacacaccaggaggauacugccuaacacgauggauguuaauagaagcagaacuaaaaugcuucggaaauacagcaguugcaaaaugcaacgaaaaacacgaugaagaauuuugcgauauguuacgauuauuugacuuuaacaaacaagcaauacaacgacuaaaagcccccgcacaaaugucaauacaacuaauaaacaaagcaguaaaugcacugauaaaugaucaacuaauaaugaaaaaucacuuaagagacaucauguguaucccauauugcaacuacucaaaauauugguaucuaaaucacacuaccacaggaagaacaucccuaccaaaaugcuggcucguaucuaacggaaguuaccuaaacgaaacacacuuuucagaugauaucgaacaacaagcagacaacaugauaacagaaaugcuacaaaaagaauauauggaaagacaaggaaaaacaccacucggcuuagucgaccucuucgucuuuucaacaucauucuaccuaauaucaaucuuccuacaccucguaaaaauaccaacacacagacauauaguaggaaaaucgugcccaaaaccacauagacuuaaccauaugggaauauguucauguggucuuuacaaacaaccaggcgugccaguaaaauggaaacguuaa

SEQ ID NO: 5828 - RNA, 1476 nt, Artificial Sequence
  derived and/or modified protein sequence (opt6) from MOPV/LASV reassortant(IGS-11;Clade IV)__AFY05588__GPCstabilized
augggucaaauaguaacauuuuuccaagaaguaccacacguaauagaagaaguuaugaacauaguacuaauagcucuaucaguacuagcagucuuaaaaggucuauauaacuuugcaacaugcggauuaguaggucuaguaacauuccucuuauuaugcggacgaucauguaccaccucacuauacaaaggaguauacgaacuacaaacauuagaacucaacauggaaacacucaacaugacaaugcccuuaucuugcaccaaaaauaacucacaccacuacaucaugguuggaaacgaaacaggauuagaacuaacacuaacuaauacaagcauaaucaaccacaaauucugcaacuuaucagacgcucacaaaaaaaacuuauaugaccacgcucuaaugagcauaauaucaacauuucacuuaucaauaccaaauuucaaccaauacgaagccaugucuugcgacuuuaacggcggaaaaauuuccguccaauauaaucucucacauagcuacgcaggagacgcagcaaaccacugcggaaccguagcaaauggaguucuacaaacauucaugagaauggcauggggaggaucauacauagcacuggacucaggaugcggaaacugggacugcaucaugacauccuaucaauaccuaauaauucaaaacacaacaugggaagaccauugccaauucucacgcccaagcccaaucggauacuuaggucuucuaucacaaagaacaagagauuuauacaucucaagaagaagaagaggaacauucacauggacucuaucagacucugagggugaagacacaccaggaggcuacugucuuaccagauggaugcuaauagaagcagaacuaaaaugcuucggaaacacagccguagcaaaaugcaacgaaaaacacgaugaagaauucugcgacaugcuaagauuauucgacuuuaacaaacaagcaauccaaagacucaaagcccccgcacaaaugagcauccaauuaauaaacaaagccguaaacgcuuuaaucaacgaccaacuaauaaugaaaaaccauuuacgagacauaaugugcauaccauacugcaauuauucaaaauacugguaucuaaaccacacaacaacaggccgaaccagcuuaccaaaaugcuggcuaguauccaacggauccuacuuaaacgaaacacacuucucagaugauauagagcaacaagcagauaauaugauaacagaaauguuacaaaaagaauauauggaaagacaaggaaaaacacccuuaggacucguagaucuauucguauucucaacaucuuuuuaccuaauuucuauauuccuacaccucguaaaaauuccuacacacagacacauaguaggaaaaucauguccaaaaccacaccgacuaaaucacaugggaauaugcucauguggacuauauaaacaaccagguguaccaguaaaauggaaaagauaa

SEQ ID NO: 5829 - RNA, 1476 nt, Artificial Sequence
  derived and/or modified protein sequence (opt6) from MOPV/LASV reassortant(IGS-12;Clade IV)__AFY05590__GPCstabilized
augggacaaauaguaacauuuuuccaagaagucccacacguaauagaagaaguaaugaauauaguacuaauagcacuaucaguauuagcagucuuaaaaggccuauauaacuucgccacuugcggacuugucggucuaguaacauucuuacuucuaugcggaagauccugcacaacaucacuauacaaaggagucuacgaacuacaaacauuagaacuaaacauggaaaccuuaaacaugacaaugccccuauccugcacuaaaaacaauucacaucauuacauaaugguuggcaacgaaacaggacucgaacuaacccucacaaacacaucuauaauaaaccacaaauucugcaaccucucagacgcacacaagaaaaacuuauacgaccacgcacucaugaguauaauaucaacauuccacuuaucaauccccaauuucaaucaauacgaagcaaugucaugcgacuucaauggaggaaaaauaucaguucaauacaaucuaucccauuccuacgcaggagaugcagccaaccauugcggcacagucgcaaacggcguauuacaaacauuuaugcgcauggcauggggaggaucauauauagcauuagauucaggcugcggaaacugggacugcauaaugacaucauaccaauaccuaaucauacaaaacacaacaugggaagaccacugucaauuuuccagaccaagcccaauaggauauuuaggccuacuaucacaaagaacaagagacauguacauauccagaagaagaagagguaccuucacauggacauuauccgacucagaaggagaagauacaccaggaggauacugccuaacccgauggauguuaauagaagcagaacuuaaauguuucggcaauacagcaguagcaaaauguaaugaaaaacaugacgaagaauuuugugauaugcuacgacuauucgauuuuaauaaacaagcaauucaaagauuaaaagcacccgcccaaaugucaauacaacuaaucaacaaagcaguaaacgccuuaauaaacgaccaauuaauaaugaaaaaucaucuacgcgacaucauguguauuccauacugcaacuacucuaaauacugguaccuaaaccacacaacaaccggacgaacaucauuaccaaaaugcuggcucgucucaaacggauccuaucuaaaugaaacucacuuuucagaugacauagaacaacaagcagauaauaugauaacagaaauguuacaaaaagaauacauggaaagacaaggaaaaacaccucucggauuaguagaccucuuuguauuuagcacaucauucuacuuaaucucaauauuccuacaccuaguaaaaauaccuacacacagacauauaguaggaaaaucaugcccaaaaccacacagacuaaaccauaugggaauaugcucaugcggacuauauaaacaaccuggaguaccaguuaaauggaaaagauaa

SEQ ID NO: 5830 - RNA, 1476 nt, Artificial Sequence
  derived and/or modified protein sequence (opt6) from LASV(LM032-SLE-2010;Clade IV)__AIT17802__GPCstabilized
augggacaaauaguaacauucuuucaagaaguuccacauguaauagaagaaguaaugaacauaguacuaauugcauuaucaauacuagcaguacuaaaaggacuauacaaccuagcaacaugcggacucguaggucuaguaacauucuuacuauuaugcggacguagcuguacaacaucauuauauaaaggaguauacgaacuacaaacacuagaauuaaauauggaaacauuaaacaugaccaugccacuaucauguacuaaaaacaacucacaccacuauauuaugguaggcaacgaaacuggccucgaacuaaccuuaacaaacacauccauuaucaaccauaaauucugcaaccuaucagaugcccauaagaaaaaccuauauaaccacgcacuaaugucaauaauaucaacauuccaccuaucaauaccuaauuucaaucaauacgaagcaaugaguugcgacuucaacggaggcaaaauaucaguacaauacaaccuaagccauaguuaugccggagacgcagcuaaucacugugguacaguagccaauggaguacuacaaacauucaugcgaauggcauggggaggcuccuauaucgcacuagauagcggaugugacagaugggacuguauaaugacaucuuaucaauauuuaauaauacaaaauacaacaugggaagaccacugccaauucagcagaccaucaccaauagguuaccucggucuguuaucacaaagaaccagagacauauacauaucacguagaagaagaggaaccuucacauggacacuaucagacagugaaggaaaagauacccccggaggauauuguuuaacacgauggaugcuaauugaagccgaauuaaaauguuucggaaacacagcuguagcaaaaugcaacgaaaaacacgacgaagaauuuugcgacauguuaagacuuuucgacuucaacaaacaagcaauacaacgacuaaaagccccagcucaaaugucaauucaacuaauaaacaaagcaguaaaugcccuaauaaacgaucaacuaauaaugaaaaaccauuuaagagacaucaugugcaucccauacugcaauuacaguaaauacugguaucuaaaccauacaacaacaggaaaaacaagccuuccaaaauguugguuaguaucuaacggaaguuaccuaaacgaaacacacuucucugaugacaucgaacaacaagcagauaauaugauuaccgaaaugcuacaaaaagaauacauggaaagauuagguaaaacaccacucggccuaguagaucuauucguauucucaacuucauucuaccuaauauccauauuucuucaccuaguaaaaauaccaacacacagacacauaguaggacgaucaugucccaaaccacauagacuaaaucacaugggaauaugcucaugcgguuuauacaaacaaccaggaguacccguaaaauggaaaagauaa

SEQ ID NO: 5831 - RNA, 1476 nt, Artificial Sequence
  derived and/or modified protein sequence (opt6) from LASV(LM222-SLE-2010;Clade IV)__AIT17806__GPCstabilized
augggacaaauuguaaccuuuuuccaagaaguaccacauguaauagaagaaguuaugaacauaguucuaauagccuuaucaauauuagcaguauuaaaaggccuauacaacuucgcaacaugcggacuaauuggacuugucacauucuuacuacuauguggaagaucuugcaccacauccuuauacaaaggagucuaugaacuccaaacacuagaauuaaacauggaaacacuuaacaugacuaugccccuaucauguacaaaaaacaacucacaccacuauauaaugguaggaaacgaaaccggauuagaauuaacauuaacaaauacaucaauaaucaaucacaaauuuugcaaccuaucagacgcccacaaaaaaaacuuauaugaccaugcauuaaugucaauaauaucaacuuuccacuuaucaauacccaacuucaaucaauaugaagcaaugaguugcgacuucaauggaggaaaaauuucaguacaauacaaccuuucacauucauaugcaggcgacgccgcaaaccacugcggaacaguugcaaaugggguucuacaaaccuucaugagaauggcauggggcggaucuuacauugcacuugauucaggaugcggaaaaugggacuguauaaugacauccuaccaguauuuaauaauacaaaauaccaccugggaagaccacugccaauucucaagaccuucccccauaggauauuuaggacuacuaucacaaagaacaagagacauauacauaucacgaagacgaagaggaacauuuacauggacccucucagauucagaaggaaaagacacaccaggaggauacuguuuaacaagauggauguuaauagaagccgaacuaaaaugcuucggcaacacagccguugcaaaauguaacgaaaaacacgacgaagaauuuugcgacaugcuacgcuuauucgauuucaauaaacaagcaauccaacgacuaaaagcaccugcacaaaugucaauacaauuaauaaacaaagcaguaaaugcauuaaucaaugaccaacuaauaaugaaaaaucauuuaagagacauaauguguauuccauacugcaacuacagcaaauacugguaccuaaaccacaccacaacuggaaaaaccucauuacccaaaugcuggcuaguaucuaauggaucauaucuaaacgaaacacacuucucugacgacauagaacaacaagcagacaacaugauaacugaaaugcuacaaaaagaauacauggaaagacaaggcaaaacaccacuaggucuaguagaccuauuugucuucucuacaucauuuuacuuaauauccauauuucuacaccucguaaaaaucccaacacacagacauaucguaggcaaaucauguccaaaaccacacagacuaaaccacaugggcauuuguucaugcggucuauacaaacaaccaggcguaccaguaaaauggaaaagauaa

SEQ ID NO: 5832 - RNA, 1476 nt, Artificial Sequence
  derived and/or modified protein sequence (opt6) from LASV(LM395-SLE-2009;Clade IV)__AIT17810__GPCstabilized
augggacaaauuguaacauucuuucaagaagucccacauguuauagaagaagucaugaacauaguacuaauugcauuaucaauacuagcaguacuaaaaggacuauacaauuuagcaacaugcggacuaguaggauuagucacauucuuauuacuaugcggacggucauguacaacaucuuuauacaaaggugucuacgaacuacaaacuuuagaacuaaacauggaaaccuuaaacaugacaaugccauuaucaugcacaaaagauaauucacaccacuauauacgagucggaaacgaaacaggauuagaacuaacauuaacaaacacaucuauauuaaaccacaaauucugcaacuuauccgacgcacacaaaaaaaacuuauaugaucacgccuuaaugucaauaaucagcacuuuucaucuaucaauaccuaacuucaaccaauacgaagcaaugucaugcgacuuuaacggcggaagaauaucaguacaauacaaccuaucccacaguuaugcaggagaugcagcaaaccacugcggcacgguagcaaacggcguauuacaaacauuuaugagaauggcauggggaggaucauacaucgcccucgacuccggaugcggucgaugggauuguauaaugacuucauaucaauaucuaauaauacaaaacacaacaugggaagaucacugccaauuuucaagaccaucaccaauaggauauuuaggacuauuaucacaaagaacacgagauaucuacauaucaagacguagacgcggaacauucacauggacacuauccgacagcgaaggaaaagacacuccaggcggauacugcuuaacucguuggaugcuaauagaagcagaacucaaaugcuuuggcaacacagcaguagcaaaauguaacgaaaaacaugacgaagaauuuugcgacaugcuacgauuauuugacuuuaacaaacaagcaauccaacgacuuaaagcaccagcucaaaugagcauacaacuaaucaacaaagcaguaaacgcucuaauuaaugaccaacuaaucaugaaaaaccaucuaagagacauaauguguauaccauauugcaacuacucaaaauacugguacuuaaaucacacaacaacaggaaaaacaucuuuaccuagauguugguuaguauccaacggcucauacuuaaacgaaacccacuuuucagacgauauagaacaacaagcagacaauaugauuacagaaaugcuacaaaaagaauacauggaaagacaaggaaaaacaccauuaggauuaguagaccuauucguauucucaacaucauucuaucuaauaucaaucuuccuacaccuaguaaaaauaccaacacaccgacaugucgucggcaaacccuguccaaaaccacacagauuaaaucacaugggaauuuguucaugcggauuauauaaacaaccaggcguacccguuaaauggaaacguuaa

SEQ ID NO: 5833 - RNA, 1476 nt, Artificial Sequence
  derived and/or modified protein sequence (opt6) from LASV(LM765-SLE-2012;Clade IV)__AIT17814__GPCstabilized
augggacaaauaguaacauucuuucaagaaguaccacauguaauagaagaaguaaugaacaucguauuaauagcauuaaguauacuagccguacuaaaaggacuauauaauuucgccacaugcggacucguaggccuagucaccuuccuacuucuaugcggaagaucuuguacaacaucauuauacaaaggagucuacgaacugcaaacauuagaauuaaacauggaaacacuaaacaugacaaugccacuaucaugcaccaaaaacaauucacaucacuacaucauggugggaaacgaaacaggauuagaacuaacacuuacaaauacaagcauaauagaccacaaauucugcaaccuaucagaugcacacagaaagaacuuauaugaucacgcacuaauguccauaauaucaacauuucaccuauccauaccaaacuucaaccaauaugaagcaaugucaugcgacuucaacggaggaaaaauaucaguacaauacaacuuaucacacaguuacgcaaaagacgcagcagaucauuguggaacaguagcaaacggaguacuacaaacauucaugcgaauggccuggggaggaagcuacauagcgcuagacucaggauguggacgaugggauugcauaaugacuucauaucaauacuuaaucauccaaaacacuacaugggaagaucacugucaauucuccagacccucccccauaggauaccuaggacuauuaucacagagaaccagagauauauauauaucaagaagaagaagaggaacauucacauggacccuaucagacucagaaggaaaagacaccccaggaggauacugcuuaacacgauggaugcucaucgaagcugaauuaaaaugcuucggaaauacagcagucgcaaaaugcaaugaaaaacacgacgaagaauuuugugacaugcuaagauuauucgacuucaacaaacaagccauacaacgacuaaaagcaccagcccaaaugucaauacaauuaauaaacaaagcaguaaacgcauuaauaaaugaccaacuaauaaugaaaaaucaccuuagagauauaauguguauuccauacugcaacuauagcaaauacugguacuuaaaucacaccacaacaggaaaaacaagccucccuaaauguuggcuaguauccaauggaucauaucuuaaugaaacacauuucucagaugauauagaacaacaagcagacaacaugauaaccgaaauguuacaaaaagaauauauggaaagacaaggaaaaacaccauuaggucuaguagauuuauucguauuuucaacaucauucuaucuaauaucaauuuuccuacaucuaguaaaaauacccacccacagacauauaguaggaaaaccaugcccaaaaccacacagacuaaaccacaugggaaucugcucauguggacucuauaaacaaccaggaguaccaguuaaauggaaaagauaa

SEQ ID NO: 5834 - RNA, 1476 nt, Artificial Sequence
  derived and/or modified protein sequence (opt6) from LASV(LM774-SLE-2012;Clade IV)__AIT17820__GPCstabilized
augggucaaaucguaacauucuuucaagaaguaccccauguaaucgaagaagucaugaauauaguccuuauagcucuaagcauacuagcaguacuaaaaggauuauauaacuuugcaacaugcggacuaguuggccuaguaacuuuccuacuauuaugcggaagauccugcacaaccucacuauacaaaggaguuuacgaauuacaaacacuagaacuaaauauggaaacacuaaacaugaccaugccauuaagcugcaccaaaaauaacucacaccacuauauaaugguaggcaaugaaacaggucucgaacuaacauuaacaaauaccagcauaaucaaccacaaauuuugcaauuuaucagacgcacacaaaaaaaaccuauacgaccaugcucucaugucaauaauauccaccuuucaccuaucaauacccaacuuuaaccaauacgaagcaauguccugcgacuucaauggaggaaaaauaucaguucaauacaaccuaucucacuccuacgcugaagacgcagccaaccacugcggaacagucgcaaacggaguacuacaaacauucaugagaauggccuggggaggaucauacauagcauuagacucaggaugcggaaacugggacuguaucaugacuucuuaucaauacuuaauaauacaaaacacuaccugggaagaucacugucaauucucaagacccuccccaauaggauaccucggacuacuaucacaaagaacaagagacauauauauaucaagaagaagacgaggaacuuucacuuggacuuuauccgacagcgaaggaaaagauaccccaggaggcuacugucuaacacgauggaugcuuauugaagcagaauuaaaaugcuuuggaaacacagccguagccaaauguaacgaaaaacacgaugaagaauuuugcgacaugcuuagauuauucgacuuuaacaaacaagcaauacaaagacuaaaagcaccagcacaaauguccauacaacuaaucaacaaagcagucaacgcuuuaaucaacgaccaauuaauaaugaaaaaccaccuacgagauauaauguguauuccauacugcaacuauucaaaauacugguaucuaaaucacacaacaacaggaaaaacaucauuacccaaauguugguuagucucaaacggaucauacuuaaacgaaacucacuucucagacgacauagaacaacaagccgacaauaugauaacagaaaugcuacagaaagaauauauggaaagacaaggaaaaacaccauuaggccuagucgaccuauucgucuuuucuacuucauucuaccuaauaucaaucuuuuuacacuuaguaaaaauaccaacacacagacauauaguagguaaaucaugcccaaaaccacacagacuaaaucauaugggaauaugcagcugcggauuauacaaacaaccaggaguacccguaaaauggaaaagauaa

SEQ ID NO: 5835 - RNA, 1476 nt, Artificial Sequence
  derived and/or modified protein sequence (opt6) from LASV(LM776-SLE-2012;Clade IV)__AIT17824__GPCstabilized
augggacaaauaguaacauucuuccaagaaguaccucacgucauagaagaagucaugaacauaguccuaauagcccuaucaauacucgcaguacuaaaaggauuauacaauuuugcuacuuguggauuaguaggauuaguaacauucuuacuacucugcggccgaucaugcacuacaucaguauacaaaggaguauacgaacuacaaaccuuagaauuaaauauggaaacauuaaacaugacaaugccacuaucaugcaccaaaaacaacucacaucauuacauaaugguuggaaaugaaacaggccuagaauuaacacuaacaaacacaucaaucauaaaccacaaauucugcaaucugucagacgcacacaagaaaaaccuauaugaccacgcauuaaugucuauaaucucuacauuccauuuaagcauaccaaacuuuaaccaauacgaagcaaugucaugcgacuucaacggaggaaaaauaucaguccaguacaaucuaucacacucauacgcaggagaugcagcaaaccauuguggaacugucgccaacggcguauuacaaacauucaugcgaauggcauggggcggaucauacauagcacuagacucuggaugcggaaaaugggacugcauaaugacaucauaccaauaccuaauaauucaaaacacaacaugggaagaucacugucaauuuucacgaccaucuccaaucggauaucuaggacuacuuucacaaagaaccagagacauauauauaucucgucgccgcagaggaacauuuaccuggacauuaagugacuccgaaggaaaagauaccccaggaggcuauugucuaaccagauggaugcuaauagaagcagaacuaaaaugcuucggaaauacagcuguagcaaaauguaacgaaaaacaugacgaagaauuuugcgauauguuaagacuauucgacuucaauaaacaagcaauacaacgauuaaaagcaccagcacaaaugucaauacaauuaauaaauaaagccgucaaugcucuaauaaacgaccaacuaauaaugaaaaaccauuuacgcgacauaaugugcauacccuacugcaauuacucaaaauauugguaccuaaaucacacaacaaccggaaaaacaucauuaccuaaauguuggcucguaucaaacggauccuaucuaaaugaaacacacuuuucagacgauauagaacaacaagcagauaacaugauuacagaaaugcuucaaaaagaauauauggaaagacaaggcaaaacaccacuaggucuaguagaccucuucguauuuucaaccucauucuacuuaauaucaauauuccuacaucuaguuaaaauaccaacacaccgucacauagucggaaaaucuugcccaaaaccacacagacuaaaccauaugggaauaugcucaugcgguuuauacaaacaaccaggaguaccaguaagauggaaacgauaa

SEQ ID NO: 5836 - RNA, 1476 nt, Artificial Sequence
  derived and/or modified protein sequence (opt6) from LASV(LM778-SLE-2012;Clade IV)__AIT17828__GPCstabilized
augggacaaauaguaacauucuuccaagaaguaccacacguaauagaagaaguaaugaauauuguacuuauagcacuauccauacuagcaguauuaaaaggcuuauauaauuuugcaacaugcggacucguaggacuagucacauucuuacuccuaugcggaagaucuugcacaaccucauuauacaaaggcgacuaugaauuacaaacacuugaacuaaacauggaaacacuaaauaugacaaugccacuauccugcacaaaaaacaacucccaccacuacauaaugguaggaaacgaaacaggacuagaauuaacacuaaccaacacauccauaauaaaucauaaauuuugcaacuuaagugaugcacacaaaaaaaacuuauacgaccacgcccuaaugucaauuauaucaaccuuccaucuaucaauacccaacuucaaccaauaugaagcaaugucaugugacuucaauggcggcaaaauaucaguccaauacaaucuaucacacucauacgcaggagacgccgcaaaucacuguggaacaguagcaaacggaguccuacaaacauucaugagaauggcauggggcgguucuuauauagcccuagacucaggauguggcaauugggacuguaucaugacaucauaccaauacuuaauaauacaaaacacaacaugggaagaucacugccaauuuucaagaccaucaccaaucgguuacuuaggacuacuaucacaacgcacacgcgacauauacaucucucgaagaagacgaggaacauucaccuggacccucucagacucagaaggaaaagacacaccaggaggcuacugccuaaccagauggaugcuaauagaagcagaacuuaaaugcuucggaaacacagccguagcuaaaugcaacgaaaaacacgacgaagaauucugcgauaugcuaagacuauucgacuucaacaaacaagccauucaaagacucaaagcacccgcccaaaugucaauucaacuaauaaauaaagcaguaaacgcacuaauuaaugaccaacuaauaaugaaaaaucacuuaagagacauaaugugcauaccauacuguaacuacucaaaauacugguauuuaaaucacacaacaacaggcaaaacaucauuaccaaaauguuggcuaguuucaaacggcucauaucucaacgaaacacacuuuuccgaugacauagaacaacaagcagacaauaugauaacagaaaugcuacaaaaagaguacauggaaagacaaggaaaaacaccacuuggacuagucgaccucuuugucuucucaacaucauucuaucuaaucucaaucuuuuuacaucuaguaaaaaucccaacacacagacacauaguaggaaaaucuugcccaaaaccccaccguuuaaaccauaugggaaucuguucaugcggacucuauaaacaaccaggcguacccgucaaauggaaaagauaa

SEQ ID NO: 5837 - RNA, 1476 nt, Artificial Sequence
  derived and/or modified protein sequence (opt6) from LASV(Mad39;Clade IV)__ANH09722__GPCstabilized
augggacaaauaguaaccuuuuuccaagaaguuccacauguaauagaagaaguaaugaacauaguccuaauagcacuauccauauuagccguacuaaaagguuuauacaauguagccacaugcggacucauaggccuuguaacauuucuacuccuaugcggacgcucaugcacaacaacacuauacaaaggaguauaugaacuacaagcacuagaacucaacauggaaacacuaaacaugacaaugccauuauccugcacaaaaaauaacucucaccacuauaucagaguuggaaacgaaacaggacuagaacuuacauuaacuaacacaucacuaauaaaccacaaauucugcaaucuaucugaugcacacaaaaaaaaccuuuacgaccacgcacuaaugucaauuauaucaacauuccaccuaucaauaccaaacuucaaucaauacgaagcaaugucuugcgacuucaacgauggaaaaauaucaguucaauacaaucuaucacacacauacgccggagacacagccaaccacuguggaacagucgcaaauggcguuuuacaaacauuuaugcgaauggcauggggaggaucuuacauagcacuagacucagguuguggaggaugggauugcauaaugacaucauaucaauaccuaauaauucaaaacacaacaugggaagaucacugccaauuuucaagaccauccccaauaggauaucuaggacuuuuaucacaaagaacgagagacauauacauaucacgaagaagaagaggaacuuucacauggacgcucuccgacuccgaagguaaagacacaccaggaggauacugcuuaacuagauggauguuaauagaagcagaauuaaaaugcuuuggaaauacagcaguagcaaaaugcaacgaaaaacaugaugaagaauucugugacaugcuucgacuauuugacuucaauaaacaagcaauacaaagacuaaaagcaccagcacaaaugucaauccaauuaauaaacaaagcaguaaaugcauugauaaaugaccaauuaauaaugaaaaaucaucuaagagacauaaugugcauaccauauugcaauuacucuaaauauugguaccuaaaccacacugucacuggaaaaaccucacuaccaaaauguugguuaguauccaacggcucauaccuaaacgaaacccauuucuccgaugacauagaacaacaagccgacaacaugauaacagaaaugcuccaaaaagaguacauggaaagacaagguaaaaccccuuuaggauuagucgaccuauucguauucucaacauccuucuaccuaauaucaaucuucuuacaucuuguaaaaauaccaacucaucgccacgucguuggaaaaccaugccccaaaccacaucgacucaaccauauggguauauguuccuguggcuucuacaaacaaccaggagucccaguacgauggaaaagauaa

SEQ ID NO: 5838 - RNA, 1476 nt, Artificial Sequence
  derived and/or modified protein sequence (opt6) from LASV(Mad41;Clade IV)__ANH09724__GPCstabilized
augggccaaauaguaacauucuuccaagaagucccacacguaauagaagaaguaaugaauauaguacuaauagcauuaaguauacuagccguauuaaaaggcuuauauaauguugcaacauguggacuuauagguuuaguaacauuucuucuuuuauguggacgcucaugcacaacaacacuauacaaaggaguauaugaauuacaagcacuagaauuaaacauggaaacacuaaacaugacaaugccauuaucaugcaccaaaaacgacagucaucacuauauaaugguaggaaacgaaacaggauuagaauuaaccuuaacaaacacauccauaaucucacacaaauucugcaacuuauccgacgcccauaaacaaaaccuauacgaccacgcacucaugaguauaauuucaacauuucaucuaagcauaccaaacuucaaccaauaugaagcaauguccugugacuucaacggcggcaaaauauccguacaauauaacuuaucacauacuuaugccggagaugcagccaaucacugcggaacaguagccaacggaguacuacaaacauuuaugcgaauggcauggggcggaucauacauagcacuagacucaggaugcggaggaugggacuguauaaugacaucauaucaauauuuaauuauacaaaauacaacuugggaagaucacugccaauuuuccagacccucaccaauagguuaccuaggccuucuaucacaaagaacuagagacauauacauaucucgccgaagaagaggaacuuuuaccuggacacuaucagauuccgaagguaaagacacaccagguggcuauugcuuaacaagauggaugcuaauagaagcagaacuaaaaugcuucggaaauacggcugucgcaaaauguaacgaaaaacacgaugaagaauuuugcgacauguuacgauuauucgacuucaacaaacaagcaauacaaagacuaaaagcaccagcccaaaugucaauacaacuuauaaauaaagcaguaaaugcauuaauaaaugaccaacuaauaaugaaaaaucacuuacgagacauaauguguaucccauacuguaacuacucaaaauauugguaccuaaaccauacuguaaccggaaaaacuagccuaccaaaauguugguuaguaaguaacggaucauaccuaaaugaaacacacuuuucagacgauauugaacaacaagcagauaauaugauaacagaaauguuacaaaaagaauacauggaaagacaaggaaaaacaccucuaggccuagucgaccuauuuguauucucuacaaguuucuaucuaaucucaauauuuuuacauuuaguaaaaauaccaacacaccgucacguaguaggaaaaccaugcccaaaaccacacaggcuaaaucauaugggaauuugcucaugcggauucuauggacaacccggaguacccguaagauggaaaagauaa

SEQ ID NO: 5839 - RNA, 1476 nt, Artificial Sequence
  derived and/or modified protein sequence (opt6) from LASV(Mad63;Clade IV)__ANH09728__GPCstabilized
augggccaaauaguaacauucuuucaagaaguaccacauguaauagaagaaguaaugaacauuguacuaauagcccuaucaguacuagcaguauuaaaagguuuauacaaugucgcaacaugcggacuaauaggacuaguaacuuuccuacuacuauguggaagaucauguacaacaacacuauacaaaggagucuaugaauuacaagcacuagaauuaaauaugggaacacuaaacaugacaaugccacuauccuguacaaaaaacaauagucaccacuauaucaugguuggaaacgaaacaggacuagaacuuacacuaacaaacacaagcauuauuaaccacaaauuuuguaaccuaucagacgcacacaaaaaagaccuauacgaccaugcucuaaugucaauaauauccaccuuccacuuaucuguaccaaacuucaaucaauacgaagcaaugucaugugacuucaacggaggaaaaauaucaguucaauauaacuuaagucaugcauacgcaggagacacugcuaaucacugcggaacuguagccaacggaguauuacaaacauucaugagaauggccuggggaggaucauacauagcucuagauucaggcugcgguggaugggauuguauaaugacaucauaccaauaucuaaucauacaaaacacaacaugggaagaccauugccaauuuucgagaccaucaccaauaggauacuuaggccuauuaucucaaagaacaagagauaucuacauaagucgaagaagaagaggaacauuuacuuggacacuaucagauagcgaaggagaauauacaccaggaggcuacugcuuaacuagauggauguuaauagaagcagaauuaaaaugcuucgggaacacagcaguagcaaaaugcaaugaaaaacacgacgaagaauucugugauaugcuuagauuauucgacuucaacaaacaagcaauccaacgacuaaaagcuccagcacaaaugucaauacaacuaauaaacaaagcagucaaugcacuaauaaaugaucaacuaauaaugaaaaaccacuuaagagacauaaugugcauacccuacugcaauuacucaaaauauugguaucuaaaccacaccguaacuggaaaaacaagcuuacccaaauguuggcuuguaucaaauggaucauacuuaaacgaaacccacuucagugacgacauagaacaacaagcagauaacaugauaacagaaaugcuccaaaaagaauauauggaaagacaaggaaaaacaccccuaggacucguagaccuauucgucuuuaguaccaguuuuuaccuuaucucaauauuccuacaccuaguaaaaauaccaacacacagacacguaguaggcaaaccaugcccaaaaccacacagacuaaaccauaugggcaucuguucaugcggauucuauaaacaaccuggaguaccagucagauggaaacgauaa

SEQ ID NO: 5840 - RNA, 1476 nt, Artificial Sequence
  derived and/or modified protein sequence (opt6) from LASV(Mad69;Clade IV)__ANH09730__GPCstabilized
augggacaaaucguaacauucuuucaagaaguuccacauguaauagaagaaguuaugaacauaguuuuaauagcacuaagcguauuagcaguacuaaaaggacuauacaacguagcuacaugcggacuaauaggacuaguaacauuccuccuauuaugcggaagaucaugcacaacuacauuauauaaaggagucuacgaauuacaagcccuagaauuaaacauggaaacuuuaaacaugacaaugccucuaucauguacaaaaaauaacucacaccauuacauaaugguaggaaaugaaacaggacuagaacuaacauuaaccaacacaucaauaaucaaucacaaauucugcaaucuauccgacgcacacaaaaaaaacuuauacgaccacgcacuaaugucaauaauaucaacuuuccacuuaucuauccccaauuucaaccaauacgaagcaaugucaugcgacuucaaccaaggaaaaauaagcguucaauacaaccuaucacacgcauacgcaggugaugcugcuaaccacugcggaacaguagcaaacgguguccuacaaacauucaugagaauggcauggggcggcuccuacaucgcacuagauucaggaugcggaggaugggauugcaucaugacaucuuaucaauaccuaauaauccaaaacacaacaugggaaaaccacugucaauucucaagaccauccccaaucggauauuuaggacuauuaucacaacgcacacgagacauauacauaucgagacgacgaagaggaacauucaccuggacacuaucugacucugaaggaaaaggcaccccaggaggcuacugucucacaagauggauguuaauugaagcugaacuaaaauguuucggaaacaccgcaguagcaaaaugcaacgaaaaacacgaugaagaauuuugcgacaugcucagacuauucgacuucaacaaacaagcuauacaacgauuuaaagcaccagcacaaauguccauacaauuaauaaauaaagcaguaaaugcacuaauaaacgaccaacuaaucaugaaaaaucaccuaagagacauaaugugcauaccauacugcaauuauucaaaauauugguaucuaaaucauaccguaacuggaaaaacaucauuaccaaaaugcuggcuugucucaaacggaucuuacuuaaacgaaacacacuucucagacgauaucgaacaacaagcugacaacaugaucacagaaaugcuacaaaaagaauauauggaaagacaaggccgaacaccacuaggucuaguagaucucuuuguauucucaacaucauucuaucuaauaagcauauuccuacauuuaguaaaaaucccaacacaccgccacguaguaggaaaaccauguccuaaaccacacagacucaaccacaugggcauaugcuccugcggcuucuauaaacaacccggcguaccaguaagauggaaaagauaa

SEQ ID NO: 5841 - RNA, 1476 nt, Artificial Sequence
  derived and/or modified protein sequence (opt6) from LASV(Mad83;Clade IV)__ANH09732__GPCstabilized
augggacaaaucguaacauuuuuucaagaaguaccacauguaauagaagaagucaugaacaucguccucauagcccuaucuauauuagcaguauuaaaaggcguauacaacguagcaacaugcggcuuaauaggauuagucacuuuccuacuauuaucggguagaucaugcaccacaacaauauauaaaggaguauaugaacuacaagcacuugaacucaauauggaaacccucaacaugaccaugccacucucauguacaaaaaacaauucacaucacuauauaaugguaggaaacgaaacaggacuagaacuaacauuaacaaacacaucuaucauaaaccauaaauucugcaaccuaucggaugcccacaaaaaaaaccuauaugaccacgcauuaaugagcauaaucucaacauuccacuuaucaauaccaaauuucaaucaauaugaagcaaugucaugugacuucaacggcggaaaaauuucaguacaauacaaucuaucacacacuuacgcaggagacgcagcaaaucacugugguacagucgcaaauggcguacuacaaacauucaugcgaauggcauggggaggaucuuacauagcauuagacuccggcugcggcggcugggacugcauaaugacaucauaccaauacuuaauaauacaaaacacaacaugggaaaaucauugucaauucuccagaccaucaccaauuggauacuuaggccuguuaucacaaagaacaagagauauauacauaucaagaagaagacgaggcaccuuuacauggacauuaucagauucagaaggaaaagacaccccaggaggauauugcuuaaccagauggaugcucauagaagcagaacuaaaaugcuuuggaaacaccgcagucgccaaaugcaacgaaaaacacgacgaagaauuuugugacauguuaagauuauucgauuuuaacaaacaagcaauucaaagacuaaaagcaccagcucaaauguccauacaacuaaucaacaaagcagucaacgcauuaauaaacgaccaacuaauaaugaaaaaccaccucagagacauaauguguauacccuacugcaauuauucaaaauacugguaucuaaaucacaccguaacaggaaaaaccucauuacccaaaugcugguuaguauccaacggcucauaccuaaaugaaacacauuucucagacgauaucgaacaacaagcugauaacaugaucaccgaaaugcuacagaaagaauacauggaaagacaaggaaaaacaccacuuggccuaguagacuuauucguauucucaacaucuuuuuacuuaauaucaauauuccuacauuuagucaaaauacccacucaucgacauauaguaggaaaaccaugcccaaaaccucauagacuaaaccacaugggaauaugcagcuguggcuucuacaaacaacccggaguacccguaagauggaaaagauaa

SEQ ID NO: 5842 - RNA, 1476 nt, Artificial Sequence
  derived and/or modified protein sequence (opt6) from LASV(NL;Clade IV)__AAO59512__GPCstabilized
augggacaaauaguaacauuuuuccaagaaguuccacacguaauagaagaagucaugaacauaguacuaauagcauuaucaauccuugcaguacugaaaggacuuuauaacuuugcaaccugcggacuuguaggucuagucgcauuccuacuacuuuguggccgcucaugcacuucaucccuauacaaaggcguauacgaacuacaaacauuagaacuaaauauggaaaccuuaaacaugacaaugccccuaucuuguacaaaaaauaacucccaccacuacauaagaguaggaaaugaaacaggccuagaauuaacacuaacaaacacaucaauaauaaaccacaaauucugcaaccuauccgacgcacacaaaaaaaacuuauacgaucacgcauuaaugucaauuaucaguacauuccacuuauccauaccuaauuucaaccaauacgaagccauguccugcgacuucaacggaggaaaaauaucaguacaauacaaucuaucacacucuuaugcaguagaugccgccaaacacuguggaacaguagcaaacggagucuuacaaacauuuaugcgcauggcauggggaggcucauauauugcacuagauucaggcugcggaagaugggacugcaucaugacaucauaccaauacuuaauuauacaaaacaccacaugggaagaccacugccaauucucccgaccaucaccaauuggauaccuaggucuacuaucccaaagaacaagagauauauacauuuccagaagacgaagaggaacuuucaccuggaccuuaucagauucagaaggcaaagauacaccaggaggcuacugucuaacaagauggauguuaauagaagcagaacucaaaugcuuuggaaacaccgcaguagccaaaugcaacgaaaaacaugaugaagaauucugugacauguuaagacuauucgacuucaauaaacaagcaauacaaagacuuaaaacacccgcacaaauguccauucaacuaaucaacaaagcaguaaacgcacucaucaacgaucaauuaauaaugaaaaaccaccuaagagacauaauguguauaccauauuguaacuacucacgauacugguaucuaaaucauacaacaacagguaaaacaucacuacccaaauguugguuaguaucuaauggauccuacuuaaaugaaacccgauuuuccgacgacaucgaacaacaagcagauaauaugauaacagaaaugcuacaaaaagaauacauggaaagacaaggcaaaaccccacuaggauuaguagaccuauucguauuuucaacaucauucuaucuaauaucaauauucuuacacuuagucaaaauaccaacucacagacacauagucggaaaauccuguccuaaaccacacagacuaaaccacaugggaauaugcagcuguggauuauauaaacaacccggaguacccguaaaauggaaacgcuaa

SEQ ID NO: 5843 - RNA, 1476 nt, Artificial Sequence
  derived and/or modified protein sequence (opt6) from LASV(Z0947-SLE-2011;Clade IV)__AIT17840__GPCstabilized
augggacaaauaguaacauucuuccaagaaguaccacacguaauagaagaaguaaugaauaucguucucauagcucuuuccauccuagcuguacuaaaaggauuauauaauuucgccacaugcggccuaguaggcuuaguaacauucuuauuacucugcgguagauccugcacaauaucacuauacaaaggaguauacgaauuacaaacccuagaacuuaacauggaaacacuaaacaugacaaugccauuauccuguacaaaaaacaauucucaccacuacauaaugguaggaaacgaaacaggucucgaacuaacucucacaaauaccuccauaauaaaccacaaauucugcaaccucucugaugcucacaaaaaaaaccuauacgaccaugcucuaauguccauaauaucaacuuuucauuuaucaaucccaaacuucaaccaauacgaagcaauguccugugacuuuaacggaggcaaaauuucagugcaauacaacuuaucacacucauacgccggagacgcugcuaaucacugcgguacaguagcaaacggaguauuacaaacauuuaugcgaauggcauggggaggaagcuacaucgcacucgacuccggaugugacagaugggacuguauaaugacaucauaccaauaccuaauaauacaaaacacuacaugggaagaccacugccaauuuucacgcccaucaccaaucggauacuuaggacuacuaucacaaagaaccagagacauauacauuuccagaagaagaagaggaacauucaccuggacccuaucagauucagaaggcaaagauacucccgguggauacugccuaacaagauggaugcuaauagaagcugaauuaaaaugcuucggaaacacagcaguagcaaaaugcaaugaaaaacacgaugaagaauucugcgauaugcuccgccuuuuugacuucaauaaacaggcaauacaacgauuaaaagcacccgcacaaaugaguauacaacuaauaaacaaagcaguaaacgcacuaauaaacgaucaauuaauaaugaaaaaucaucucagagacaucaugugcauaccauauugcaacuauagcaaauacugguacuuaaaccacacaaccacaggcaaaacaucacuaccaaaaugcuggcuaguaucuaacggaucauacuuaaaugaaacacauuucagcgaugauauagaacaacaagcagacaacaugauaacagaaaugcuacaaaaagaauacauggaacgacaaggaaaaaccccauuaggacuaguagacuuauucguauucaguacaucauuuuaccucauaaguaucuuccuacaccuugucaaaauaccaacacaucgacacauaguaggaaaaccaugccccaaaccacauagacuaaaccacaugggaauuugcuccuguggacuauauaaacaacccggcguaccaguaaaauggaaacgauaa

SEQ ID NO: 5844 - RNA, 1476 nt, Artificial Sequence
  derived and/or modified protein sequence (opt6) from LASV(Z0948-SLE-2011;Clade IV)__AIT17844__GPCstabilized
augggacaaauuguaacuuucuuccaagaaguaccacauguaaucgaagaaguaaugaacauuguacuaauagcacuaucaauacuagcaguacucaaaggccuauauaauuucgccacaugcggacucguaggccucgucacuuuucugcuacuaugcggacgaagcugcacaauauccuuauauaaaggcgucuacgaauuacaaacucuugaacuaaacauggaaacacuaaacaugacuaugccacuauccugcacuaaaaacaacucacaccacuacauaaugguaggcaaugaaacaggacuagaacuaacuuuaacaaacaccuccaucauaaaucacaaauucugcaaucuuagugacgcccacaaaaaaaauuuauacgaucacgcacucaugaguauaauaucaacauuucaccuaucaauaccaaauuucaaccaauaugaagcaaugucaugugacuucaacggaggaaaaauaucaguacaauacaaccuaucccacucauacgcaggcgaugcagccaaucacuguggcacuguagcaaauggaguacuacaaacauucaugagaauggcauggggaggaucauauauagcacuagauucaggaugcgauagaugggacugcauuaugacaucauaccaauaccuaaucauacaaaacaccacaugggaagaccauugccaauucuccagaccaucaccaaucggauaccuaggacuacuaucacaaagaaccagagacauauacauauccagaagaagacgaggcacauucacauggacuuuaucugauucagaaggaaaagacacccccggaggauauuguuuaacaagauggaugcuaaucgaagccgaacuaaaaugcuuuggaaacacagcaguagcuaaaugcaaugaaaaacaugaugaagaauucugcgacauguuaagacuauuugauuuuaacaaacaagcaauucaaagacucaaagccccugcacaaaugucuauacaauuaaucaaccgagcaguuaacgcacuaauaaacgaccaacucaucaugaaaaaccacuuaagagacauaauguguauaccauacugcaauuacucuaaauauugguaccuaaaccacaccacaacaggcaaaacguccuuaccaaaaugcuggcuugucuccaauggaucuuaucucaacgaaacacacuuuucagacgacaucgaacaacaagcugauaauaugaucacagaaaugcuucaaaaagaauauauggaacgacaagguaaaacaccacuaggacuagucgaccuauucguauucagcacuuccuucuaucuaauaucaauauuuuuacacuuaguaaaaauaccaacacauaggcacauaguaggaaaaccauguccaaaaccccacagacuuaaccacaugggaauauguucaugcggauuauacaaacaacccggaguuccaguuaaauggaaaagauaa

SEQ ID NO: 5845 - RNA, 1476 nt, Artificial Sequence
  derived and/or modified protein sequence (opt6) from LASV(Z148;Clade IV)__AAT49008__GPCstabilized
augggacaaauaguaacauucuuccaagaagucccacauguaauagaagaaguaaugaauauugucuuaauagcacuaucaauacuagcuguacuaaaaggauuauacaacgucgcaacauguggauuaauaggucuaguuacauuccuauuucuaugcggaagaucaugcucaacaacacuauacaaaggcgucuacgaacuacaaacucucgaacuaaauauggaaacccugaacaugacuaugccacucucaugcacaaaaaacaauucacaccacuacauaauggugggaaaugaaacaggacucgaacuaacauuaacaaauacaucuauaaucaaccacaaauucugcaacuuauccgacgcacauaaaaaaaacuuauacgaccauacauuaaugucuauuaucucuaccuuccacuuauccaucccaaauuucaaucaauacgaagcaaugucaugcgauuuuaacggaggaaaaauaucaguacaauacaaccuaucacauucuuacgccguagaugcagcaaaccauuguggaacaguagcuaacggaguccuacaaacuuucaugagaauggcauggggaggcucauacauagcauuagacuccggauguggaaauugggauugcaucaugacaucauaccaauaccuaauaauacaaaacacaacaugggaagaccacugucaauuuucaagaccuucaccaauaggauaucuaggauuauuaucucaacgaacaagagacauauacauaagucgacgacgaagaggaacauucaccuggacacuaucugacagcgaaggaaaagauaccccuggaggcuacugccuaacacgauggauguuaauagaagcugaauuaaaaugcuuuggcaauacagcuguagcaaaaugcaacgaaaaacacgaugaagaauucugcgacaugcuacgacuauucgacuucaacaaacaagcaauacaaagacuuaaagcaccagcacaaaugucaauccaacuaauaaauaaagcagucaaugcuuuaauaaaugaccaauuaauaaugaaaaaccaccuacgagacauaaugugcauaccauacugcaacuacucuagauacugguauuuaaaucacacaguaaccggaaaaaccucacuaccaaaaugcugguuaguaucaaacggcucauacuuaaacgaaacacacuucucagacgacauagaacaacaagccgauaacuuaauaacagaaaugcuacaaaaagaauacauggaaagacaaggaaaaacacccuuagguuuagucgaccucuuuguauucuccacaagcuucuaccucauaucaauauuccuucacuuaguaaaaaucccuacacaucgacauauaguaggaaaaccaugcccaaaaccacauagacuuaaccauaugggaauaugcucauguggaguauauaaacaaccaggcguaccaguacguuggaaacguuaa

SEQ ID NO: 5846 - RNA, 1476 nt, Artificial Sequence
  derived and/or modified protein sequence (opt6) from LASV(Bamba-R114;Clade V)__AHC95555__GPCstabilized
augggacaaauaguaacauucuuccaagaaguuccccacguaauagaagaagucaugaacauaguacuaauagcacucucaauacuagccguuuuaaaaggacuauacaacauagcaacauguggacuaauaggacuggucaccuuccuucuacuaugcggacgcucaugcucaucaaaccuauacaaaggaguauacgaauuacaaucacuagacuuaaacauggaaacacucaacaugacuaugccacuaucaugcaccaaaaacaacagccaccauuauauuagagccggaaacgaaacaggacuagaacuaacacuuacaaacacaucucuaauuaaccacaaauucugcaaccuaucagaugcucauaaaaaaaaucuauaugaccacacacuaaugucaauaauauccacauuucacuuaucuauaccaaacuucaaccaauaugaagcaaugucaugcgacuucaauggaggaaaaauaucaguccaauacaaccuaucacacgcauacgccauagaugcagcagaacacugcggaacuguugccaauggaguacuacaaacauuuaugagaauggcauggggaggauccuacauagcacuugauucaggcugcggaaauugggacuguaucaugacaucauaucaauacuuaauaauacaaaacacaaccugggaagaccacugccaauuuucucgaccauccccaauagguuaccuaggucuacucucucaacgaacaagagacauauacaucucaagaagaagaagaggaacauucacauggaccuuaagcgacagugaaggaaaugcaacucccggaggauacugccuuacuagauggaugcucauagaagcagaacucaaaugcuuuggaaacaccgcuguagcaaaauguaaugaaaaacacgacgaagaauucugcgacauguuacgccuauucgauuucaauaaacaagcaaucucacgccuaaaaucaccagcacaaaugucaauccaacuaauaaacaaagcaguaaaugcccuaauaaaugaccaacucaucaugaaaaaccaccuaagagacauuaugugcauaccauauugcaacuacucaaaauauugguaucuaaaccacaccauaacaggccgaacaucauuacccaaaugcuggcuagucucaaacggaucauacuuaaaugaaacacacuucucagacgacaucgaacaacaagcugacaauaugaucacagaaaugcuacaaaaagaauacauggaacgacaaggaaaaaccccccuaggucuagucgacuuauucguauucuccacaucauucuaccuaauauccauuuuccuucaccuaguaaaaauucccacacacagacacauaguaggaaaaccuugucccaaaccacacagacuaaaccacaugggcauaugcagcugcggauuauacaaacaaccaggaguaccucucaaauggaaaagauaa

SEQ ID NO: 5847 - RNA, 1476 nt, Artificial Sequence
  derived and/or modified protein sequence (opt6) from LASV(Komina-R16;Clade V)__AHC95557__GPCstabilized
augggacaaauaguaacauuuuuccaagaaguaccucacguaauagaagaaguuaugaacaucguuuuaaucgcauuaucaauacucgccguauuaaaaggauuauacaauaucgcaacaugcggacuaauaggccuagucacauuuuuccuacuauguggaagauccuguucaucaaaccuauacaaaggcguuuacgaauuacaaucacuagaccuuaacauggaaacacuaaacaugacaaugccauuauccugcacuaaaaacaacucacaucacuacauaagaguagguaaugaaacaggccucgaacucacccuaacaaauacaucacuacuaaaccacaaauuuuguaaucuaucagacgcccauaaaagaaacuuauaugaccacgcacuaaugucuauaauaaguacauuccacuuaucaauaccaaauuuuaaccaauacgaagcaaugucaugcgauuucaacggaggcaaaauaaccguacaauacaaucucucucacucauacgccggugauacagccaaacauugcggaacuauugcaaauggaguacuacaaaccuuuaugcgaauggcuuggggcggaucauacauugcccuagacucaggaugcggaaacugggacugcauaaugacaucguaccaauacuuaauaauacaaaacacaacgugggaagaccacugccaauuuuccagaccaucaccuauagguuacuuaggacuauuaucacaaagaacaagagacauauauauaucuagaagaagaagaggaacauucacauggacacuaucugauucagaaggaaacgcaacaccaggagguuacugucuaacaagauggaugcuaauagaagcagaauuaaaaugcuucggaaauacagcaguagccaaaugcaaugaaaaacaugacgaagaauuuugcgacaugcuaagauuauuugauuuuaacaaacaagccauaucaagacuuagaucuccagcacaaaugucuauacaauuaaucaauaaagcagucaacgcacuaauaaacgaccaauuaauaaugaaaaaccaccuacgagauauaaugugcauuccauauuguaauuacuccaaauacugguauuuaaaccauacaguaaccggaagaacaagccuaccaaaaugcugguuaguaucaaacggcuccuaucuaaaugaaacacacuucucagaugauauugaacaacaagcugacaauaugauaacagaaauguuacaaaaagaauacauggacagacaaggcaaaacaccacuaggauuaguagaccuauuuguuuucucaacaucauucuaucuaaucucaauuuuccuccauuuagucaaaauacccacacauagacauauuguaggaaaaccaugccccaaaccacauagauuaaacagaaugggaauaugcucauguggccuauacaagcaaccaggaguccccguaaaauggaaacgcuaa

SEQ ID NO: 5848 - RNA, 1476 nt, Artificial Sequence
  derived and/or modified protein sequence (opt6) from LASV(Ouoma-R123;Clade V)__AHC95559__GPCstabilized
augggacaaaucauaacauuuuuccaagaaguaccacacguuauagaagaaguaaugaacauaguauuaauagcauuaucaauccuagcaguauuaaaaggacuauacaauauagccacaugcggacuaaucggccuaguaacauuucuacuacuaugcggaagaucaugcuccucuucauuauauaaaggaguauaugaacuacaaucacuagaccuaaacauggaaacauuaaacaugaccaugccacucucaugcaccaaaaacaacucucaucauuacaucagaguaggaaacgaaacaggacuagaauuaacacuuacaaacacaucacuaauaaaccauaaauucugcaaccuauccgacgcucacaaaaaaaauuuauaugaccaugcacuaaugucaauaauauccaccuuccaccuauccauaccaaauuuuaaccaauaugaagccauguccugcgacuuuaauggagguaaaaucucaguccaauacaaucucucacacgcauaugcaauagaugcagcaucacauugcggaacaguagccaauggaguacuacaaaccuucaugcgcauggccuggggaggaucauacauagcacuagacucuggaugcgguaauugggacuguauaaugacuuccuaccaauauuuaauaauacaaaacacaacaugggaagaccauugucaauucucacguccauccccuauaggauaucuaggucuacucucacaaagaacacgugacauauacauuucacgcagaagaagaggaacuuucaccuggacacuaucugauucugaaggcaacgccacaccaggaggauacugccuaacaagauggaugcuaauagaggcagaauuaaaaugcuucggaaacacagcuguagcuaaaugcaacgaaaaacacgaugaagaauuuugcgauauguuacgacuauucgauuucaauaaacaagccauaucaagacuaaaaucuccagcucaaaugucuauacaacuaauaaacaaagcuguaaacgcccuaaucaacgaccaauuaauaaugaaaaaccaucuaagagacauaaugugcauuccauacuguaauuacucaaaauauugguauuuaaaccacacugucacuggcaaaaccucccuaccaaaaugcugguuaguaucaaacggaucauacuuaaacgaaacacacuuuucagacgacaucgaacaacaagcagauaacaugauaacagaaauguuacaaaaagaauacauggaaagacaaggaaaaaccccauuaggacuagucgaccucuucguauucuccaccucauuuuaccucauaaguauauuccuacaccuaguaaaaauaccaacacacagacacauuguaggaaaaccuugcccaaaaccacaucgauuaaaccauaugggcauauguucaugcggacuuuauaaacaaccaggaguaccagucaaauggaaaagauaa

SEQ ID NO: 5849 - RNA, 1476 nt, Artificial Sequence
  derived and/or modified protein sequence (opt6) from LASV(Soromba-R;Clade V)__AHC95553__GPCstabilized
augggacaaauuguaacauucuuucaggaaguaccccacguaauugaagaaguaaugaacauaguauuaauugccuuaucaaucuuagcaguacuaaaaggacucuauaauauagcaacauguggauuaauaggccucguaacauucuuccuacuaugcggaagauccugcucaucaaacuuauacaaaggcguauacgaacuacaaagcuuagaccuaaacauggaaacccuaaacaugacgaugccacuaucuugcacuaaaaacaacucacaccacuacauaagagucggaaacgaaacaggacuagaacuaacauuaacaaacacaagucuauuagaccauaaauucugcaauuuaucagacgcacauaaaaaaaaucuuuaugaucacgcauuaaugucaauaaucucuacauuccaccuaucaauacccaacuuuaaccaauacgaagcaaugucuugcgacuucaacggaggaaaaauuacaguacaauacaaccucucacacucauacgcaggagaugccgccagacacugcggaacaauagcaaauggaguacuacaaacauuuaugcgaauggcuuggggaggaucauacauagcucuagacagcggcuguggcaacugggacuguauaaugacaagcuaccaauaccuaauaauccaaaacacaacaugggaagaccacugucaauucagucguccaucuccuaucggauacuuaucucuacuaucacaaagaacaagagacauauacaucucaagaagaagacgaggcacauucacauggacacuaucagauucagaaggaaacgcuaccccaggaggcuacugccuaacaagauggauguuaauagaagcagaguuaaaauguuucggaaacacagcaguagcaaaaugcaacgaaaaacaugacgaagaauucugcgacauguuaagacuauucgauuucaacaaacaagcaauauccagacuaagaucaccagcacaaaugucaauacaauuaauaaauaaagcgguaaacgcucuaauaaacgaccaacuuauaaugaaaaaucaccuacgagauauaaugugcauuccauacugcaauuacuccaaauauugguacuuaaaucacaccguuacaggaagaacaucacucccaaaauguuggcuaguaucaaauggaucauaucuaaaugaaacacacuucucagaugauauagaacaacaagccgacaacaugauaacagaaaugcuacaaaaagaauauauggaccgacaaggaaaaacaccacuaggacuaguagacuuauuuguauucucaacaaguuucuaccuaauaucaaucuucuuacacuuaguaaaaauacccacacauagacacauagucggaaaaccuugcccaaaaccacauagauuaaacagaaugggaauaugcuccuguggauuauauaaacaaccaggaguaccaguaaaauggaaaagauaa

SEQ ID NO: 5850 - RNA, 1473 nt, Artificial Sequence
  derived and/or modified protein sequence (opt6) from LASV(Alzey;Clade VI)__SCA79105__GPCstabilized
augggacaaauaauaacauucuuccaagaagucccccacgucauagaagaaguaaugaacauaguauuaaucgcacuaucacuacucgcaauacuaaaaggagucuauaaugucgcaacaugcgguauuaucggucuagucacauuucuauuccuaugcggacguuccugcucacuaauuuacaaaggaucuuacgaacuacaaacacuagaauuaaauauggaaacauuaaauaugacaaugccacuauccuguaccaaaaacucaucacaucacuacauucgaguaggaaacgaaacaggacuagaacuuacacuaacuaacacaucaauaaucaaccacaaauucugcaaucuauccgacgcacacaaaagaaacuuauacgaccacgcacuaaugucaauauuaucaacauuccaucuaucuaucccaaauuucaaucaauacgaagcaaugucaugcgacuucaauggaggaaaaauaucaguacaauacaacuuaucacacgcauacgcuguagacgcagcagaacacugcggaacaguugcaaacggcguucuucaaacauucaugagaauggccuggggcggaucauauauagcacuagauucaggcugugguaacugggacugcauaaugacaucauaccaauaccuaauaauacaaaacacuacaugggaagaccacugucaauucucacgacccuccccaauaggauacuuaggacuuuuaucacaacgaacaagagacauauauaucuccagaagaagaagagguacauucacauggacccuaucagacuccgaaggaaacgaaacuccaggaggauauugccuaacaagauggaugcuaauagaggcagaauuaaaaugcuuuggaaauacagcagucgcaaaaugcaaugaaaaacacgacgaagaauuuugcgauaugcuccgauuauucgacuucaacaaacaagcaauacaaagacuaaaaucucccgcacaaaugucuauacaacuaauaaacaaagcugucaacgcccuaauaaacgaucaauuaauaaugaaaaaccacuuaagagacaugaugugcauaccauacuguaauuacucaaaauauugguaccuaaaucacacaucaucugguagaacaucauuacccaaaugcuggcuuguaucaaacggaucauaucuaaacgaaacccauuucuccgacgacaucgaacaacaagcagacaacaugaucacagaaaugcuacaaaaagaauacauagaccgacaaggaaaaaccccacuaggccuaguagaccucuucguauucucaaccagcuucuacuuaauaucaauuuuccuccauuuaauaaaaauacccacacacagacauauaguaggaaaaccauguccaaaaccacaccgauuaaaccacaugggaauauguucaugcggacuuuacaaacaaccuggaguuccaacaagauggaaacgauaa

SEQ ID NO: 5851 - RNA, 1473 nt, Artificial Sequence
  derived and/or modified protein sequence (opt6) from LASV(Lassa/H.sapiens-wt/TGO/2016/201600568;Clade VI)__AVN98153__GPCstabilized
augggccaaauaauaacauucuuucaagaaguuccacacgucauagaagaagucaugaacauaguacuaauagcauuaucauuacucgcaauacucaaagguguauacaacguagcaacaugcggaauaaucggauuaguaacauucuuauucuuaugcggaagaagcuguucauuaaucuacaaaggaucauacgaacuacaaacacuagaacucaacauggaaacauuaaacaugacaaugccauuaucaugcacuaaaaacagcucacaccacuacauacgaguuggaaacgaaacaggccuagaauuaacauuaacaaauacaucaauaauaaaccauaaauucugcaaccuaucagacgcccauaaacgaaaccuauaugaccacgcacuaaugucaauacuaucaacauuccaccucucaauacccaacuuuaaccaauaugaagcuaugucaugugacuucaaugguggaaaaauaucaguacaauacaaucuaucccaugcauacgcuguagacgcugccgaacacugcggaacaguagcaaauggugucuuacaaacauucaugcgaauggcauggggcgguucauacauagcacuagacucuggaugcggaaauugggacugcauaaugacaagcuaccaauacuuaauaauacaaaacacaaccugggaagaccacugccaauuuucaagacccucaccaauaggauaucuaggacuacuaucacaaaggacaagagauauuuacauauccagaagaagaagaggcacauucacauggacccucucugacucagaagguaacgaaaccccaggcggauacugccuaacaagauggauguuaauagaagcagaauuaaaaugcuucggaaacacagcaguagcaaaaugcaacgaaaaacacgacgaagaauuuugcgacauguuaagacuauucgacuucaacaaacaagcaauacagagauuaaaaucaccagcacagaugucaauacaguuaauaaacaaagccguaaaugcacuaauuaaugaccaacuaauaaugaaaaaucaccuacgagacaugauguguauaccauacugcaacuacucaaaauacugguaucuaaaucacaccagcagcggacgagcaucauuacccaaaugcugguuaguaucuaacggaucauaucuaaacgaaacacacuucuccgacgacauagaacaacaagcagacaacaugauaacagaaauguuacaaaaagaauacauagauagacaaggcaaaaccccauuaggauuaguagacuuauuuguuuucucaaccucauucuaucuaauauccauauuccuacaucuaauaaaaauaccaacacaccgacacauaguaggaaaacccugccccaaaccucaccgcuuaaaccacauggguauaugcagcugcggacuauacaaacaacccggaguacccacccgauggaaacguuaa

SEQ ID NO: 5852 - RNA, 1473 nt, Artificial Sequence
  derived and/or modified protein sequence (opt6) from LASV(NIGERIA IKEJI;Clade II)__AMZ00373__GPCstabilized
augggucaaauaauaacauuuuuccaagaaguaccacauguaauagaagaaguuaugaacaucguacuaauagcccuaucucuacuagcaauauuaaaaggcauauacaacguugcaacuuguggacuauucggacuaauaucauuuuuauuccuuugcggccgaucaugcuccacaauguauaaaggaguuuacgaauuacaaacccuagaauuagacauggcaaaccuaaacaugacaaugccacuaucaugcacaaaaaacaauucccaccauuauauaaugguaggaaaugaaacaggauuagaacucacacuaacaaaccaaucaauaauaaaccacaaauuuuguaaccucucagaugcccacaaaaaaaacuuauacgaccauacauuaauguccauaauaucaacauuccaccuauccauacccaacuuuaaccaauacgaagcuaugucaugugacuuuaacggcggaaaaaucuccguacaauacaacuuaucucacucauacgcaguagacgccgcaaaccacugcggaacaguagcaaauggaguucuacaaacauuuaugagaauggccuggggaggaucauacauagcauuagacucaggaugcggcaauugggacugcauaaugacaucauaccaauaccuaauaauccaaaacacaacuugggaagaccacugucaauucuccagaccaucaccaauuggauaccuaggcuuacuuucacaaagaacuagagauauauacauaucuagaagaaggagaggcacauucacuuggacacuaucugacucagaaggcaaugacgcaccaggcgguuauugucuaacaagauggaugcuaauagaagcagaauuaaaauguuucggaaauacagcuauagcaaaaugcaacgaaaaacacgaugaagaauucugcgacauguuaagauuauuugauuucaacaaacaagcaauaaaacgauuaaaagcaccugcacaaaugucaauccaacuaaucaacaaagcaguaaaugcacuaauaaaugaccaacuaaucaugaaaaaccaccuaagagauauaauguguaucccauacugcaacuacucaaaauacugguaccuaaauaacacaguaaccggcaaauccucccucccaaaaugcuggcucguaucuaacggcaguuaccuaaacgaaacccacuucuccgaugacaucgaacaacaagcagacaacaugauaacugaaaugcuacaaaaagaauacauggacagacaaggaaaaacaccauuaggauuaguagauuuauucguauucucaacaucauucuaccuaaucucaaucuuccuucauuuaguaaaaauaccaacacaccgacacauuacaggaaaaccaugcccaaaaccccacagacuaaaccacaugggaauaugcucauguggacuuuacaaacaaccaggggucccuguaaaauggaaaagauaa

SEQ ID NO: 5853 - RNA, 1476 nt, Artificial Sequence
  derived and/or modified protein sequence (opt11) from LASV(Josiah;Clade IV)__NP_694870__GPCstabilized
augggccaaaucguaaccuucuuccaagaagucccccacgucaucgaggaagucaugaacauaguccucauagcgcucucaguacucgccguccuaaaaggccucuacaacuucgcaaccugcggacucguaggacugguaacauuccuucuacuaugcggaagaucaugcacuaccucacuauacaaaggagucuacgaacuacaaacccuagaacugaacauggaaacccucaacaugaccaugccccuauccugcaccaaaaacaacagccaucacuacauaaugguaggcaacgaaaccggccuugaacuaacccuaacaaacacauccaucauaaaccacaaauucugcaaccucuccgacgcccacaagaaaaaccucuacgaccacgcucucaugaguaucauauccaccuuucaccuguccaucccaaauuuuaaccaguaugaagccauguccugcgacuucaacggcggaaaaaucuccguacaauacaaccucucccacuccuacgccggcgacgcagccaaccacugcggcaccgucgccaacggcguccuccagaccuucaugcgaauggccuggggaggcuccuacaucgcacucgacuccggaugcggcaauugggacugcaucaugaccuccuaccaauaccucaucauccaaaauaccaccugggaagaccacugccaauucucccgcccaucccccaucggauaccucggacuacuaucccaacggacccgcgacaucuacaucagccgacguaggcgcggaacauucaccuggacgcuaagcgacuccgaaggcaaagacacccccggaggcuacugccugacccgcuggaugcuaaucgaagcagaacuaaaaugcuucggcaacaccgccgucgccaaaugcaacgaaaaacacgacgaggaguucugugacaugcuacgccucuucgacuucaacaaacaagccauacagcgacucaaagcaccggcccaaaugagcauccagcuaaucaacaaagccgucaacgcacucauaaacgaccagcucauaaugaaaaaccaccuacgcgacaucaugugcauccccuacugcaacuacucaaaauacugguaccugaaccacacaacuaccggccgcacaucccucccaaaaugcugguuagucuccaacggcucauaccucaaugaaacccacuucagcgacgacaucgaacaacaagccgacaacaugaucacagaaaugcuccaaaaagaauacauggaacgacaaggaaaaacaccccucggccucgucgaccuauuugucuucuccacaucguucuaccuaauauccaucuuccuccaccucguaaaaauccccacccaucgccacaucgucggcaaauccugccccaaaccacaccgccucaaccauaugggcaucugcuccugcggucucuacaaacaacccggcguucccgucaaauggaaacgcuaa

SEQ ID NO: 5854 - RNA, 1473 nt, Artificial Sequence
  derived and/or modified protein sequence (opt11) from LASV(LP;Clade I)__AAF86701__GPCstabilized
augggccaaauaauaacauucuuccaagaagucccccacgucaucgaagaagucaugaauaucguacucaucgcccucucgcuccucgcuauccugaaaggccucuacaacaucgccacaugcggcaucauaggccucgucgccuuccuauuucucugcggcaaaucuugcucccucacccuaaaaggaggcuacgaacuccaaacacuagaacucaacauggaaacccucaauaugaccaugccccuuuccugcaccaaaaacuccucccaccacuacauccgcguaggcaacgaaaccggccucgaacucacacucaccaacacaagcaucaucaaccacaaauucugcaaccugucugacgcucacaagaaaaaucuuuacgaucacgcacucaugucgaucauaucaacauuccaccucucgauccccaacuucaaccaauacgaagccauguccugcgacuucaacggcggcaaaaucagcguccaauacaaccucucccacuccuacgccggcgacgcagcagaacacugcggcaccguggcgaacggaguacuccaaaccuucaugcgcauggccuggggcggacgcuacauagcccucgacuccggcuguggcaacugggacugcaucaugaccuccuaccaauaccucaucauccagaauaccaccugggaagaccacugccaauucucccgccccucaccaauaggcuaccucggccuccuaucccaacgaacacgcgacaucuacaucucaagacgcagacgcggcaccuucaccuggacccucucagacucugaaggcaacgaaacccccggaggcuacugccucacacgauggaugcucaucgaagccgaacucaaaugcuucggaaacaccgccguggccaaaugcaacgaaaaacacgacgaggaguucugcgacaugcuccgacucuucgacuucaacaaacaagccauacgccgacuaaaagcccccgcgcaaaugagcauccaacucaucaacaaagccgucaacgcccucaucaaugaucaacucaucaugaaaaaccaccuccgcgacauaaugugcaucccauacugcaacuacucaaaauacugguaccuaaaccacacuuccucaggacgcaccucacuccccaaaugcuggcucaucuccaacggcuccuaccuuaacgaaacacaguucucggacgacaucgaacaacaagcagacaacaugaucaccgaaaugcuacaaaaagaauacaucgaacgccaaggcaaaacaccccuaggccuagucgacauuuucauauucuccaccuccuucuaccucaucucaauuuuccuccaccuaaucaaaauccccacacaucgccacaucguaggaaaaccuugccccaaaccacacagacuaaaccacaugggcgucugcuccugcggccucuacaagcacccaggcguucccacaaaauggaagcgcuaa

SEQ ID NO: 5855 - RNA, 1473 nt, Artificial Sequence
  derived and/or modified protein sequence (opt11) from LASV(803213;Clade II)__AAF86703__GPCstabilized
augggccaaaucaucaccuucuuccaggaggucccacacgucaucgaggaagucaugaacaucguccucaucgcccucucccuccuagccauccucaaaggcaucuacaacgucgcaaccugcggacucuucggacuaauauccuuccuccuccuuugcggccgcuccuguucgguaaccuacaaaggcguauacgaacugcaaacacuagaacucaacauggccaaccucaacaugaccaugccccuuuccugcaccaagaauaacucccaccacuacaucauggucggcaacgaaaccggucuagaacucacccuaaccaacacuagcauaaucaaccacaaauucugcaaccuaagcgaugcccacaagaaaaaccucuacgaccacgcccuaaugucgaucaucuccacauuucaccuauccauccccaacuucaaccaauacgaagccauguccugcgacuucaacgguggcaaaaucuccguccaauacaaccucucccacagcuucgccgucgacgcagcgaaccauugcggcaccaucgccaacggcguacuacaaacuuucaugcgcauggccuggggcgggagcuacaucgcccucgacuccggcugcggaaacugggacugcauaaugaccucauaccaauaccucauaauccaaaacacaaccugggaagaccacugccaguucucucgaccaucaccaauaggcuaccuaggccuccuaucucaacgcacccgcgacaucuacaucucccgccgccgccgcggcacauucacauggacccucuccgacagcgaaggcaacgaagccccuggcggauacugccucacccguuggaugcucauagaagcagaacucaaaugcuucggcaacacggccgucgcuaaaugcaacgaaaaacacgacgaagaguucugcgacaugcuccgacucuucgacuucaacaaacaagccaucaaacgucucaaaacgcccgcccaaauguccauccagcucaucaacaaagcagucaacgcccucaucaaugaccaacucaucaugaaaaaccaccuacgcgacaucauguguauccccuacugcaacuacagccguuacugguaccuaaaccacacaguaaccggcaaaacaucacucccacgcugcuggcuagucuccaacggcuccuaccucaacgaaacccacuucuccgacgacaucgaacaacaggccgacaacaugaucaccgagaugcuccaaaaggaguacauggaccgccaaggcaaaacaccccucggccucguagaccuauuuguauucuccaccuccuucuaccuaaucuccauauuccuccaucucguaaaaauucccacccaccgacacaucgucggaaagccaugccccaaaccacaccgacucaaccacaugggcaucugcucgugcggccuauacaagcacccaggcguaccuguaaaauggaaacgcuaa

SEQ ID NO: 5856 - RNA, 1473 nt, Artificial Sequence
  derived and/or modified protein sequence (opt11) from LASV(GA391;Clade III)__CAA36645__GPCstabilized
augggccaaaucguuaccuucuuccaagaaguaccacacguaaucgaagaagucaugaacaucguauuaaucgcccucucaauccucgcuauccucaaaggccuuuacaacguagcuaccugcggccucaucggccuaguaaccuuccuccuccucuccggccgcuccugcucccuuaucuacaaaggcacauacgaacuucaaacccucgaacuaaauauggaaacccuaaacaugacuaugccccuauccugcaccaaaaacaacucgcaccacuacauccgagucggcaaugaaacaggccucgaacucacccuuaccaacacaucgauccuaaaccacaaguuuuguaaccucuccgacgcgcacaaacgcaaccucuacgaccacucccucaugucaaucaucuccaccuuccaccuaucuauacccaacuucaaccaauacgaagcaaugucuugcgacuucaacggcggaaaaaucaccguccaguacaaucuaucacacucauucgcagucgacgccgccggucacugcggaacccucgccaacggaguacuucaaacauucaugcgcauggcauggggcggcuccuacaucgcccuagacucaggcugcggcaacugggacugcauaaugaccuccuaccaauaccucauuauccaaaacaccaccugggacgaccacugccaauucucccgaccuucacccaucggcuaccucgggcuacuaucccaacgaacccgagacaucuacaucucccgcaggcgccgcggcacauucaccuggacccuauccgacagcgaaggcaacgaaacccccgguggcuacugccucacccgcuggaugcucauagaagccgaguuaaaaugcuucgguaacacagccgucgcaaaaugcaacgaaaaacacgacgaagaguucugcgacaugcuccgacuuuucgacuucaauaaacaagccauccgccgccuuaagaccccagcccaaaugucaauccaacucaucaacaaagccguaaacgcccucaucaacgaucaacucaucaugaaaaaccaccuccgugacaucaugugcauacccuacugcaacuacucccgcuauugguaccucaaccacaccuccacaggcaagaccucacucccccgcugcuggcucauauccaauggcucuuaucuaaacgaaaccaaauucucagacgacaucgaacaacaagcugacaacaugaucaccgaaaugcuccaaaaagaauacauagaccgccaaggaaaaacaccccucggccucguagaccucuucgucuucuccaccuccuucuaucucaucucgaucuuccuccaccucgucaaaauacccacccaccgacacauagucggaaaacccugccccaaaccacaccgccucaaccacaugggcaucugcuccugcggccuauacaaacaacccggcguccccgugcgcuggaaacgauaa

SEQ ID NO: 5857 - RNA, 1476 nt, Artificial Sequence
  derived and/or modified protein sequence (opt11) from LASV(AV;Clade V)__CCA30314__GPCstabilized
augggccaaauaguaaccuucuuccaagaaguuccccacgucaucgaagaagucaugaacaucguccuaauagcccucucaauccuagccguacuaaagggccucuacaacaucgcaaccugcggccucaucggccuaaucaccuuccuacuccugugcggacgcucaugcagcuccaaccuauacaaaggcgucuacgaacuccaaucccuugaccucaacauggaaacucucaacaugaccaugcccuuguccugcaccaaaaacaacucacaccacuacauacgcguaggcaacgacaccggucucgaacuaacccuaaccaacaccucuauccucaaccacaaauucugcaaccuaucagacgcacacaagaaagaccucuacgaccacgcacucaugucgaucauauccaccuuccaccucucaauacccaacuucaaccaauacgaagccaugucaugcgacuuuaacggaggcaaaaucuccguacaauauaaccucucacacuccuacgccaucgacgccgcaaaccacugcggaaccgucgccaacggcauccuccaaacuuucaugcgcauggccuggggaggaucuuacaucgcccuugacagcggaugcgguaacugggauugcaucaugaccuccuaccaauaccucauuauccaaaauacuaccugggaaaaccacugccaguucucccgccccagccccaucggauaccuaggucuacucucccaacgaacccgcgauaucuacaucucccgaagacgccgcggcaccuuuaccuggacacuauccgacucagaagguaacgccaccccagggggauacugccucacgagauggaugcucaucgaagcagaacuuaaaugcuucggcaacaccgccguagcaaaaugcaacgaaaaacacgacgaagaguucugcgacaugcuccgacucuucgacuucaacaaacaagccauaucacgucucaaauccccagcccaaauguccauacaacucauaaacaaagccguuaacgcacucaucaacgaccaacucaucaugaaaaaccaccuccgcgacauaaugugcauacccuacugcaacuacuccaaauacugguaccugaaccacaccauaaccggcaaaacuucacucccuaaaugcuggcucgucucgaacggaucauaccucaacgaaacucacuucuccgacgacaucgaacaacaagccgacaacaugaucaccgaaaugcuccaaaaagaauacauggaacgccaaggcaaaaccccacugggccucgucgaccucuucguauuuuccaccucauucuaccucaucuccaucuuccuccgccucguaaaaauccccacccaccggcacaucgucggaaaacccugccccaaaccccaucgacucaaccacaugggaauuugcucuugugggcuuuacaaacaaccaggcguacccguccgauggaaacgcuaa

SEQ ID NO: 5858 - RNA, 1473 nt, Artificial Sequence
  derived and/or modified protein sequence (opt11) from LASV(Togo/2016/7082;Clade VI)__AMR44577__GPCstabilized
augggacaaaucaucaccuucuuccaagaagucccccacguaaucgaagaagucaugaacaucguacucauagcccucucccuacuagccauccucaaaggcgucuacaacgucgccacaugcggcaucauaggccucgucaccuuccuauuccucugcggccgcuccuguucccucaucuacaaaggcucguaugaauuacagacccucgaacucaacauggaaacccucaacaugaccaugccccucucaugcaccaaaaacagcucacaccacuacauccguguuggcaacgaaaccggacucgaauuaacccuuaccaacacauccaucaucaaccacaaguucugcaaccucucagacgcucacaaacgcaaccucuacgaccacgcccucauguccauccucuccaccuuccaccuuuccauccccaacuuuaaccaauacgaagccauguccugcgacuucaacggcggcaaaaucuccguccaauacaaccugucccacgccuacgccgucgacgccgccgaacacugcggcacagucgcaaacgguguccuacaaaccuucaugcguauggccuggggcggcuccuacauagcccuagacucuggauguggaaacugggacugcauaaugaccuccuaucaauaccuaaucauccaaaacacuacaugggaagaccacugccaauuuucccgacccucacccauaggcuaccucggccuccucucccaacgcacccgcgacauauacaucucucgucgccgccgcggcacauucaccuggaccuuaagugacucagaaggaaacgaaacccccggaggauacugccucacacgauggaugcucaucgaagcugaacuuaagugcuucggcaacacugccgucgccaaaugcaacgaaaaacacgacgaagaguucugcgacaugcuccgauuauucgacuucaacaagcaagccauccagcgacucaaaucccccgcccaaaugucgauccagcucauaaacaaagccgucaacgcccuuaucaacgaccaacucauaaugaaaaaccaccucagagacaugaugugcauaccguacugcaacuacuccaaguacugguaucucaaccacacauccuccggaagaaccucacuccccaaaugcuggcucguaucgaacggcucuuaccuaaacgaaacacacuuuagugacgacauugaacaacaagccgacaacaugaucaccgaaaugcuccaaaaagaauacaucgacagacaaggcaaaacaccccucggacucgucgaccuauucguauucucaaccucauucuaccucauauccaucuuucuccaccuaauaaaaauacccacccaccgacacaucgucggcaaacccugccccaaaccucaccgccuaaaccacaugggcaucugcuccugcggccucuacaagcaacccggaguccccacccgcuggaaacgauag

SEQ ID NO: 5859 - RNA, 1473 nt, Artificial Sequence
  derived and/or modified protein sequence (opt11) from LASV(KAK-428;Clade n.d. (VII))__ANH09740__GPCstabilized
augggccaaaucguaaccuucuuccaggaaguaccccacgucaucgaagaaguuaugaacaucguacucaucgcccucucccuccuagcgauccuuaaaggacucuacaacuucgcaaccugcggcgucaucggacucauaacguuccuacuacucugcggacgcuccuguuccgccacguacaaaggccaauacgaacuccagacacuagaacucaacauggaaagccuaaacaugacgaugccccuauccugcaccaaaaacaacucacaccacuacauccgcgccgggaauaacaccggccuagaacuaacacucacaaacaccucgaucaucucccacaaauucugcaaccuaucagacgcccacaagaaaaaccucuacgaccacacgcucaugucaauuauuaccaccuuccaccucucgauaccaaacuucaaucaauacgaagccaugucaugcgacuucaacgguggcaaaaucucuauccaguacaacuugucccacuccuacgccggcgacgcggcccagcacugcggcaccguugcaaacggcguacugcagaccuucaugcgaauggccuggggaggcuccuaccucgcccuagacuccggcugccgcggaugggacugcaucaucuccaguuaccaauaccucaucauccaaaacaccacaugggacgaccacugccaauucucacgccccuccccgaucggcuaccucgguuucgucucccagaaaacgcgcgacauauacaucagccgccgacgucgcggcaccuucacauggacccucagcgacagcgaaggccacgacaugcccggcggcuacugccuaacccgauggaugcuaaucgaagccgaucucaagugcuucggcaacaccgccgucgcaaaaugcaacgaaaaacacgacgaagaguucugcgauauguggcgacucuucgacuucaacaaacaggccauccaaaggcuaaaggccccagcccaaaugaacauucaacuuauaaacaaagcagucaacgcccuuaucaacgaccaacucaugaugaagaaccaccuacgcgacaucaugugcauccccuacuguaacuacuccaaauucugguaccucaacaacaccaccaccggccgcaccucucucccacgcugcuggcucaucagcaacggcuccuaccuaaacgaaacccacuucuccgacgacaucgaacaacaagccgacaacaugauaacugaaaugcugcaaaaagaauacauggaccgucaaggcaaaacaccccucggccucgucgaccucuucguuuucuccaccagcuucuaccucaucaccaucuuccuacaccuugucaagauacccacccaccgccacaucgucggcaaacccugucccaaaccccaccgacucaaccacaugggaaucugcuccugcggccuauacaaacaaccaggcguccccguacgcuggaaacgcuaa

SEQ ID NO: 5860 - RNA, 1473 nt, Artificial Sequence
  derived and/or modified protein sequence (opt11) from LASV(Acar 3080;Clade I)__AAT49014__GPCstabilized
augggucaaaucaucaccuucuuccaagaaguaccacacgucaucgaagaagucaugaacaucguccucauagcccucagccuacucgcaauacucaaaggccuauacaacaucgcaacgugcggcaucauugggcucgucgccuuccuauucuuaugcggcaaaucaugcucccuaacucuaaaaggcggauacgaauuacaaacccuagaacuaaacauggaaacccucaauaugacaaugccacuauccugcaccaaaaacagcucccaccacuacauacgagucggcaacgaaacaggcuuagaacucacccucaccaauacauccaucaucaaccacaaauucugcaaccucucagacgcccacaagaaaaaucucuacgaccacgcccuuaugucgauaaucuccaccuuccaccucuccauccccaacuucaaccaauacgaggccauguccugcgacuucaacggaggcaaaauaucaguccaauacaaccuaucacacuccuacgccggcgacgcugccgaacacugcggcaccgucgcaaacggcguccuccaaacauucaugcgaauggccuggggcgggcgcuacaucgcucucgacuccggaugcggcaacugggacugcaucaugaccuccuaccaauaccuaaucauccaaaacacgaccugggaagaccacugccaauuuagccgccccucccccauaggcuaccucgggcuccucucccaacgaacacgcgacaucuacaucucccgccgcagacgcggcaccuucaccuggacacucucagacuccgaaggcaacgaaaccccaggcggcuacugccucacccgcuggaugcuaaucgaagccgaacuaaaaugcuucggcaacacagccguagccaaaugcaacgaaaaacacgacgaagaguucugcgacaugcuccgccuauucgacuucaacaaacaagcaauacgccgccuaaaagccccagcccaaauguccauccaacuaaucaacaaagccguuaacgcccucaucaacgaccagcuuauaaugaaaaaccaccuccgcgacaucaugugcauccccuacugcaacuacagcaaauacugguacuuaaaccacaccuccuccggccgaacaucccuccccaaaugcuggcugaucucgaacggcuccuaccucaaugaaacccaauucuccgacgacaucgaacaacaagccgaccacaugaucacagaaaugcuccaaaaagaauacauagaacgucaaggaaaaacaccccucggucuagucgacaucuucaucuucuccaccucguucuaccuuauaucaaucuuccuacaccucaucaaaauccccacccaccgucacauagucggaaaaccaugcccaaaaccacaccgccuaaaucacaugggcgucugcuccugcggccucuacaaacaccccggcgucccaaccaaguggaagcgauaa

SEQ ID NO: 5861 - RNA, 1473 nt, Artificial Sequence
  derived and/or modified protein sequence (opt11) from LASV(Pinneo-NIG-1969;Clade I)__AIT17836__GPCstabilized
augggacaaauaaucaccuucuuccaagaagugccccacgucauagaagaagucaugaauaucguccucaucgcacucucccuacucgccauacucaaagggcuguacaacauagcaaccugcggcaucauagggcucguugccuuccucuuccuuugcggcaaaucgugcucccucacccucaaaggcggcuacgaacuacaaacccucgaacucaauauggaaacccuaaacaugaccaugccacuauccuguacaaagaacucaucccaucacuacauccgcguaggcaaugaaacaggccucgaacucacacuaacuaacacguccauaauaaaccacaaauucugcaaccucucagacgcccacaagaaaaaccucuacgaccacgcccucauguccaucaucuccaccuuucaccuauccauucccaacuucaaccaauacgaagccauguccugcgacuucaacggcgguaaaaucucaguacaauacaaccucucacacuccuacgccggcgacgcagccgaacacugcggcaccguagccaacggcguacuacaaacauucaugcgcauggccuggggcggccgcuacauagcacuggacuccggcugcggaaacugggacugcaucaugacauccuaccaauaccucauaauccaaaacaccacaugggaagaccacugccaauucucccgcccaucacccaucggcuaccugggacuccuaucacaacgcacccgagacaucuacaucucccgacgccggcgcggcaccuucacauggacauuaucagacucugaaggcaaugagaccccaggaggcuacugccucacccgcuggaugcucaucgaagccgaacuaaaaugcuucggcaauaccgccguagccaaaugcaacgaaaaacacgaugaagaguucugcgacaugcuccgccuauucgacuucaacaaacaagcaaucagacgccucaaagccccagcccaaauguccauacagcuaauaaacaaagcagucaacgcucucaucaacgaccaacucaucaugaaaaaccaucuccgcgacaucauguguauccccuacugcaacuacagcaaauacugguaucuuaaucacaccuccuccggccgaaccucucuccccaaaugcuggcucauauccaacggauccuaccucaacgaaacccaguucagcgacgacaucgaacaacaagcggacaauaugaucaccgaaaugcuacagaaagaauacaucgaacgccaaggcaaaacaccacucggccuagucgacaucuucaucuucuccaccuccuucuaccucauuagcaucuuccuacaccucauaaaaauccccacacaccgccacaucgucggaaaaccgugccccaaaccucaccgucuuaaccacaugggcgucugcuccugcggccucuacaaacaccccggcguccccaccaaauggaaacgcuaa

SEQ ID NO: 5862 - RNA, 1473 nt, Artificial Sequence
  derived and/or modified protein sequence (opt11) from LASV(ISTH0009-NIG-2011;Clade II)__AIT17404__GPCstabilized
augggucagaucauuaccuucuuccaggaagucccacacgucaucgaagaagucaugaacaucguacucaucgcccucagucuacucgcgauccuaaaaggcaucuacaacgucgcaaccugcggacucuuuggccuagucucuuuccuccuucucugcggacggucaugcuccaccaccuacaaaggcgucuacgaacuccaaacccucgaacuugacauggcaucccuaaauaugaccaugccgcucuccugcaccaaaaauaacucucaccacuacaucauggucggaaacgaaaccggccucgaacucacccuaacaaacacauccauuaucaaccacaaauuuugcaaccucuccgacgcucauaagaaaaaccucuacgaccacgcccucauguccaucauaucaaccuuccaccuaucaauaccaaacuucaaccaauacgaagccaugagcugcgacuucaacggaggaaagauaucaguccaauacaaccucucccacgccuacgcagucgacgcagccaaccacugcggcacaaucgccaacggcguacuacaaaccuucaugcgcauggccuggggcgguuccuacaucgcccucgacagcggaugcggaagcugggacugcauaaugacauccuaccaauacuuaaucauccaaaacaccacuugggaagaccacugccaauucucacgccccuccccaauaggauaccucggccuacucucgcaacgcacccgugacauauacauaucccgacgccgccgcggcaccuucacauggacccuauccgacagcgaaggcaacgaaacgccuggcggcuacugccucacccgcuggauguuaaucgaagccgagcuaaaaugcuucggcaacacagccguagccaaaugcaacgaaaaacacgacgaagaguucugcgacaugcucagacucuucgacuucaacaaacaagccauacgacgccucaaaaccccagcacaaauguccauccaacuaaucaacaaagccgucaacgcccuuauaaacgaccagcuuauaaugaaaaaccaccuccgcgacaucaugugcauccccuacugcaacuacagcaaauacugguaccuaaaccacacggucaccggcaaaacgucccucccccgcugcuggcuagucuccaacgguuccuaccucaacgaaacccacuucagcgacgacaucgaacaacaggccgacaacaugaucaccgaacuccuccaaaaagaauacauggaccgccaaggcaaaacaccccuaggccucgucgaccucuuugucuucagcaccucauucuaccucauaucuaucuuccuacaccuuaucaaaauccccacccacagacacaucaccggcaagcccugccccaaaccccaccgccucaaccacauggguaucugcagcugcggccucuacaaacacccuggcguacccguaaaguggaaacgcuaa

SEQ ID NO: 5863 - RNA, 1473 nt, Artificial Sequence
  derived and/or modified protein sequence (opt11) from LASV(ISTH0012-NIG-2011;Clade II)__AIT17408__GPCstabilized
augggccaaauaaucacauucuuccaagaaguaccucacguaaucgaagaagucaugaacaucguucuaaucgcucucucccuccucgccauccucaaaggcaucuacaacguagcgaccugcggccucuuuggccucgucuccuuccuccuccuuugcggacgcucaugcuccaccacauacaaaggcgucuacgaacuccaaacccucgaacucgacauggccucucuuaacaugaccaugccccuaucaugcaccaaaaacaacucccaccacuacaucauggucggcaacgaaaccggccucgaacuuacccucacuaacacauccauaaucaaccacaaauucugcaaccucucagacgcccacaaaaagaaccuauacgaccacgcccucaugucaaucaucuccaccuuccaccuguccauaccaaacuucaaccaauacgaagccauguccugcgacuucaacggcggcaaaaucuccguccaauacaaccuuucccacacauacgcggucgacgccgcuaaccacugcggcacagucgccaacggcguacuccaaacguucaugcgcauggccuggggcggcuccuacaucgcacucgacuccggaugcggauccugggacugcaucaugaccuccuaucaauaccuaaucauccaaaacaccacaugggaagaucacugccaauucucacgccccucaccaaucggcuaccucggucuccucucacaacgcacccgcgacaucuacaucucacgacgaagacgcggcacauucaccuggacccuguccgacuccgaagguaacgagacccccggcggcuacugccucacccgcuggaugcucauugaagcugaacucaaaugcuucgggaacaccgcagucgccaaaugcaacgaaaaacacgacgaagaguucugcgauaugcuccgccucuucgacuucaacaaacaagcaauccgacgccucaaaacacccgcucagaugucaauacaacucaucaacaaagcagucaacgcccucaucaacgaucaacuuaucaugaaaaaccaccuccgcgacauaaugugcauccccuacugcaacuacuccaaauacugguaccucaaccacaccguaacaggcaagaccucccucccccgaugcuggcucgucucuaacggcuccuaccucaacgaaacacacuuuuccgacgacaucgaacaacaagcugacaacaugaucaccgaacuccuccaaaaggaauacauggaccgccaaggcaagacaccccucgggcuuguagaccucuucgucuucuccaccuccuucuaccucaucucaauauuccuacaccucguaaaaauacccacccaccgccacguuauugguaaacccugccccaaaccgcaccgccuaaaccacaugggcaucugcucaugcgggcucuacaaacaccccggcguacccgucaaauggaagcgcuaa

SEQ ID NO: 5864 - RNA, 1473 nt, Artificial Sequence
  derived and/or modified protein sequence (opt11) from LASV(ISTH0047-NIG-2011;Clade II)__AIT17412__GPCstabilized
auggggcaaaucaucaccuucuuccaagaagucccccaugucaucgaagaagucaugaacaucguccuaauagcucugagccuacucgccauccuuaaaggaaucuacaacguagcaaccugcggacucuucggccucgucuccuuccuacuccuaugcggacguuccugcuccaccaccuacaaaggcguuuacgaacuccaaacacuagaacuugacauggccucccucaacaugaccaugccccucuccugcaccaaaaacaacucacaccacuacaucaugguagguaacgaaacaggccucgaacugacucucaccaacacauccaucaucaaccacaaauucugcaaccucuccgacgcacacaagaaaaaccuguacgaccacgcccucauguccaucaucucaacguuccaccuguccauccccaacuucaaccaauacgaagccauguccugugacuucaacggcggaaaaauauccguccaauacaaccucucccacgcauacgccguagacgccgccaaccacugcggcaccauagccaacggcguccuccaaacauucaugagaauggccuggggcggauccuacaucgcccucgacagcggcugcggcucaugggacugcaucaugacauccuaccaauaccucaucauccaaaacaccagcugggaagaccacugccaauucucacgccccucgcccaucggcuaccucggacuccucagccaacgcacccgagauauauacauuucacgacgacgccgcggcaccuucaccuggacacuuucugacuccgaaggcaacgaaacccccggcggcuauugccugacccgauggaugcucaucgaagcagaacucaaaugcuucggcaacacggcagucgcaaaaugcaacgaaaaacacgacgaagaguucugcgauaugcuccgccuguucgacuucaacaaacaagccauccgccgacucaaaaccccagcccagauguccauccaacucauuaacaaagccgucaacgcccucaucaacgaccagcucaucaugaaaaaccaccuacgcgacauaaugugcaucccuuauugcaacuacucuaaauauugguaucuaaaccacacagucaccggcaaaaccucccuuccccgaugcuggcucgucuccaacggcucauaccucaacgaaacccacuucuccgacgacaucgaacaacaggccgacaacaugaucaccgaacuacuccaaaaagaauacaucgauagacaaggaaaaacaccccuaggccucgucgaccucuucguauucucaaccuccuucuaccucaucuccauuuuccuacaccucguaaaaauccccacccaccgccacgucaucggaaaacccugccccaaaccccaccgccucaaccacaugggaaucugcuccugcggccuauacaaacaccccggcguccccgucaaauggaaacgcuaa

SEQ ID NO: 5865 - RNA, 1473 nt, Artificial Sequence
  derived and/or modified protein sequence (opt11) from LASV(ISTH0073-NIG-2011;Clade II)__AIT17416__GPCstabilized
augggccaaauaauaaccuucuuccaagaagucccccacgucaucgaagaagucaugaacaucguccuaaucgcccucucccucuuagcaauccuaaaaggcaucuauaacguagcaaccugcggucucuucggccuugucagcuuccuccuccuuugcggccgaucuugcagcacaacauacaaaggaguauacgaacuacaaacccucgaacucgacauggccagccuaaauaugaccaugccucucuccugcaccaaaaacaacucgcaucacuacaucaugguuggcaacgaaaccggccucgaacucacccucacaaacaccucgauaaucaaccacaaauucugcaaccuauccgacgcccaccgcaaaaaccucuaugaccacgcccucauguccaucauauccaccuuccaccucucaaucccaaacuucaaucaauacgaagccauguccugcgacuucaacggcggcaaaaucucaguacaauacaaccucucccacgcauacgcagucgacgcggcuaaccacugcggaaccaucgcaaacggcguacuccaaaccuucaugcgcauggccuggggcggcuccuacauagcccuagacuccgggugcggcuccugggauugcaucaugacauccuaccaauaccucaucauccaaaacacauccugggaagaccacugccaauucagccgacccagccccauuggcuaccuaggccugcucucacaacgcacccgcgacauauacaucagccgucgccgccgcggcacauucacuuggacccucucagacucagaagguaacgaaaccccuggcggcuacugccucacccgcuggaugcucauagaagccgaacuaaaaugcuucggaaacaccgccgucgccaaaugcaacgaaaaacacgacgaagaguucugcgacaugcuccgacucuucgacuucaacaaacaagccauucgacgccucaaaacacccgcccagauguccauccaacucaucaacaaagccgucaacgcacucaucaacgaccaacucauaaugaaaaaccaccuccgcgacaucaugugcauucccuacugcaacuacuccaaauacugguaucuaaaccacaccgucaccggcaaaacaucacuaccccgcugcuggcuaguaagcaacggaagcuaccucaacgaaacccacuucuccgacgacauagaacaacaagcggacaacaugaucaccgaacuucuucaaaaagaauacauagacagacaaggcaaaaccccgcucggccucgucgaccucuucgucuucuccaccucauucuaccuuaucagcaucuuccuccaccucguaaaaaucccaacacacagacacgucaucggaaaacccugcccaaaaccccaccgccugaaccacaugggcauaugcucgugcggccuauacaaacacccagggguccccgucaaauggaagcgguaa

SEQ ID NO: 5866 - RNA, 1473 nt, Artificial Sequence
  derived and/or modified protein sequence (opt11) from LASV(ISTH0230-NIG-2011;Clade II)__AIT17420__GPCstabilized
augggccaaauaaucaccuucuuccaagaagucccccacguaaucgaagaagucaugaacaucguacucaucgcccucucucuacucgccauccuaaaaggcaucuacaacgucgcaaccugcggucuuuucggccuagucucauuccuccuucucugcggacgcagcugcucaacaaccuacaaaggcgucuacgaacugcaaacccucgaacuugacauggccucccucaacaugaccaugccccucucaugcaccaaaaacaacucccaccauuacauuaugguaggcaacgaaaccggacuagaacucaccuuaaccaacaccucuaucaucaaucacaaauucugcaaccuguccgacgcccacaagaaaaaccucuacgaccacgcccucauguccaucaucuccaccuuccaccucucuauccccaacuuuaaccaauaugaagccauguccugcgacuucaacggcggcaaaauauccguccaauacaaccucucccacaccuacgccgucgacgccgccaaccacugcggcaccauagccaacggcguccuccaaacauucaugcgaauggccuggggcgguagcuacaucgcccucgacucaggaugcggcagcugggacugcaucaugaccuccuaccaauaccuuauaauccaaaauaccacaugggaagaccacugucaauucucaagacccucccccaucggcuaccucggacuccucucucaacgcacaagagacaucuacaucucccgccgccgccgcgguaccuucaccuggacacucuccgacuccgaaggaaaugaaacccccggcggcuacugccucacacguuggaugcucaucgaagcugaacucaaaugcuucggcaacacugccgucgcaaaaugcaaugaaaaacaugacgaagaauuuugcgacaugcuacgccuauucgauuucaacaaacaagccauccgccgacucaaaaccccugcacaaaugucuauccaacuuaucaacaaagcagucaacgcccucaucaacgaccaacuaaucaugaaaaaccaucuccgcgacaucaugugcauaccauacugcaacuacuccaaauacugguaccuaaaccacaccgucaccgguaagaccucacuuccacgaugcuggcuugucucuaacggcuccuaccuuaacgaaacccacuucuccgacgacaucgaacaacaagcagacaacaugaucacagaacuccuacaaaaagaauacauggaccgccaaggcaaaacaccccuaggccucgucgaccucuucguguucuccaccucauucuaccucaucucaaucuuccuucaucucaucaaaauacccacccacagacacauuaccggaaaaccaugcccuaaaccacaccgccuuaaucacaugggcauaugcuccugcggacuauacaaacaccccggcgucccaguaaaguggaaacgcuaa

SEQ ID NO: 5867 - RNA, 1473 nt, Artificial Sequence
  derived and/or modified protein sequence (opt11) from LASV(ISTH0531-NIG-2011;Clade II)__AIT17424__GPCstabilized
augggccaaaucauaaccuucuuccaagaaguuccccacgucaucgaagaaguaaugaacaucguccucaucgcccucucccuccucgccauacuaaaaggcaucuacaacguugcaaccugcggacuauucgggcucgucuccuuccuccuccucugcgggcgcuccugcuccacaaccuacaaaggagucuaugaacuccaaacccuagaacucgacaugaccaaccucaacaugaccaugccccucucaugcaccaaaaacaacucacaccacuacaucauggucggcaacgaaacaggacuagaacucacacucacaaauaccuccauaaucaaccacaaauucugcaaccuauccgaugcccacaagaaaaaccucuacaaccacgcccuaauguccaucaucucaacauuccaccucucgauccccaacuucaaccaauacgaagccauguccugcgauuucaacggcggcaaaaucuccguccaauacaaccuaucccacgccuacgccgucgacgcugccaaccacugcgguaccaucgcaaacggaguacuccagacuuucaugcguauggccuggggaggcuccuacauagcacuagacucuggaugcgguuccugggacugcaucaugaccuccuaccaauaccuaaucauccaaaacaccacuugggaagaccacugccaauucucacgccccucccccaucggguaccuaggacuacucucccaacgaacccgcgacaucuauaucagccgccgccgccgaggaaccuucacuuggacccucuccgacuccgaaggaaacgagacccccggcggcuacugccucacccgauggaugcuaauugaagccgaacucaaaugcuuuggaaauaccgccgucgccaaaugcaacgagaaacacgacgaagaguucugcgacaugcucagacucuucgacuucaacaaacaagccauccgacgccuaaaaacccccgcccagacuaacauccaacucaucaacaaagccgucaacgcccucaucaacgaccagcuaaucaugaaaaaccaccuacgcgacaucaugugcauucccuacugcaauuacucaaaauacugguaccucaaccacacagucaccggaaaaacaucccucccgcgaugcuggcucguaucuaacggcucauaccucaacgaaacucacuucagcgacgacaucgaacaacaagccgacaacaugaucaccgaacuucuacaaaaagaauacauggaccgccaaggcaaaacaccccucggccuuguagaccucuucgucuucuccacuucauucuaccuaaucuccaucuuccuacaccuggucaaaaucccaacacaccgccacaucauaggcaaaccaugccccaaaccccaccggcucaaccacaugggcaucugcuccugcggccuauauaaacacccuggaguaccagucaaauggaaacgcuag

SEQ ID NO: 5868 - RNA, 1473 nt, Artificial Sequence
  derived and/or modified protein sequence (opt11) from LASV(ISTH0595-NIG-2011;Clade II)__AIT17428__GPCstabilized
augggccaaaucauaaccuucuuccaagaagucccccacgucaucgaagaagucaugaacauaguccuaaucgcacuuucacuccuagccaucuuaaaaggcaucuacaacguagccacuugcggccucuucggucucgucuccuuccuucuacucugcgguagaucaugcuccaccacauacaaagggguauacgaacuacaaacccuagaacucgacauggcaagccuaaacaugacuaugccccuaagcugcaccaaaaacaacucccaccauuacaucaugguaggcaaugaaaccggccucgaacuaacacucaccaacacauccaucaucaaccacaaauucugcaaccucuccgaugcccacaaaaagaaccucuacgaccacgcccucaugucaaucaucucaaccuuccaccucuccauccccaacuucaaccaguacgaagccaugucuugcgacuucaacggcggcaaaaucuccguccaauacaaccuuucccacaccuacgccguugacgcagccaaccacugcgguaccaucgccaacggcguccugcaaaccuucaugcguauggcauggggcggcuccuacaucgcccucgacuccggcugcggauccugggacugcaucaugaccucuuaccaauaccucaucauccaaaacaccaccugggaagaccacugccaauucucccgccccucccccauaggcuaucugggccuccucucccaacgcacacgcgauauauacaucucacgacgccgucgaggcacuuucacauggacacucuccgacuccgaggguaacgaaacacccggcggcuacugccucacccgguggaugcucaucgccgcugaccuuaagugcuucgggaauacagccgucgccaaaugcaacgaaaaacacgacgaagaguucugcgacaugcuacgccucuucgauuuuaacaagcaggccaucgaacgacucaaaacucccgcccaaaugucuauccaacucaucaacaaagccgucaacgcccuaaucaacgaucaacucaucaugaaaaaccaucuccgagacaucaugugcauccccuauugcaacuacucaaaauacugguaccuaaaccacaccgucaccggccgcaccucccucccccgaugcuggcuugucuccaacggcuccuaccucaacgaaacccacuucuccgacgacaucgaacaacaagccgacaacaugaucacagaacuacuccaaaaagaauacauggaccgccaaggaaaaacacccuugggccucguugaccuauucguuuucucaaccucuuucuaccuaaucuccaucuuccuccaccucguccgaauacccacccaccgucacgucauaggaaaacccugccccaaaccacaccgacucaaccacaugggcaucugcuccugcggccucuacaaacaccccggcguucccguaaaauggaaacgcuag

SEQ ID NO: 5869 - RNA, 1473 nt, Artificial Sequence
  derived and/or modified protein sequence (opt11) from LASV(ISTH0964-NIG-2011;Clade II)__AIT17430__GPCstabilized
augggccagaucaucaccuucuuccaagaaguuccccacgucaucgaagaagucaugaacaucguccuaaucgcccucuccuuacuagccauccucaaaggcaucuacaacgucgccaccuguggucucuucggccuggucuccuuccuccuacucugcggccgcuccugcuccaccaccuacaaaggcguuuacgaacuacaaacccuagaacuugacauggcaucccucaacaugaccaugccccuuuccugcacuaaaaacaacucccaccacuacauaauggucggaaaugaaacgggccucgaacucacccucaccaacacaucaaucaucaaccacaaauucugcaaccucuccgacgcccacaagaaaaaccucuacgaccacgcccuuaugucgaucauuuccaccuuccaccugagcaucccuaauuucaaccaauacgaagcuauguccugcgauuucaacggaggucgaaucagcguucaauacaaccucucccacaccuacgccgucgacgccgcaaagcacugcggcacgauagccaauggugugcuccaaaccuucaugcgcauggcuuggggcggcuccuacauagcucuagacagugggugcggcuccugggacugcauuaugaccuccuaccaauaccuaaucauccaaaacaccacaugggaagaucacugccaauucucccgccccagccccaucggcuaccucggccuacucucacaacgcacccgagacaucuacaucucccgccgccgccgcggaaccuucacuuggacccucucagacuccgaaggcaacgaaacccccggcggcuacugccuaacacgcuggaugcucaucgaagccgaacucaaaugcuucggaaacaccgccgucgcaaaaugcaacgaaaaacacgacgaagaguucugcgacaugcuccgacucuucgacuucaacaaacaagccauccgccgccucaaaacacccgcacaaauguccauccaacucaucaacaaagccgucaaugcccuaaucaacgaccagcuaaucaugaaaaaccaccuccgagacauaaugugcauacccuacugcaacuacuccaaguacugguaccucaaccacaccgucaccggaaaaacaucacuaccccgcugcuggcucgucuccaacggauccuaccucaacgaaacacacuucuccgacgacaucgaacaacaagcagacaacaugaucaccgaacuccuccaaaaggaauacaucgacagacaaggcaagaccccgcucggccuagucgaccucuucgucuucuccaccuccuucuaccucaucuccauauuccuccaucucguaaaaauacccacgcaccgccacgucaucggaaaacccugcccaaaaccucaccgccucaaccacaugggaaucuguuccugcggccucuacaaacacccaggaguccccgucaaauggaaaagauag

SEQ ID NO: 5870 - RNA, 1473 nt, Artificial Sequence
  derived and/or modified protein sequence (opt11) from LASV(ISTH1038-NIG-2011;Clade II)__AIT17438__GPCstabilized
augggacagaucauaacguucuuccaagaaguaccccacguaaucgaagaagucaugaacauaguccuaaucgcccucucacuacucgccauacucaaaggcauauacaacgucgcaaccugcggacucuucgggcuugucaguuuucuacuccucugcggacgcucaugcagcaccaccuacaaaggcgucuacgaacuccaaacccucgaacucgacauggcaaaucugaacaugacaaugccccucagcugcaccaaaaacaacucccaccacuacauacgagucggaaacgaaacaggccucgaacugacccucaccaacacaagcauaaucucccacaaauucugcaaccucuccgacgcacacaagaaaaaccucuacgaccacgcccuuaugucuaucauauccacauuccaccuauccauccccaacuucaaccaauacgaggccaugagcugcgacuucaauggcggcaaaauaagcguacaguacaaccucucacacaccuaugccguagacgccgccaaccauugcggaaccaucgccaacggcguccuccaaacuuucaugcgcauggccuggggcggaucauacaucgcacuagacuccggaugcggcuccugggacugcaucaugaccuccuaccaauaccuaaucauacaaaacaccacuugggaagaccacugccaauucucacgacccagccccaucgguuaccucggccuacuaucccaacgcacacgcgacaucuacaucucacgccgccgccgcgguaccuucaccuggacccucuccgacucagaagguaaagaaacaccaggcggcuacugccuaacgcgcuggaugcuaaucgaagccgaacuaaaaugcuucggcaacacagccgucgcaaaaugcaacgaaaaacacgacgaagaguucugcgacaugcugcgccucuucgauuucaacaaacaggcaauccgccgccucaaaacccccgcccaaaugaacauacaacucauuaacaaggccgucaacgcccucaucaacgaccaacucaucaugaaaaaccaccuccgugacauaaugugcauuccauacugcaacuacuccaaauacugguacuuaaaccacaccguaaccggcaaaaccagccucccacgcugcuggcucguaagcaacggcucauaccucaacgaaacccacuucucagacgacauagaacaacaagccgacaacaugauuaccgaacuccuacaaaaagaauacaucgaucgccaaggaaagacaccccucggccuagucgaccuauucguauucuccaccucauucuaccucauauccaucuuccuccaccuagucaagaucccaacccaccgccacguaauagguaaaccaugcccgaaaccccaccgccucaaccaaaugggcaucugcuccugcggccucuacaaacaacccggaguccccgucaaauggaaaagauaa

SEQ ID NO: 5871 - RNA, 1473 nt, Artificial Sequence
  derived and/or modified protein sequence (opt11) from LASV(ISTH1048-NIG-2011;Clade II)__AIT17442__GPCstabilized
augggccaaaucauaaccuucuuccaagaaguaccccacguaauagaagaagucaugaacauuguccucaucgcccuaucccuccuugcaauccucaaaggcauauacaacgucgcaacaugcggucuauucggccuugucucauuccucuuacucugcgggcgcuccugcuccaccaccuacaaaggcgucuacgaacuucaaacacuagaacucgacauggccucacucaacaugacaaugccccucucaugcaccaaaaacaacucccaccacuacaucaugguuggcaacgaaacagggcucgaacugaccuuaaccaacaccucaaucaucaaccacaaauuuugcaaccucuccgacgcacaccgcaaaaaccucuacgaccacgcccuaaugagcaucauaucgaccuuccaccucuccauacccaacuucaaccaguacgaggcaauguccugcgacuucaacggcggcaaaaucucaguacaguacaaccucucccacgccuacgcagucgacgcagccaaccacugcggcaccauagcaaauggcguccuccagaccuucaugcgaauggccuggggcggcaguuacauagcccucgacuccggaugcggguccugggacugcauuaugaccuccuaccaauaucuaaucauacaaaacaccucaugggaagaccacugccaauucagccgccccucccccaucggauaccucggccuccucucccaacgcacacgcgacaucuacaucucccgccgcagaagaggcaccuucaccuggacacuaucagauucugaaggaaacgagacacccggcggcuacugccuaacccgauggaugcucauagaagccgaacucaaaugcuucggcaacaccgccgucgccaaaugcaacgaaaaacacgacgaggaguucugcgacaugcuacgccucuucgacuucaauaaacaagccauccgacgccucaaaacacccgcacagaugucuauucaacucaucaacaaagcagucaacgcccucauuaacgaccaacuaaucaugaaaaaccaccuuagagacaucauguguaucccauacugcaacuacuccaaauacugguaccucaaccacacaguuaccggcaagaccucccucccacgcugcuggcucguaucaaauggcuccuaccuuaacgaaacccacuucucagacgacaucgaacagcaagcagacaacaugaucacagaacugcuacagaaagaauauauagaccgccagggcaaaacccccuuaggucucguagaucucuucgucuucucuaccuccuuuuaucucauauccaucuuccuucaccuugucaaaaucccaacacaccgacacguaaucggcaaacccugcccaaaaccccaccgcaucaaccacaugggaaucugcuccugcggccucuacaaacaccccggcguccccguaaaauggaagcgauaa

SEQ ID NO: 5872 - RNA, 1473 nt, Artificial Sequence
  derived and/or modified protein sequence (opt11) from LASV(ISTH1058-NIG-2011;Clade II)__AIT17446__GPCstabilized
augggucaaaucaucaccuucuuccaagaagucccccacguaaucgaagaagucaugaacaucguccucauagcacucucccuucuggcaauccucaaaggcaucuacaacgucgcaaccugcggccucuucggccucgucagcuuccuccuacucugcggccgcuccugcucuacuacuuacaaaggaguauacgaacuccaaacucucgaacucgauauggccucccugaacaugaccaugccccucuccugcaccaaaaacaacucccaccacuacaucauggucggaaacgaaaccggccuagaacucacacuaacaaacaccuccaucauaaaccacaaauucugcaaucucucagacgcccacaagaaaaaccuauacgaccacgcccuaaugucaaucaucuccaccuuccaccucuccauccccaacuucaaccaauacgaggccauguccugcgacuucaacggcggaaaaaucaguguccaauacaaccugagccacaccuacgcagucgaugcagcgucccacugcgguaccgucgcaaacggcguccuccaaaccuucaugcgcauggccuggggaggcuccuacauagcccuagacagcggcugcggcuccugggacugcaucaugacuucauaccaauaccuaaucauccaaaacacuaccugggaagaccacugccaauucucccgccccucuccuaucggcuaccucggccuccucucucagcgaacccgcgacaucuacaucucccgcaggcgccgcggcaccuucaccuggacccuauccgacuccgaagguaacgaaacccccggcggcuacugucucacccgcuggaugcuaaucgaagccgaacucaaaugcuucggcaauacagccgucgccaaaugcaacgaaaaacacgacgaagaguucugcgacaugcuccgccucuucgacuucaacaaacaagccauccgccgccugaaaacucccgcacaaaugucaauacaacucauaaacaaagccgucaacgcccucaucaacgaccaacucauaaugaaaaaucaucuccgugacaucaugugcauccccuacugcaacuacucuaaauacugguaccucaaccacacagucacuggcaaaaccucccugccccgaugcuggcucguaagcaacggcuccuaccugaacgaaacccacuucuccgacgacaucgaacaacaagccgacaacaugaucaccgaacuccuacaaaaagaauacauggaccgacaaggcaaaacgccccuaggccucgucgaccuauucguauucucaaccuccuucuaccuuaucucaaucuuccuccaccucguaaaaauacccacccaccgccacguaauuggcaaaccaugcccaaaaccccacagacucaaucacaugggcaucugcagcugcggccucuacaaacaccccggaguccccgucaaauggaaacgcuag

SEQ ID NO: 5873 - RNA, 1473 nt, Artificial Sequence
  derived and/or modified protein sequence (opt11) from LASV(ISTH1064-NIG-2011;Clade II)__AIT17450__GPCstabilized
augggucaaaucaucacauucuuccaagaagugccccacguaaucgaagaaguaaugaacaucguacucauagcccugagccuacuagccauccucaaaggcaucuacaacgucgccacaugcggccuuuucggccuagucuccuuccuccuacucugcggccgauccugcuccaccacauacaaaggaguauacgaacugcaaacccucgaacucgacauggccagccucaacaugaccaugccccuauccugcaccaaaaacaacucgcaccacuacauuaugguaggcaacgaaacuggucuagaacuaacccucaccaacacauccaucaucaaccacaaauucugcaaccuuucagacgcacacaagaaaaaccuguacgaccacgcccugauguccauaaucuccaccuuccaccuauccauccccaacuucaaccaauacgaagccaugagcugcgacuucaacggcggaaaaauaagcguccaauacaaccuaucucacaccuacgccgucgacgccgccaaccacugcggcaccauagccaacggcguacugcaaaccuucaugcgcauggcuuggggaggcuccuacaucgcccucgacagcggaugcggcagcugggacugcaucaugacuuccuaccaauaccucauaauccagaacacaaccugggaagaccacugccaauucucccgaccauccccuauuggauaccuaggccuccuaucccagcgcacacgagacauauacauuaguagacgacgccgcggcaccuucaccuggacccucagcgacuccgaaggcaacgaaacccccggaggcuacugccucacccgauggaugcucauagaagcagaacuaaaaugcuucggcaacacagccgucgcaaaaugcaacgaaaaacacgacgaggaguucugcgacaugcucagacucuucgacuucaacaaacaagccauccgccgacucaaaacacccgcccaaauguccauacagcucauuaacaaagcaguaaacgcacucaucaacgaccaacucaucaugaaaaaccaccuccgcgacauuaugugcauacccuacugcaacuacuccaaauacugguaccuaaaccauaccgucacaggcaaaaccagccucccccgcugcuggcuagucuccaacggcagcuaccuaaacgaaacgcacuucuccgacgacauagaacaacaggccgacaacaugauaaccgaacuccuacaaaaagaauacaucgaccgccaagggaaaacaccgcuaggccucguggaccuauucgucuucucaacauccuucuaccuaaucuccaucuuccuacaccucgucaaaauaccgacccaccggcacaucaucggcaaaccaugcccaaaaccucaccgccuuaaccacaugggcauaugcagcugcggccucuacaaacacccaggcguucccgucaaauggaaacgcuaa

SEQ ID NO: 5874 - RNA, 1473 nt, Artificial Sequence
  derived and/or modified protein sequence (opt11) from LASV(ISTH1069-NIG-2011;Clade II)__AIT17454__GPCstabilized
augggccaaaucaucaccuucuuccaagaaguaccccacguaauagaagaaguaaugaacaucguccucaucgccuucucacuccucgccauccucaaaggaaucuacaacgucgccacaugcggccuguucggccucguauccuuccuccuacucugcggccgcucgugcucaaccaccuauaaaggagucuacgaacuccaaacccucgagcuagacauggccucccuaaacaugacaaugccgcuaucuugcaccaaaaacaacucucaccacuacaucaugguugguaacgaaacgggccucgaacucacgcucaccaacaccuccaucauaaaccacaaauucugcaacuuaucugacgcccacaagcgcaaccucuacgaccacgcccucauguccauaaucuccaccuuccaccucuccauccccaacuucaaccaauacgaagcgaugucaugcgauuucaacggaggcaaaaucuccguccaauacaaccuaucccacaccuacgccguagacgcagccggccacugcggcaccaucgccaacggcguccuccaaaccuucaugcgaauggccuggggcggcucauacauugcccucgacucaggcugcgguuccugggacugcaucaugacaucauaccaauaccucauuauccaaaacaccacaugggaagaccacugccaguucucccgccccuccccaaucgguuaccucggccuacuaagccaacgcacccgugacauauacaucucccgucgacgccgcggcaccuucaccuggacccuaucugacucugaaggcaacgaaacccccggcggcuacugccucacccgcuggaugcuuaucgaggccgaacucaagugcuucggcaacaccgcugucgccaaaugcaacgaaaaacacgacgaggaguucugcgacaugcuccgccuauucgacuucaacaaacaagccauacgccgcuugaaaacccccgcccaaaugucgauccaacucaucaacaaagcagucaacgcccucauaaacgaccaacucaucaugaaaaaccaccuccgcgacaucaugugcaucccauacugcaauuacuccaaauacugguaccucaaccacaccauaaccggaaaaacaucccucccccgaugcuggcuagucucaaacggcuccuaccuaaacgaaacacacuucagcgacgacaucgaacaacaagcagauaacaugaucaccgaacuucuccaaaaagaauacauggaccgucaaggcaagaccccacuaggccugguagaccucuuugucuucagcaccagcuucuaccuuaucuccaucuuccuccaccucgucaaaauacccacacauagacacauaauaggcaaacccugccccaaaccacaccgccucaaccacaugggcaucugcuccugcggccuauacaaacaccccggagucccaguccguuggaagcgauaa

SEQ ID NO: 5875 - RNA, 1473 nt, Artificial Sequence
  derived and/or modified protein sequence (opt11) from LASV(ISTH1096-NIG-2012;Clade II)__AIT17458__GPCstabilized
augggccaaaucaucaccuucuuccaagaagucccccacgucaucgaagaagucaugaauauaguccucaucgcccucucacuccucgcaauccucaaaggcaucuauaacgucgccacaugcggccucuucggccucgucagcuuccuccuccucugcggacgcuccugcuccaccacauacaaaggcgucuacgaacuccaaacucucgaacuagacauggccucacuuaacaugaccaugccccugucaugcaccaaaaacaacucccaccacuacaucauggucggcaacgaaaccggacucgaacucacccucaccaacaccuccaucaucaaccacaaauucugcaaccuaucugacgcccacaagaaaaaccucuacgaccacgcccucaugucuaucaucuccaccuuccaccucuccauacccaacuucaaucaauaugaagccaugucaugcgacuucaacggcggcaaaaucuccguccaauacaaccucucccacaccuacgccaucgacgcagccaaccacugcggaaccauagccaacgguguccuccagacauucaugcgaauggccuggggcggcagcuacaucgcccuagacuccggcugcggauccugggacuguaucaugaccaccuaccaauaccucaucauccaaaacacuaccugggaagaucacugccaauucucacgccccucaccaaucggcuaccucggacuccuuucucaacgcacccgcgacaucuacaucuccagacgccgacgcggaacguucaccuggacccuuuccgacuccgaaggcaacgaaacccccggcggauauugccucacccgcuggaugcucaucgaagcagaacucaaaugcuucggcaacacagccgucgccaaaugcaacgaaaaacaugacgaagaguucugcgacaugcuccgccucuucgacuuuaacaaacaggccauccgccgccucaaaacccccgcacaaaugucuauccaacucaucaacaaagcaguaaacgcacucaucaacgaccaacucauaaugaaaaaucaccuccgcgacauuauguguauccccuacugcaauuacuccaaguacugguaccucaaccacaccguuaccggcaaaacuucccuaccccgcugcuggcucgucuccaacggcagcuaccucaacgaaacccauuucuccgacgacaucgaacaacaagcagacaacaugaucacagaacuacuacaaaaagaauacauggaccgacaaggcaaaacuccccucggccuggucgaccucuucgucuucucaaccucguucuaccucaucucgauuuuccuacaccucguaaaaauacccacccaccgacacguuauaggaaaacccugccccaaaccccaccguuugaaccacaugggaaucugcuccuguggccucuacaaacaccccgguguccccgucaaauggaagcgauaa

SEQ ID NO: 5876 - RNA, 1473 nt, Artificial Sequence
  derived and/or modified protein sequence (opt11) from LASV(ISTH1107-NIG-2012;Clade II)__AIT17462__GPCstabilized
augggacaaauaaucacauucuuccaagaagucccccacguaauagaagaaguaaugaacaucguacucaucgcacucucuuuacucgccauacuuaaaggcauauacaacgucgcuaccugcggccuuuucggucuagucuccuuccuccuacucugcggacgauccugcucaaccaccuacaaaggaguauacgaacuucaaacccuagaacucgacauggccucccuaaacaugacaaugccacuauccuguaccaaaaacaacucccaucacuacaucauggucggcaacgaaaccggccucgaacucacacucaccaauacuuccaucauaaaccauaaauucugcaaccucucagacgcgcacaagaaaaaccucuacgaccaugcccuaaugucaaucauauccaccuuccaccucuccauccccaacuucaaccaauacgaggccauguccugcgacuucaacggaggaaaaaucuccguccaauacaaccucucacacgccuacgcuguagacgcugccaaccacugcggcacaaucgccaacggaguacuccaaaccuucaugcgcauggccuggggaggcuccuacauagcccucgacuccggcugcggaucaugggacugcaucaugaccuccuaccaauaccuaauaauccaaaacacaaccugggaagaccacugccaauucucacgccccucccccaucggcuaccucggccuccucucacaacgaacccgcgacaucuacaucucccgccgccgacgcggcaccuucaccuggacccucagcgacuccgaaggcaacgaaacacccggcggcuacugccuaacccgcuggaugcuaaucgaagccgagcucaaaugcuucggaaacacagccgucgcaaaaugcaacgaaaaacacgacgaggaguucugcgacaugcuacgccuauucgacuucaacaaacaagccauccgacgacucaaaacccccgcccaaaugucuauacaacugaucaacaaagccgucaacgcacucauaaacgaccaacucaucaugaaaaaccaccucagggacaucaugugcauaccauacugcaauuacucaaaguacugguaccucaaccacaccgucacagguaaaaccucacuccccaaaugcuggcuagucagcaacgguuccuaccuaaaugaaacccacuucuccgacgacaucgaacaacaagccgacaacaugaucacagaacuacuacaaaaagaauacaucgaccggcaagguaaaacuccccucggccucgucgaucucuucgucuucagcacgucauucuaccucaucucaaucuuccuccaucucguaaaaauccccacacaccgccacgucaucggcaaaccuugccccaaaccccaccgacuaaaccacaugggcaucugcucaugcggcuuguacaaacaccccggcguacccgucaaauggaaacgauga

SEQ ID NO: 5877 - RNA, 1473 nt, Artificial Sequence
  derived and/or modified protein sequence (opt11) from LASV(ISTH1111-NIG-2011;Clade II)__AIT17466__GPCstabilized
augggccaaauaauaaccuucuuccaggaagucccacaaguaaucgaagaagucaugaacaucgucuuaaucgcccucucccuacuugcuauccucaagggaaucuacaacguagcaaccugcggacucuucggacucguuuccuuccuccuccucugcggccgauccugcucaaccaccuacaaaggagucuacgaacuccaaacccuagagcucgacauggccucccuaaacaugacaaugccgcuauccugcacuaaaaacaacagccaccacuacaucauggucggcaacgaaaccggccuagaacucacacuaaccaaccaauccaucaucaaccacaaauucugcaaccuaucagacgcacacaagaaaaaucuauacgaccacgcccucauguccauaauaucaacauuccaccuauccauaccgaacuucaaccaauacgaagccauguccugcgacuucaacgggggcaaaauuagcguccaguacaaccucucucacaccuucgccgucgacgcagccaaccacugcggaaccaucgccaacggcguacuccaaacauucaugagaauggcuuggggcggaucauacaucgcccucgacuccggaugcggcucaugggacugcaucaugacuagcuaccaauaccucauaauacaaaacaccaccugggaagaccacugccaauucucacgcccuucccccaucggauaccuaggccuccucucccaacgcacccgcgacaucuacaucagccgccgacgccgcggcacauucaccuggacccucuccgacuccgaaggcaacgaaacacccggcggguacugccucacccgcuggaugcucaucgaagccgaacucaaaugcuucggcaacaccgccgucgccaaaugcaacgaaaaacaugacgaggaguucugcgacaugcuccgccuuuucgacuucaauaaacaagccauacgccgccucaagacaccagcacaaauguccauacaacuuaucaacaaagccguuaacgcccucauuaacgaccaacucauaaugaaaaaccaccucagagacaucaugugcauaccauacugcaacuacuccaaauacugguaccucaaccacaccaucacugguaaaaccucccucccacgaugcuggcucgucagcaacggcuccuaccucaacgaaacccauuucuccgacgacauugaacagcaagccgacaacaugaucacggagcuacuacaaaaagaauacauggaucgacaaggcaaaacaccccucggucuagucgaccucuucgucuucuccaccucauucuaccugaucuccaucuuccuccaccuagucaaaauacccacccaccgacacgucauaggcaaacccugcccaaaaccccaucgccucaaccacaugggaauaugcucuugcggccucuacaaacacccaggcgucccagucaaguggaaacguuaa

SEQ ID NO: 5878 - RNA, 1473 nt, Artificial Sequence
  derived and/or modified protein sequence (opt11) from LASV(ISTH1121-NIG-2012;Clade II)__AIT17470__GPCstabilized
augggucaaaucaucacauucuuccaagaagucccacacgucaucgaagaagucaugaacauuguccucaucgcacucucacuccucgccauccucaaaggcauauacaacgucgcaaccugcggccuauucggccucgucucauuccuacuccuuugcggacgcuccugcuccaccacauacaaaggcgucuacgaacuccaaacccuagaacucgacauggccucccucaacaugaccaugccccucuccugcacaaagaacaacucacaccacuacauaauggucggaaacgaaaccggccucgaacucacccuuaccaacaccuccauuaucaaccacaaauucugcaaucucucagacgcacaccgcaaaaaccuuuacgaccacgcccucaugaguauaaucuccacuuuccaccucuccauccccaacuucaaccaauacgaagccaugagcugcgauuucaacggaggcaaaauauccguccaauacaaccuaucucacaccuacgccgucgacgccgccaaccacugcgggaccaucgcaaacggcguucuccaaaccuucaugcgaauggcauggggcggcuccuacaucgcccucgacuccggcugcgguucuugggacugcaucaugaccuccuaccaauaccuuaucauacaaaacaccacaugggaagaccacugucaauucucacgacccucccccaucggcuaccuuggccuccugucgcaacgcacgcgugacaucuacaucucacgccgccgccgcggcacguucacauggacacucagcgacucagaaggcaacgaaacccccggcggcuacugccucacacgcuggaugcuaaucgaagccgaacuaaaaugcuucggcaacacagccguagccaaaugcaacgaaaaacacgacgaagaguucugcgacaugcuacgccucuucgacuucaacaaacaagccauccgccgacucaagacucccgcccaaauguccauccaacucaucaacaaagcagucaacgcacucaucaaugaccaacucauaaugaaaaaccaccuccgcgacaucaugugcauccccuacugcaacuacuccaaguacugguaccucaaccacaccgucaccggcaaaaccucacuaccacguugcuggcucgucucaaacggcucuuaucucaacgaaacccacuucuccgacgacauagaacaacaggcugacaacaugaucacagaacuacuccagaaagaauauaucgaccgccagggcaaaacaccccucggccucguugaccucuucgucuucuccaccuccuucuaccucauaagcaucuuccuccaucucgucaaaauccccacccaccgccacgucauuggcaaacccugcccaaaaccccaccgacuuaaucacaugggcaucugcagcugcggccucuacaaacacccaggugucccagucaaguggaaacgcuag

SEQ ID NO: 5879 - RNA, 1473 nt, Artificial Sequence
  derived and/or modified protein sequence (opt11) from LASV(ISTH1129-NIG-2012;Clade II)__AIT17474__GPCstabilized
augggacagaucaucaccuucuuccaagaagucccccacguaaucgaagaagucaugaacaucguacuuauagcccuaucacuacucgcaauucucaagggcauauacaacgucgcuaccugcggccucuuuggccuaguauccuuccuccuccuaugcggaagaucaugcuccaccaccuacaaaggagucuacgagcuccaaacccucgaacuagacauggccagccuaaacaugaccaugccccuaucauguaccaaaaacaacucccaccacuauaucauggucggaaaugaaaccggccuagaacuuacacucaccaacaccucuauaaucaaccacaaauucugcaaccuaucugacgcucacaagaaaaaucuauacgaccacgcacucauguccaucauauccacauuccaccuauccauccccaacuucaaccaauacgaagccauguccugcgacuucaacggcggcaaaaucuccauccaauauaaccuaucacauaccuacgcugucgaugcagccaaccacugcggcaccaucgcaaacggcguccuucaaaccuucaugcgcauggccuggggcggcucauauaucgcacucgacucaggcugcggaucaugggauugcaucaugaccuccuaccaguaccucaucauacaaaacaccaccugggaagaccauugccaauuuucccgccccucccccaucggauaccugggccuucucucccaacgcacgcgcgacaucuacaucucucgccgccgacgaggaaccuucaccuggacccucucugacuccgaaggcaacgagacccccggcggcuacugccucacccgcuggaugcucaucgaagcagagcuuaaaugcuucggcaacaccgccgucgcaaaauguaacgaaaaacacgacgaggaguucugcgacaugcuacgacuauucgacuucaacaagcaagccauccgccgccucaaaacccccgcacaaaugucuauccaacucaucaacaaagccgucaacgcccucauaaacgaccaacucaucaugaagaaccaccuacgagacaucaugugcauccccuacugcaacuacucgaaauacugguacuuaaaccacaccaucaccggaaaaacaagccuaccccgcugcuggcucgucuccaacggguccuaccuaaacgaaacccacuucuccgacgacauagaacagcaagccgacaauaugauaaccgaacuccuacaaaaagaauacauugaccgacaagguaaaaccccgcucggacucgucgaccucuucgucuucucaaccucauucuaccucaucuccaucuuccuccaccucgucaaaauccccacacaccgacacauaacaggcaagcccugcccaaaaccccaccgccuuaaccacaugggcauuugcuccugcggacucuacaaacaccccggcguccccgucagauggaaacgcuaa

SEQ ID NO: 5880 - RNA, 1473 nt, Artificial Sequence
  derived and/or modified protein sequence (opt11) from LASV(ISTH1137-NIG-2011;Clade II)__AIT17478__GPCstabilized
augggccaaauaauaacauuuuuccaagaaguaccgcacgucaucgaagaagucaugaacaucgugcucaucgcucucucccuccucgcgauccucaaaggcaucuacaacguagccacgugcggacuauucggacucgucucauuccuccuacuaugcggccgaagcugcuccaccaccuacaaaggcgucuaugaacuccaaacacucgaacucgacauggcaucccucaacaugaccaugccccucuccugcacuaaaaacaacucccaccacuacaucauggucggcaacgaaacaggucucgagcucacccuaacgaacaccucaauaaucaaccacaaauucugcaaccuaucagacgcacacaagaaaaaccucuacgaccacgcccucaugagcaucaucuccacauuccaccuauccauccccaacuuuaaccaauacgaagccauguccugcgacuucaacggcggcaaaaucuccguccaguacaaccucucacacaccuacgccgucgacgcagccgaccacugcggaaccaucgccaacggcgugcuccaaacauucaugcgaauggccuggggcggaucauacaucgcccucgacuccggcugcggcuccugggacugcaucaugaccagcuaccaauaccugauaauacaaaacaccacaugggaagaccacugucaauucucccgacccucaccgauaggcuaccuaggccuacucucccaacgcacccgcgacaucuacaucucccgccgucgccgaggcaccuucaccuggacccugucagacuccgaaggcaacgagacucccggaggcuacugccuuacccgauggaugcucauagaagccgaacucaaaugcuucggcaacaccgccgucgccaaaugcaacgaaaaacacgacgaagaauuuugcgacaugcuacgacucuucgacuucaacaaacaagccaucucacgccucaagaccccggcccagaugagcauccaacuaaucaacaaagccguuaacgcucucaucaacgaccaacucaucaugaaaaaccaccuccgcgacaucaugugcauccccuacugcaacuacuccaaauacugguaccuaaaccacacagucacagguaagaccucccucccccgcugcuggcucgucuccaacggguccuaccucaacgaaacccacuucuccgacgacaucgaacaacaggccgacaacaugaucaccgaaaugcuccagaaggaauacaucgaccgccaaggcaaaacaccccuuggacucgucgaucucuucgucuucucaaccucauucuaccucaucuccaucuuccuacaucucgucaaaauccccacccacagacacgucaucggcaaacccugccccaaaccccaccgccuaaaccacaugggcaucugcucaugcggccucuacaaacacccagguguccccgucaaauggaaacguuaa

SEQ ID NO: 5881 - RNA, 1473 nt, Artificial Sequence
  derived and/or modified protein sequence (opt11) from LASV(ISTH2010-NIG-2012;Clade II)__AIT17482__GPCstabilized
augggccaaaucauaacauucuuccaggaagucccgcacgucaucgaagaggucaugaacaucguacuaaucgcccugucccuccuagccauacuaaaaggcauauacaacguagccacaugcggccuauucggccuugucuccuuccuccuccucuguggccgcuccugcucaaccaccuacaaaggcguauacgaacuccaaacacuagaacucgacauggccucccucaacaugaccaugccccucucauguaccaagaacaacucacaccauuacaucauggucggcaacgaaaccggccuggaacucacccucacuaauaccagcaucaucaaccauaaauucugcaaccuauccgacgcccacaagaaaaaccucuacgaccacgcacuaaugucgaucaucucaaccuuccaccuaucuauccccaacuucaaccaauaugaggccauguccugcgacuucaacggcggcaaaauaagcguacaauacaaccucucccacgccuacgcugucgaugccgcuaaccacugcggaaccaucgcuaacggaguccuacaaaccuucaugcgaauggccuggggcggcagcuacaucgcccuagacuccggaugcggcagcugggacugcaucaugaccuccuaccaauaccuaaucauccaaaacaucaccugggaagaccacugccaauucagccgcccaucaccaaucggcuaccucggccuucucucucaacgaacccgagacaucuacaucucccgccgccgccgcggaaccuucaccuggacucucucugacucagaaggcaacgaaaccccaggaggauauugccucacccguuggaugcucaucgaagcagaacucaaauguuucggcaacaccgccgucgccaaaugcaacgaaaaacacgacgaagaguucugcgacaugcuccgacucuucgacuucaacaaacaagccauccggcgacucaaaacccccgcgcaaauguccauacagcucaucaacaaagccguaaacgcccucaucaacgaccagcuuaucaugaaaaaccaccuucgcgacaucaugugcauccccuacugcaacuacuccaaauauugguaccucaaccacaccguaaccgguaaaacgagccucccccgcugcuggcucgucuccaacggcuccuaccucaaugaaacccacuuuuccgacgacaucgaacaacaagccgacaacaugaucaccgaacuccuucaaaaagaauacauagaccgccaagguaaaaccccgcucggccuaguagaccuuuucguauucucaaccucuuucuaccuaaucuccaucuuccuccaccucgucaaaauccccacccaccgacacgucguagguaaaccaugccccaaaccccaccgacucaaucacauggguaucugcuccugcggacucuacaaacaucccggcguacccgucaaauggaaacgcuaa

SEQ ID NO: 5882 - RNA, 1473 nt, Artificial Sequence
  derived and/or modified protein sequence (opt11) from LASV(ISTH2016-NIG-2012;Clade II)__AIT17486__GPCstabilized
augggccaaauaauaaccuucuuccaagaagucccacacgucaucgaagaagucaugaacaucguacuuaucgcccucucccuccuagcaauacucaaaggcaucuauaacguagcaaccugcggccuauucggccuugucucauuccuccuccuaugcgggcgcuccugcuccaccacauacaaaggaguauacgagcuacaaacacuagaacuugacauggccucucuaaacaugacaaugccccucucaugcaccaaaaauaacucacaccacuacaucaugguaggcaacgaaaccggccuagagcucacccucaccaacacgucaaucaucaaccacaaauucugcaaccucucagacgcccacaaaaagaaucuauacgaccacgcccuaauguccauaaucucaaccuuccaccucagcauccccaacuucaaccaauacgaagccauguccugcgacuucaacggcggcaaaauaucuguccaauacaaucuuucccacacauacgccgucgacgccgccaaccacugcggaaccaucgccaacgggguccuccaaaccuucaugcguauggccuggggcgguuccuacaucgcccucgacagcggcugcggcagcugggacugcaucaugaccuccuaccaauaccuaauuauacaaaacacuaccugggaagaccacugccaguucucacgccccucaccaguaggauacuuaggacuccucucccaacguacucgagacaucuacaucucacgccgccgccggggcaccuuuaccuggacccucuccgacuccgaaggcaacgagacaccuggcggcuacugccucacccgcuggaugcucaucgaagcagaacucaaaugcuuuggaaacaccgccgucgcaaaaugcaacgaaaaacacgacgaggaguucugcgacaugcucagacucuucgacuucaacaaacaggcaauccgacgccucaaaacaccagcucaaaugagcauccaacucaucaacaaagccgucaacgcacucaucaacgaccaacucaucaugaagaaucaccuccgagacaucauguguauccccuacugcaacuacucaaaauacugguaccucaaccacacggucaccggcaaaacaucccucccccgcugcuggcucguuuccaacggcucauaucucaacgaaacccacuuuagcgaugacaucgaacaacaagcugacaacaugaucaccgaacuccuccagaaagaauacauagaccgacaaggaaaaacuccccucggccuggucgaucucuucgucuucuccaccuccuucuaccuaaucuccaucuuccuccaccucgucaaaaucccaacccaccgccacgucaucggcaaacccugucccaaaccccacagacucaaccacaugggcaucugcucaugcggccucuacaaacaccccggcguacccgucaaauggaaacgcuaa

SEQ ID NO: 5883 - RNA, 1473 nt, Artificial Sequence
  derived and/or modified protein sequence (opt11) from LASV(ISTH2020-NIG-2012;Clade II)__AIT17490__GPCstabilized
auggggcaaaucaucaccuucuuccaagaagucccgcacgucaucgaggaaguaaugaacaucguccucauuacgcucucccugcuagcuauccuuaaaggcaucuacaacgucgccacuugcggccucuucggccuaguaucauuccuccuacucuguggccgaucaugcucuacuaccuacaaaggcguauacgaacuacagacccuggaacucgacauggccaaccucaacaugaccaugccccuaucuugcaccaaaaacaacucucaccacuauauuauggucggcaacgaaacaggccucgaacuuacucucaccaacaccagcaucauaaaccacaaauucugcaaccucuccgacgcccauaagaaaaaccuauaugaccacgcucucauguccaucauauccaccuuccaccuauccauacccaacuucaaccaauacgaggccauguccugcgacuucaacggcgggaaaaucuccguccaauacaaccucucacacaccuucgccgucgacgccgccaaccacugcggcacaaucgccaacggaguacuacaaaccuucaugcgaauggccuggggcggcuccuacauagcccuugacuccggcugcggcuccugggacugcaucaugacgucauaucaauaccuaaucauccaaaacaccaccugggaagaccacugccaauucagccgacccucacccaucggcuaccucggccuccuaucacaacgcacccgcgacaucuauaucucccgccgccgccgcggcaccuucaccuggacccucucagacucagaaggcaacgaaacaccaggcgguuacugccugacccgcuggaugcucaucgaagcagaacucaaaugcuuuggcaacaccgccguagccaaaugcaacgaaaaacacgacgaagaguucugcgacaugcuacgacucuucgacuucaacaaacaagccauccgacgacuaaaaaccccggcccaaaugucuauacaacucauuaauaaggcagugaacgcccucaucaacgaccaacuuauaaugaaaaaccaccuccgcgacauaaugugcauacccuacugcaacuacuccaaauacugguaccuaaaccacaccgucaccgguaaaaccucacuaccccgcuguuggcucgucuccaacggguccuaccucaacgaaacccacuucuccgacgacaucgaacaacaagccgacaauaugaucaccgaacuccuccaaaaagaauacauggaccgacaaggcaaaaccccacucggccucgucgaucuauucguauucucaaccuccuucuaccucauauccaucuuccuccaccuugugaaaaucccgacgcaucgccacauuaucggcaaaccaugccccaaaccccaccgucuaaaccacaugggaaucugcuccugcggccucuacaaacaccccggcguccccgugaaauggaaacgauga

SEQ ID NO: 5884 - RNA, 1473 nt, Artificial Sequence
  derived and/or modified protein sequence (opt11) from LASV(ISTH2025-NIG-2012;Clade II)__AIT17494__GPCstabilized
auggggcaaaucaucaccuucuuccaagaagugccccacgucauugaagaaguuaugaacaucguccucauagcccucucccugcuagccauccuaaagggcgucuacaacgucgcaaccugcggacuauucggccucgucuccuuccuccuccucugcggucgcuccugcuccacaauauacaaaggcgucuacgaacuccaaacacucgaacucgacauggccucccucaacaugacaaugccucucuccugcaccaaaaacaacagccaccacuacauaauggucggaaacgaaacaggccucgaacucacccucaccaacaccagcaucauaaaccacaaauucugcaaccucagcgacgcccacaagaaaaaccucuacgaccacgcccucaugucuaucaucucaaccuuccaccucuccauccccaacuucaaccaauacgaagccauguccugcgacuucaacggcgguaaaaucuccguucaauacaaccuuagccauacauaugccgucgacgccgccaaccacugcgguacaauagcgaacggcguucuacagaccuucaugcgcauggccuggggcggcuccuacaucgcacucgacuccggaugcggcuccugggacugcaucaugacaucauaccaauaccuuaucauccaaaacaccuccugggaagaccacugccaauucucccguccaucccccaucggcuaccucggccuucucucccaacgcacacgcgacaucuacaucuccaggcgccggcguggcaccuucacauggaccuuaagcgacucagaaggaaacgaaaccccaggcggcuauugccuaaccagauggaugcugaucgaagccgaacuuaaaugcuucggaaacaccgcaguggcuaaaugcaacgaaaaacaugacgaagaguucugcgauaugcuccgacucuucgacuucaacaaacaagccauacgccgccucaaaacccccgcccaaauguccauucaacucaucaacaaagccgucaacgcccucaucaacgaccagcucauuaugaaaaaccaccuccgagacaucaugugcauccccuacugcaacuacucaaaauacugguaccucaaccacaccgucaccggcaaaaccucccucccccgaugcuggcucgucuccaacggcucuuaccucaacgaaacccacuucucugacgacauagaacaacaagccgacaacaugaucaccgaacuccuccaaaaagaauacaucgaccgccaaggcaaaacccccuuaggacucguagaccuauucgucuucagcacaucauucuacuuaauauccauuuuucuacaccucgucaaaauccccacccaccgccacgugauugguaaaccaugccccaaaccacaccgccucaaccacaugggcaucugcuccugcggucucuacaaacaccccggcguccccguuaaauggaaacgauag

SEQ ID NO: 5885 - RNA, 1473 nt, Artificial Sequence
  derived and/or modified protein sequence (opt11) from LASV(ISTH2031-NIG-2012;Clade II)__AIT17498__GPCstabilized
augggccaaauaaucaccuucuuccaagaagucccacacgucaucgaagaagucaugaacaucguccucaucgcacucucccuucucgcaauccuuaaaggaaucuacaacgucgcaaccugcggacuauucggccugguauccuuccuccuccucugcggccgcuccugcuccaccaccuacaaaggaguuuacgaacuccaaacccuagaacuugacauggccucccucaacaugacuaugccacuguccugcacuaaaaacaacucucaccacuacaucauggucggaaacgaaaccggccucgagcucacccucaccaacacauccaucaucaaucacaaguucugcaaccucuccgacgcccacaagaaaaaccuauacgaccaugcacucaugucgaucaucuccacauuucaucucuccauacccaacuucaaccaguacgaagccauguccugugacuucaacggcggcaaaaucuccgugcaauacaaccucucccacaccuaugccguugacgccgccaaucacugcggcaccaucgccaacggcguccuacaaaccuuuaugcgcauggccuggggcggaagcuacauagcccuugacuccggcugcggaaacugggacugcaucaugaccucauaccaauaccucaucauucaaaacaccacaugggaagaccacugccaauucuccaggcccucccccaucggcuaccucggucuacucucacaacgcacccgcgauaucuacaucucccgccgccgucgcggcaccuucacauggacccuaagcgauucagaagguaacgaaacccccggcggcuacugccuaacccgauggaugcucaucgaaacagaacuuaaaugcuucggcaacaccgccgucgcaaaaugcaacgaaaaacacgaugaggaguucugcgacaugcuacguuuauucgacuucaauaaacaagccauaucccgccuccgcuccccugcucagauguccauccaacucaucaacaaagcugucaacgcacuaaucaacgaccaacucaucaugaaaaaccaccuccgugacaucaugugcauccccuacugcaacuacaguaaauauugguaccucaaccacaccgugaccggcaaaacaucacuccccaaaugcuggcucguaucuaacggcucauaccuaaacgaaacucacuucuccgacgacaucgaacaacaggccgacaacaugaucacagaaaugcuccaaaaagaauacaucgaccgucaaggcaaaacaccccucggccuagucgaccucuucguauucucaacauccuucuaccucaucuccauauuucuacaccuagucaaaauccccacccaccgccacauuaccggaaaacccugccccaaaccccaccgacuaaaccacaugggcaucugcuccugcggccucuacaaacaccccggcguccccgucaaauggaaacgcuaa

SEQ ID NO: 5886 - RNA, 1473 nt, Artificial Sequence
  derived and/or modified protein sequence (opt11) from LASV(ISTH2037-NIG-2012;Clade II)__AIT17502__GPCstabilized
augggccaaaucaucacuuucuuccaagaaaucccacacgucaucgaagaggucaugaacaucgucuuaaucacccucucgcuccucgccauacuaaaaggcaucuacaacgucgccacaugcggccuuuucggccucguaucauuccuccuccucugcggcaaauccugcagcaccacuuacaaaggcgucuacgagcuacaaacccucgagcucgacauggccucccucaacaugaccaugccccuuuccuguaccaagaacaacucccaccacuacauaauggucggaaacgaaacaggccucgaacuuacgcuaaccaacacauccauuaucaaucacaaauucugcaaccuaucagacgcacaccgcaaaaaccuauacgaccacacccucauguccauuaucuccaccuuucaccucuccauaccaaauuucaaccaauacgaagcaaugagcugcgacuucaauggcggcaaaauaucuguccaauacaacuuaucacacgccuacgccaucgacgccgccacccacugcggcaccaucgcuaacggcguccuccaaacguucaugcgcauggcauggggcgguucauauauugcccucgacucuggcugcggaggcugggacugcaucaugaccuccuaccaauaccucaucauucaaaacaccaccugggaagaccacugccaauucucccgccccagcccgaucgguuaccucggccuacuaagucaacgcacccgugacaucuacauaucccgucgccgacgaggcaccuucaccuggacccucuccgacuccgaagguaaugaaaccccuggaggauacugccuaacacgcuggaugcucaucgaagccgaacuaaaaugcuucggcaacaccgccgucgccaaaugcaacgaaaagcacgacgaggaauuuugcgacaugcuccgacucuucgacuucaacaaacaagccauacgccgccucaagacacccgcccaaauguccauccaacucaucaacaaagccguaaacgcacuaaucaacgaccaacucaucaugcgcaaccaccuucgcgacaucaugugcauuccauacugcaacuacuccaaauacugguaccucaaccacaccgucaccggcaaaaccucucuccccaagugcuggcucgucuccaacggcuccuaccuaaaugaaacccacuucucagacgacaucgagcaacaagcagacaauaugaucaccgagcuucuccaaaaagaauacauggaccgccaagguaaaacaccccucggccuagucgaccuguucgucuucuccaccucuuucuaccucaucuccaucuuccuacaccucguaaaaauacccacccaccgacacgucaucggcaaaccaugcccuaaaccccaccgucucaaucacaugggcgucugcuccugcggccucuacaaacaccccggcguccccgucaaauggaagcgcuaa

SEQ ID NO: 5887 - RNA, 1473 nt, Artificial Sequence
  derived and/or modified protein sequence (opt11) from LASV(ISTH2042-NIG-2012;Clade II)__AIT17506__GPCstabilized
augggccaaaucauaaccuucuuccaagaggucccucacgucaucgaagaagucaugaacauaguccuuaucgcccucagccuccucgcuauccucaagggaaucuacaacgucgcaaccugcggccucuucggccuagucucauuccugcuucuuugcggacgauccugcuccacaaccuacaaaggcguauacgagcuccaaacacucgaacucgacauggccucacucaacaugaccaugccccucucaugcaccaaaaacaacagccaccacuacauaaugguuggcaaugaaaccggacucgaacuaacccucacuaauacauccaucaucaaccacaaauucugcaaccuaagcgaugcccacaagaaaaaccuauacgaucacgcucuaauguccaucaucuccaccuuccacuuauccaucccaaacuuuaaccaauacgaagcaauguccugcgacuucaacggcggcaaaaucuccguccaauacaaccuaucccacgcauacgcagucgacgccgcagaacacugcggcacaaucgcaaacgguguccuacaaaccuucaugcgaauggccuggggcggcuccuacauagcacuugacuccggcugcggauccugggacugcguaaugacaagcuaccaauaccuaaucauacaaaacaccaccugggaggaccauugccaauucucccgccccucccccaucggcuaccuaggccuccuuucccagcgaacacgcgauaucuacaucucccgacgcagacgcggcacauucaccuggacccucuccgacuccgaaggcaacgaaacaccaggcggcuacugccuaacccgauggaugcuuaucgaagcagaacucaaaugcuucggaaauaccgccguagccaaaugcaacgagaaacaugacgaagaguucugcgacaugcucagacucuucgacuucaacaaacaagcaaucgaacgccugaaaacccccgcccaaauguccauccaacuaaucaacaaagccguaaacgcccucaucaacgaccaacucaucaugaaaaaccaccuccgugacaucaugugcauccccuacugcaacuacucaaaguacugguacuuaaaccacaccgucaccggcaaaaccucacugccccgcugcuggcucgucuccaacggcuccuaccucaacgaaacacacuucuccgacgacaucgaacaacaagcugauaacaugaucaccgaaaugcuccaaaaagaauacauagaccgucagggcaaaacaccacucggccucguagaccuguucgucuucagcacuuccuucuaccuaauauccaucuuccuccaccuugucaaaaucccaacacaucggcacgucaucggcaaacccugccccaaaccccaccgacuaaaccacaugggcauaugcucgugcggccucuacaagcaccccggcgugcccgucaaauggaaacgcuaa

SEQ ID NO: 5888 - RNA, 1473 nt, Artificial Sequence
  derived and/or modified protein sequence (opt11) from LASV(ISTH2046-NIG-2012;Clade II)__AIT17510__GPCstabilized
augggccaaauaauaaccuucuuucaagaggucccccacgucaucgaagaaguaaugaacaucguccuaaucgcccucucccuccucgccauacucaagggaaucuacaacgucgccacaugcggccucuucggccuagucucauuccuccuccuaugcggccgcagcugcucaaccacauacaagggcgucuacgaacuacaaacccucgaacuggacauggcaucccucaacaugacaaugccccuaucaugcaccaaaaacaacucccaccacuacauaauggucggcaacgaaacaggccuagaacucacccuaaccaacaccuccauaauuaaccacaaauucugcaaccuaucggacgcacacaagaaaaaccucuacgaucacgcccuaauguccaucauaucaacauuccaccucucgauccccaacuucaaucaauacgaggcaauguccugcgacuucaacgggggcaagauauccguccaguacaaccucucccacaccuacgccgucgacgccgccaaccacugcggcacaaucgccaauggaguacuccagacauucaugcggauggccuggggcggcuccuacaucgcccucgacuccggcugcggcuccugggacugcaucaugaccuccuaccaauaucuaaucauccaaaacaccacgugggaggaccacugccaauucucacgccccucccccauuggcuaccucggccuccuuagccagcgcaccaaagauaucuacauaucacgacgccgccguggcaccuucaccuggacccucucagacuccgaaggcaacgagacucccggaggcuacugccuaacccgauggaugcuaaucgaagcagaacucaaaugcuucggcaacaccgccgucgccaaaugcaacgaaaaacacgaugaagaguucugcgacaugcugcgacucuucgacuucaacaaacaagccauccggcgccuuaaaacacccgcccaaaugucuauccaacucaucaacaaagccguaaacgcacucaucaaugaccaacuuaucaugaaaaaccaccuccgcgacaucaugugcauacccuauugcaacuacuccaaauacugguaccucaaucacacagucaccggcaaaacuucacuaccccgcugcuggcucgucuccaacggcagcuaccucaacgaaacccacuucagcgacgauaucgaacagcaagccgacaacaugaucacagaacuacuccaaaaggaauacaucgaccgccaaggcaaaaccccacucggccucgucgaccucuucgucuucucgacauccuucuaccucauuucaaucuuccuccaccucgucaaaauaccaacccaccgacacgucaucggcaaacccuguccaaaaccccaccgacucaaccacaugggcaucugcucaugcggccucuacaaacacccaggcguacccgucaaauggaaacgcuga

SEQ ID NO: 5889 - RNA, 1473 nt, Artificial Sequence
  derived and/or modified protein sequence (opt11) from LASV(ISTH2050-NIG-2012;Clade II)__AIT17514__GPCstabilized
augggacaaaucaucaccuucuuccaagaagucccucacgugaucgaagaaguaaugaacaucguccuaaucgcccuaagccuccucgccguccucaaaggcaucuacaacguugcaaccugcggacuauucggccuaguaucguuccuccuccucugcggacgguccugcuccaccaccuacaaaggcgucuacgaacuccaaacacuagaacucgacauggccucacucaacaugacaaugccgcucucaugcacaaagaacaauucacaccacuacauuaugguaggaaacgaaaccggccucgagcucacccucacaaacaccucaaucauaaaccacaaauucugcaaccucucagacgcccacaagaaaaaccucuacgaccacgcccucauguccaucaucuccaccuuccaccucuccaucccaaacuucaaccaauacgaagcaauguccugcgacuucaacgggggaaaaaucuccguccaauacaaccucucgcacaccuacgccgucgacgccgccaaccacugcggcaccaucgccaacggaguucuacaaaccuucaugcgcauggccuggggcggcuccuacaucgcccucgacucagguugcggcucgugggacugcaucaugaccucauaccaauaccucaucauccagaacaccaccugggaagaccacugccaauucucacgccccucuccaaucggcuaucucggucuacucagccaacgaaccagagacaucuacaucucccgccgccgccgcggaaccuucacuuggacccuauccgacucugaaggaaacgagacuccaggaggauacugccuaacccgcuggaugcucaucgaagccgaacuaaaaugcuucggaaacaccgccguugccaaaugcaacgagaaacacgacgaagaguucugugacaugcuccgccucuucgacuucaacaaacaagccauacggcgacucaaaacaccagcccaaaugagcauacaacucaucaacaaagccguaaaugcccuaaucaacgaccaacucaucaugaaaaaccacuugcgcgacaucaugugcauccccuacuguaacuacuccaaguacugguaccuaaaccacaccguaaccggaaaaacaucccucccccgcugcuggcuagucuccaacggcuccuaucucaacgaaacccacuuuuccgacgauaucgaacagcaagccgacaacaugaucaccgaacuucuccaaaaagaauacaucgaccgccagggcaaaacaccccucggccucgucgaccucuuugucuucuccaccagcuucuaccucaucucuauauuccuucaccucguuaagauacccacccaccgacacguaaucggcaaaccaugcccaaaaccccaccgacucaaccacaugggcaucugcagcugcggucuauaccgacacccaggcgugcccgugaaauggaaacgcuaa

SEQ ID NO: 5890 - RNA, 1473 nt, Artificial Sequence
  derived and/or modified protein sequence (opt11) from LASV(ISTH2057-NIG-2012;Clade II)__AIT17518__GPCstabilized
augggccaaaucauaaccuucuuccaagaaguuccccacgucaucgaagaagugaugaacaucgugcucaucgcccucucgcuacucgcaauccuaaaaggaaucuauaacguugccacuugcggccuuuucggccuaguauccuuccuccuacugugcggccgcucuuguuccaccacauacaaaggcgucuacgaacuacaaacacuagaacuugacauggccucccugaacaugaccaugccccuaucuugcacaaagaacaacucccaccacuacaucauggucggaaacgaaacaggacucgaacucacacuaaccaacaccucaauuauaaaccacaaauucugcaaccuuuccgacgcccacaagaaaaaccucuacgaccacgcccuaauguccaucaucagcaccuuccaccucuccauccccaacuucaaccaauacgaagccaugucuugcgacuucaacggcggcaaaaucuccguccaauacaaccucucgcacgccuacgccgucgacgcagccaaccacugcggaaccauagccaacggcguccuccaaacauucaugcgcauggccuggggaggcagcuacaucgcacuggacuccggcugcggcuccugggacuguauuaugaccuccuaccaauaccuaaucauccaaaacacuaccugggaagaccacugccaauucuccagaccuuccccaaucggcuaucugggccuccucucacaacgaacccgcgacauauacauaucccgucgccgccgcggcaccuucaccuggacacucagcgacuccgaaggaaacgaaacacccggaggcuacugccucacccgcuggaugcucaucgaagccgaacucaagugcuucggaaacacugcagucgccaaguguaacgaaaaacacgacgaagaguucugcgacaugcuccgacuauucgauuucaacaaacaagccauacgccgccucaagacccccgcucaaauguccauccaacugaucaacaaagccgucaacgcccuuaucaacgaccaacucaucaugaagaaccaccucagagacauaaugugcauccccuacugcaacuacuccaaauacugguaccuaaaccacaccgucaccggaaaaaccucacuuccccgcugcuggcucguuucaaacggcuccuaccucaacgaaacccacuucucagacgacauugagcaacaagcagacaacaugaucaccgaacuacuacaaaaagaauacauggaccgccaaggaaaaacaccccucggccucguugaucucuucguuuucuccaccuccuucuaccucaucucaaucuuccuccaccucgucaaaaucccaacccaccgucacguaauaggcaagccaugccccaaaccccaccgacucaaccauaugggcaucugcuccugcggccucuacaaacacccggguguacccgucaaauggaaacgguga

SEQ ID NO: 5891 - RNA, 1473 nt, Artificial Sequence
  derived and/or modified protein sequence (opt11) from LASV(ISTH2064-NIG-2012;Clade II)__AIT17524__GPCstabilized
augggucaaaucaucaccuucuuccaagaaguaccccacgucaucgaagaagucaugaacaucguacucauagcccucucccuccuugccauccucaaaggcauauacaacguagccacaugcggccuauucggccucguguccuuccuacuacuaugcggacgcucauguuccacaaccuacaaaggcgucuaugaacuccaaacccucgaacucgacauggccucccuuaacaugaccaugccccucucuugcaccaaaaacaacucacaccauuacauaauggucggaaacgaaaccggacuugaacuaacucucaccaacaccuccaucauaaaccacaaauucugcaaccucuccgacgcccauaagaaaaaccucuacgaccacgcccucaugucaauaaucuccaccuuccaccuaagcauccccaacuucaaccaauaugaggcaauguccugcgacuucaauggaggcaaaaucuccguccaauacaaccucagccacacauacgccauagacgcagccaaccacugcggcacaaucgccaauggcgugcuccaaacuuucaugcgaauggcauggggaggcuccuauaucgcucucgacuccggcugcggcuccugggauugcaucaugaccucauaccaauaccucaucauccaaaacaccacaugggaagaccacugccaguuuagccgcccaucacccaucggcuaccuaggucuccucagccaacgcacucgcgacaucuacaucuccagacgaagacgcggaacauucaccuggacccucuccgacuccgaaggcaacgaaacucccggcggcuacugccucacucgcuggaugcuaauagaagcagaacucaaauguuucggaaacacugccgucgccaaaugcaacgaaaaacacgacgaagaguucugcgauaugcugcgacucuuugauuucaacaaacaagccauccgacggcuaaaaacacccgcacaaauguccauccaacucauaaacaaagccgucaacgcucucauuaaugaccaacuaauuaugaaaaaccaccuccgugacaucaugugcauccccuauugcaauuacucuaaauacugguaccucaaccacaccguaaccggcaaaaccucccuuccccgcugcuggcucgucuccaacggcuccuaccucaacgaaacccacuucuccgacgacaucgaacaacaggccgacaacaugaucacugaaaugcuccaaaaagaauacauggaccgacaaggcaaaacaccccugggccuaguagaccucuucgucuucuccaccuccuucuaccucauauccauauuccuccaccucguaaagauccccacccaccgccacgucaucggcaagccaugccccaaaccacaccgccucaaccacaugggcaucuguuccugcggccuuuacaaacauccaggcgucccaguaaaauggaaacgcuga

SEQ ID NO: 5892 - RNA, 1473 nt, Artificial Sequence
  derived and/or modified protein sequence (opt11) from LASV(ISTH2065-NIG-2012;Clade II)__AIT17528__GPCstabilized
augggccaaaucauaaccuucuuccaagaagucccccacgucaucgaagaaguaaugaacauaguacucaucgcacucucccuccucgccaugcucaagggcaucuacaacaucgccacaugcggacucuucggccuaauauccuuccugcuucucugcggccgcuccuguagcacaaccuacaaaggcgucuacgaacuccaagcgcuggaacucgacauggccaaccucaacaugaccaugccccucagcugcaccaaaaacaacucccaccacuauauaaugguaggaaacgaaacuggacucgaacuaacacucacaaacaccuccaucaucaaccacaaauucugcaaccucucugacgcccauaagaaaaaccucuacgaccacgcccuaaugucaauaaucagcaccuuucaccucucgauucccaacuucaaccaauacgaagccaugucgugcgacuucaacggcggaaaaaucuccguucaguacaaccucucacacacauacgcaggcgacgccgcaaaacacugcggaaccaucgccaacggcguucuccaaacguucaugcgcauggcuuggggcgggucuuacaucgcccucgacuccggcugcggcaacugggacugcaucaugacuagcuaucaauaccucaucauccaaaacacaacaugggaagaucacugccaauucucccgccccuccccaaucggauaccucggccuucuuucccaacgcacucgcgacaucuacaucucccgacgcagacgcggcacuuucaccuggacccucuccgacuccgaaggcaacgaaacccccggaggcuacugccugacccgcuggaugcuaaucgaagccgaacucaaaugcuucggcaacacagccgucgcuaaaugcaaugaaaaacacgaugaagaguucugcgacaugcuccgccucuuugacuucaacaaacaagccauccgccgccucaaaacccccgcccagauguccauccaacucauaaacaaagccgucaacgcccucaucaaugaccaacucaucaugaaaaaccaccuccgcgacaucaugugcauccccuacugcaacuacagcaaauacugguaccucaaccacucagucacaggucgaaccucccuuccucgcugcuggcuagucagcaacggcuccuaccucaacgaaacccaauucuccgacgacaucgaacaacaagcugacaacaugaucaccgaaaugcuccaaaaagaauacaucgaccgacaaggaaaaaccccacuaggccucgucgaccuauucgucuucuccaccucauucuaccucaucuccaucuuccuccaccucaucaaaauccccacccaccgccacauagucggcaaacccugccccaaaccccaccgccucaaccacaugggcauuugcucaugcggacuauacaaacauccuggcauccccguaaaauggaaacgcuaa

SEQ ID NO: 5893 - RNA, 1473 nt, Artificial Sequence
  derived and/or modified protein sequence (opt11) from LASV(ISTH2094-NIG-2012;Clade II)__AIT17538__GPCstabilized
augggccaaaucauaacauucuuccaagaagucccacacgucaucgaggaaguaaugaacaucguccuuaucgcccucucacuucuggccauccuaaaaggcauauacaacaucgcaaccugcggccuguucggccucaucuccuuccuccuacucugcggccgcucaugcuccacaaccuacaaaggcgucuacgaacuccaaacccuggaacucgacauggccaaccucaacaugacuaugccccuuuccugcaccaaaaauaacucccaccacuacaucaugguaggcaacgaaaccggccuggaacucacccucaccaacaccuccauaaucaaccacaaauucuguaaccucucagacgcccacaagaaaaaccucuaugaccacgcccuaauguccauuaucuccacauuccaccuauccauacccaacuucaaccaauacgaagccaugucaugcgacuucaacgaaggcaaaaucagcguccaauacaaccuaucacacucuuacgccaucgacgcagccggccacuguggaaccauagccaauggcguacuacaaaccuucaugcgcauggcauggggcgguucauacauagcacuagacuccggaugcggcaacugggacugcaucaugacguccuaccaauaucuuaucauacagaacaccaccugggaagaccacugccaauucucccgccccucccccaucggcuaccuaggacuccucucccaacgcacccgcgacaucuauaucucccgcagacgacgcgguaccuucacauggacccuguccgacuccgaaggcaaugaagcccccgguggauacugccucacucgauggaugcucaucgaggcagaacucaaaugcuucggcaacaccgcaauagccaaaugcaacgaaaaacacgacgaagaguucugcgacaugcuacgacuauucgacuucaacaaacaagccauaaaacgccucaaagcccccgcccaaauguccauccaccucaucaacaaagccguuaacgcccucauuaacgaccaacucaucaugaaaaaccaccuccgcgacaucaugugcaucccauauugcaacuauuccaaauacugguaccucaaccacaccgucaccggcaaaaccucccuccccaaaugcuggcucguguccaacggcuccuaccugaacgaaacccacuucuccgacgacaucgaacaacaagcagacaacaugauaaccgagcuucuucaaaaagaauacauggaccgccaaggcaaaaccccucuaggucucguugaccucuuuguuuucucgacuuccuucuaccucaucuccaucuuccuccaccucguuaaaaucccaacacaccgccacauaguuggccgcccuugccccaaaccccacagacuaaaccacaugggcaucugcuccugcggccucuacaaacaccccggaguccccgucaaauggaagcgcuaa

SEQ ID NO: 5894 - RNA, 1473 nt, Artificial Sequence
  derived and/or modified protein sequence (opt11) from LASV(ISTH2129-NIG-2012;Clade II)__AIT17544__GPCstabilized
augggccagaucauaaccuucuuccaagaagucccccacgucaucgaagaagucaugaauaucguacuuaucgcacuaucacuccuagccauacucaaaggcaucuauaacgucgccacaugcggccucuucggccuagucuccuuccucuuacucugcggaagaucaugcuccaccaccuacaaaggcgucuacgaacuccaaacacucgaacucgacaugggcucccucaacaugacaaugccacugucgugcaccaaaaauaacucccaccauuacaucauggucggcaacgaaaccggccucgaacucacccucaccaacaccuccaucaucaaccacaaauucugcaaccucuccgacgcccauaagaaaaaucuauacgaccacgcccucauguccauaaucuccaccuuccaccucucuauccccaacuucaaccaauacgaggccauguccugcgauuucaacgguggcaaaaucucaguccaauauaaccuuagccacucuuacgccgucgacgccgccaaccacugcgguacaauagccaacggcguacuccaaaccuucaugagaauggccugggguggcucauacaucgcacucgacuccggcugcggcagcugggacugcaucaugaccuccuaccaauaccucaucauccagaacaccaccugggaagaccacugucaguucuccagacccucccccaucgguuaccucggccuccucucccaacgaacccgcgacaucuacauaucacgacgccgccgcggcaccuucacauggacacucucagacagcgaaggcaacgaaacccccggcggcuacugccuaacccgauggaugcucaucgaggccgaacuaaaaugcuucggcaacacagccgucgcgaaaugcaacgaaaaacacgacgaagaguucugcgauaugcuaagacucuucgacuucaacaaacaggccauccgacgccucaaaacccccgcccaaaugucaauacaacucaucaacaaagcugucaacgcccuaaucaaugaccaacucaucaugaaaaaucaccuccgagacaucaugugcauaccauacugcaacuacuccaaauacugguaccucaaucauacaguaaccggcaaaacaagccucccccgcugcuggcuugucucaaacggaagcuaccucaacgaaacccacuucuccgacgauauagaacaacaagcagacaacaugaucaccgaacuacuacaaaaagaauacauggaccgccaagguaaaaccccucuaggccucgucgaccucuucgucuucucaaccucauucuaccuaaucucuaucuuccuccaccucgucaaaauccccacacaccgccacauaaucggcaaaccaugcccgaaaccccaccgccucaaccacaugggcaucugcuccugcggccucuacaaacaccccggcgucccagucaaauggaaacgauaa

SEQ ID NO: 5895 - RNA, 1473 nt, Artificial Sequence
  derived and/or modified protein sequence (opt11) from LASV(ISTH2217-NIG-2012;Clade II)__AIT17548__GPCstabilized
augggucaaaucaucaccuucuuccaggaaguaccgcacgucaucgaagaagucaugaacaucguucuaaucgcccuaucucuucucgccauacuaaaaggcaucuacaacgucgcaaccugcggccucuucggccuagucuccuuccucuuucucugcggccgcuccugcucgaccaccuacaaaggcgucuacgaacuacaaacccuugaacucgacauggccucccucaacaugaccaugccccucuccugcaccaaaaauaacucccaccacuacaucauggucggcaacgaaacaggacuugaacuaacccucaccaacacauccaucaucaaccacaaauucugcaaccuauccgacgcccacaaacgcaaccucuacgaccaugcacucauguccaucauauccaccuuccaccucucaauaccuaacuucaaccaguaugaagccauguccugcgacuuuaacggcggcaaaaucuccguacaauacaaccucucccaugcauacgccggcgaugcagccaaacacugcggcaccaucgccaacggcguacuccagaccuucaugcgcauggccuggggcggcuccuacaucgcccucgacuccggcugcggauccugggacugcaucaugaccuccuaccaauaucuaaucauacagaacaccaccugggaagaccacugccaauucucacgacccuccccaaucggauaccucggccuucucucccaacgaacucgcgacaucuacaucuccagacgccgacgcgggaccuucacuuggacccucuccgacuccgaaggcaacgaaacccccggaggcuacugccucacccgauggaugcucaucgaagccgaacucaagugcuucggcaacaccgccgucgccaaaugcaacgaaaaacaugacgaagaguucugcgacaugcuaagacucuucgacuucaacaaacaagcaauccgccgucuccgcaccccagcccaaauguccauccagcuaaucaacaaagccgucaacgcacucaucaacgaccaacucauuaugaaaaaccaccuacgcgacaucaugugcauccccuauugcaacuacucaaaguacugguaucucaaccauaccguaaccggaaaaacuucccuaccaaaaugcuggcucguaucaaacggcuccuaccugaacgaaacacacuucagcgacgacaucgaacaacaagccgacaauaugaucaccgaaaugcuacaaaaagaauacaucgaccgccaaggcaaaaccccucuaggccuuguggaccucuucgucuucagcaccagcuucuaucucauauccaucuuccuacaccuagucaaaauccccacccaccgccacgucaucggcaaacccugccccaaaccucaccgacuaaaccacaugggcauaugcucaugcggccucuacaaacaccccggaguaccaguaaaguggaaacgauaa

SEQ ID NO: 5896 - RNA, 1473 nt, Artificial Sequence
  derived and/or modified protein sequence (opt11) from LASV(ISTH2271-NIG-2012;Clade II)__AIT17552__GPCstabilized
augggacaaaucaucacauucuuccaagaaguaccccacgucaucgaagaagucaugaacauaguccucaucgcccuaucacuacucgccauccuuaaaggaaucuacaacgucgcaacuugcggccucuucggccuugucucauuccuccuacuuugcggccgcucaugcucuaccacauacaaaggaguuuacgaacuccaaacccuggaacucgacauggccucccuaaacaugaccaugccccuaucuugcaccaaaaacaacucccaccacuacaucaugguuggcaacgaaacaggccucgaacuuacccuaacuaacacguccauaaucaaccauaaauucugcaacuuaucugacgcccacaagaaaaaccucuacgaccacgcccucaugagcaucaucucaaccuuccaccucagcauacccaacuucaaccaauacgaagccaugucaugugacuucaacggcggcaaaauaucagugcaauacaaccucucacacgcuuacgccguuaacgcagccaaccacugcggcaccaucgccaauggcguccuccagaccuucaugcgcauggccuggggcggcucauacauagcucucgacuccggcugcggcucaugggacugcaucaugacuagcuaccaauaccucaucauacaaaacacaacaugggaagaccacugccaauucucccgccccucccccaucggauaccucggccuccucucacaacgaacccgcgacauauacauuucacgccgaagacgcggcacauucaccuggacacuauccgauuccgaaggcaacgagacccccggcgguuacugccucacccgauggaugcucaucgaagccgaacugaaaugcuucggaaacaccgccguagcgaaaugcaacgagaaacacgacgaagaguucugcgacaugcucagacucuucgauuucaacaaacaagccauccgccgacucaaaacacccgcccaaaugucaauccaacuaaucaacaaagcagucaacgcccucaucaacgaucaacucaucaugaagaaccaccuccgcgacauaaugugcauccccuacugcaauuacuccaaauacugguaucucaaucacaccgucaccggcaaaaccucacucccccgcugcuggcuagucucaaacggcagcuaccuaaacgaaacucacuucuccgacgacaucgaacagcaagccgacaacaugaucaccgaacuccuucaaaaagaauacauggaccgccaaggcaaaacuccccucggccuaguagaucucuucgucuucucaaccucauucuaccuaaucuccaucuuccuacaccucgucaaaaucccaacacaccgccacgucaucggaaaacccugccccaaaccccaucgccucaaucacaugggaaucugcuccugcggccucuacaaacaccccggcguacccgucaaauggaagaaauaa

SEQ ID NO: 5897 - RNA, 1473 nt, Artificial Sequence
  derived and/or modified protein sequence (opt11) from LASV(ISTH2304-NIG-2012;Clade II)__AIT17556__GPCstabilized
auggggcaaaucauuaccuucuuccaagaagugccacacguaaucgaagaagucaugaacauaguucucauagcccucucccuucuagcaauacucaaagguauauacaacguagcaacaugcggucucuucggacucgucuccuuccuucuacucugcggccgcuccugcuccacuaccuacaaaggagucuacgaacuacaaacccuagaacuugacauggccucucucaacaugaccaugccacucuccugcaccaaaaacaacucccaccacuacaucaugguaggcaacgaaacaggacuagaacucacccuaaccaacaccuccauaaucaaccacaaauucugcaaccucuccgacgcgcacaagaaaaaccucuacgaccacgcccuaauguccaucaucuccacauuccaccucuccaucccaaacuucaaccaauacgaagcuauguccugcgacuucaacggaggaaaaaucucaguccaguacaaccucucccacacuuacgcuguagacgccgcaaaccacugcggcaccaucgccaacggcguccuccaaacauucaugcggauggccuggggcggcuccuacaucgcccucgacucaggcugcggcuccugggacugcauaaugaccagcuaccaauaccuaaucauccaaaacaccacaugggaagaccacugccaauucucucgcccaucccccaucggcuaccuaggccuccuaucccaacgcacccgcgacauauauaucucaagacgccgccgcggcaccuucaccuggacacuaucugacucagaaggaaacgagacccccggagguuacugccucacacguuggaugcuaaucgaagccgaacuaaaaugcuucggcaacaccgccguagcgaaaugcaacgaaaaacacgacgaagaguucugcgacaugcuucgccucuucgauuucaacaaacaagccauccgccgccuuaaaacccccgcccaaaugucaauccaacuaaucaacaaagccgucaacgcacucaucaacgaucaacucauaaugaaaaaucaccuccgcgacaucaugugcauucccuacugcaacuacuccaaauacugguaccucaaccacaccaucaccggcaaaaccucccucccccgaugcuggcucgucuccaacgggagcuaccucaacgaaacacacuucuccgacgacaucgaacagcaagcagacaacaugauaacugaacuacuccaaaaagaauacaucgacagacaagguaaaacaccccuaggccuugucgaccuauucguauucuccaccuccuucuaccuuaucuccauuuuccuccaucuaguaaaaauucccacccaccgccacaucacuggaaaacccugcccaaaaccccaucgccucaaccacaugggcaucugcucaugcggccuguacaaacaccccggcguccccguacguuggaaacgcuaa

SEQ ID NO: 5898 - RNA, 1473 nt, Artificial Sequence
  derived and/or modified protein sequence (opt11) from LASV(ISTH2312-NIG-2012;Clade II)__AIT17560__GPCstabilized
augggacaaaucaucaccuucuuccaggaagucccccacgucaucgaagaagucaugaauauagugcucauugcccuaagccuccucgccguacucaaaggaauauacaacgucgccacaugcggccuauucggccucgucuccuuccuccuccuaugcggacgcuccugcucuaccaccuacaagggcgucuacgaacuacagacucucgaacuagacauggccucccucaacaugaccaugccucucuccugcaccaccaacaacagccaccacuacaucaugguuggaaacgaaacaggccuggaacugacccucaccaauaccuccauaaucaaccacaaauucugcaaccucucagacgcacacaagaaaaaccucuaugaccacgcccuaaugucgaucaucuccacauuccaccuuuccauccccaacuucaaccaguacgaagccauguccugcgacuuuaacggcgguaaaaucuccguccaauacaaccuaucacacgccuacgccggagaagcagccaaccacugcggcaccauagccaacgguguccuccagacauucaugcgcauggcauggggcggcuccuacaucgcccucgacucaggcugcggcuccugggacugcauaaugaccucauacaaauaccucauaauucaaaacaccaccuggggugaccacugccaauucucacgacccucacccaucggcuaccucggccuacucucccaacgcacacgugauaucuacauaucccgacgucgacgcggaacauucacauggacccucucagacagugaaggaaaugaaacccccgggggcuacugccuaacucgauggaugcucaucgaggccgaacucaaaugcuucggaaacaccgcuguagccaaaugcaacgaaaaacaugacgaagaguucugcgacaugcuacgccucuucgacuucaacaaacaagcaauacgcaaacuaaaaaccccagcccaaaugagcauccaacuaaucaacaaagccgucaacgcccuuauaaacgaccaacucauaaugaaaaaccaccuccgcgacaucaugugcauccccuacugcaacuauucacgcuacugguaccucaaccacaccgucacaggccgaacaucccucccacgcugcuggcucgucagcaacggcuccuaucucaacgaaacacacuucucagacgacauagaacaacaagcagacaacaugaucaccgaacuccuucaaaaagaauacauagaccgccaaggcaaaaccccacuaggccucgucgaccucuucguauucuccacauccuucuaccucaucuccaucuuccuccaccuggucaaaauccccacccaccgccacaucauaggcaaacccugccccaagccccaccgccuaaaccacaugggcaucugcucaugcggacuauacaaacacccaggcguccccgucaaauggaaacgcuaa

SEQ ID NO: 5899 - RNA, 1473 nt, Artificial Sequence
  derived and/or modified protein sequence (opt11) from LASV(ISTH2316-NIG-2012;Clade II)__AIT17564__GPCstabilized
auggggcaaaucaucaccuucuuccaagaaguaccccaugucaucgaagaaguuaugaacaucguccucaucgcgcuaucucuccucgcuauccucaaaggcauuuacaacguagccacaugcggccuguucggccuacucuccuuccuucuacucuguggccgauccugcuccacaaccuacaagggagucuacgaacuucaaacccuagaacuagacauggccucccucaacaugacaaugccccucucaugcaccaaaaacaacucccaccacuacaucauggucgguaacgaaacaggccucgaacuuacacucaccaacaccuccaucauuaaucacaaauucugcaaucuuagcgacgcccacaagaaagaccucuacgaccacgcccucaugucuaucauauccacguuccaccucucaaucccaaacuucaaccaauacgaagccauguccugcgacuuuaacggcggaaaaauauccguccaauacaaccucucccacgccuacgccgucgacgccgccaaacacugcggcaccaucgccaacggaguccuccagacauucaugcgcauggccuggggcggaucauacaucgcccucgacuccggaugcggaagcugggacugcaucaugacuuccuaccaguaccucaucauucaaaacacaucaugggaagaccacugccaauucucccgaccaucccccaucggguaccucggccuccuaucccaacgcacccgugacaucuacaucucccgacgccgccguggaaccuucaccuggacccucucagacuccgaaggcaacgaaacacccggcggauacugucuaacccgcuggaugcucaucgaggcagaacuaaaaugcuucggcaacaccgcugucgccaaaugcaacgagaaacacgacgaagaauuuugcgacaugcuccgccucuucgacuucaacaaacaagccaucaaacgccucaaaacacccgcccaaauguccauccagcucaucaauaaagccgucaacgcccucaucaacgaccaacuuaucaugaaaaaccaccuuagagacaucaugugcauccccuacugcaacuauuccaaauacugguaccuaaaccacacugugacgggaaaaaccucacuaccacgcugcuggcucgucuccaacggauccuaccucaaugaaacccacuuuucagacgauaucgaacaacaagcugacaacaugaucaccgaacuccugcaaaaagaauacauagaccgccagggaaaaaccccacucggacucgucgaccuuuucgucuucucaaccucauucuaccucaucuccaucuuccuacaccuaguuaaaauccccacacaccgccacgucaucggcaaaccgugccccaaaccccaccgacuaaaucacaugggcaucugcuccugcggacuauacaaacacccaggcguaccagucaaauggaaacgcuag

SEQ ID NO: 5900 - RNA, 1473 nt, Artificial Sequence
  derived and/or modified protein sequence (opt11) from LASV(ISTH2358-NIG-2012;Clade II)__AIT17572__GPCstabilized
augggccaaauaauuaccuucuuccaagaagucccacacgucaucgaagaagucaugaacaucguccuaauugcccuaucccuccucgccauccuuaaaggcaucuacaaugucgccacaugcggacucuucggucuagucucguuccuccuucuaugcggccgcuccugcucuaccaccuauaaaggggucuacgaacuccaaacccuagaacuggacauggccaaccucaacaugacaaugccacucaguugcaccaaaaacaacucacaccacuacaucauggucggcaacgaaaccggccucgaacugacccuaaccaacacuuccaucaucaaccacaaguucugcaaccucuccgacgcucacaagaaaaaccucuacgaccacgcccucaugucgaucauauccaccuuccaccuauccauaccaaacuuuaaccaauacgaagcaauguccugugacuucaacggcggcaaaaucuccguccaauacaaccucucacacaacuacgccgucgacgccgcaaaccacugcggcaccaucgccaacggaguccuccaaaccuucaugcgaauggccuggggcggcuccuacauagcccuggacuccggcugcgggaacugggacugcauuaugaccucauaccaauaccuuaucauacagaacacaacaugggaagaccacugccaauucucacgcccuucccccaucggcuaucucggccuccucucccagcgcacccgcgacaucuacauaucccgacgccgccgcggcaccuucaccuggacccuauccgacuccgaaggcaacgacaugcccggaggcuacugccuuacacguuggaugcucauagaagcugaacucaaauguuucggcaacaccgcaguugcaaaaugcaacgaaaaacacgacgaggaguucugcgacaugcuccgccucuucgacuuuaacaaacaagccaucagacgacuaaaaacccccgcacagaugaacauccaacuuaucaauaaagccgucaacgcacucauaaacgaccaacugaucaugaaaaaccaccuccgcgacaucaugugcauacccuacugcaacuacuccaaauacugguaccuaaaccacaccguaacuggcaagaccagccucccccguugcuggcucgucucaaacggcagcuaccuuaacgaaacccacuucuccgacgacaucgaacaacaagccgacaacaugaucaccgaacuccuacaaaaggaauacauggaccgccagggaaaaacaccccucggccucgucgaccucuucgucuucuccaccucauucuaccucauauccaucuuccuacaccuagucaaaaucccaacacaucgacacauaaucggaaaacccugccccaaaccccaucgucuuaaccacaugggaaucuguucaugcggccucuacaaacaccccgggguccccgucaaauggaaacgcuaa

SEQ ID NO: 5901 - RNA, 1473 nt, Artificial Sequence
  derived and/or modified protein sequence (opt11) from LASV(ISTH2376-NIG-2012;Clade II)__AIT17576__GPCstabilized
augggccaaaucaucacauucuuccaagaagucccccacgucaucgaagaagucaugaacauaguccuuauagcccugucacuccucgccauacucaaaggcauauacaacgucgcaaccugcggacucuucggccucgucuccuuccuacuccucugcggccgcuccugcuccacuaccuauaaaggaguuuacgaacuacaaacccuagagcuugacauggccucccucaacaugacaaugccccucuccugcaccaaaaacaacucucaccauuacaucauggucggcaacgaaacaggccuagaacucacccuaacaaacacaucaaucaucaaccacaaauucugcaaccuauccgacgcccacaagaaaaaccuuuacgaccacgcccucauguccaucaucuccaccuuccaccuauccaucccaaacuucaaccaguacgaagccaugucaugcgacuucaacggcggaaaaaucuccguccaguacaaucucucccacacauacgccgucgacgccgccaaccauugcgguacuauagccaacggcguccuacaaacuuucaugcgaauggccuggggaggcuccuacaucgcgcucgacuccggcugcggaaauugggacugcaucaugaccuccuaccaauaccucaucauccaaaacacaaccugggaagaccacugccaauucagccgacccucccccauaggcuaccucggacuccugucccagcgaacccgcgacaucuacaucucacgccgacgaagaggcaccuucacauggacacuauccgacuccgaagggaacgaaacccccgguggcuacugccucacccgauggaugcucauugaagccgaacuuaaaugcuucggcaacaccgcaguagccaagugcaacgaaaaacacgacgaagaguucugugacaugcuacgacuuuucgacuucaacaaacaagcaaucucccgccucaaaacccccgcccaaauguccauucaacucaucaacaaagccguaaacgcccucaucaacgaccaacucaucaugaaaaaccaccuucgagacaucaugugcauccccuacugcaacuacuccaaauauugguaccucaaccacacaguaaccggcaaaaccucccuaccccguugcuggcuagucuccaacgguucuuaucucaacgaaacccacuucuccgacgacaucgaacaacaagccgacaauaugaucacagaaaugcuccaaaaagaauacaucgaccgccaaggcaagacaccccucgggcuagucgaccuuuucguauucucaaccuccuuuuaccuaaucuccauauuccuccaccucgucaaaauccccacccaccgucacaucacgggaaaacccugccccaaaccccaccgccuaaaccacaugggcaucugcuccugcggccucuacaaacaucccggcguacccgucaaauggaaacguuaa

SEQ ID NO: 5902 - RNA, 1473 nt, Artificial Sequence
  derived and/or modified protein sequence (opt11) from LASV(Lassa virus/H.sapiens-wt/NGA/2015/ISTH_0543;Clade II)__AVO03639__GPCstabilized
augggccaaaucaucaccuucuuccaggaaguaccacacgucaucgaagagguaaugaacauaguccucaucgcacucucccuacucgccauauuaaaaggcaucuacaacguagcaaccugcggccuauucggccuagucucauuccuccuccucugcggccgcuccugcuccaccaccuacaaaggaguuuacgaacuccaaacccucgaacucgacauggcaaaccuaaacaugacaaugccucucuccugcaccaaaaacaacucacaccacuacaucauggucggcaacgagaccggccucgaacucacuuuaaccaacaccucaaucaucaaccacaaauucugcaaccuaucggacgcccacaagaaaaaccucuacgaccacgcccugaugucaaucaucucaacauuccaccucuccauacccaacuucaaccaauacgaagcaauguccugcgacuucaacggcggcaaaaucucuguacaauacaaccugucacacaccuacgccgucgacgccgccaaccacugcggaaccaucgccaacggcguccuacaaacauucaugcgcauggcguggggcggauccuacauagcucucgacuccgguugcggcuccugggacuguaucaugacauccuaccaauaccucgucauacaaaacacaaccugggaagaccacugccaauucucccgccccucuccaaucggcuaccugggccuccucagccaacgcacccgugacaucuacaucuccagacgcagacgcggaaccuucacauggacccucucagacuccgaaggcaacgagacccccggcggcuacugccuaaccagauggaugcugaucgaagcagaacugaaauguuucgguaacacugcaguagccaaaugcaacgaaaaacacgacgaagaguucugcgacaugcucagacuuuucgacuucaacaaacaagccauccgccgacuaaaaacccccgcccagaugucuauccaacucaucaacaaagccgucaacgcacucaucaacgaucaacucaucaugaaaaaccaccuccgcgacauuaugugcauaccuuacugcaacuacuccaaauauugguaccucaaccacacagucaccggcaaaaccagccucccccgcugcuggcucgucucaaacggcagcuaccuaaacgaaacccacuucucugaugacauugaacaacaggccgacaacaugauuacagaacuccuacaaaaggaauacaucgacagacaaggaaaaaccccucucggccuaguagaccucuucgucuucucaacauccuucuaccuaaucagcaucuuccuccaccucgucaaaauccccacccaccgccacauaaccggcaaacccugccccaaaccucaccgacucaaccacaugggaaucugcucauguggccucuacaaacaccccggcguacccgucaaauggaaacgcuaa

SEQ ID NO: 5903 - RNA, 1473 nt, Artificial Sequence
  derived and/or modified protein sequence (opt11) from LASV(Lassa virus/H.sapiens-wt/NGA/2015/ISTH_0547;Clade II)__AVO03583__GPCstabilized
augggccaaauuauaaccuucuuccaagaagucccccaugucaucgaagaggucaugaacaucguccuaaucgcacucagccuccucgccauccuaaaaggcauauacaacguagccacaugcggccucuucggccucgucagcuuccuccuacucugcggccgcuccugcucaaccaccuauaaaggcguauacgagcuacagacccucgaacuagacauggccucacucaacaugacaaugccacucuccugcaccaaaaauaacucacaccacuacauaauggucggcaacgaaacaggacucgaacucacucucaccaacacuucuaucaucaaccacaaauucugcaaccuauccgacgcacacaagaaaaaccuguaugaccacgcacuaaugagcaucaucuccaccuuccaccucuccaucccaaacuucaaccaauacgaagccaugucaugcgauuucaacggcggcaaaauauccguacaauacaaccucucccacaccuacgccgucgacgccgccaaccacugcggcaccaucgcaaacggaguacuacaaaccuucaugcgcauggccuggggagguucauacauagcacuagacagcggcugcggauccugggacuguauaaugaccuccuaccaauaccucaucauacaaaacaccaccugggaggaccacugccaauucucacgaccaucuccaaucggauaccuuggccuccucucucaacgaacacgcgacauauacauaucccgccgccgccgcggcaccuucaccuggacccucuccgacuccgaaggaaacgaaaccccaggaggcuacugccucacacgcuggaugcucaucgaggccgaacucaaaugcuucggcaacaccgccgucgccaagugcaacgagaaacacgacgaagaguucugcgacaugcuccgucucuucgacuucaacaaacaagcaauacgccgccucaaaaccccugcccaaaugucuauacaacucauaaacaaagccgucaacgcacucaucaacgaccaacucauuaugaagaaccaucuacgagacaucaugugcaucccuuacugcaacuacuccaaauacugguaccuaaaccacaccgucaccggcaagacaucacucccccgaugcuggcuaguaucuaacggcuccuaccuaaacgaaacccacuucuccgaugacaucgaacaacaagccgacaacaugaucaccgaacuucuccagaaagaauacaucgaacgccaaggcaaaacaccccucggucucguagaccucuucgucuucucaacauccuucuaccucaucuccaucuuccuccaccucgucaagaucccuacccaccgccacauaaccggcaaaccaugccccaaaccucaccgacucaaccacaugggaaucugcuccugcggccucuacaaacacccagguguccccguaaaguggaaacgcuaa

SEQ ID NO: 5904 - RNA, 1473 nt, Artificial Sequence
  derived and/or modified protein sequence (opt11) from LASV(Lassa virus/H.sapiens-wt/NGA/2015/ISTH_0574;Clade II)__AVO03657__GPCstabilized
augggccaaauuauaaccuucuuucaagaagucccacacgucaucgaagaagucaugaacaucguccucaucgcccucucacugcucgcaauccucaaaggcaucuacaacgucgcuaccugcggccuauucggucuaguagccuuccuucuccucuguggccgcuccugcuccaccacauacaaaggcguguacgaacuccaaacccuagaacuugacauggccucccucaacaugaccaugccccucagcugcaccaaaaacaacucccaccacuacaucauggucggcaacgaaaccggacuagaacuuacucuaacaaacaccucuaucaucaaccacaaauucugcaaccuaagcgacgcccacaagaaaaaucucuacgaccacgcgcucauguccaucaucucaacuuuccaccuuuccauccccaacuucaaccaauacgaagcaaugagcugcgacuucaacggcggaaaaaucuccguccaauacaaccucagccacacauacgcagucgacgccgccaaccacugcggcaccaucacaaacgguguacuccaaaccuucaugcguauggcauggggcggcuccuacaucgcacuagacuccggauguggcucaugggacugcauaaugaccagcuaccaauaccuuauaauccagaacaccaccugggaagaucacugccaguucucccgacccucccccaucggcuaccuaggccuccucucccaacgaacacgcgacauauacaucagccgccgucgccgagguaccuucaccuggacccucucagacuccgaaggcaacgaaacacccggaggcuacugccuaacccgcuggaugcucaucgaagccgaacuaaaaugcuucgguaacaccgccguagccaaaugcaaugaaaaacacgacgaagaguucugcgacaugcucagacuauucgacuucaacaaacaggccaucagacgacucaaaacccccgcccaaaugagcauacagcucaucaacaaagccguuaacgcccuuaucaacgaccaacuaauuaugaaaaaccaccuccgcgacaucaugugcauucccuacugcaacuacuccaaauacugguaucucaaccacaccgucaccggccguaccucacuaccacgaugcuggcucgucuccaacggaucauaccucaacgaaacccacuucuccgaugacauagaacaacaagccgacaacaugaucaccgaacuccuccaaaaagaauacauggaccgucaaggcaaaacaccccuuggccucguugaccucuucgucuucucuaccuccuucuaccucaucuccaucuuccuccaccugaucaaaauccccacccaucgccacgucaucggcaaacccugcccaaaaccacaccgucucaaccacaugggaaucugcagcugcggacuguacaaacaccccggcguucccguuaaauggaaaagauga

SEQ ID NO: 5905 - RNA, 1473 nt, Artificial Sequence
  derived and/or modified protein sequence (opt11) from LASV(Lassa virus/H.sapiens-wt/NGA/2015/ISTH_0681;Clade II)__AVO03617__GPCstabilized
augggccaaaucaucaccuuuuuccaagaagucccccaugucauagaagaagucaugaacaucguacucaucgcccucucacuccuagccauacucaaaggcaucuacaacgucgcuaccugcggccuauucggacucgucagcuuccuccuccucugcggcagguccugcucuaccaccuauaaaggcguuuacgaacuacaaacacucgaacucgacauggccucccuaaacaugaccaugccccucuccugcaccaaaaacaacagccaccacuacaucaugguagguaacgaaaccggccucgagcucacucucaccaacaccaguauaaucaaccacaaauucugcaaccuauccgaugcccacaaaaagaaccucuacgaccacgcccucaugaguaucaucucuaccuuccaccucuccauacccaacuucaaucaauacgaagcaaugucuugcgacuucaacggcggaaaaauauccguccaauacaaccuaucccacaccuacgccgaaggagccgccaaccacuguggcaccaucgcaaacggcguacuccaaacauucaugcgcauggccuggggcggauccuacaucgcccucgacuccgguugcggcuccugggacugcaucaugaccagcuaccaauaccucaucauacaaaacaccacaugggaagaccauugccaauucucaagacccucccccaucgguuaccucggccuccucucacaacgcacccgcgacaucuacauaucccgucgccgccgcggcaccuucacauggacucucucagacuccgaaggcaacgaaacccccggaggcuauugccucacccgauggaugcucaucgaagccgaacucaaaugcuucggcaacacugccguagcaaaaugcaacgaaaaacacgaugaagaguucugcgacaugcuaagacucuucgacuucaauaaacaagcuauaaugcgacuaaaaacccccgcccaaaugucaauccaacuaaucaacaaagccgucaacgcccuuaucaacgaccagcucaucaugaaaaaccaccuccgcgacauaaugugcauacccuacugcaacuauuccaaauauugguaccucaaccacaccgucaccggcaaaaccucacuuccccgguguuggcuagucuccaacggcucuuaccucaacgaaacccacuucuccgacgacauagaacaacaagccgacaacaugauaaccgaaaugcuccaaaaagaauacauggaccggcagggcaaaaccccgcucggccuggucgaccuauucguauucuccaccuccuucuaucucaucucaaucuuccuccaucuagucaagaucccuacacaccgucacgucaucggcaaacccugcccaaaaccccaccgucucaaccacaugggcaucugcagcugcggccucuacaaacaccccggcguucccgucaaguggaaacgcuaa

SEQ ID NO: 5906 - RNA, 1473 nt, Artificial Sequence
  derived and/or modified protein sequence (opt11) from LASV(Lassa virus/H.sapiens-wt/NGA/2015/ISTH_0682;Clade II)__AVO03625__GPCstabilized
augggccagauuaucaccuucuuccaagaagucccccacgucaucgaagaagucaugaacaucguccuuaucgcacuuucccuccucgccauccucaaaggcaucuacaacguugccacuugcggacucuucggccucguuagcuuccuccuccuuugcggacgcuccugcucaaccaccuacaaaggugucuacgaacuacaaacccuagaacucgacauggccucccucaacaugaccaugccacuaucuugcaccaaaaacaacucccaccacuacauaauggucggaaacgaaaccggccuugaacucacccucacaaauaccucuaucaucaaccacaaauucugcaaccucuccgacgcccacaagaaaaaccucuacgaccacgcccucauguccauuaucucaaccuuccaccucucuauccccaacuucaaccaguacgaagcaauguccugugacuucaacggcggaaaaaucuccguccaauacaaucucucccacgccuacgccguagacgccgccaaccacugcggaaccaucgcuaacggcguacuccaaaccuucaugcgaauggccuggggcggcucauacauagcucucgacuccgguugcggcuccugggacugcaucaugacauccuaccacuaccuaaucauucaaaacacaacaugggaagaccacugccaauucagccgcccauccccaaucggcuaccucggccuacucucccaaagaacccgcgacaucuacauaucccgucgccgcagaggcacuuucaccuggacucucagcgacucugaaggcaacgaaacccccggcggcuacugccucacucgcuggaugcucauagaagccgaacucaaauguuucggcaacaccgccgucgccaaauguaacgaaaaacacgacgaggaguucugcgacaugcuccgccuauucgacuucaacaaacaagccauucgccgccucaaaaccccagcucaaaugucgauccagcucaucaauaaggccguaaacgcccuaaucaacgaccaacucauaaugaaaaaccaucuccgcgacaucaugugcauccccuacugcaacuacuccaaauacugguaccucaaccacacugucaccggcaaaaccucccucccacgcugcuggcucgucuccaacggcuccuaccucaacgaaacccacuucucagacgacauugaacaacaagccgacaacaugauuacagaacuacuccaaaaggaauacaucgaccgccaaggcaagacaccccuaggccuaguugaccuauuugucuucuccaccucauucuaccuaauauccaucuuccuccaucuaguaaaaaucccaacccaccgacacgugauaggcaaacccugcccuaaaccccaccgccucaaccacaugggcauuugcuccugcggccuauacaaacacccaggcguccccgucaaauggaaacgcuaa

SEQ ID NO: 5907 - RNA, 1473 nt, Artificial Sequence
  derived and/or modified protein sequence (opt11) from LASV(Lassa virus/H.sapiens-wt/NGA/2015/ISTH_0687;Clade II)__AVO03581__GPCstabilized
augggccaaauaaucaccuucuuccaagaagucccccacgucaucgaagaggucaugaacauuguccuaauagcccucucacuacucgccauacuaaaagguaucuacaacgucgcaaccugcggccuuuucggccucgucuccuuucuccuacucugcggccgcucuugcucgaccaccuacaaaggugucuaugaacuacaaacccuagaacucgacaugaccaaccucaacaugaccaugccccucuccuguaccaaaaacaacucucaccacuacaucauggucgguaacgaaaccggccucgaacuaacacucaccaacaccucaaucauaaaccacaaauucugcaaccucuccgacgcccacaagaaaaaccucuacaaccacgcccucauguccaucaucagcacuuuccaccuuuccauccccaacuucaaccaauacgaagccauguccugcgacuucaacggcggaaaaauauccguccaauacaaccucagccacaccuacgccgucgacgccgccaaccacugcggaaccgucgccaacggcguacuccaaaccuucaugcgcauggcguggggcggcuccuacaucgcccuagacuccggcugcggcggcugggacugcaucaugaccucuuaccaauaccucaucauccaaaauaccaccugggaagaccacugccaauucucccgaccaucacccauaggcuaccucggccuccucucccaacgcacccgagacauauacaucucccgccgccgccgcggcaccuucaccuggacucucucagacucagaaggaaacgaaacccccggcggauauugccuaaccagauggaugcuaaucgaagccgaacuaaaaugcuucggcaacaccgccguagccaaaugcaacgaaaaacacgacgaagaguucugcgacaugcuccgccuuuucgacuucaacaaacaggccauccgcaaacucaaagcccccgcccaaaugucaauccaacucaucaacaaagcugucaacgcccucaucaacgaccagcugaucaugaaaaaccaccuccgcgacaucaugugcauccccuacugcaacuacuccaaauacugguaccucaaccacaccgucacaggcaaaaccucccuccccaaauguugguuaguaagcaacggcuccuaccucaacgaaacccacuucuccgacgacauagaacagcaagccgacaacaugauuaccgaacuccuacaaaaagaauacauggaccgccaaggaaaaacaccccucggccucguugaccuauucgucuucuccaccucuuucuaccucaucuccauauucuuacaccucgucaaaauccccacccaccgccacauaaucggcaaacccugcccaaaaccgcaccgacugaaccacaugggcaucugcuccugcggccuguacaaacaucccgggguccccguaaaauggaaacgauaa

SEQ ID NO: 5908 - RNA, 1473 nt, Artificial Sequence
  derived and/or modified protein sequence (opt11) from LASV(Lassa virus/H.sapiens-wt/NGA/2015/ISTH_0736;Clade II)__AVO03573__GPCstabilized
augggccaaaucaucacauucuuccaagaagucccccauguaaucgaagaagucaugaacaucguucucaucgcccuaucccuccucgcaguucucaagggcaucuacaacgucgcaaccugcggacucuucggccuuguauccuuccuccuccucugcggccgaucuugcucaaccaccuacaaaggcgucuacgaacuccaaacccucgaacuagacauggccucccuuaacaugaccaugccccuaucaugcaccaaaaacaacucccaucauuacaucauggucggcaacgaaacagggcuagaacucacccucaccaacaccucaaucaucaaucacaaauucugcaaccucucagaugcccacaagaaaaaccuauacgaccacgcccucauguccaucaucuccaccuuccaccucucaaucccuaacuuuaaccaauacgaagccauguccugcgacuucaacgguggcaaaaucucaguccaguacaaccuaucccacacccacgccgucgacgccgcuaaccacugcggcaccaucgccaacggaguucuacagacauucaugcguauggcauggggaggaucuuacauagcccucgacucaggauguggcuccugggacugcaucaugaccagcuaccaauaccuaaucauccaaaacaccaccugggaagaccacugccaauucucacgaccaucucccaucggauaccuaggccuccucucccaacgaacccgcgacaucuauaucucacgccgccgccgcggcaccuucacauggacccucagcgacucugaaggcaaugaaacacccggcggcuauugccucacccguuggaugcucaucgaagccgaacucaaaugcuucggcaacacugccgucgcgaaaugcaacgaaaaacacgacgaagaguucugcgacaugcuccggcucuuugacuucaacaaacaagccauccgccgccuuaaaacccccgcccagauguccauccaacuuauaaauaaagcugucaacgcccucauuaacgaccaacuaaucaugaaaaaccaucuccgagacaucaugugcauccccuacuguaacuauucccguuacugguaucucaaccacaccguaacaggcaaaacaucccuacccagauguuggcucguaagcaauggaaguuaccuuaacgaaacccacuucuccgacgacaucgaacaacaagcagacaacaugaucaccgaacuccuacaaaaagaauacaucgaccgccagggucgcaccccacucggccucguagaccucuucguauucucaaccuccuucuaccugaucucgaucuuccuccaucucgucaaaauacccacacacagacacgucaucggaaaacccugccccaaaccccaccgacucaaccacaugggcaucugcuccugcggccucuacaagcaccccggcguacccgucaaauggaaacgcuaa

SEQ ID NO: 5909 - RNA, 1473 nt, Artificial Sequence
  derived and/or modified protein sequence (opt11) from LASV(Lassa virus/H.sapiens-wt/NGA/2015/ISTH_0789;Clade II)__AVO03551__GPCstabilized
augggccaaaucgucaccuucuuccaagaagucccccacgucaucgaagaaaucaugaacauaguccucaucacacuaucccuccuugccauccucaaaggcgucuacaaccuggcaaccugcggacucaucggccucaucacauuccuauuccucugcggccgcuccugcuccaccauauacaaaggcuccuaccaauuccagacacucgaacucaacauggaaacccucaacaugaccaugccucucuccugcaccaaaaacuccucacaucacuacaucagagucuccaacgaaacaggacucgagcucacucuaaccaacaccuccauaauaaaucacaaauucuguaaccucuccgacgcacacaaaaaaaaccucuacgaccacacccucauguccauaaucuccacauuccaccucuccauccccaacuucaaccaauacgaagccauguccugcgacuuuaacggcggaaaaaucuccguccaauacaaccucucacacucuuaugccgucgacgcggccaaccacugcggcacaguugccaacggaguucuccaaaccuuuaugcgaauggccuggggcggaucauauaucgcacuagacuccggcugcggcaacugggacugcaucaugaccucuuaccaauaccuaauaauccaaaacaccaccugggaagaccacugccaauucucucgcccaucccccaucggcuacuuaggucuguuaucccagcgcacccgcgacaucuacauaucccgacgacgccgcggcaccuucaccuggacccuuuccgacucagaaggcaaagaaaccccuggcggcuauugucucacccgauggaugcuaaucgaagccgaacucaaaugcuucgguaacaccgccgucgccaaaugcaacgaaaaacacgacgaggaauuuugcgauaugcuccgacucuucgacuucaacaaacaagcaauccaacgccucaaagcacccgcccaaauguccauccaacuuaucaacaaagcugucaacgcacucaucaacgaccaacuaauaaugaaaaaccaccuacgcgacaucauguguaucccauacugcaacuacuccaaauacugguaccuuaaccacaccuccaccggccgcaccagccuccccaaaugcuggcuggucuccaacggcuccuaccuuaacgaaacccacuucucggacgacaucgaacaacaagccgacaacaugaucaccgaaaugcuacaaaaagaauacauagaccgccaaggcaaaaccccucucggacucgucgaccucuucguauucuccaccuccuucuaccucaucuccaucuuccuccaccucgucaaaauccccacccaccgucauaucgucggaaaaucaugccccaaaccccaucgccuaaaccacaugggaaucuguuccugcggacuuuacaaaagacccggcguccccgucaaauggaaacgcuaa

SEQ ID NO: 5910 - RNA, 1473 nt, Artificial Sequence
  derived and/or modified protein sequence (opt11) from LASV(Lassa virus/H.sapiens-wt/NGA/2015/ISTH_0821;Clade II)__AVO03641__GPCstabilized
augggccaaaucauaaccuucuuccaagaagugccccacguaaucgaagaagucaugaacaucgucuuaaucgcccuaucacuacucgccauccucaagggcaucuacaacgucgcaaccugcggacucuucggccucguuucguuccuccuccucugcggccgcucaugcagcaccacguacaaaggcgucuacgaauugcaaacccuagagcucgacauggccucccuuaacaugacaaugccccuuuccugcaccaaaaauaacucacaccacuacaucauggucggcaacgagaccggacucgaacuaacccucaccaacacuuccaucaucaaccacaaauucugcaaccucuccgacgcccacaagaaaaaccuguacgaccacacccucaugucaaucaucucaaccuuucaccucucaauccccaacuucaaccaauacgaagcaauguccugcgacuucaacggaggcaaaaucagcguccaguacaaccucucccacacuuacgccguugacgcagccaaccacugcggcacuaucgccaacggcguacuacaaaccuucaugcgcauggccuggggcgggucauacaucgcccucgacagcggcugcggcaacugggacugcauuaugaccucauaccaguaccucaucauccaaaacacuacaugggaagaccacugucaauucucacgccccagcccaaucggcuaccucggacuccuaagccaacgcacccgagacaucuacauaucccgccgccgacgcggaaccuucaccuggacccucuccgacuccgaaggcaacgagacacccggcggcuauugccucacacgauggaugcuuaucgaggccgaacucaaauguuucggcaacacagccgucgcaaaguguaacgaaaaacaugacgaagaguucugcgacaugcuccgccuauucgacuucaacaaacaagccaucucccgccucaagacccccgcccaaauguccauccaacuaaucaacaaagccgucaacgcacuaauuaacgaccaacucaucaugaagaaucaccuacgagacaucaugugcauccccuacugcaacuacuccaaauacugguaccuaaaccacaccgucaccggcaaaacgucccucccccgcugcuggcucgucuccaacggcucauacuuaaacgaaacacacuucagcgacgacaucgaacaacaagccgacaacaugaucaccgaaaugcuccaaaaggaauacaucgaccgucaaggcaaaacaccccucggccuaguagaccucuucguguucucaacauccuucuaccuaaucuccaucuuccuacaccuaguaaaaaucccaacacaccgacacgucaucggaaaaccaugccccaaaccccaccgacucaaccauaugggcaucugcuccugcggacucuacaaacaccccggcguccccgucaaauggaaacgcuaa

SEQ ID NO: 5911 - RNA, 1473 nt, Artificial Sequence
  derived and/or modified protein sequence (opt11) from LASV(Lassa virus/H.sapiens-wt/NGA/2015/ISTH_0831;Clade II)__AVO03545__GPCstabilized
augggccaaaucgucacguucuuccaagaaguaccccacguaaucgaagaaaucaugaacaucguccucauuacacucucccuccucgcaauccucaaaggagucuacaaccucgcaaccugcggccucaucggccuaaucaccuuccucuuccuaugcggccgcucuugcuccaugacauacaaaggauccuaccaacucgagacucuagaacucaacauggaaacacucaacaugaccaugccacuuucaugcaccaaaaacaccucccaccauuacauccgcgucggcaacgagaccggccuagaacucacccuaaccaacaccuccaucauaaaccacaaauucugcaaccuuuccgacgcacacaagaaaaaucuuuacgaccacucccucauguccaucgucagcacauuccaccuauccauucccaacuucaaccaauacgaagccaugucaugcgacuucaacggcggaaaaaucuccauccaauacaaccucucccacgccuacgccggagacgccgcaaaacacugcggcacacucgccaacgguguacuccaaaccuucaugcgcauggcauggggaggaucauacaucgcccucgacucaggcugcggaaacugggacugcaucaugacuucuuaccaauaccucaucauccaaaacacaaccugggacgaccacugccaauucucccgacccucccccaucggcuaccucggccuccucucccaacguacccgcgaaaucuacaucucgcgaagacgccgcggcacauucaccuggacccuauccgauucagaagguaacgaagcacccggcggauacugccucacccgcuggaugcucauagaagccgaacucaaaugcuucggaaauaccgccguugcaaaaugcaaugaaaaacacgacgaagaguucugcgacaugcuccgucuauucgacuucaauaaacaagccauccaacgccuaaaaacacccgcccaaauguccauccaacucaucaacaaagccguaaacgcacucaucaacgaucaacucauaaugaaaaaccaccuacgcgacaucaugugcauucccuacugcaacuacucuaaguacugguaccucaaccacacgaccaccggucgaaccucccuacccagauguuggcucguuuccaacggcagcuaccuaaacgaaacccacuucuccgacgacauagaacaacaagccgacaacaugauaaccgaaaugcuccagaaggaauacaucgaccgccaaggcaagacaccccucggccucgucgaccucuuugucuucucaaccucuuucuaccucauauccaucuuccuccaccuaguaaaaaucccgacccaccgucacaucgucggcaaauccugccccaaaccacaccgucucaaccauaugggaaucugcuccugcggucucuacaaacagcccggcgucccaguucgcuggaagcgauaa

SEQ ID NO: 5912 - RNA, 1473 nt, Artificial Sequence
  derived and/or modified protein sequence (opt11) from LASV(Lassa virus/H.sapiens-wt/NGA/2016/ISTH_0009;Clade II)__AVO03571__GPCstabilized
augggacaaaucaucaccuucuuccaagaagucccccacgucaucgaagaagucaugaauaucguccucauagcccuaucucuccuugcuauccucaaaggcaucuacaacgucgcaaccugcggccuacuagggcucgucuccuuccuacuacucugcggccgcuccugcucaaccaccuacaaaggcgucuacgaacuucaaacucucgaacucgauauggccucucuuaacaugacaaugccccucuccugcaccaaaaacaacucccaccacuacaucaugguuggcaaugaaacaggccucgaacucacccuaacaaacaccuccaucaucaaccacaaauucuguaaucucuccgacgcccacaagaaaaaccuauacgaccacgcccuuaugucuauaaucagcaccuuccaccucuccauacccaacuuuaaccaguacgaagccauguccugcgacuuuaacggcggacgcauauccguccaauacaaccugucacacuccuacgccguggacgcugccaaccacugcggcacaauugccaacggcguccugcaaaccuucaugcgcauggccuggggcggcuccuacauagccuuagacuccggaugcggcuccugggacugcaucaugacgucauaccaauaccucaucauacaaaacaccaccugggaagaccacugccaauuuucccgccccagcccaaucggcuaccucggccuucuaucccaacgaacccgcgacaucuacaucucacgccgccgccgcggcaccuucaccuggacccucuccgacuccgaaggcaacgaaacaccaggcggcuacugucucacacgcuggaugcucaucgaagccgaacuaaaaugcuucggcaacaccgccgucgccaaaugcaacgaaaaacacgacgaagaauuuugcgacaugcuacgacuuuucgacuucaacaaacaagcuauccgccgccuaaaaacccccgcucaaauguccauacaacucaucaacaaagccgucaacgcccucaucaacgaccaacuaaucaugaaaaaccaucuccgagacaucaugugcauccccuauuguaacuacuccaaauacugguaccuaaaccacaccguuaccgguaagacaucccuaccacgcugcuggcuagucucaaacggcuccuaccuaaacgaaacccacuucuccgacgacauagaacagcaagcagacaacaugaucacugaacuccuucaaaaagaauacaucgaccgccaagguaaaacaccccucggccucgucgaccuauucgucuucuccaccuccuucuaucuaauauccaucuuccuccaccucgucaaaauccccacccaucgccauaucacuggaaaacccugccccaaaccacaucgacuaaaccacauggguaucugcuccugcggccuauacaaccaccccggcgucccagucaaguggaaacgcuag

SEQ ID NO: 5913 - RNA, 1473 nt, Artificial Sequence
  derived and/or modified protein sequence (opt11) from LASV(Lassa virus/H.sapiens-wt/NGA/2016/ISTH_0017;Clade II)__AVO03567__GPCstabilized
augggccagauuaucaccuucuuccaggaaguaccacacgucaucgaagaaguaaugaacaucguacucaucgcccuaucccuacucgcaauccucaaaggcaucuacaacguagcaaccugcggccucuucggacucguuuccuuccuccuccuuugcggccgcucaugcuccacaaccuacaaaggcgucuacgaacuacaaacacucgaacucgacauggccucccucaacaugaccaugccccucagcugcaccaaaaacaacagccaccacuacaucauggucggcaacgaaacaggacuugaacucacccucacaaacaccucaaucaucaaccacaaguucugcaaccuaagcgacgcgcacaagaaaaaccuauacgaccacgcccuaaugucaaucaucagcaccuuccaccucucgauucccaacuucaaccaauaugaagcaauguccugcgacuucaacggaggcaaaaucagcguccaguacaaccuaagccacacauacgccauagacgccgcaaaccacugcggcaccaucgccaauggcguccuccaaaccuucaugcgcauggccuggggaggcuccuacauagcacucgacuccggcugcggcucaugggacugcaucaugacauccuaccaauaccucaucauccaaaacacgacaugggaagaccacugccaauucucacgccccucccccauaggcuaccuaggccuccuaucacaacgcacccgcgacaucuacaucuccagacgacgucgagguaccuucaccuggacacucagcgacucagaaggcaacgaaacccccggcggauacugccucacccgcuggaugcuaauagaagcagaacucaaaugcuuuggcaacaccgcugucgcaaaaugcaacgaaaagcacgacgaagaguuuugcgacaugcuccgccucuucgacuucaacaaacaagccauccgucgccucaaaacacccgcccaaauguccauccagcuaaucaauaaagccguuaacgcacuuaucaacgaccaacucaucaugaaaaaccaccucagagacauuaugugcaucccauacugcaacuacuccaaauacugguaccuuaaccacacagucaccggcaaaaccucacuuccccgcugcuggcuagucuccaacggcucauaccucaacgaaacacacuuuagcgacgacauugaacagcaggcagacaacaugaucacagaacuacuccaaaaagaauacauggaccgccaaggaaaaacaccccuaggccuuguagaccuuuucgucuucuccaccuccuucuaccuaaucucaaucuuccuccaccucguucgaauccccacccaccgacaugucauaggaaaacccugccccaaaccccaccgacucaaccacaugggcaucuguuccugcggccucuauaaacaucccggaguccccguuaaauggaaacgcuaa

SEQ ID NO: 5914 - RNA, 1473 nt, Artificial Sequence
  derived and/or modified protein sequence (opt11) from LASV(Lassa virus/H.sapiens-wt/NGA/2016/ISTH_0035;Clade II)__AVO03619__GPCstabilized
augggccaaaucaucacauucuuccaagaagucccacacgucauagaagaagucaugaacaucguacucauagcccuaucccucuuagccauccucaaaggcaucuacaacgucgcaaccugcggccucuucggacucgucuccuuccuacuacuaugcggccgcucaugcuccaugacuuacaagggcgucuacgaacuccaaacccuagaacucgauauggccucccuuaacaugaccaugccacuuuccugcaccaaaaacaacucgcaccacuacaucaugguaggcaacgaaacaggacucgaacuaacucucaccaacacauccaucaucaaucacaaauucugcaaccuuucagacgcccacaagaaaaaccuguacgaccacgcccucaugagcaucauaucaaccuuccaccucuccauccccaacuucaaccaauacgaagccauguccugcgauuucaacggcggaaaaauaucuguacaauacaaccuaucccacacauacgccgucgacgccgccaaccacugcggaacaaucgcuaacggcguccuccaaacuuucaugcgcauggccuggggaggcuccuacaucgcccucgacuccggcugcggcuccugggauugcaucaugaccuccuaccaauaccucaucauccagaacacaacuugggaagaccacugccaauuuucccgccccucccccaucggcuaccuaggacuccucucccaacgcacccgcgacaucuacaucagccgcaggcgccggggcaccuucaccuggacccucuccgacucugaaggcaacgaaacccccggcggcuacugccuaacccgcuggaugcuaauugaagcagaacucaaaugcuucggcaacaccgccguagccaaaugcaacgaaaaacacgacgaagaguucugcgauauguuacgacucuucgacuucaacaagcaagccauacgccggcucaagacccccgcacaaauguccauccaacucaucaacaaagcaguuaacgcacucaucaaugaccaacucauaaugaaaaaccaccuccgcgacaucaugugcauacccuacuguaacuacuccaaauauugguaccucaaccacaccaucaccggcaaaaccucucucccacgcugcuggcuaguaucgaacggcuccuaccuaaaugaaacccacuucuccgacgacauagaacaacaagcagacaacaugaucaccgaacuccuacaaaaggaauacauggaccgccagggcaaaacaccccuaggccucguagaccuguucguauucuccaccuccuucuaccuaaucucaaucuuccuacaccucgucaaaauccccacacaccgacacgucaucggcaaaccaugcccaaaaccccaccgccuuaaccauaugggcaucugcucuugcggucucuacaaacaccccggcguacccgucaaauggaaacgcuga

SEQ ID NO: 5915 - RNA, 1473 nt, Artificial Sequence
  derived and/or modified protein sequence (opt11) from LASV(Lassa virus/H.sapiens-wt/NGA/2016/ISTH_0104;Clade II)__AVO03631__GPCstabilized
augggccaaguaaucaccuucuuccaagaaguuccccacgucaucgaagaagucaugaacaucguccuaauagcccucucacuccucgccauccuaaaaggaauauauaacgucgcaaccugcggacucuucggccuuaucuccuuccuucuacucugcggucgcucaugcuccaccaccuacaaaggcgucuacgagcuacaaacacuugaacuaaacaugcaaaaccucaacaugacuaugccucuguccugcaccaaaaacuccucccaccauuacauuauggucggcaaugagaccggacucgaacucacacuaaccaauacuuccaucaucaaucacaaauucugcaaccucucagacgcacacaagaaaaaccuauacgaccacgcccucauguccauaaucucaaccuuucaccucuccauuccaaauuucaaccaauacgaagccauguccugcgacuuuaacggcggcaaaaucucaguacaauacaaccucagucacaccuacgccaucgacgccgccaaccacugcggcacagucgccaacggcguccuacagaccuucaugcgcauggcauggggcggauccuacaucgcccuggacuccggcugcggcaacugggacugcaucaugaccagcuaccaauaccucaucauccaaaacaccaccugggaagaccacugccaauucucccgcccuuccccaaucggauaccucggccuccucucccaacgcacccgcgacaucuacauaagccgaagacgccgaggcaccuucaccuggacccucuccgacuccgaaggcaacgaagcucccggcggguacugccucacacgcuggaugcucaucgaggccgagcucaaaugcuucggcaacaccgcaguagccaagugcaacgaaaaacacgacgaagaguucugcgacaugcuucggcuauucgacuucaacaaacaagccaucaagcgacuuaaaaccccagcccaaauguccauccaacucaucaacaaagccgucaacgcccuaauaaacgaucaacucaucaugaaaaaccaccuccgagacauaaugugcauucccuacugcaacuacuccaaauacugguaccucaaccacacaguaaccggccguacgucccucccacgaugcuggcuuguauccaacggcagcuaccuuaacgacacccaauucuccgacgacaucgaacaacaagcagacaacaugauuaccgaaaugcuacaaaaagaauacauggaccgccaaggaaaaacaccccucggccuagucgaccucuuugucuucucaaccuccuucuaccuaaucuccaucuuccugcaccuaguaaaaauacccacccaucgccacaucgucggccgacccugcccgaaaccacaucgacucaaccacaugggaaucugcucuugcggacucuacaaacaucccggcguccccgucaaauggaaacgcuaa

SEQ ID NO: 5916 - RNA, 1476 nt, Artificial Sequence
  derived and/or modified protein sequence (opt11) from LASV(Lassa virus/H.sapiens-wt/NGA/2016/ISTH_0133;Clade II)__AVO03635__GPCstabilized
augggccaaaucauaaccuucuuccaagaaguaccccacgucaucgaagaagucaugaacauaguccucauugcccuaucccuacuugccguccucaaagccaucuacaacgucgcaaccugcggagucuucggccuuauauccuuccuccuucuaugcgggcgaucuugcuccaccaccuacaaaggagucuacgaacuccaaacccucgaacucgacauggcaaaucucaacaugaccaugccccucucaugcaccaaaaacaacucacaccacuacauaaugguaggaaacgaaacaggccucgaacucaccuuaaccaacaccucaaucaucaaccacaaauucugcaaccucuccgacgcccacaagaaaaaccucuacgaccacucucucaugucgaucauauccaccuuccaccuauccauccccaacuucaaccaauacgaagccauguccugcgacuuuaacggcggaaaaaucuccguccaauacaaccucucccacuccuacgccguagacgccgcaaaacacugcggcaccaucgcaaauggcguccugcaaaccuucaugcgaauggccugggguggauccuacauagcccucgacucuggcaaaugcggcugggacuguaucaugaccucuuaccaauaccucaucauccaaaacacaacaugggaagaccacugccaauucucacgcccuuccccuaucggcuaccucggccuccuaucacaacgcacccgcgacaucuacaucucccgccgccuccgccgaaccuucacauggacucucuccgacuccgaaggcaacgacgccccaggcggcuacugucuaacccgcuggaugcucauagaagccgaacuuaaguguuucggcaauaccgccauagccaagugcaacgaaaaacacgacgaagaauuuugcgacaugcugcgccucuucgacuucaaccgccaagccaucaagcgccucaaaaccgaaccccaaauguccauccaacucaucaacaaagcugucaacgcacucaucaacgaccaacuuauaaugaaaaaccaucugcgcgacaucaugggcugccccuacugcaacuacuccaaauacugguaccucaaccacaccaucaccggaaaaaccucgcucccccgcugcuggcucgucuccaacggcuccuaccucaacgaaacucacuucuccgacgacaucgaacaacaagccgacaacaugauuaccgaacuacuccaaaaagaauacauggacagacaaggcaaaacgccccucggccucguagaccucuucgucuucagcaccucuuucuaucuuaucucuauauuccuacaccucgucaaaauccccacccaccgacacauaguuggcaagccuugccccaaaccccaccgccuaaaccacaugggcaucuguuccugcggccucuacaaacaccccggcgucccagucaaauggaaaagacaauag

SEQ ID NO: 5917 - RNA, 1473 nt, Artificial Sequence
  derived and/or modified protein sequence (opt11) from LASV(Lassa virus/H.sapiens-wt/NGA/2016/ISTH_0141;Clade II)__AVO03649__GPCstabilized
augggccaaaucaucaccuucuuccaagaagucccacacgucaucgaagaagucaugaacaucguccuaaucacccucucucugcuggcaaucuuaaaaggcaucuacaacgucgccacaugcggccucuucggacuugucuccuuccuacuccucugcggccgcuccugcucaaccauauacaagggcgucuacgaacuccaaacacucgaacucgauauggcaucacuaaacaugacaaugccccugucaugcaccaaaaacaacucccaccacuacaucauggucggaaacgaaacaggccuagaacuaacccuaacaaacacauccauaaucaaccacaaauucugcaaccuuagcgacgcucacaagaaaaaccucuacgaccacgcacucaugagcauaaucagcaccuuccaccucagcaucccaaacuucaaccaguacgaagcaaugucaugcgacuucaacggcggcaaaauauccguacaauacaaccuaucucacacauacgcuguugacgcggccgaacacugcggcaccaucgcgaacggcguccuccaaaccuucaugcggauggccuggggcggcuccuacaucgcccucgacagcggaugcggaagcugggacugcaucaugaccagcuaccaauaccuaaucauccaaaacaccacgugggaagaccacugccaauucagccgccccucuccaauuggauaccucggccuccucucacaacguacuagagacaucuacauaagccgacgccgacgcggcacauucaccuggacccucuccgacuccgaaggcaacgaaacacccggaggcuacugccuaacgcgcuggaugcucauagaagcagaacuuaaaugcuucggaaacaccgccgucgccaagugcaacgaaaaacacgacgaagaauuuugugacaugcuccgccuuuucgauuucaacaaacaagccauacgccgccuuaagacaccagcccaaauguccauccagcuaaucaacaaagccgucaacgcccucaucaacgaccaacucauuaugaaaaaccacuuacgcgacaucaugugcauccccuacugcaacuacuccaaauacugguaccucaaccacacugucaccgguaaaacaucacucccacgcugcuggcuggucuccaacggauccuaccuuaacgaaacccgcuucuccgacgacaucgaacaacaagcagacaauaugaucacagaacuccuccaaaaggaauacaucgaccgucaaggcaaaacaccccucggccucgucgaccucuucgucuucuccaccuccuucuaccuaauaucaauuuuccuccaccuugucaaaauccccacccaccgucacaucauaggaaaacccugccccaaaccccacagacucaaccacaugggcaucugcucauguggccuauacaaacaccccggaaucccggucaaguggaaacgcuaa

SEQ ID NO: 5918 - RNA, 1473 nt, Artificial Sequence
  derived and/or modified protein sequence (opt11) from LASV(Lassa virus/H.sapiens-wt/NGA/2016/ISTH_0146;Clade II)__AVO03633__GPCstabilized
augggccaaaucaucaccuucuuucaagaaguaccccacgucaucgaagaagucaugaacaucguacucaucgcccuaagccuccuagcaauacuaaaaggaaucuacaacguagcaaccugcggccucuucggccuaguauccuuucuacuccuaugcggacgcucgugcuccaccaccuacaagggagucuacgaacuacaaacacuagaacucgacauggcaucucucaacaugaccaugccacucuccugcaccaaaaacaacucccaccauuacaucauggucggcaacgaaaccggacucgaacuaacccuaaccaacaccuccaucauuaaccacaaauucugcaaccucucagacgcacacaagaaaaaccucuacgaccacgcccucauguccaucaucuccacauuccaccucuccaucccaaacuucaaccaauacgaagccaugagcugcgacuucaacggcggcaaaaucuccguccaguacaaucucucccauacuuacgccgucgacgcagccaaccacugcggcacaaucgccaacgggguucuucaaaccuucaugagaauggcauggggcggcuccuacaucgcccucgacucaggcuguggcucuugggacugcauaaugacaucauaccaauaccucaucauacaaaacaccaccugggaagaccacugccaauuuagccgcccaucccccaucggauaccucggccuccucucccaacguacacgcgacauuuauaucucccgccgccgccgaggcacauucaccuggacccucucugacucggaaggcaacgaaacaccaggcggauacugccucaccagauggaugcucaucgaggccgaacuaaaaugcuucggcaacaccgccgucgcgaaaugcaacgaaaaacacgacgaagaguucugcgacaugcuacgacucuucgacuucaacaaacaagccauucgccgacucaaaaccccagcccaaaugucaauccaacucauaaacaaagccguaaacgcgcucauaaacgaccaacuaaucaugaaaaaccaccuacgagacaucaugugcaucccauacugcaacuacuccaaauacugguaccucaaccacaccgucaccggcaaaacaucacucccccgcugcuggcucgucucaaacggcucuuaccuaaacgaaacccacuucuccgacgacaucgaacagcaggccgacaacaugaucacagaacuacuccaaaaagaauacauggaccgccagggcaaaacaccccuuggacucgucgaccucuucgucuucucaaccucguucuaccuaaucagcaucuuccuucaccucgucaaaauacccacccaccgccacgucauaggcaaacccugcccaaaaccccaccgacucaaccacaugggcaucugcuccugcggccucuacaaacacccaggcguccccgucaaauggaaacgcuag

SEQ ID NO: 5919 - RNA, 1473 nt, Artificial Sequence
  derived and/or modified protein sequence (opt11) from LASV(Lassa virus/H.sapiens-wt/NGA/2016/ISTH_0187;Clade II)__AVO03549__GPCstabilized
augggucaaauugucaccuucuuccaggaagucccacacgucaucgaggaaguaaugaauaucguccucaucgccuuauccguccucgccauccuaaaaggacucuacaacuucgcaaccugcggacucaucggccuagucaccuuccuacuacucucaggucgcuccugcuccauggucuacaaaggcgucuacgaacuccaaacccucgaacucaacauggaaacacucaacaugacaaugccccuauccugcaccaaaaacaacucccaccacuacauccgugucggcaacgacaccggccuagaauuaacacuuaccaacaauacccuccucaaccacaaauucugcaaccucagcgacgcccacaagaaaaacuuauacgaucaugcccucaugucuaucauaagcaccuuccaccucuccauccccaacuucaaccaauacgaagccauguccugcgacuucaacggcggccggaucaccguacaauacaaccucucucacuccuacgccgucgacgccgccaaucacugcggcacagucgccaacggcguccuccagaccuucaugcgcauggccuggggcggcucauacaucgcccucgacucucgcugcggcaacugggacugcaucaugaccuccuaccaauaccuaaucauacaaaacaccaccugggaagaccacugccaauuuucacgacccucccccaucggcuaucuuggccuccucucccaacgcacccgcgacaucuacaucucacgccgacgacgcggcaccuucaccuggacucucucugacuccgagggaaacgaaacccccggcggcuacugccuaacccgcuggaugcugaucgaagccgaacucaaaugcuucggaaacaccgccgucgccaaaugcaacgaaaaacacgacgaagaauuuugcgacaugcuccgccucuucgacuucaauaaacaagccauucgccgacugaaagcccccgcacaaauguccauccaacucaucaacaaagccguuaacgccuuaauuaacgaccagcucaucaugaaaaaccaccuccgagacauaaugugcauucccuacugcaacuacuccaaauacugguaccuaaaccacaccucaaccggcaaaaccucccuaccccgcugcuggcuaguaucaaacggcuccuaccucaacgaaacccacuucuccgacgacauagagcaacaagccgacaacaugaucacagaaaugcugcaaaaagaauaccuagaccgacaagguaaaacaccccucggacucgucgacaucuucguguucuccaccucuuucuaccucauauccauuuuccuacaccucaucaaaaucccuacccaccgccacaucguaggcaaacccugcccaaaaccccaucgccuaaaccacaugggaauuugcagcugcggccucuacaaacaacccggcguccccguccgauggaaacgauaa

SEQ ID NO: 5920 - RNA, 1473 nt, Artificial Sequence
  derived and/or modified protein sequence (opt11) from LASV(Lassa virus/H.sapiens-wt/NGA/2016/ISTH_0199;Clade II)__AVO03653__GPCstabilized
augggccaaaucauaaccuucuuccaagaagucccucacgucaucgaagaaguuaugaacaucguucuuaucgcccucucacuucucgccauccucaaaggcauauacaacguagcaaccugcggccucuucggccucgucucauuccuacuucucugcggccgcuccugcucaacuacauacaaaggcgucuacgaacuucaaacgcucgaacuugacauggccagccucaacaugaccaugccacuauccugcacaaagaacaauucccaccacuacaucauggucgguaacgaaaccgggcuugaacucacguuaaccaacaccuccaucaucaaccacaaauucugcaaccucucagacgcacauaagaaaaaccuauacgaccacgcgcucaugucuaucauauccacauuccaccucuccauccccaauuucaaccaauaugaagccaugucuugcgacuucaacggcggaaaaauaucaguccaauacaaccucucccacacauacgcagucgacgccgccaaccacugcggaaccaucgccaacggcguccuacagaccuucaugcgcauggccuggggaggcagcuacauugcacuagacuccggcugcggcaacugggacugcaucaugacgucuuaccaauaccuaaucauacaaaacaccaccugggaagaccacugccaauucucccgacccucccccaucggcuaccuuggccuacuaucacaaagaacucgcgacaucuacaucucacgccgacgccgcggcaccuucaccuggacacucuccgauuccgaaggcaacgaaacccccggcggcuacugccucacccgcuggaugcuuaucgaagccgaacuuaaaugcuucggcaacacagcagucgccaaaugcaacgaaaaacaugacgaagaauuuugcgacaugcucagacucuucgacuucaacaaacaagcaaucucccgccucaaaacccccgcacagauguccauacaacucaucaacaaagccgucaacgcccugauaaacgaccagcuaaucaugaaaaaccaccuccgagacaucaugugcaucccauauugcaacuacuccaaauacugguaucuaaaccacacagucacaggcaaaaccucccucccacgcugcuggcucgucuccaacggcuccuaccugaacgaaacucacuucucagacgacaucgaacaacaggccgacaacaugauaaccgaaaugcuccaaaaagaauacaucgacagacagggaaagaccccgcucggccucgucgaccucuucgucuucuccaccucauucuaccuaaucuccaucuuccuccaucucgucaaaauaccgacccaucgccacgucauaggaaaacccugcccaaaaccccaccgccucaaccacaugggcauaugcuccugcggccucuacaaacaccccggagucccagucaaauggaaacgcuaa

SEQ ID NO: 5921 - RNA, 1473 nt, Artificial Sequence
  derived and/or modified protein sequence (opt11) from LASV(Lassa virus/H.sapiens-wt/NGA/2016/ISTH_0419;Clade II)__AVO03539__GPCstabilized
augggccaaaucguaaccuucuuccaagaagucccucaugucauugaagaagucaugaacaucguccuaaucgcacucucccuacucgcaauacucaaaggaaucuacaacuucgcaacuugcggccuuaucggccucaucaccuuccucuuucucugcggccgauccugcuccgccaucuacaaaggcuccuaucaacuccaaacgaucgaacuaaacauggaaacacucaacaugaccaugccccucucaugcacgaaaaauuccagccaccacuacaucagagucggcaacgaaacaggccuagaacucacccugaccaacaucuccaucauagaucacaaauucugcaaccucuccgacgcccacaagaaaaaccuauacgaccacgcccuaauguccaucaucucaacauuccaccuauccauacccaacuucaaccaauacgaagccaugucaugcgacuucaacggaggcaaaaucuccguccaauacaaccuaucccacaccuacgcagucgacgcagccaaccacugcggcacaguugcaaacggcguccuccagaccuucaugcgcauggccuggggcggcucauacaucgcucucgauucuggcugcggcaacugggacugcaucaugacgucauaccaauaccucaucauccagaacaccaccugggaagaccacugccaauucagccgccccuccccaauaggcuaccucggacuccucucccaacgaacucgcgacaucuacaucuccagacgccgacgugguacauucaccuggacccucuccgacucagaaggcaaagaaaccccuggcggcuauugccucacacgcuggaugcucaucgaagcagaacucaaaugcuucgguaacaccgccgucgccaaaugcaacgaaaaacacgacgaagaguucugcgacaugcuccgccucuucgauuucaacaaacaagccauccaaaggcuuaaagcccccgcacaaauguccauccaacuuaucaacaaagccgucaacgcccucaucaacgaccaacucaucaugaaaaaccacuuacgagacauuaugugcauccccuauugcaauuacucuaaauacugguaccucaaccacaccuccaccggccgcaccagccucccccgcugcuggcucgucagcaacggcagcuaccucaacgaaacccauuucucagacgacaucgaacaacaggcagacaacaugaucaccgaaaugcuccaaaaagaauacaucgaccggcaaggaaaaaccccacucggccucgucgaccucuucgucuucuccaccuccuucuaccucaucuccaucuuccuccaccucaucaaaaucccuacucaccgacacaucgucgggaaauccugucccaaaccccaucgccuaaaccauauggguaucugcuccuguggccuuuacaagcagcccggaguaccaguaaaauggaaacgauaa

SEQ ID NO: 5922 - RNA, 1473 nt, Artificial Sequence
  derived and/or modified protein sequence (opt11) from LASV(Lassa virus/H.sapiens-wt/NGA/2016/ISTH_0447;Clade II)__AVO03559__GPCstabilized
augggccaaauaaucacauucuuccaagaaguuccccacgucaucgaggaagucaugaacaucguccucaucgcccucucacuccuugcuauccucaaagggauauacaauaucgcgaccugcggccucuucggacucgucucauuccuacuccuuugcggccgaucuugcucgacgaccuacaaaggagucuacgaacuccaaaccuuagaacucgacauggccucucucaauaugacaaugccccuuuccugcacuaaaaacaacucgcaccacuacaucaugguaggcaaugaaaccggccucgaacucacacucaccaacaccuccaucauaaaccacaaauuuugcaaccuauccgacgcccacaagaaaaaccuauacgaccacacccucauguccaucaucuccacauuccaccuauccauaccuaacuucaaccaauacgaagccauguccugcgacuucaacggcggaaaaaucucaguccaauacaaccucucacacgccuacgccgucgacgccgccaaucacugcggcaccaucgcaaacggcguccuacaaacauucaugcguauggcauggggcggcucuuacauagcccucgacuccggcugcggcaacugggauugcauaaugaccuccuaccaauaccucauaauacaaaacaccaccugggaagaucacugccaauucucccguccaucacccaucggcuacuuaggccuccucucccaacgcacccgcgacaucuacauaucccgcagacgccgaggcaccuucacauggacccuauccgacuccgaaggcaacgaaacaccaggcggcuacugccucacccgcuggaugcuaaucgaagccgaacucaaaugcuucggaaacaccgccgucgcaaaaugcaacgagaaacacgacgaagaguucugcgauaugcuccgacucuucgacuucaacaaacaggccauccgccgccucaaaacccccgcccaaaugucaauccaacuaaucaacaaagccgucaacgcucuaaucaacgaccaacucauaaugaaaaaccaccucagagacaucaugugcauacccuacugcaacuacucaaaauacugguaccucaaucacaccgucacaggcaaaaccucacucccgcgaugcuggcucgucuccaauggcuccuaccuaaacgaaacucacuucuccgacgacauugaacaacaggccgacaacaugaucacagaacuccuccaaaaggaauacaucgaccgacaaggcaaaaccccucucggacucgucgaucucuucguauucagcaccucauuuuaucuaaucuccauauuccuccaccucgucaaaauccccacacaccgucacguagucggcaaacccugccccaaaccccaccgucucaaccacaugggcaucugcuccugcggucucuacaaacacccgggcguccccgucaaguggaaacgauaa

SEQ ID NO: 5923 - RNA, 1473 nt, Artificial Sequence
  derived and/or modified protein sequence (opt11) from LASV(Lassa virus/H.sapiens-wt/NGA/2016/ISTH_0543;Clade II)__AVO03595__GPCstabilized
auggggcaaaucauaaccuucuuccaagaggucccacacgucaucgaagaagucaugaacaucgugcucaucgcacucucccuccucgccauccucaaaggaauauacaacaucgccacaugcggccucuucggccugaucucuuuccuacugcuuugcggccgaucuugcuccacaaccuacaaaggagucuacgaacuacaaacccucgaacuugacauggccaaccucaauaugaccaugccccuauccugcaccaaaaacaacucacaccacuacaucauggucggcaacgaaaccggccuagagcuaacccuuacaaacacauccaucauaaaccacaaauucugcaaccucucugacgcccacaaaaaaaaccucuacgaccacgccuuaaugucaaucaucucuacauuucaccucuccauacccaacuucaaccaauacgaagcuauguccugcgacuucaacggcgguaaaaucuccguccaauacaaccucucccacuccuacgcaguagaugcagccggccacugcggcaccaucgccaacggaguccuacaaaccuucaugagaauggccuggggcgggagcuacaucgcacucgacuccggauguggcaacugggacugcaucaugacaucuuaccaauaccucgucauacaaaacaccaccugggaagaccacugccaauucucccgccccuccccaaucgguuaccuaggccugcucucccaacgaacccgcgacaucuacaucagccgccgaaggcgcgguacauucacauggacucucuccgacagcgaaggcaacgaagcgcccggaggcuacugccucacacgcuggaugcuuauugaagccgaacucaaaugcuucggcaacaccgcuaucgccaaaugcaacgaaaaacacgacgaagaauucugcgacaugcuccgccucuucgacuucaacaaacaagccauacgccgccucaaagccccagcccaaauguccauacagcucaucaacaaagccgucaacgcccucaucaacgaccaacucauaaugaaaaaccacuuacgcgacauaaugugcauccccuacugcaacuacucuaaauacugguaccucaaccauaccgucaccggcaaaaccucccuccccaaauguuggcuaguauccaacggcuccuaccucaacgaaacccacuucucagacgacauagaacaacaagccgacaacaugauuaccgaacuccuccagaaagaauacauggaccgacaaggaaaaaccccacucggccucgucgaccucuucguauucuccacuuccuucuaccucaucuccaucuuccuccaccucguaaaaaucccaacccaccgacauauagucggacgccccugcccaaaaccccaccgacuuaaucacaugggcaucugcucaugcggccucuacaaacacccaggcguucccgucaaauggaaaagauaa

SEQ ID NO: 5924 - RNA, 1473 nt, Artificial Sequence
  derived and/or modified protein sequence (opt11) from LASV(Lassa virus/H.sapiens-wt/NGA/2016/ISTH_0565;Clade II)__AVO03637__GPCstabilized
augggccaaaucgucacauucuuccaagaaguaccccacgucauagaagaagucaugaacaucguccuaaucgcccucucccuacucgccauccuuaaaggcaucuacaacgucgcuacaugcggccuguucggacucaucuccuuccuacuccucugcggacgcuccugcuccaccacauacaaaggagucuacgaacuccaaacacucgaacuagacauggccaaccucaacaugacuaugccccuuuccugcacgaagaacuccucacaccacuacaucauggucggcaacgaaaccgggcucgaacucacccucaccaacaccuccaucaucaaccacaaauuuugcaaccucuccgacgcccacaagaaaaaccucuacgaccacgcccuaauguccauuauauccacauuccaccuauccauacccaacuucaaccaauacgaagcaaugucaugcgacuucaacggcggcaaaaucucuguccaauacaaccuaucacacacauacgccgucgacgccgccaaccacugcggcaccaucgccaacggcguccuacaaacauucaugcgaauggccuggggagguuccuacaucgcccucgacuccggcugcggaaacugggacugcauaaugaccuccuaccaauaccuuaucauccaaaacaccacaugggaagaccauugccaauucucacgccccucaccuauaggcuaccuaggccuccucucccagcgcacacgcgacaucuacaucagccgccgccgccgcggcaccuucacauggacuuuauccgacuccgaaggaaacgaggcccccggcggcuacugccucacacgcuggaugcuaaucgaagccgaacucaaaugcuucggcaauaccgccauagccaaaugcaacgaaaaacacgacgaagaguucugcgacaugcuucgccucuucgacuucaacaaacaagccaucaaacgccucaaauccccggcacagauguccauccaacucaucaacaaagcagucaacgcucucaucaacgaccaacuaauaaugaaaaaccaccuacgcgacaucaugugcauccccuacugcaacuacucccgcuacugguaccucaaucacaccgucaccggaaaaaccagccuuccccguugcuggcuuaucucuaacggaucauaccuaaacgaaacccacuucuccgacgacauagaacaacaagccgacaacaugaucacagaacuccuccaaaaagaauacauggaccgacagggcaaaaccccacucggacucgucgaccucuucguauucuccaccuccuucuaccucauaucaauauuccugcaccuugucaagauacccacccaccgccacaucgucggccgccccugccccaaaccccaccgacuaaaccacaugggcaucugcagcugcgggcuauacaaacacccaggaguccccguaaaauggaagcgcuag

SEQ ID NO: 5925 - RNA, 1473 nt, Artificial Sequence
  derived and/or modified protein sequence (opt11) from LASV(Lassa virus/H.sapiens-wt/NGA/2016/ISTH_0572;Clade II)__AVO03611__GPCstabilized
augggccaaaucaucacauucuuccaagaagucccccaugucauugaagaagucaugaauaucguccuaauagcacuaucccuucucgcuauccucaaaggcauauacaacguagccaccuguggccuauucggccucgucgccuuccuccuucucugcggccgguccugcuccaccaccuacaagggcgucuacgaacuucaaacccucgaacucgacauggccagccuaaacaugaccaugccucucucaugcaccaaaaacaacucacaccacuacaucauggucggcaacgaaaccggccucgaacucacccucaccaacaccagcaucaucaaccacaaauucugcaaccucuccgacgcacacaagaaaaaccuauacgaccacgcacucauguccaucaucuccaccuuccaccucucaaucccaaacuucaaccaacacgaagccauguccugcgacuucaacggcggcaaaauauccguccaauacaaccucagccacaccuacgccguagacgccgcaaaccauugcggaaccaucgccaacggaguccuccaaaccuuuaugcggauggccuggggcgggucuuauaucgcccucgacuccggcugcggcucaugggacugcaucaugaccuccuaccaauaccucaucauacaaaacaccacaugggaagaccacugccaauucucccgaccaucccccaucggcuaccuaggucuccuaucccaacgaacccgagacauauacaucucccgccgccgccgcggcaccuucaccuggacacuauccgacagcgagggcaacgagacccccggcggguacugccucacccgcuggaugcuaaucgaagcagaacucaaaugcuucggcaacacagccguugccaaaugcaacgaaaaacacgacgaagaguucugcgacaugcuccgacuuuucgacuucaacaaacaagcuauccgacgccuaaaaacccccgcccaaaugucaauacaacucaucaacaaagccgucaacgcgcucauuaacgaccaacucaucaugaaaaaccaccuccgagacaucaugugcauccccuacugcaacuacuccaaguacugguacuuaaaccacaccgucaccggccgcaccucccucccacgcuguuggcucgucuccaacggcuccuaucucaacgaaacacacuucuccgaugacaucgaacaacaagcagacaacaugaucaccgaacuccuccaaaaagaauacauggacagacagggcaaaacgccccucggccucgucgaccucuucgucuucuccaccucauucuaccuaaucucaaucuuccuccaccucauuaagaucccuacccaccgacacgucaucggaaaaccaugccccaaaccccaccgccucaaccacaugggcaucugcuccugcggccucuacaaacaccccggcgucccagucaaauggaaacgcuaa

SEQ ID NO: 5926 - RNA, 1473 nt, Artificial Sequence
  derived and/or modified protein sequence (opt11) from LASV(Lassa virus/H.sapiens-wt/NGA/2016/ISTH_0610;Clade II)__AVO03585__GPCstabilized
augggacaaaucauaaccuucuuccaagaagucccucacgucaucgaagaaguaaugaacaucguccucaucgcacucucccuccucgcuauccucaaaggcgucuacaacguagcaaccugcggccucuucgggcuggucuccuuccuacuucucugcggccgcuccugcucaaccaccuacaaaggcgucuacgaauuacagacccucgaacucgacauggccucccucaacaugaccaugccucucagcugcaccaagaacaacucgcaccacuauaucaugguaggcaacgaaacaggccuggaacucacccucacaaacaccuccauaauaaaccacaaauuuugcaaccuaucagacgcccacaagaaaaaccucuacgaccacgcccucauguccaucaucuccacauuucaccucuccauccccaacuucaaucaguacgaagccaugucaugcgacuucaacggcggcaaaaucuccguccaauacaaccuaucacacaccuacgccgucgacgccgccaaccacugcgggaccauagccaacggcguguuacaaaccuucaugagaauggccuggggcggcuccuacaucgcccucgacucaggaugcggcuccugggacugcaucaugaccuccuaccaauaccucaucauccaaaacaccaccugggaagaccauugucaauucucucggccaucuccuaucggauaccuaggucuccucucacaacgcaccagagacaucuacaucucacgccgcagacggggcaccuucacuuggacccuauccgacucagagggcaacgagacccccggcggcuacugccucacacgcuggaugcucauagaagcagaacucaaaugcuucgguaacaccgccguugccaaaugcaacgaaaaacaugacgaagaguuuugcgauaugcugcgacuauucgacuucaacaaacaagccauccgccgccuaaaagcgcccgcccaaaugagcauccaacucaucaacaaagcggucaacgcccuaaucaacgaccaacucaucaugaaaaaccaccuccgcgacaucaugugcauaccuuacugcaacuacucaaaauacugguaccucaaccacaccgucaccggacgcaccucacuaccacgauguuggcucgucuccaacgguucauaccuaaacgaaacgcacuucuccgacgauauagaacaacaagccgacaacaugaucaccgaacuccuacaaaaagaauacaucgaccggcaaggcaaaacaccccucggccucgucgacuuauucguuuucuccaccuccuucuaccucaucucaauauuccuccaucucguuaaaaucccaacccacagacacauaaucggcaagcccugcccaaaaccccaccgccuaaaccacaugggaaucugcucaugcggacuuuacaaacaccccggcgucccagucaaauggaaacgcuaa

SEQ ID NO: 5927 - RNA, 1473 nt, Artificial Sequence
  derived and/or modified protein sequence (opt11) from LASV(Lassa virus/H.sapiens-wt/NGA/2016/ISTH_0621;Clade II)__AVO03543__GPCstabilized
augggccaaaucguaaccuucuuccaagaaaucccccacguaguugaagaaaucaugaacaucguccuaauuacccuuucccuacucgcaauccucaaaggccuguacaauuucgcaaccugcggccuuaucggccuaaucacauuccucuuccuuugcggccgcuccuguucaaccaucuacaaaggcuccuaccaacuacaagcccucgaacucaacauggaaacauuaaacaugaccaugccacucuccugcaccaaaaacaacucccaccacuacauccguguaggcaacgaaaccggccucgaacucacacucaccaauaccagcaucaucgaccacaaauucugcaaccucucagacgcacauaaacgcaaccucuacgaccacacccucauguccaucaucucaacauuccaccucucuauaccaaacuucaaccaauacgaggcaauguccugcgacuucaacgguggcaaaaucuccguccaauauaaccucucacacuccuacgcaggcgacgccgcacgccacugcggcacagucgccaacggaguccuccaaaccuucaugcgcauggccuggggcggcagcuacaucgcccucgacuccggaugcggcaauugggacugcaucaugaccucauaucaguaccucaucauccaaaacaccaccugggaaaaccauugucaauucuccagaccuucaccaaucggcuaccuaggccugcuaagccaacgcacccgcgacaucuacaucucccgacgcagacguggaaccuucaccuggacccucucagacucagaaggcaaggaaacccccgguggauacuguuuaacccgcuggaugcucaucgaggcagaacucaaaugcuucggcaacacagccguggccaaaugcaacgaaaaacaugacgaagaguucugcgacaugcuacgccucuucgacuucaauaagcaagccauccaacgacucaaaacccccgcccaaauguccauccaacucaucaacaaagccguaaacgcccuaaucaacgaccaacuaaucaugaaaaaccaccuccgcgacaucaugugcauccccuacugcaacuacucaaaauacugguaccuaaaccacaccacaaccggcaaaacuucccuacccaaaugcuggcuaguuagcaacggcuccuaccuaaacgaaacccacuucuccgacgacaucgaacaacaagccgacaacaugaucaccgaaaugcuccaaaaagaauacaucgaccgccaaggcaaaacaccacucggccucgucgaccucuucguauucuccacauccuucuaccuaaucuccaucuuccuccaccuaaucaagaucccuacccaccgacacaucgucggcaaaucuugccccaaaccccaccgacuuaaccacaugggcauuugcuccuguggacucuacaaacagccaggcguucuagucaaauggaaacgcuaa

SEQ ID NO: 5928 - RNA, 1473 nt, Artificial Sequence
  derived and/or modified protein sequence (opt11) from LASV(Lassa virus/H.sapiens-wt/NGA/2016/ISTH_0701;Clade II)__AVO03629__GPCstabilized
augggccaaaucaucacuuucuuccaagaagucccacacgucaucgaagaaguuaugaacaucguccuaaucgcacucucccuccucgcuauacucaaaggcauauacaacgucgcaaccugcggccucuucggacucgucuccuuccuccuauuaugcggccgcuccugcuccaccaccuauaagggcgucuacgaacuacaaacccuagagcucgacauggccucccuaaacaugaccaugccccuuagcugcaccaaaaacaacucccaccacuacaucaugguaggcaacgaaaccggccuagaacucacacuaaccaauaccucaaucaucggacacaaauucugcaaccuauccgacgcccacaagaaaaaccucuacgaccacgcccugauguccaucaucagcacuuuccaccucuccauccccaacuucaaccaguacgaagccaugagcugcgacuucaacggaggcaaaaucucaguccaauacaaucuaucccacgccuacgccguagacgccgccaaccacugcggcaccauagcaaacggcguacuccaaaccuucaugagaauggccuggggcgguagcuacaucgcucuggacuccggcugcggauccugggacugcaucaugacaagcuaccaauaccucauaauacagaacaccacuugggaagaccacugccaauucagccgccccucccccaucggcuaccuaggccuccuaucccaacgaacccgcgacaucuacauaucaagacgccgccgcggcacauucaccuggacacucagcgacuccgagggaaacgaaacccccggcggcuacugccuaacacgcuggaugcuaaucgaagcagagcucaaaugcuucggcaauaccgccguagccaaaugcaacgaaaaacaugacgaagaguucugcgacaugcuacgccuauucgacuucaacaaacaagcaauccgacgacugaaaacgcccgcccagauguccauccaacugaucaacaaagccgucaacgcccuaaucaacgaccaacugaucaugaaaaaccaccuccgagacaucaugugcauacccuacugcaacuacucaaaguacugguaccucaaccacaccguaaccggaaaaaccucccuaccacgaugcuggcucguaucaaacggcuccuaccuuaacgaaacccacuucucggacgacaucgaacaacaagccgacaacaugaucaccgaacucuuacaaaaagaauacaucgaucgccaaggcaagacaccacucgggcucgucgaccucuucguuuucuccacauccuucuaccuaauauccaucuuccuccaucucguaaaaaucccaacacaccgccacgucaucggaaaacccugcccaaaaccccaccgccucaaccacaugggcaucugcucaugcggccucuauaaacacccuggaguacccguaaaauggaaacguuaa

SEQ ID NO: 5929 - RNA, 1473 nt, Artificial Sequence
  derived and/or modified protein sequence (opt11) from LASV(Lassa virus/H.sapiens-wt/NGA/2016/ISTH_0702;Clade II)__AVO03557__GPCstabilized
augggccaaaucauaaccuucuuccaagaagucccccacgucaucgaagaggucaugaacauaguccucauagcacuaucacuacuugcaguacuaaaagguauauacaacgucgcgaccuguggacucuucggccuagucgcauuccuccuccugugcggccgcucaugcucaacgaccuacaaaggcgucuacgaacuccagacucucgagcuagacauggccaaucucaacaugaccaugccccuaucaugcaccaaaaacaacucccaccacuacauaauggucggaaacgaaaccggccucgaacucacgcucaccaacaccuccaucaucaaccacaaauucugcaaccucuccgacgcccacaagaaaaaccucuacgaccacgcccucauguccaucaucuccaccuuucaccucuccaucccuaacuucaaccaauacgaagccauguccugcgacuucaacggcggaaaaaucagcguccaauacaaccuaucccacaccuacgccgucgacgcagcaaaccacugcggcacuaucgcuaacggaguccuccaaaccuucaugcgaauggccuggggcggcuccuacaucgcccuugacucgggcugcggaagcugggauugcaucaugaccagcuaccaauaccuuaucauccaaaacaccaccugggaagaccacugccaauucucacgacccucacccaucggcuaccuuggccuccucucccaacgcaccagagacaucuacaucuccagacgccgucgcggaaccuucaccuggacccuuuccgacuccgaaggcaacgaaacccccggcggcuacugccucacccgauggaugcucaucgaagccgaacucaaaugcuucggcaacacagccgucgccaaaugcaacgaaaaacacgacgaggaguucugcgacaugcuucgucucuuugacuuuaacaaacaggccauccgccggcuaaaaacccccgcccagauguccauacaacucaucaacaaagcagucaacgcccucaucaacgaccaacucaucaugaaaaaccaccuacgcgacaucaugugcauaccauacugcaacuacuccaaauauugguaccucaaccacacagucaccggacgcaccucccucccucgcugcuggcucguauccaacggcuccuaccuaaacgaaacacacuucuccgacgacaucgaacaacaggccgacaacaugauaacugaacuccuucaaaaagaauacauggacagacaaggaaaaacaccacuaggccucgucgaccuauucgucuucuccaccuccuucuaccucaucuccaucuuccuacaccucaucaaaauccccacccaccgacacgucaucggcaaaccaugccccaaaccccaccgccuuaaucacaugggcaucugcucaugcggacuauacaaacaccccggcguccccgucaaauggaaacgcuaa

SEQ ID NO: 5930 - RNA, 1473 nt, Artificial Sequence
  derived and/or modified protein sequence (opt11) from LASV(Lassa virus/H.sapiens-wt/NGA/2016/ISTH_0703;Clade II)__AVO03597__GPCstabilized
augggccaaaucaucaccuucuuccaagaagucccccacgucaucgaagaagucaugaacauaguccuaauagcacucucccuccucgccauacuaaaaggcaucuacaacgucgcaacaugcggccucuucggacucgucucauuccuccuucuuugcggacgcuccugcucaaccaccuacaaaggagucuacgaacuccaaacccucgaacuugacauggccucccucaauaugaccaugccccucuccugcaccaaaaacaacucccaccacuacaucauggucggaaacgaaaccgggcuagaacugacacucaccaacaccuccaucauaaaccacaaauuuuguaaucucucagacgcucacaagaaaaaccucuacgaccacgcacucauguccauaaucagcaccuuccaccuauccauacccaacuucaaccaguacgaagcaauguccugcgauuucaauggagggaaaauauccguccaauacaaccuaucccacaccuacgccgucgacgccgcaucccacugcgguacaauugccaacggaguacuccaaaccuucaugcgcauggcauggggcggauccuauauugcccucgacucaggcugcgguagcugggacugcaucaugaccuccuaccaauaccucauaauacaaaacaccaccugggaagaccacugccaauucucccgcccaucacccaucggcuaccuaggacuacucucccaacgaaccagagacaucuacaucucccgacgacggcgcggcaccuucacuuggacacuauccgacuccgaaggcaacgaaacacccggcggcuacugccuaacccgcuggaugcucaucgaggccgaacuaaaaugcuucggcaacaccgccguggccaaaugcaacgaaaaacacgacgaagaguucugcgacaugcuccgacuauucgacuucaacaaacaagccauccgccggcuaaaaacuccugcacaaaugucuauccaacuuaucaacaaagcgguaaacgcccucaucaacgaccaacucaucaugaaaaaccaccuacgcgacauaaugugcauccccuauugcaacuacucaaaauacugguaccuaaaccauacagucaccggccgcaccucccugccccgcugcugguuagucuccaacggcucuuaccuaaacgaaacccacuucucggacgacauagaacaacaagccgacaauaugaucacugaacugcuccaaaaagaauacaucgaacgccaagggaagacaccccucggccucgucgaccucuucguauucucgaccuccuucuaccuuauuucgaucuuccuucaccucaucaaaauccccacucaccgccauguaaucggcaaacccugccccaaaccccaccgacuuaaccacaugggaaucugcuccugcggccuauacaaacaccccggcguccccgucaaauggaaacgauaa

SEQ ID NO: 5931 - RNA, 1473 nt, Artificial Sequence
  derived and/or modified protein sequence (opt11) from LASV(Lassa virus/H.sapiens-wt/NGA/2016/ISTH_0717;Clade II)__AVO03547__GPCstabilized
augggccaaaucguuacauucuuccaagaagucccgcacgucauugaagagguuaugaacauugucuuaauagcacuauccauccucgcaauacuaaaaggucucuacaacgucgcaaccugcggccucauaggccugguaacauuccuacuccuauccggacgcagcugcuccaugaucuacaagggcguauacgaacuccaaacacuugaacucaacauggagacccucaacaugacaaugccacuuuccugcaccaaaaacaacucccaccacuacaucauggucggcaacgaaaccggccucgaacuaacccucacaaacaccucacuccucaaccacaaguucugcaaccucuccgacgcucacaagaaaaaccucuacgaccacacacucaugucgaucaucuccaccuuccaccucucuauccccaacuucaaccaauacgaagcuauguccugcgauuucaacggcggcaaaauaaccguccaauacaaccuaucacacaccuacgccguugacgccgucaaucacugcggcacccucgccaacggcauccuucaaacauuuaugcgcauggccuggggaggaucuuacauugcccucgacucccgcugcggcuccugggacuguauaaugacauccuaccaauaccucauaauucaaaacaccaccugggaagaccacugccaauucucacgacccuccccaauaggcuaccucgggcuccucucccaacguacccgcgacauauacauaucccgacgccgccguggcaccuucaccuggacacucuccgacucagaaggcaacgagacuccaggaggauacugccuaacccgauggaugcucaucgaagcagaauuaaaaugcuucggcaacaccgcaguagccaaaugcaacgagaaacacgacgaggaauuuugcgacaugcuccgccucuucgacuucaacaaacaggccauccgccgucucaaagcccccgcccaaauguccauacaacucaucaacaaagccgucaacgcacucauaaacgaccaacuuaucaugaaaaaccaccuacgcgacaucaugugcauccccuacugcaacuacagcaaauauugguaccucaaccacaccuccaccggcagaaccucacucccccgauguuggcuagucuccaacggcagcuaccuuaacgaaacacacuucuccgacgacaucgaacaacaagccgacaacaugaucaccgagaugcuacaaaaagaauaccucgaccgccaagggaaaacccccuuaggccuagucgaccuuuucguauucuccaccuccuucuaccucaucuccauauuccuacaccuaauaaaaauccccacccaccgccacaucguaggcaaacccugccccaaaccccaccgccucaaccacaugggcaucugcucuugcgggcucuacaaacaacccggaguccccguacgcuggaaacgauaa

SEQ ID NO: 5932 - RNA, 1473 nt, Artificial Sequence
  derived and/or modified protein sequence (opt11) from LASV(Lassa virus/H.sapiens-wt/NGA/2016/ISTH_0753;Clade II)__AVO03609__GPCstabilized
augggccaaaucaucaccuucuuccaagaagucccccacgucauagaagaagucaugaauaucguccucaucgcccuaucucuccuagccauccucaaaggcaucuacaacgucgcaaccugcggccucuucggccuagucucauuccuccuacucugcggacgauccugcucuaccacauacaagggaguauacgaacuccaaacccuggaacucgacauggccucucucaacaugaccaugccacucucaugcaccaaaaacaacucccaccacuacaucauggucggcaacgaaaccggccuugaacucacccucaccaauaccuccauaaucaaccacaaauucugcaaccucuccgacgcccacaagaaaaaccucuacgaccaugcccucauguccauuaucucuaccuuccaccucuccauccccaacuucaaucaauacgaggccauguccugcgacuucaacggcggcaaaauaucaguccaauacaaccucucucacaccuacgccguugacgcagccaaccacuguggcacaauugccaacggcguccuccaaaccuucaugcguauggccuggggaggcagcuacaucgcacuagacucagguugcggcaacugggacugcaucaugaccuccuaccaauaccuuaucauccaaaacaccacaugggaagaccacugccaauucagccgacccucucccauuggauaccucggacuccuaucucaacgcacccgugauauauacaucucccgccgccgacguggcaccuuuaccuggacacucucugacuccgaaggaaacgaaacccccggaggcuacugccucacgcgauggaugcucaucgaagccgagcucaaaugcuucggaaacacagccgucgccaaaugcaacgaaaaacacgacgaagaguucugcgacaugcuccgacuuuucgacuucaacaaacaggccaucagccgacucaaaaccccagcacaaauguccauccaacuaauaaacaaagccgucaacgcccucaucaacgaccaacucaucaugaaaaaccaccuacgagacauuaugugcaucccauacugcaacuacucaaaauauugguaccucaaccacacaguuaccggacgcaccucacuuccacguugcuggcuagucucuaacggcuccuaccucaacgaaacccacuucuccgaugacaucgaacaacaagccgacaacaugauuacugaacuccuccaaaaagaauacauggaccgucaagguaaaacaccccuuggccuagucgaccucuucgucuucucaaccucauucuaccucauuucaaucuucuuacaccucgucaaaaucccaacacaccgccacgucaucggaaaacccugccccaaaccccaccgucuaaaccauaugggcaucuguagcuguggccucuacaaacaccccggagugcccguaaaauggaaacgguag

SEQ ID NO: 5933 - RNA, 1473 nt, Artificial Sequence
  derived and/or modified protein sequence (opt11) from LASV(Lassa virus/H.sapiens-wt/NGA/2016/ISTH_0759;Clade II)__AVO03593__GPCstabilized
augggccaaaucauaacauucuuccaagaagucccccacguaauagaagaagucaugaauauugucuuaaucgcacuaucccuacucgccauccuuaaaggcaucuacaacgucgcaacaugcggccucuucggccucguauccuuucuucuccucugcggccgcucuugcucuaccaccuacaaaggcgucuacgaacuccaaacccucgaacucgacauggcaucccucaauaugaccaugccccucuccugcaccaaaaacaacucccaccacuacaucauggucggcaacgagacaggccucgaacucacccucaccaacaccuccauaaucaaccacaaauuuugcaaccucucugacgcccacaagaagaaccucuacgaccacacccucaugucuaucaucuccacauuccaccucucgaucccaaacuucaaccaauacgaagcaaugucaugcgacuucaacggcggcaaaaucucgguccaauacaaccuuucccacaccuacgccguugacgccgccaaccacugcggaaccaucgccaacggcguucuucaaaccuucaugcgcauggcauggggcggguccuacaucgcccucgacucaggcugcggcucaugggacugcaucaugaccucguaccaauaccucaucauccaaaacaccuccugggaagaccacugccaauucucccgacccucaccuaucggauaccuaggccuacucucccaacgcacacgcgacaucuacaucucccgacgcagacgcggcaccuucaccuggacccuaucugacuccgaaggcaacgaaacacccggcggcuacugccucacacgcuggaugcucaucgaagccgaacucaaaugcuucggcaacaccgcugucgcaaaaugcaacgaaaaacacgacgaagaguucugcgacaugcuacgccuauucgacuucaacaaacaggccauccgccgacuaaagacacccgcccagauguccauacaacuuaucaauaaggcaguaaacgcccuaaucaacgaccaacucaucaugaaaaaccaccuccgcgacauuaugugcauaccuuacugcaacuacuccaaauacugguaucuaaaccacaccguaacagguaaaaccucucuuccccgcugcuggcuagucuccaacgguuccuaccuaaacgaaacccacuucucugacgacaucgaacaacaagccgacaacaugaucacagaacuacuccaaaaagaauacaucgaccgucaaggaaaaacaccucucggucucgucgaccuauucguuuucucaacauccuucuaucucauauccaucuuucuccaccuagucaaaauccccacccaccgccacguuaucggcaaacccugccccaaaccccaccgacuaaaccacaugggcaucugcuccugcggccuauacaagcaccccggcguccccguaaaauggaaacgcuaa

SEQ ID NO: 5934 - RNA, 1473 nt, Artificial Sequence
  derived and/or modified protein sequence (opt11) from LASV(Lassa virus/H.sapiens-wt/NGA/2016/ISTH_0777;Clade II)__AVO03615__GPCstabilized
augggccagauaaucaccuucuuccaggaagucccccacguuaucgaagaagucaugaacauaguacucaucgcccucucacuccucgcaauccucaaaggcauauacaacguugcaaccugcggccuccuuggacuaauauccuuccuccuccucugcggccgauccugcucaaccaccuacaaaggcgucuacgaacuccagacccucgaacucgacauggccaaccucaacaugacuaugccccucuccuguaccaagaacagcucccaccacuauaucauggucggcaacgaaaccgggcuagaguuaacccucaccaacacuucaaucauaaaucacaaauucugcaaccucucagacgcacacaagaaaaaccuauaugaccacgcccucauguccaucaucuccaccuuccaccucagcaucccuaacuucaaccaauacgaagcuauguccugcgacuucaacggaggaaaaaucucuguccaauauaaccucucucacgccuacgccgucgacgccgcaaaccacugcggcaccaucgccaacggcguccuacaaaccuuuaugcgcauggccuggggcggcucauacaucgcccuugacuccggcugcggaaacugggacugcauaaugaccucguaccaauaucucaucauucagaauacuaccugggaggaccacugccaauucucccgucccucccccaucggauaccuaggacuucucucacaacgcacccgugacaucuacaucucccgccgccgccgcggaacauucaccuggacccucuccgacucagagggcaacgaagcccccggcggauacugccuaacccgcuggaugcucauagaagccgaacuaaaaugcuucggcaacacagccaucgccaaaugcaacgagaaacacgacgaagaguucugcgacaugcuacgccuauucgacuucaacaaacaggcaauccgacgccucaaaaccccugcccaaauguccauccaacucaucaacaaagcgguuaacgcccucaucaacgaccaacucaucaugaaaaaccaccuccgcgacauaaugugcauccccuacugcaacuacuccaaauacugguaccucaaccacaccgucacagguaaaaccucgcucccacgaugcuggcucaucuccaacggcuccuaccuaaacgaaacgcacuucucagacgacaucgaacaacaagccgacaacaugauaacagaacuccuacaaaaagaauacauggaccgccaaggcaaaacaccccuaggccucgucgaccuauucguuuucucuaccuccuuuuaucucaucucgaucuuccuccaccuugucaaaaucccaacccaccgccacaucgucggcaaacccugucccaaaccacaccgccucaaccacaugggcaucugcuccugcggccuauacaaacaucccggcguaccagucaaauggaaacgcuaa

SEQ ID NO: 5935 - RNA, 1473 nt, Artificial Sequence
  derived and/or modified protein sequence (opt11) from LASV(Lassa virus/H.sapiens-wt/NGA/2016/ISTH_0779;Clade II)__AVO03655__GPCstabilized
augggacaaaucaucaccuucuuccaagaaguaccccauguagucgaagaaguaaugaacgucguccugauagcccucucccuccucgccauccucaaaggcaucuacaacauagcaaccugcggccucuucggacuuaucuccuuccuccuacucugcggccgcucaugcagcaccaccuacaaaggagucuaugaacuccaaacccucgaauuagacauggccaaccucaacaugaccaugccccuuucaugcaccaaaaacaacucccaccacuacaucaugguaggcaacgaaaccggacuagaacucacgcucacaaacaccuccaucaucaaccacaaauucugcaaccuauccgacgcccacaagaaaaaccucuacgaccacacccucaugucaauaaucuccacauuccaccucuccauacccaacuucaaucaauacgaggccauguccugcgacuucaacggagguaaaaucagcguccaauacaaccuaucccacgguuacgccgucgacgccgccaaccacugcggcaccaucgccaacggcguccuccaaaccuucaugcgcauggccuggggaggcucauacauagccuuagacagcggaugcggcaauugggacugcauaaugacaagcuaccaauaccuugucauccaaaacaccacaugggaagaucacugucaauucagccgcccuucgcccaucggcuaccucggccuacuaucucaacgcaccagagacaucuacauuucacgccgacgccgcggaaccuucacauggacccuaucagacuccgaaggaaacgacgcccccggcggcuacugccucacccgcuggaugcuaauagaggccgagcucaaaugcuucggcaacacagccaucgccaaaugcaacgaaaaacacgacgaggaguucugcgacaugcucagacuauucgacuucaaccgccaagccaucaaacgccucaagacacccgcccaaaugucaauccagcucaucaacaaggccgucaacgcccucaucaacgaccagcucauaaugaaaaaccaccuccgagacaucaugugcauccccuacugcaacuacuccaaauacugguaccucaacaacaccgucaccggcaaauccagccuacccaaaugcuggcucguguccaacggaucauaccuaaaugaaacccacuucuccgacgacaucgaacaacaagccgacaacaugaucacagaaaugcuucaaaaagaauacaucgaccgacaaggcaaaacaccccucggacucgucgaccuuuucgucuucuccaccagcuucuaccuuaucucaaucuuccuacaccucguccgcaucccaacacaccgccacauaaccggcaaaccaugccccaaaccacaccgccucaaccacauggguaucuguagcugcggacuguacaaacagcccggcguacccgucaaauggaagcgguag

SEQ ID NO: 5936 - RNA, 1473 nt, Artificial Sequence
  derived and/or modified protein sequence (opt11) from LASV(Lassa virus/H.sapiens-wt/NGA/2016/ISTH_0917;Clade II)__AVO03535__GPCstabilized
augggacaaaucguaaccuucuuccaagaagucccacacgucaucgaagaaauaaugaacaucguacuaaucacacuaucccuccucgccauccucaaaggcgucuacaaccuagcaaccugcgggcucaucggacucauaaccuuccucuuccucugcggccgauccugcuccaugacauacaagggaaacuaccaacucgaaacccucgaacuaaacauggaaaugcucaacaugacuaugccacucuccugcaccaaaaacaacucccaccacuacauacgaguuggcaacgaaaccggccucgaacucacccucaccaacaccuccaucauccaacauaaauucugcaaccucuccgacgcccacaaacgaaaccucuacgaccacucccucaugucaaucguauccacauuccaccucucaauccccaacuucaaccaauaugaagccauguccugcgacuucaacggcggaaaaaucuccauccaauacaaccuaucgcacacuuacgccggcgacgccgcaaaacacugcggaacacucgcaaacggcauccuucaaacauucaugcgcauggccuggggaggcuccuacaucgcccucgacucaggcuguggcgguugggacugcaucaugaccaacuaccaguaccuuaucauccaaaacgucaccugggaagaccauugccaauucucacgccccuccccaaucggcuaccucggccuacucucccaacgcacacgagaagucuacaucucacgacggcgccgaggcaccuucaccuggacccuuagcgacuccgaaggcaacgaagcaccaggaggcuacugccuaacccgcuggaugcuaaucgaagccgaacucaaauguuucggcaacacggccguagcaaaaugcaacgagaaacacgacgaagaguucugugacaugcuacgccucuucgacuuuaacaaacaagccauccgccgacucaaagccccaacccaaauguccauacagcucaucaacaaagccgucaacgcacucaucaacgaccaacucaucaugaagaaccaccuccgcgacaucauguguauccccuacugcaacuacucuaaguacugguaccuaaaccacacaaucaccggccgcaccucacuaccacgaugcugguuagucuccaacggcucguaccucaacgaaacccacuucagcgacgacauugaacaacaagccgacaacaugaucacagaaaugcuccaaaaagaauauaucgaccgacagggaaaaacgccccuaggccucgucgaccuauucgucuucagcacuuccuucuaccuaaucuccaucuuccuccaccuaguaaaaaucccuacccaccgccacaucgucggcaaaucguguccaaaaccccaccgacucaaucacauggguaucugcagcugcggccucuacaaacgccccggggucuccguacgauggaaacgcuga

SEQ ID NO: 5937 - RNA, 1473 nt, Artificial Sequence
  derived and/or modified protein sequence (opt11) from LASV(Lassa virus/H.sapiens-wt/NGA/2016/ISTH_1006;Clade II)__AVO03643__GPCstabilized
augggccaaaucauaacauucuuccaagaagucccccacguaaucgaagaagucaugaacauaguccucauagcccuuucacuacucgccauccucaagggaaucuacaacgucgcaaccugcggacucuucggacucgucgccuuccuccuccucugcgggcgcuccugcuccaccaccuacaaaggcgucuacgaacuccaaacacuugaacuagacauggcuucccucaacaugacaaugccccucuccugcaccaaaaacaacagccaccacuauaucauggucggcaacgaaaccggacucgaacucacccucacaaacacauccaucauuaaccacaaauucugcaaccuaucagacgcacacaagaaaaaccuguacgaucacgcccucauguccaucauaucuacauuucaccuuuccauccccaacuucaaucaauacgaagccaugggcugcgauuucaacggcggcaaaaucuccguacaauacaaccuaucacacuccuacgccgucgacgccgccaaccacugcggcaccaucgccaacggcguccuacaaaccuucaugcgcauggccuggggcggcagcuacauagcccucgauuccggaugcggauccugggacuguaucaugaccuccuaccaauaccucaucauccaaaacacaacaugggaagaccacugccaauucucccgcccaucccccauaggcuaccuuggccuccugucccaacgaacacgcgacauauacaucucccgcagacgccgcgggacuuucaccuggacacuuucagacuccgaaggcaacgaaaccccaggcgguuacugccucacaagguggaugcucauagaagccgaacucaaauguuucggaaacacagccgucgcuaaaugcaacgagaaacacgacgaagaguucugcgacaugcuacgccucuucgacuucaacaaacaagccaucagacgccucaaaaccccagcucagaugucaauacaacucaucaacaaagccguaaacgcccucauaaacgaccaacucaucaugaaaaaccaccuaagagacaucaugugcaucccauacugcaacuacucaaaauacugguaccucaaccacacagucaccggucgaaccagccuuccccgcugcuggcucgucuccaacggcuccuaccucaacgaaacgcacuucuccgacgacauagaacaacaagccgacaacaugaucaccgaacuccuccaaaaagaauacauggaccgccagggcaaaacgccccuuggccucguagaccuauucgucuucuccacuuccuucuaccucaucucgaucuuccuccaccucauaaaaauccccacccaccgacacgucaucggaaaaccuugccccaaaccacaccgacugaaccacaugggcaucugcuccuguggccucuacaaacaccccggaguccccgucaaauggaaacguuaa

SEQ ID NO: 5938 - RNA, 1473 nt, Artificial Sequence
  derived and/or modified protein sequence (opt11) from LASV(Lassa virus/H.sapiens-wt/NGA/2016/ISTH_1026;Clade II)__AVO03589__GPCstabilized
augggacaaaucauaaccuucuuccaagaagugccccacgucauagaagaagucaugaacaucguccuaauagcccucucacuccucgccauccucaaaggcaucuauaacgucgcgacaugcggccuuuucggccucgucagcuuccuccuacucugcggccgcucaugcuccaccacuuacaaaggcgucuacgagcuacaaacacucgaacucgacauggccucccuaaacaugaccaugccccucuccugcaccaaaaacaacucccaccacuacaucaugguuggcaacgaaacgggacucgaacucacacuaaccaacaccuccaucaucaaccacaaauucugcaaccucucagacgcccacaagaaaaaccuauacgaccacgcacuuaugagcaucaucagcaccuuccaccucuccauccccaacuucaaucaauacgaagccauguccugcgacuucaaugguggcaaaaucagcguacaauacaaccuaucccacgccuacgcaaucgacgcugccucccauugcggcaccauagccaacggaguacuccaaaccuucaugaggauggccuggggcggaucauacaucgcccucgacuccggcugcggcuccugggacugcauaaugacuuccuaccaauaccuaaucauucaaaacaccacuugggaagaccacugccaguucucccgcccaagccccaucggauaccuuggccuccucucccaacgcacccgagacaucuacauaucccgccgccgccgcggaaccuucaccuggacucugucggacuccgaaggcaacgaaaccccuggcggcuacugccucacccgauggaugcuuaucgaagccgaacuaaaaugcuucggcaacaccgccgucgccaaaugcaacgaaaaacacgacgaagaguucugcgacaugcugcgacuguucgacuucaacaaacaggccauacgccgacucaaaacccccgcccaaaugucaauccaacucaucaacaaagccgucaacgcccucaucaacgaccaacuaaucaugaaaaaccaucuccgcgacaucaugugcauccccuacugcaacuacuccaaauacugguaccucaaccacacaguaaccggcaaaaccucacucccccguugcuggcucgucuccaauggcuccuaccucaacgaaacacacuucagcgaugacaucgaacaacaagcagacaacaugauaacagaacuccuccaaaaagaauaccuagaccgacaaggcaaaacgccccucggacucgucgaccucuucguuuucucuaccuccuucuaccuaaucucaauuuuucuccaccucgucaaaaucccaacccaccgccacguaaucggccgccccuguccaaaaccccaccgccucaaccacaugggcaucuguuccugcggccucuacaaacaccccggagucccggucaaguggaaacgcuaa

SEQ ID NO: 5939 - RNA, 1473 nt, Artificial Sequence
  derived and/or modified protein sequence (opt11) from LASV(Lassa virus/H.sapiens-wt/NGA/2016/ISTH_1070;Clade II)__AVO03651__GPCstabilized
augggccaaaucaucaccuucuuccaagaagucccccacgucauagaagaagucaugaauaucguccuaauagcccucucccuccucgcgauccuuaaaggcauauacaacgucgcaaccugcggacuauucgggcucguguccuuccuccuacucugcggccgcuccuguuccaccacuuacaaaggcgucuacgaauuacaaacccuugaacucgacauggccucacucaacaugaccaugccccucuccugcaccaaaaacaacucacaccacuacauuauggucggcaacgagaccggacucgaacucacucucaccaacacaucaaucaucaaccacaaauucugcaaccuauccgacgcccacaaaaagaaccuauacgaccacgcccucaugucaauaaucuccacguuccaccuauccauccccaacuucaaccaauacgaagcuauguccugcgacuuuaacggcggcaaaaucucaguacaauacaaccucucccacaccuucgccguagacgcagcuaaucacugcggcaccaucgccaacggcguacuacaaaccuucaugcgcauggcauggggaggcucauacaucgcccucgacuccggcugcggcuccugggacugcaucaugacauccuaccaauaccucaucauccaaaacaccacaugggaagaccacugccaauucucucgccccagccccauaggcuaccuuggccuacucucucaacgcacucgcgacaucuacaucucccgccgacgccgcggcacauucaccuggacacucuccgacuccgaaggaaacgagaccccuggcggcuacugccucacccgcuggaugcuaaucgaagcggaacucaagugcuucggcaacaccgccgucgccaaguguaaugagaaacacgacgaagaguucugcgacaugcugcgccucuucgacuucaacaagcaagccauccgacgccucaaaacccccgcacaaaugucaauacaacuaauaaacaaagccguaaacgcccugaucaacgaccaacucauaaugaaaaaucaccuccgugacauaaugugcaucccguacugcaacuacuccaaauacugguaccucaaccacaccguaaccgguaaaaccucccuccccagaugcugguuagucuccaacggcucuuaccuaaacgaaacccacuucuccgacgacaucgaacaacaagcagacaacaugaucaccgaacuccuccaaaaggaauacauggaccgccaaggcaaaacaccccuaggacucguagaccucuucgucuucucuaccuccuucuaccucaucuccaucuuccuccacuuaguaaaaauacccacgcaccggcacaucaucggcaagcccugccccaaaccgcaccgucucaaccacaugggaaucugcagcugcggccuauacaaacacccaggcguccccgucaaauggaaacguuaa

SEQ ID NO: 5940 - RNA, 1473 nt, Artificial Sequence
  derived and/or modified protein sequence (opt11) from LASV(Lassa virus/H.sapiens-wt/NGA/2016/ISTH_1123;Clade II)__AVO03645__GPCstabilized
augggccaaaucaucacauucuuccaagaaguaccccacgucaucgaagaagugaugaacaucguccucaucgcccucucccuacucgccauccuaaaaggcaucuacaacguggccacaugcggccuauucggccucgucagcuuccuucuacucugcggcagguccugcucuaccacauacaagggcgucuacgaacuccaaacacucgaacucgacaugggcucacucaacaugaccaugccccucucaugcaccaaaaacaacucccaccacuacauuauggucggcaacgaaaccggccucgagcucacccucaccaauaccucuaucauaaaccauaaauucugcaaccucuccgacgcccacaagaaaaaccuuuaugaccacgcacucauguccaucauuucaaccuuccaccuuuccauccccaauuucaaccaguacgaagccauguccugcgacuucaacggaggcaaaauaucaguccaauacaaccucucccacgccuacgccgucgacgccgccaaccacugcggcacuauagccaacggaguccuccaaaccuuuaugcgcauggccuggggaggcucguacaucgcccuagacuccggcugcggauccugggacugcaucaugaccuccuaccaauaccucaucauccaaaauacaucaugggaagaccacugccaauucagccgcccaagccccaucggcuaccucggccuacucucucagcggacccgcgacaucuacaucucccgccgcagacgcggcacauucaccuggacccucuccgacuccgagggaaacgaaacccccggaggcuacugccuuacccgcuggaugcuuauugaagccgaacuuaaaugcuucgguaacacugccguagcaaaaugcaacgaaaaacacgacgaagaguucugcgacaugcuccggcuauucgacuucaacaaacaagcaauacgccgacucaaaacucccgcacaaauguccauccaacucaucaacaaagccgucaacgcacucaucaacgaccaacucauaaugaaaaaccaccuccgagacaucaugugcaucccauacugcaacuacuccaaauacugguaccuaaaccacaccgucaccggaaaaaccucacucccccgcugcuggcuagucucaaacggcucauaccucaaugaaacccacuucuccgaugacauagaacaacaagccgacaacaugauuaccgaacuccuacaaaaagaauacaucgaccgucagggcaaaacaccccuuggccuagucgaccucuucgucuuuucaacuuccuucuaccucaucucuauuuuccuccaccucguaaaaauccccacccaccgccacguaauaggcaagcccugucccaaaccccaccgccucaaccacaugggcaucugcagcugcggccuauacaaacacccuggcguccccguaaaauggaagcgcuag

SEQ ID NO: 5941 - RNA, 1473 nt, Artificial Sequence
  derived and/or modified protein sequence (opt11) from LASV(Lassa virus/H.sapiens-wt/NGA/2016/ISTH_1150;Clade II)__AVO03627__GPCstabilized
augggccaagucauuaccuucuuccaagaaaucccccacgucaucgaagaagucaugaauauaguacuaaucacccucucccugcucgccauccucaaaggcaucuacaacgucgccaccuguggacucuucggccucauauccuuccuccuacuaugcggccgcuccugcuccaccaccuacaaaggcgucuacgaacuccaaacacuagaacuagauauggccaaucucaacaugaccaugccccucuccugcaccaaaaauuccucacaccacuacaucaugguaggcaacgaaaccggacucgaacucacccuuaccaacaccucaaucaucaaccacaaauucugcaaccucuccgacgcacacaagaaaaaccucuacgaccacgcccucauguccaucaucuccaccuuccaccucuccauacccaacuucaaccaguacgaagccauguccugcgacuucaacggcggaaaaaucucuguccaauacaaccucucccacgcauacgcagucgacgccgccaaucacugcggcaccauagcaaacggaguacugcagacauucaugcgaauggccuggggcgguagcuacauagcucuggacucaggcugcggcaacugggacugcauaaugaccagcuaccaauaccucaucauccaaaacaccaccugggaagaccacugccaguucucuagaccaucucccaucggcuaccucggccuucuaucccaacguacccgcgacaucuacauaucccgacgacgccgcggcacauucaccuggacacucuccgacucagaaggcaacgaagcucccgggggcuacugccucacacgcuggaugcucaucgaagccgagcucaaaugcuucggcaacaccgccauagccaaauguaacgaaaaacacgacgaagaguucugcgacaugcuccgccucuucgacuucaacaaacaagcaauccgacgccuaaaaacacccgcccaaaaauccauccaacucauaaacaaagcaguaaaugcccuaauaaacgaccaacugauuaugaagaaccaccuccgagacaucaugugcauccccuacugcaacuacuccaaauacugguaccucaaccacacagucaccggcaaaacaucccuccccaaaugcuggcugauaucuaacggcucguacuuaaacgaaacccacuucuccgacgacauugaacaacaagccgacaacaugaucaccgaacuccuacaaaaggaauacauggaccgacaaggcaagacuccacucggccuagucgaccuauucguauucuccacgagcuucuaucucaucuccaucuuucuacaccuugucaaaauccccacacaucgccacaucguaggccgcccaugccccaaaccccaccgccucaaccacaugggcaucugcucaugcgggcuauacaagcaucccggcguccccgucaaauggaaacgcuaa

SEQ ID NO: 5942 - RNA, 1473 nt, Artificial Sequence
  derived and/or modified protein sequence (opt11) from LASV(Lassa virus/H.sapiens-wt/NGA/2016/ISTH_1174;Clade II)__AVO03555__GPCstabilized
augggacaaaucaucaccuucuuccaagaaguaccccacguaauugaagaagugaugaacaucguacuaaucgcacucucccuccucgccauccuaaaaggaaucuacaacguagccacaugcggcuucuucggacucgucuccuuccuccuucuaugcggccgauccugcuccaccaucuacaagggcgucuacgaacuccaaacccucgaacucgacauggcuucccuaaacaugaccaugccccucaguuguacgaaaaacaacucccaccacuacauaaugguaggcaacgaaacaggccucgaacucacccuaaccaacaccuccaucauaaaccacaaguucugcaaccucucagacgcacacaaaaagaaccucuacgaccacgcccugaugucuauaaucucaaccuuccaccuaucuaucccucacuucaaccaguacgaagccaugagcugcgacuucaacggcggcaaaaucucaguucaauacaaccucucacacaccuacgccguagacgccgccaaccacugcggaacaauagccaauggcguccuccaaacguucaugcggauggccuggggcggaucauacaucgcccucgacuccggcugcggcagcugggacugcaucaugaccucauaccaauaccucaucauacaaaacaccaccugggaagaccacugccaauucucucgcccaucucccaucggcuaccuaggccuacucucccagcgcaccagggacaucuacaucucccgccgccgacgcggaacauuuaccuggacccucucugacucagaaggcaacgaaacacccggaggcuacugccucacccgcuggaugcucaucgaagccgaacucaagugcuuuggcaacaccgccgucgccaagugcaacgaaaaacacgacgaagaguucugcgacaugcuacgccucuucgauuucaacaaacaagccauccgcaagcuaaaaacacccgcccagauguccauucagcucaucaacaaagccgucaacgcccuaaucaacgaccaacucaucaugaaaaaccaccuccgcgacaucaugugcauccccuacugcaacuacagcaaauacugguaccuaaaccacaccgucaccggcaaaacauccuuaccacgcugcuggcuggucucaaacggcuccuaccucaacgaaacacacuucuccgacgacaucgaacaacaagccgacaauaugauaacagaacuacuccaaaaagaauacauggaccgccaaggaaaaacaccccucggccuagucgaccucuucgucuucucuaccuccuucuaccucauaucaaucuuccuacaccucguaaaaaucccuacccaucgccacguaaucggcaaaccaugcccuaaaccacaccgccuaaaccacaugggcaucugcuccugcggccucuacaaacaccccggcgugcccgucaaguggaaacgauaa

SEQ ID NO: 5943 - RNA, 1473 nt, Artificial Sequence
  derived and/or modified protein sequence (opt11) from LASV(Lassa virus/H.sapiens-wt/NGA/2016/ISTH_1207;Clade II)__AVO03599__GPCstabilized
augggccagaucaucaccuucuuccaagaagucccccacguaauagaggaaguuaugaacaucguccuaaucgccuuaucccuccucgcuauccucaaaggcauauacaacguagcaaccugcggccucuucggccucgucagcuuccuccuccucugcggccgcuccugcuccacuaccuacaagggcguauacgaacuccaaacacuagaacucgacaugacuucccucaacaugaccaugccccucucaugcaccaaaaacaacucccaccacuacaucaugguaggaaacgaaaccggccucgaacucacacugacaaacacauccaucaucaaccacaaauucugcaaccucuccgacgcccacaagaaaaaccucuacgaccacgcccucauguccauaauaagcacuuuccaccuaagcauccccaacuucaaccaauacgaagcaauguccugcgacuuuaacggcggcaaaaucagcguccaauacaaccucucacacacguacgccgucgacgccgccaaucacugcggaaccaucgccaacggcguccuccaaacauucaugagaauggcaugggguggcuccuacauagcacucgacuccggcugcggauccugggacugcaucaugaccuccuaccaauaccuaaucauccaaaacacgaccugggaagaccauugccaguucucacgccccuccccuauaggcuaccugggacuccuaucccaaagaacccgcgacauuuacaucucccgccgccgccgcggcaccuucaccuggacccucucagacucagaaggcaacgacacacccggcggcuacugccucacccguuggaugcucaucgaagccgaacuaaaaugcuucggaaacaccgccgucgcaaaaugcaacgagaaacacgacgaagaguucugcgacaugcuccgccucuucgacuucaauaaacaagccaucagaagacuuaaaacccccgcgcaaaugagcauccaacugaucaacaaagccgucaacgcccucaucaacgaccaacugauaaugaaaaaccaccuccgagacauaaugugcaucccauacuguaacuacucaaaauacugguaccuaaaccacacagugacgggaaaaaccucccugccccgcugcuggcucgucuccaacggcucuuaccucaacgaaacccacuucagcgacgacauagaacaacaagcagacaacaugaucacagaacuccuccagaaagaguacauagacagacaaggcaagaccccacuaggccucgucgaucucuucgucuucuccaccagcuucuaucuaaucuccauauuucuacaccucgucaaaauccccacccaccggcacguaaucggcaaaccuugcccuaaaccccaccgccucaaccacaugggaaucugcucaugcggccucuauaaacaccccggcgucccuguaaaauggaaacgauaa

SEQ ID NO: 5944 - RNA, 1473 nt, Artificial Sequence
  derived and/or modified protein sequence (opt11) from LASV(Lassa virus/H.sapiens-wt/NGA/2016/ISTH_1306;Clade II)__AVO03623__GPCstabilized
augggacaaaucaucaccuucuuccaggaagucccccacgucaucgaagaagucaugaacaucguacuaauagcccuaucccuacucgcuauccucaaaggcaucuacaacguagccacaugcggacuuuucggccuugucucuuuucuccuccuuugugggcgcuccugcuccaccacuuacaaaggcguauacgaacuccaaacccucgaacucgacauggccucccucaacaugaccaugccccucuccugcaccaaaaacaacucacaccacuacaucaugguaggcaacgaaacuggccuugaacuaacauuaaccaacaccagcaucaucaaucacaaauucugcaaccucuccgacgcccacaagaaaaaccucuacgaccacgcccuaauguccauaauauccacuuuccaccucuccaucccuaacuucaaccaauaugaagccauguccugcgacuucaacgggggcaaaaucucaguacaauacaaccugagccacaccuacgccgucgacgcagccaaccacugcggcaccguagcaaacggcguccuccaaacauucaugcguauggcaugggguggaucuuacauagcccuagacuccggcugcgguucuugggacugcaucaugaccuccuaccaauaccucaucauccaaaacacaacaugggaagaccacugccaguucucccgccccagccccaucggcuaccuaggacuacuaucgcaacgcacacgcgacaucuacauaagccgccgccgccgcggaacauucaccuggacccucuccgacuccgaaggaaacgaaacccccggcggauacugucucacucgcuggaugcucaucgaagcagaacucaaaugcuucggcaacaccgccgucgccaaaugcaaugaaaaacacgacgaagaguucugcgacaugcuccgccuuuucgacuucaacaaacaagcaaucagacgccucaaaaccccugcccaaaugucaauccagcuaaucaacaaagccgucaacgcccucaucaacgaccaacucauaaugaaaaaccaccuccgagacaucaugugcauacccuauugcaacuacucaaaauacugguaccucaaccacacagucaccggacgcacgucgcuccccagaugcuggcucgucucaaacgguagcuaccucaacgaaacccacuucucagacgacaucgaacagcaagcagacaacaugauaaccgaacuucuacaaaaagaauacaucgaccgccaaggcaaaacaccccucggcuuagucgaucucuucguauucuccaccuccuucuaccucauauccauauuccuacaccuugucaaaauuccaacccaccgccacgucaucggaaaacccugcccuaaaccccaccgccucaaccacaugggaauauguuccugcggccucuacaaacaccccggaguucccgucaaauggaaacgcuaa

SEQ ID NO: 5945 - RNA, 1473 nt, Artificial Sequence
  derived and/or modified protein sequence (opt11) from LASV(Lassa virus/H.sapiens-wt/NGA/2016/ISTH_1311;Clade II)__AVO03575__GPCstabilized
augggccaaauagucaccuucuuccaagaagucccccacgucaucgaggaagucaugaacaucguccucaucgcccuauccuuacucgccauacuuaaaggcauauacaacgucgcaaccugcggccuuuucggccuaaucucauuccuacuccucugcggacgcuccugcucaacaaccuacaaaggcgucuacgaacuccaaacccuggagcucgacauggccaaccucaauaugaccaugccccuauccugcaccaaaaacaacucccaccacuacauaaugguaggaaacgaaaccggccucgaacuaacccucaccaacaccuccaucaucaaccacaaauucugcaaccucucugacgcccacaagaaaaaccucuacgaccacgccuuaauguccaucaucuccaccuuccaccucucuauaccaaacuucaaccaauaugaagcaauguccugugacuucaacggaggcaaaaucuccguccaauacaaccuuucacacgccuacgccggcgacgcagcaucacacugcggcaccaucgccaacggcguucugcaaaccuucaugcguauggccuggggcggauccuacauagcacucgacuccggcugcggaaacugggacugcaucaugaccuccuaccaauaccuaaucauccaaaacaccacaugggaagaccacugccaauucucccgccccucacccauaggcuaccucggccuccucucucaaagaacccgcgacaucuacaucucacgccgccgacgcggaacuuucacuuggaccuuaucagacucggagggcaacgacgcacccggcggauacugccucacaagauggaugcucauugaagcagagcucaaaugcuucggcaacacagcgaucgccaaauguaacgagaaacacgacgaagaguucugcgacaugcucagacuauucgacuucaacaaacaggccauaaaacgccucaaaacacccgcccaaaugucuauccaacucaucaacaaagccguaaacgcucuaauaaacgaccaacucaucaugaagaaccaccuccgugacauaaugugcaucccauacugcaacuacuccaaauacugguaccucaaucacaccaccacaggcaaaacgucccuacccaaaugcuggcucaucuccaacgguuccuaccuaaacgaaacccauuucucagaugacaucgaacaacaagcagacaacaugaucacagaacuucuacaaaaagaauaccucgacagacaaggcaaaacaccccuuggacucgucgaccucuucgucuucuccacaucguucuaccuaauaagcaucuuccuccaccucaucaaaauacccacccaccgccacaucgucggccguccaugccccaaaccccaucgacuuaaccacaugggcaucugcuccugcggccuauacaaacacccaggcgucccagucaaauggaaacgauga

SEQ ID NO: 5946 - RNA, 1473 nt, Artificial Sequence
  derived and/or modified protein sequence (opt11) from LASV(Lassa virus/H.sapiens-wt/NGA/2016/ISTH_1423;Clade II)__AVO03577__GPCstabilized
augggccaaaucgucaccuuuuuccaagaaguuccccacgucaucgaggaagucaugaacauaguccucaucgcccucucccuccuagcuauccuaaaaggcauuuacaacgucgcaaccugcggucucuucggacucgucaguuuccuccuccuaugcggccgauccugcuccaccaccuacaaaggcgucuaugaacuccaaacccuagagcucgacauggcgaaccucaacaugaccaugccccugucaugcaccaaaaacaacucacaccacuacaucauggucggcaacgaaacaggccucgaacucacccuaaccaacaccucaaucaucaaccacaaauucugcaaccuguccgacgcccacaagaaaaaccuauacgaccacgcucucauguccaucaucucaaccuuccaccucuccauacccaacuucaaccaguacgaggcuaugagcugugacuucaacggcggcaaaaucuccguccaauacaaccuaucccauagcuacgccgucgacgcagcuaaccacugcggcaccguugcgaacggcguacuccaaaccuucaugcgcauggcauggggcgggucauacaucgcacucgacucaggaugcggcuccugggacugcaucaugaccuccuaccaauaccucaucauccaaaacauaaccugggaagaccacugccaauucucccgacccuccccaauaggcuaccuaggacuccucucccaacgcacucgagacaucuacauaagcagaagacgacgcggcaccuucacauggacccucucugacagcgaaggaaaagaaacccccggaggcuacugccuaaccagauggaugcucaucgaagcagaacucaaaugcuuuggcaacacugccgucgcaaaaugcaacgaaaaacacgacgaagaguucugcgacaugcuccgccuguucgacuucaacaaacaagccauccgacgacuaaaaacaccagcccaaauguccauccaacuaauaaacaaagccguaaacgccuuaaucaacgaccaacucauaaugaaaaaccaucugcgcgacaucaugugcauccccuacugcaacuacuccaaauacugguaccuuaaccacacaguaaccggcaaaaccucacuccccagaugcuggcucgucuccaacggcuccuaccucaacgaaacccacuucuccgacgacaucgaacaacaggcagacaauaugauaaccgaacuacuccaaaaagaauacaucgaccgccaaggaaagacaccccucggucucgucgaccuauucgucuucuccaccagcuucuaccuaaucucaaucuuccuccaccuagucaaaauccccacccaccgucacauccuaggaaaaccaugccccaaaccccaccgccuaaaccacaugggaauaugcucaugcggccuauacaaacaccccggcguccccguaaaauggaaacgcuaa

SEQ ID NO: 5947 - RNA, 1473 nt, Artificial Sequence
  derived and/or modified protein sequence (opt11) from LASV(Lassa virus/H.sapiens-wt/NGA/2016/ISTH_1462;Clade II)__AVO03587__GPCstabilized
augggccaaaucaucacauucuuccaagaagucccccacgucaucgaggaagucaugaacauaguccucauagcgcucagucuacucgcuauccucaaagguaucuacaacgucgccacgugcggacucuuuggacucguauccuuccuacuccuaugcggccguuccugcuccaccaccuacaagggcgucuacgagcuccaaacacucgagcuagacauggccucccucaacaugaccaugccccucuccugcaccaaaaacaacucccaccacuacaucaugguaggcaacgaaaccggucucgaacucacccucacaaauacauccauaaucaaccacaaauucugcaaccucuccgacgcccauaagaaaaaccuauacgaccacgcccucaugucuaucaucaguaccuuccaccuuucuauccccaacuuuaaccaauacgaagcaaugucuugcgacuucaacggcggcaaaaucuccguacaauacaaccucucccacaccuacgccgucgacgcggccaaccauugcggaaccaucgccaacggaguucuccaaaccuucaugcgaauggccuggggcggaucauacaucgcccuggacucaggcugcggauccugggacugcaucaugaccuccuaccaauacuuaaucauacaaaacacuaccugggaagaccacugccaauucucccgccccucccccaucggauaccuaggccuccucucccagcgcacccgcgacaucuacauaucacgcagacgacgaggcacauucaccuggacccucuccgacuccgaagguaacgaaacaccuggcggcuacugucucacccgcuggaugcucaucgaagccgaacucaaaugcuucggaaacaccgccgucgccaaaugcaacgaaaaacacgacgaagaguucugcgacaugcuccgccucuucgacuucaacaaacaagcaauacggcgccucaaaaccccagcccagaugucaauccaacucaucaacaaagccguuaacgcccucaucaacgaccaacucaucaugaaaaaccaccuucgcgacaucaugugcauccccuacugcaacuacuccaaauauugguaccucaaccacaccgucaccggccgaacgucccuaccccgcugcuggcuaguuuccaacggcuccuaccucaacgaaacccacuucucugacgacaucgaacaacaagccgacaacaugauuaccgaacuacuacaaaaagaauacaucgagagacaaggaaaaacaccccuaggccuagucgacuuauucgucuucucaaccuccuucuaccuaaucuccaucuuccuucaccucaucaaaauccccacccaucgccacgucaucggcaaacccugccccaaaccccaccgacuaaaccacaugggcaucugcuccugcggucuuuauaagcaccccggagucccagucaaauggaaacguuaa

SEQ ID NO: 5948 - RNA, 1473 nt, Artificial Sequence
  derived and/or modified protein sequence (opt11) from LASV(Lassa virus/H.sapiens-wt/NGA/2016/ISTH_1472;Clade II)__AVO03605__GPCstabilized
augggccaaauuauaacauucuuccaagaaguaccccacgugauagaagaaguaaugaacaucguccucaucgcacucucccuccucgccauacuaaaaggaaucuacaacgucgcuaccugcggccucuucggccucguauccuuccuccuacucugcggccgauccugcucgacaaccuacaaaggcgucuacgaacuccagacccucgaacucgacauggcaucccuaaacaugaccaugccacucuccugcacuaaaaacaacucacaccacuacaucauggucgguaacgaaacaggccucgaacuaacccucaccaacaccuccaucaucaaccacaaauucugcaaccucucggaugcccacaaaaagaaccuauacgaccacgcacucauguccaucaucucaaccuuccaccuauccauccccaacuucaaccaauacgaagccauguccugcgacuucaacggcggcaaaaucuccguacaauacaaccuaucccacaccuacgccguagacgcagcaaaucacugcggcaccaucgccaacggagugcuccaaaccuucaugcgcauggccuggggaggcucauacaucgcacuagacuccggcugcggauccugggacugcaucaugacaucauaucaguaccucaucauccagaacaccaccugggaagaccacugccaauucucccgccccuccccaaucgguuaccuuggccuacuuucacaacgcacccgcgacaucuacaucucccgacgccgccgaggcaccuucaccuggacccucuccgacuccgaaggaaacgaaacacccggaggcuacugccucaccagauggaugcucaucgaagcagaacucaaaugcuucggcaacacggcugucgccaaaugcaacgaaaaacacgacgaagaauucugcgacaugcuaaggcuauucgacuucaacaaacaagcaauccgccgacucaaaacccccgcacaaauguccauccaacuaaucaacaaagcagucaacgcacuaauaaacgaccaacucauaaugaaaaaccaccuucgagacaucaugugcaucccauacugcaacuacucuaaauauugguaccuaaaccacaccgucacuggcagaaccucccuacccagaugcuggcucguauccaacggcuccuaucucaacgaaacacauuucucugacgacaucgaacaacaagccgacaacaugaucacugaacuccuccaaaaagaauacaucgaccgccaaggcaaaaccccccuaggccuagucgaccucuucgucuucuccacauccuucuaccucaucucaaucuuccuccaucucauaaaaauacccacacaccgccacgucaucggcaaacccugcccaaaaccccaccgccucaaccauaugggaauaugcucaugcggucucuacaaacacccuggcguccccgucaaauggaaacgcuaa

SEQ ID NO: 5949 - RNA, 1473 nt, Artificial Sequence
  derived and/or modified protein sequence (opt11) from LASV(Lassa virus/H.sapiens-wt/NGA/2016/ISTH_1474;Clade II)__AVO03613__GPCstabilized
augggccaaaucaucaccuucuuccaagaagucccucacguaauagaagaggucaugaacauagugcucauagcccugucccuccucgccauccucaaaggaaucuacaacguagcuaccugcggccucuucggccuagucuccuuccuccuccucugcggccgcucuugcucuaccacauacaaaggcgucuacgagcuacaaacacucgaacucgacauggccagccuaaacaugaccaugcccuuaucaugcaccaaaaauaacucccaccacuacaucauggucggcaacgaaaccggacucgaacuaacccucaccaacaccuccaucauccaccacaaauuuugcaaccucuccgacgcccacaagaaaaaucuauacgaucacgcacucaugagcauaaucuccaccuuccaucuauccaucccaaacuucaaccaauacgaagcuauguccugcgacuucaacggcggcaaaaucucuguccaauacaaccucucacacacauaugccgucgacgccgccaaccacugcggaacaaucgcaaacggcguccuccaaacuuucaugcgaauggccuggggcggcagcuacaucgcacuagacuccggcugcggaagcugggacugcaucaugacauccuaccaauaccucaucauacaaaacacuacuugggaagaucacugccaauucucacgccccucccccauaggcuaccucggccuacuaucccaacgaacccgcgacauauacaucucacgccgccgccgcggaacuuucacauggacccucuccgacuccgaaggcaacgaaacccccggaggcuacugccuaacccgauggaugcucaucgaagccgaacuuaaaugcuucggcaacaccgccgucgccaaaugcaacgaaaaacacgaugaggaguucugcgacaugcuccgucuuuucgacuucaacaaacaagccauccgccgucucaaaaccccagcacaaaugucaauccaacucauuaacaaagccgucaacgcacucauaaacgaccaacugaucaugaaaaaccaccuacgcgacaucaugugcauccccuauugcaacuacucaaaauacugguaccucaaccacaccgucacaggccgcaccucccucccccgcugcuggcuagucucaaacggaucauaccucaacgaaacacacuucucagacgacauugaacaacaagccgacaacaugaucaccgaacuacuccaaaaagaauacaucgaccgccaaggcaaaaccccacucgggcuagucgaccucuucgucuucuccacaucauucuaccucaucagcaucuuccuccaucucaucaaaauccccacccaccgccacgucaucggaaaacccugccccaaaccacaccgccugaaccauaugggcauaugcagcugcggcuuauacaagcaccccggcgucccagucaaguggaaacguuaa

SEQ ID NO: 5950 - RNA, 1476 nt, Artificial Sequence
  derived and/or modified protein sequence (opt11) from LASV(Lassa virus/H.sapiens-wt/NGA/2016/ISTH_1496;Clade II)__AVO03579__GPCstabilized
augggucagauaaucaccuucuuccaagaaguuccacacguaaucgaagaagucaugaacauuguucucaucgcccucucacuccucgccauccucaaaggagucuacaacguagcaaccugcggccucuucggccuagucuccuuccuccuacucugcggacgcuccuguagcaccaccauauacaaaggugucuacgaacuccaaacccuugaacucgacauggccucccucaacaugaccaugccucucucaugcaccaagaacaacucccaccacuacauaaugguaggcaacgaaaccggacucgaacucacacucaccaacaccucaaucaucaaccacaaauucugcaaucucuccgacgcccacaagaaaaaccucuacgaucacgcccuaauguccaucauuucaacuuuccaccucucgauccccaacuucaaccaauacgaagccauguccugcgacuucaacggaggcaaaaucuccguacaauacaaccucucucacgccuacgccguagacgcugccaaccacugcggcaccauagccaacggcguccuccaaacuuucaugcgcauggccuggggcggaucauacauagcacucgacuccggaugccgcucgugggacugcaucaugacguccuaccaauaccuaaucauucaaaacaccaccugggaagaccacugccaguucucccgcccuucaccuaucggcuaucuuggacuccugucccaacgcacccgcgacaucuacaucucacgccgacgucgcggaacauucacuuggacccucuccgacuccgagggcaacgagacacccgguggcuacugucucacccgauggaugcuaaucgaagcugaacucaaaugcuucggcaacaccgccguugccaagugcaacgaaaagcacgacgaagaguucugcgacaugcuacgccucuucgacuucaacaaacaggccauccgccgacucaaaaccccagcacagauguccauccagcuaaucaacaaggcugucaacgcccucaucaacgaccaacucauaaugaaaaaccaccuccgagacaucaugugcauccccuacugcaacuacuccaaauacugguaccucaaccacacaguaacuggcaaaaccucgcucccccgcugcuggcuagucucaaacggcuccuaccucaacgaaacccacuucuccgacgacaucgaacaacaagccgacaauaugauuaccgaacuacuccaaaaagaauacaucgaucgacagggcaaaaccccacuaggccuagucgaccuauucgucuucucaaccuccuucuaccucauauccaucuuccuccaccucguaaaaaucccaacccaccgccacgucauaggcaaaccuugcccuaaaccccaccgucucaaccacaugggcaucugcucuugcggccucuacaagcacccgggcguccccgucaaauggaaaagguaa

SEQ ID NO: 5951 - RNA, 1473 nt, Artificial Sequence
  derived and/or modified protein sequence (opt11) from LASV(Lassa virus/H.sapiens-wt/NGA/2016/ISTH_1541;Clade II)__AVO03553__GPCstabilized
augggacaaaucgucaccuucuuccaagaaguaccccacgucaucgaagaaaucaugaacauaguacucaucacccucucacuccucgccguauugaaaggcaucuacaacuucgcgaccugcggccucauaggacuaauaaccuuccucuuccucugcggccgaagcugcagcaccaucuacaaaggcaacuaccaacuacaaacccuagaacuaaacauggaaacccucaacaugaccaugccccuauccugcaccaaaaacaacagccaccacuacauccgcguaggaaaugaaacuggccucgaacucacacucacuaacgucaguaucaucaaccaccgcuucugcaaccuauccgacgcccacaaaagaaaccucuacgaccacacacucauguccaucauuucaaccuuccaccuaucaaucccgaacuucaaccaguacgaggccauguccugcgacuucaacggcggcaaaaucucaguccaauacaaccuaucucauggcuacgcagucgacgcagcaaaacacugcggcaccguagcgaacggaguccuccaaaccuucaugcgcauggccuggggcggguccuacauagcccucgacuccggaugcggcaacugggacugcauaaugaccucauaucaauaccucauaauccagaacaccaccugggaggaccacugccaauucucacgccccuccccaaucggcuaccucggccuucucucccaacgcacccgcgacaucuacaucucccgccgacgacgaggcacauucaccuggacacuaucagauuccgaaggccgcgaaaccccuggcggcuacugccugacacgcuggaugcuaaucgaagcggaguuaaaauguuucggaaacacagccgucgccaaaugcaacgagaaacacgacgaagaguucugugacaugcuacgccuuuucgacuucaauaaacaagcaauccaacgccuaaaaacccccgcccaaaugucgauccaacucaucaacaaagccgugaacgcacuuaucaacgaccaacucaucaugaagaaccaccuccgagacaucaugugcauccccuacuguaacuacucaaaauacugguaccucaaccacaccaccaccggcaaaacaagucuccccaagugcuggcucguaaccaacggauccuaccucaacgaaacacacuucagugacgacaucgaacaacaagccgacaacaugauaaccgaaaugcuccaaaaagaauacaucgaccgacaagggaaaacgccccucggccucgucgaccucuucgucuucuccaccuccuucuaccucaucucaaucuuccuacaccucauaaaaauuccuaaccaccgccacauagucggaaaacccugccccaaaccccaccgccuaaaccacaugggaaucugcagcugcggcuucuacaaacaaccaggcguuccgguccgcuggaagcgcuaa

SEQ ID NO: 5952 - RNA, 1473 nt, Artificial Sequence
  derived and/or modified protein sequence (opt11) from LASV(Lassa virus/H.sapiens-wt/NGA/2016/ISTH_1546;Clade II)__AVO03537__GPCstabilized
augggccaaaucguaaccuuuuuccaagaaaucccccacgucgucgaagaaauaaugaacaucguccuaauuacccucucacuccucgccauccucaaaggacucuacaacuucgccacaugcggccuaaucggacucauaaccuuccuauuccucugcggacgcuccugcuccaccaucuacaaaggaucauaccaacuucaagcccucgaacucaacauggaaacacucaacaugaccaugccccuaucuugcaccaaaaacaacagccaccacuacaucagaguaggcaacgagaccgggcucgaacucacccuaaccaacaccucaaucaucaaccacaaauucugcaaccuguccgacgcacacaagaaaaaccucuacgaccauacacuuaugucuaucaucagcaccuuccaccuauccauaccaaacuucaaccaauacgaagccaugucaugcgacuucaacggcggcaaaauauccguccaguacaaccuuucccacuccuacgccggcgacgcagcccgccacugcgguaccgucgccaauggcguccuccaaaccuucaugcgaauggccuggggcggcuccuacauagcccucgacuccggaugcggaaacugggacuguaucaugaccucguaccaauaccucaucauccagaacaccaccugggaagaccacugccaauucuccagacccucaccaaucggcuaccucggccugcuaucccaacgaacacgcgacaucuacauaucccgccgccgccgcggcacuuucaccuggacccucuccgacucagagggaaaagaaacacccggaggcuacugccucacccgauggaugcuaaucgaagccgaacuaaaaugcuucggcaacacagccguagccaaaugcaacgaaaaacacgacgaagaguucugcgacaugcuaagacuuuucgauuucaacaaacaagccauacaacgccucaaaacccccgcucaaaugagcauacaacuuaucaacaaagcaguaaaugcacuuauaaacgaccaacucaucaugaaaaaccaccuccgcgacauaaugugcauacccuacugcaacuacuccaaauacugguaccucaaccauaccacaaccggcaaaacaucccucccccgcugcuggcucgucucaaacggcuccuaccucaacgaaacccacuucucggacgacaucgaacaacaagccgauaacaugaucacagaaaugcuccaaaaagaauacaucgaccgccaaggcaaaacaccccucggccuagucgaucucuucgucuucucaaccagcuucuaccucauaucaaucuuccuccaccucaucaaaauccccacacaccgccacaucgugggcaaauccugccccaaaccccaccgccuuaaccacaugggaaucugcuccugcggacucuacaaacaacccggagucccagucaaauggaaacgcuga

SEQ ID NO: 5953 - RNA, 1473 nt, Artificial Sequence
  derived and/or modified protein sequence (opt11) from LASV(Lassa virus/H.sapiens-wt/NGA/2016/ISTH_1591;Clade II)__AVO03647__GPCstabilized
augggccagaucauaaccuucuuccaagaaguaccccacguaaucgaagaaguuaugaacaucguccuaauagcccuaagccuccucgcaauacuaaaaggcaucuacaacgucgcaaccugcggccuguucggccuaguuucuuuccuccuccucugcggccgcuccugcuccacaaccuacaagggaguguacgaacuucagacccucgaacuagacauggccucccucaacaugaccaugccccuaucgugcaccaaaaacaacucccaccauuacaucauggucggcaacgaaacaggccucgaacucacccucacgaacaccagcauuauccaacacaaauucugcaaccucagcgacgcccacaagaaaaaccucuacgaccacgcacuaauguccaucgucuccaccuuccaccuuagcauaccuaacuucaaccaauacgaggccauguccugcgacuucaaugggggaaaaaucaccguccaguacaaccucagccacuccuaugccaucgacgccgccaaccacuguggcaccguagccaauggaguccuccaaaccuucaugcgcauggcuuggggcggcaguuacauagcucuagacuccggcugcggcuccugggacugcauaaugacauccuaccaauaccucaucauccaaaacaccaccugggaagaccacugccaguucagccgacccucccccauaggauaccuaggccuacuuucccaacgcacccgcgacaucuacaucucccgccgccgccgcggcaccuucaccuggaccuuauccgacucugaaggcaacgaaacacccggaggcuacugccucacccgcuggaugcucaucgaagcagaacucaaaugcuucggcaacacggcagucgcaaagugcaacgagaagcacgacgaagaguucugugacaugcucagacucuuugacuucaacaaacaagccauccggcgccuaaaggcccccgcacaaaugagcauacagcuaaucaauaaagccguuaacgcccucaucaaugaccaacucaucaugaaaaaccaccuccgcgacaucaugugcauacccuacugcaacuacucgaaauacugguaccucaaccacacagucaccggccgcaccucccucccccgauguuggcuagucucuaacggauccuaccuaaacgaaacacacuucuccgacgauaucgaacaacaagccgacaacaugaucaccgaacuacuccaaaaagaauacauggacaggcaaggcaaaacuccccucggccucgucgaccucuucgucuucuccaccuccuucuaccucaucucaauauuccuccaccucgucaagauacccacccaccgccacauaaucgguaaaccaugcccgaaaccucaccgacucaaccauaugggcgucugcucaugcggccucuacaaacauccaggagucccagucaaauggaaacgauaa

SEQ ID NO: 5954 - RNA, 1473 nt, Artificial Sequence
  derived and/or modified protein sequence (opt11) from LASV(Lassa virus/H.sapiens-wt/NGA/2016/ISTH_1604;Clade II)__AVO03541__GPCstabilized
augggccaaaucgucacauuuuuccaagaaguuccccacguuaucgaagaaauaaugaacaucguccucauaacccuaagccuacuggccauacucaaaggagucuacaaccuggcaacuugcggccucaucggacucauaaccuuucucuuccucugcggacgcucuugcuccaugaccuacaaaggcucuuaucaacuugaaacccucgaacuaaacauggaaacccucaacaugaccaugccccucucaugcacuaagaacaccucccaccacuacauccgcguuggcaacgaaacaggccucgagcucacccuuaccaacaccagcaucaucaaccacaaguucugcaaccucuccgacgcccacaagaaaaacuuauaugaccacucccucauguccaucguauccacguuccaccucucaauacccaacuucaaccaauacgaagccauguccugcgacuucaacgguggcaaaaucuccauccaauacaaccucucccacgccuacgccggcgacgccgcaaaacacugcgggacccucgccaacggcguccuccagaccuucaugcgcauggcguggggcggcucauacaucgcccucgacuccggcugcggcaacugggacugcauaaugaccucauaccaauaccuuaucauccagaacaccaccugggaagaccacugccaauucagccgacccucacccaucggcuaccucggccuacucucacaacgaacacgagagaucuacaucucucgacgacgccgcggcaccuucaccuggacccucuccgacuccgaagguaacgaagcacccggcggcuacugccucacccgcuggaugcucauagaagccgaacuaaaauguuucggaaacgcagccgucgcaaaaugcaacgaaaaacacgacgaggaguucugcgauaugcuacgccucuuugacuucaacaaacaagcaauccaacgucucaaaacucccgcacaaauguccauccaacucaucaacaaagcaguuaacgcccuaauaaacgaccaacucaucaugaaaaaucaccuccgcgauaucaugugcaucccauauugcaacuacuccaaauacugguaccucaaccacaccaccacgggacguaccucucucccccgcugcuggcuuguauccaacggcuccuaccuaaaugaaacccacuucagcgacgacaucgaacaacaggccgacaacaugauaaccgaaaugcuccaaaaagaauacauagaccgccaaggcaagacaccccucggucucguagaccuuuucguauucuccaccuccuucuaccuaauuuccauauuccuccaccucgucaaaauacccacccaccgucacauagucggcaaaagcugccccaaaccccaccgccucaaccacaugggaaucugcuccugcggccucuacaaacaacccggcguacccguccgcuggaaacguuaa

SEQ ID NO: 5955 - RNA, 1473 nt, Artificial Sequence
  derived and/or modified protein sequence (opt11) from LASV(Lassa virus/H.sapiens-wt/NGA/2016/ISTH_1609;Clade II)__AVO03661__GPCstabilized
augggccaaaucgucaccuucuuccaagaaauaccccacgucaucgaagaagucaugaacaucguccucaucacccucucccucuuagcaguccuaaaagguaucuacaacuucgcuacaugcggccucauaggacucaucaccuuccucuuccucugcggccgcucgugcucaacaaucuacaaaggauccuaccaacuccaaaagcucgaacucaauauggaaacucucaacaugaccaugccacuaagcugcaccaaaaacuccucccaccacuacauccgugucggcaacgaaacaggccucgaacucacccucaccaacacauccauaaucucccacaaauucugcaaccucuccgacgcacacaagaaaaaccuauacgaccaugcccuaauguccaucaucucgaccuuccaucucuccaucccuaacuucaaccaauacgaagccaugucaugcgacuucaacggcgggaaaaucagcguccaauacaaccucucccacuccuacgccggcgacgccgccagacacugcggcacccucgccaacggcguacugcaaaccuucaugcgcauggccuggggcgguucauacaucgcccucgauuccggcugcggcaacugggauugcauuaugaccucguaccaguuccuaauuauccaaaacaccaccugggaagaccacugccaauucucucgccccucccccaugggcuaucuuggccuacucagucaacgcacccgcgacaucuacauuagccgucgacgccgaggcaccuucaccuggacccucagcgacucagaaggaaaagaaacccccggcggcuacugccucacccgcuggaugcucaucgaagccgagcucaaaugcuucgguaacaccgcaguugccaaaugcaacgaaaaacacgacgaagaguucugcgacaugcuccgacucuucgacuucaacaaacaagccauucaacgccucaaaacccccgcccaaauguccauacaacucaucaacaaagccgucaacgcccuaauaaacgaccaacucaucaugaaaaaucaccuccgcgacaucaugugcauaccauacugcaacuacucccaauauugguaccuaaaccacaccaucaccggcaaaaccucgcucccaaagugcuggcuaguaucuaacggcuccuaccucaacgaaacccacuuuucggacgacauugaacaacaagccgacaacaugaucaccgaaaugcuccaaaaagaauauaucgaccgccaaggcaaaaccccgcuaggccuaguugaccucuucgucuuuuccaccucuuucuaccugaucuccaucuuccuacaccucaucaaaauacccacccaccgccacauagucggcaaauccugucccaaaccccaucgccugaaccgcaugggcaucugcuccugcggccucuacaaacaacccggagucccuguaaaauggaaacgauaa

SEQ ID NO: 5956 - RNA, 1473 nt, Artificial Sequence
  derived and/or modified protein sequence (opt11) from LASV(Lassa virus/H.sapiens-wt/NGA/2016/ISTH_1610;Clade II)__AVO03603__GPCstabilized
augggccaaaucaucaccuucuuccaggaaguaccacaugucaucgaggaagucaugaacaucguccucaucgcccucucccuccucgccauacuaaaaggcaucuacaacgucgcaaccugcggccuguucggacucgucagcuuccucuuccucugcggccgcucuugcagcacaaccuacaaaggcguauaugaacuccaaacccuugaacucgacauggccaguuuaaacaugacuaugccccuauccugcaccaaaaauaacucucaccacuacauaauggucggcaacgaaacaggccucgaacucacccucaccaacaccagcauuauaaaccacaaauucugcaaucuuucugacgcccacaagaaaaaccucuacgaccacgcccucauguccaucauaucaaccuuccaccucuccauccccaacuucaaccaauacgaagcgaugucaugcgacuuuaacggcggcaaaauauccguccaauacaaccucucccacacauacgccaucgacgccgccaaccacugcggcaccauagccaacggcguccuccaaacuuucaugcgcauggccuggggcggguccuauaucgcccucgacuccggcugcggcuccugggacugcaucaugacauccuaccaauaccugaucauccaaaacaccaccugggaagaccacugccaauucucacgccccuccccuauaggcuaccucggucuccuaucacaacguacccgagacaucuacauaucccgccgccgccgcggaaccuucacauggacauugucagacuccgaaggaaacgaaacccccggaggcuacugccucacucguuggaugcucauagaagcagaacugaaaugcuucggaaacacugccguagccaaaugcaacgaaaaacacgacgaggaguucugugacaugcuacgccucuucgacuucaacaaacaagcuauccgccgccucaaagccccugcccaaaugaacauccaacuuaucaacaaagccguaaacgcccucaucaacgaccaguuaauaaugaaaaaccaccuacgcgacaucaugugcauacccuacugcaacuauagcaaauacugguaccucaaccacacagucaccggccgcaccucucugccgcgcugcuggcucgucucaaacggguccuaccucaacgaaacucacuucucagacgacauagaacaacaagccgacaacaugauaacagaacuacuacaaaaagaauacauggaccgccaaggcaaaacaccccucggccucguugaccucuucgucuucucuaccuccuucuaccucaucucuauuuuucuucaccucaucaaaauccccacccaccgccacaucguaggcaaacccugccccaaaccacaccgacuaaaccacaugggcauaugcucuugcggccucuacaagcaccccggcguccccgucaaguggaaacgauaa

SEQ ID NO: 5957 - RNA, 1473 nt, Artificial Sequence
  derived and/or modified protein sequence (opt11) from LASV(Lassa virus/H.sapiens-wt/NGA/2018/ISTH_0959;Clade II)__AVV65099__GPCstabilized
augggccaaaucaucacauucuuccaagaaguaccccacgucaucgaagaagucaugaacaucguucuaauagcccucucccuacuagccauccucaaaggcaucuauaacguagugaccugcggccuauuuggccucgucagcuuccuccuccuaugcggacgauccugcuccaccacauacaaaggagucuacgaacuacaaacacucgaacuugacauggccucccucaacaugaccaugccccucuccugcaccaaaaacaacucccaccauuacaucauggucggcaacgaaaccggccuagaacugacccucacaaauaccuccaucaucaaccacaaauucugcaaccuaagcgacgcccacaagaaaaaucucuacgaucacgcacucaugagcaucauauccaccuuccaccucuccauaccuaacuucaaccaauaugaagccaugucaugcgacuucaacggcggaaaaaucuccguccaauacaaccucagccacgccuacgccaucgacgccgccaaccacugcggaaccauagcgaacggagucuuacaaaccuucaugcgaauggcauggggcggcagcuacaucgcacucgacuccggaugcggcucaugggacugcaucaugaccuccuaccaauaccugauaauccaaaauaccaccugggaagaccauugccaauucagccgccccucccccauaggcuaccugggacuccuuucccaaagaacccgcgacaucuacaucucacgacggcgccgcggcacauucaccuggacccucuccgacagcgaaggcaaugaaaccccaggcggauacugccucacucgcuggaugcuaauagaagccgagcuaaaaugcuucggcaacaccgccgucgcaaaaugcaaugaaaaacacgaugaagaguucugcgacaugcuccgccuauucgacuucaacaaacaagccaucagacggcucaaaacaccagcccaaauguccauccaacucauuaacaaagccgucaacgcccuaaucaaugaccaacucauaaugaaaaaccaccuccgggacaucaugugcauaccauacugcaacuacuccaaauacugguaccucaaucacaccgucaccggcaaaaccucacuaccccgaugcuggcucgucuccaauggcucauaccuaaacgaaacucacuucucagacgacaucgaacaacaagccgacaacaugaucacagaacuccuacaaaaagaauacaucgaccgccaaggcaaaacaccccucggacucguagaucuauucguauucuccaccucauucuaccucaucuccaucuuccuccaccucgucaaaauaccaacccaccgccacgucauaggcaagcccugccccaaaccccaccgccucaaucacaugggcaucugcuccugcggccucuacaaacacccuggggucccaguaaaauggaaacguuag

SEQ ID NO: 5958 - RNA, 1473 nt, Artificial Sequence
  derived and/or modified protein sequence (opt11) from LASV(Lassa virus/H.sapiens-wt/NGA/2018/ISTH_1024;Clade II)__AVV65105__GPCstabilized
augggccaaaucauaaccuucuuccaagaagucccacacguaauagaagaagucaugaauaucguccucauagcacucucccuccucgccauacucaaaggcgucuacaacgucgccacaugcggccuauucggucucguuuccuuccuccuacucugcggacgcuccugcuccaccacauacaaaggcguuuacgaacuccagacacucgaacucgacauggcaaaccucaacaugacuaugccccucucuugcaccaaaaacaacucccaccacuacauacgagucggcaacgaaacgggccucgaacucacccucaccaacaccagcaucaucaaccacaaauucugcaaccucuccgaugcacacaagaacaaccuauacgaccacgcccuaaugucaaucauaagcaccuuccaccuaucaaucccaaacuucaaucaauacgaagccaugucuugcgacuucaacggcggcaaaaucuccguccaauacaaccuaucccacgcauaugcaguugacgccgccaaccacugcggcaccauugcaaacggaguccuccaaacauucaugcgaauggccuggggcggcuccuacaucgcccucgacuccggaugcggcuccugggacugcaucaugaccucuuaccaauaccucaucauccagaacacaaccugggaagaccacugccaauucucacgucccucacccaucggcuaccucggccuccucucccaacggacccgcgacaucuacaucucucgccgacgacgcggcaccuucaccuggacacucucugacuccgaaggcaacgaaacccccgguggauacugccucacccgcuggaugcucaucgaagccgagcucaaaugcuucggcaacaccgccgucgccaagugcaaugaaaaacacgaugaagaguucugcgacaugcuucgccucuucgacuucaacaaacaagccauccgccgacuaaaaacccccgcccagaugucaauacaacucaucaacaaagccguaaacgcacuuaucaacgaucaacucaucaugaaaaaccaccuacgugacauaauguguaucccauacugcaacuacucuaaauacugguaccucaaccacaccgucaccggcaaaaccucccuaccccgaugcuggcuagucuccaacggaaccuaccucaacgaaacucacuucagcgacgacaucgaacaacaggccgacaacaugaucaccgaacuauugcaaaaagaauacauggaccgacagggaaaaaccccucuaggccuagucgacuuauuugucuucuccaccuccuucuaccucaucuccaucuuccuccaccucgucaagauccccacccaccgccacguaaucggcaaacccugcccaaaaccacaccgucucaaucacaugggcauaugcucaugcggccucuacaagcaccccgguguccccgucaaauggaaacgcuaa

SEQ ID NO: 5959 - RNA, 1473 nt, Artificial Sequence
  derived and/or modified protein sequence (opt11) from LASV(Lassa virus/H.sapiens-wt/NGA/2018/ISTH_1079;Clade II)__AVV65107__GPCstabilized
augggccaaauaauaacauucuuucaagaagucccucacgucaucgaagaagucaugaacaucguccucaucgcccucucccuccuagcuauucucaaaggcauauacaacguugcaaccugcggccucuucggccuaguagccuuccuucuacuaugcggccgcucgugcuccacaaccuacaaaggcgucuacgaacuccagacccucgaacuggacauggccucccucaacaugaccaugccccucuccugcaccaaaaacaacucccaccacuacaucaugguaggcaacgaaaccggccuagaacuaacccuaaccaacacauccauaaucaaccacaaauucuguaaccucucugacgcccacaagaaaaaccucuaugaccacgcccucauguccaucaucucuaccuuccaccucuccauacccaacuucaaccaauaugaagccauguccugcgacuucaacggcggcaaaaucucgguccaauacaaccuaucucauaccuacgccguugacgccgccaaccacugcggcacaauagccaacggcguacuccaaacauucaugcgcauggcuugggguggauccuacaucgcacucgacuccggcugcggcuccugggacugcauaaugacauccuaccaauaccucaucauccaaaacaccacuugggaagaccacugccaauucucccgacccucacccauuggauaccucggucuccuaucccaacgcacccgcgacaucuacauaucccgacgccgacgcggaaccuucaccuggacccuuuccgacuccgaaggaaacgagaccccaggcggcuauugccucacccguuggaugcuaaucgaagcagagcucaaaugcuucggcaacaccgcagucgcuaaaugcaacgaaaaacacgacgaagaauuuugugacaugcucagacucuucgacuuuaacaaacaagcaauacgccgacuaaaaacccccgcccaaaugucaauccaacucaucaacaaagccgucaacgcccucaucaacgaucaacucauaaugaaaaaccaccuacgcgacaucaugugcauccccuacugcaauuacucaaaguacugguaccucaaccacacagucaccggucgcacaucccucccacgcuguuggcuagucuccaacggcuccuaccucaacgaaacccacuucagcgacgacaucgaacaacaagccgacaauaugaucacggaacuccugcaaaaagaauacauggaccgccagggcaaaacuccccucggccucgucgaccucuucgucuuuagcaccucuuucuaucuaauuucuaucuuccuccaccucauuaaaauacccacccaccgacacgucaucggcaaacccugccccaagccccaccgacucaaccacaugggaaucugcagcuguggccucuauaaacaccccgguguccccgucaaauggaaacgcuaa

SEQ ID NO: 5960 - RNA, 1473 nt, Artificial Sequence
  derived and/or modified protein sequence (opt11) from LASV(Lassa virus/H.sapiens-wt/NGA/2018/ISTH_1177;Clade II)__AVV65101__GPCstabilized
augggccaaaucaucaccuucuuccaagaagucccccauguuaucgaagaaguaaugaacaucguacuaauagcccuaucccucuuagccauccuaaaaggcauauacaaugucgccacaugcggccucuucggucucgucuccuuccuacuccuaugcggacgcuccuguucuaccacauacaaaggcguuuaugaacuucagacccuagaacucgacauggccucccuaaacaugaccaugccccucuccugcacuaaaaacaacucacaccacuacauccgagucggcaacgaaaccggccucgaacuaacacucacuaauaccuccaucaucgaccacaaauucugcaaccucuccgacgcccacaagaaaaaucuauacgaccacgcccucauguccaucaucucgacauuccaccuauccauccccaacuuuaaccaauacgaagccaugucuugcgacuucaacggaggcaaaauauccguacaauacaaccucucccacacauacgccgucgacgcagccaaccacugcggcacaaucgccaacggcguccugcaaaccuucaugcgcauggccuggggaggcuccuacaucgcccuggacagcggcugcggcucaugggacugcauaaugacaucuuaccaauaccucaucauccaaaacaccaccugggaagaccacugccaauucucaagacccucgcccauaggcuaccucggccuccuaucccaacgcacacgggacaucuacaucagccgccgccggcgcggcaccuucaccuggacacucucagacagcgagggcaacgaaaccccaggcggcuacugccucacccgcuggaugcucauagaagcagaguuaaaaugcuucggcaacaccgcagucgccaaaugcaacgaaaaacacgacgaagaauuuugcgacaugcuccgccucuucgacuucaacaagcaagccauccggcgccucaaaacccccgcccaaaugucaauacaacucauaaauaaagcagucaacgcccucaucaacgaccaacucauaaugaaaaaccaccuucgcgacaucaugugcauccccuacugcaacuacuccaaguacugguaccucaaccacacaauaacuggccgaaccuccuuacccagaugcuggcucguuucaaacggaucauaccuaaacgaaacccacuucucugaugacauagaacaacaggcugacaacaugaucacagaacuccuccaaaaagaguacauggaccgucaagggaagaccccucuaggccucguagaccucuucgucuucuccaccuccuucuaccuaaucuccaucuuccuacaccucgucaaaauccccacccaccgccacgucauaggaaaacccugccccaagccccaccgccucaaccacaugggaaucugcuccugcggacuauacaaacaccccggcguccccguaaaauggaaacgcuaa

SEQ ID NO: 5961 - RNA, 1473 nt, Artificial Sequence
  derived and/or modified protein sequence (opt11) from LASV(Lassa virus/H.sapiens-wt/NGA/2018/ISTH_1375;Clade II)__AVV65115__GPCstabilized
augggccaaauuaucacauucuuccaagaagucccccacguaaucgaagaaguuaugaacaucguacucaucgcacuaucacuacucgccauacucaaaggcaucuauaacauagccacaugcggccuauucggccuugucagcuuccuacuccucugcggccgcuccugcucgaccaccuacaaaggcgucuacgaacuacaaacccucgaacuagacauggcaucucucaacaugaccaugccccucuccugcaccaagaacaacucccaccacuacaucauggucggaaaugaaacaggccucgaacucacccucaccaacaccucaaucaucaaccaccgcuucugcaaccucuccgacgcccacaaaaaaaaccuauacgaccacgcucuaaugagcauaaucuccaccuuccaccuaucaauacccaacuucaaccaguacgaagccaugucaugcgacuucaauggcggaaaaaucuccguccaauacaaccucucacacgccuacgccguagacgccgcaaaccacuguggcaccaucgccaacggcguccuccaaacauucaugcgaauggccuggggcgguucauacaucgcccucgacucaggcugcggaucaugggacugcauaaugaccucauaccaauaccuaaucauacaaaacaccacgugggaagaccacugccaauucucccgcccaucccccaucggcuacuuaggccuccucucacagcggacccgagacaucuacaucucccgacgacgacgaggcaccuucacauggacacucuccgacucugaaggaaacgaaaccccgggcggauacugccucacccgauggaugcucaucgaagcagaacuaaaaugcuucggaaacaccgccgucgccaaaugcaacgaaaaacacgacgaagaauucugcgacaugcuccgccucuucgacuucaacaaacaagcaauccgccgacucaaaaccccagcccagaugucaauccaacuaaucaacaaagccgucaaugcccuaaucaacgaccaacuuauaaugaaaaaccaccucagagacauaaugugcauccccuacugcaacuacucaaaauacugguaccucaaccacacugugaccggcaaaacaucuuuaccccgcugcuggcucgucucaaacggcagcuaccucaacgaaacccacuucuccgacgacaucgaacagcaagccgacaacaugaucaccgaacuccuccaaaaagaauacaucgacagacagggcaagaccccccucggccucgucgaccucuucgucuucuccaccucauucuaccucaucuccaucuuccuccaccucgucaaaauuccuacccaccgucacgucaucggcaaacccugccccaaaccccaccgccuaaaccauauggggaucugcuccugcggccucuacaaacaccccggcguucccguuaaauggaaacgauaa

SEQ ID NO: 5962 - RNA, 1473 nt, Artificial Sequence
  derived and/or modified protein sequence (opt11) from LASV(Lassa virus/H.sapiens-wt/NGA/2018/ISTH_1381;Clade II)__AVV65111__GPCstabilized
augggucaaaucgucaccuucuuccaagaagucccccacgucaucgaagaagucaugaacaucguccucauagcccuuucccuccucgccauucuuaaaggcaucuacaacgucgcuaccugcggccucuucggccucgucuccuuucuacuacucugcggacgcucaugcuccacaaccuauaaaggcgucuacgaacuacaaacccucgaacuagacauggccucccucaacaugaccaugccccuuuccugcaccaaaaacaacucccaccacuacaucauggucggaaacgaaaccggccuagagcuaacacucaccaacacuucaauaaucaaccauaaauucugcaaccucuccgacgcccacaagaaaaaccuuuacgaccacgcccuuauguccaucaucuccacauuccaccuuuccauccccaauuucaaccaauacgaagccaugagcugcgacuuuaacgggggcaaaaucucuguacaauacaaccucagccacaccuacgcugucgacgcggccaaccacugcgguaccaucgcuaacggcguccuccaaaccuucaugcgcauggccuggggcggauccuacauugcccuugacuccggcuguggaucaugggacugcaucaugaccuccuaccaauaccucaucauccaaaacaccaccugggaagaccacugccaauucucacgccccuccccaauaggcuaccucggacuacuaucccaacguacgcgcgacaucuacaucucacgccgccgucgaggaacuuucaccuggacccucuccgacuccgagggaaacgaaacacccgggggcuacugcuuaacccgcuggaugcucaucgaagcagaacucaaaugcuucggcaacaccgccguagcaaaaugcaaugaaaaacacgacgaagaguucugcgacaugcuacgccucuucgacuucaacaaacaagcaauacgacgccuaaaaacccccgcucaaaugucaauccaacucaucaacaaagccguaaacgcccucaucaacgaccaacuaaucaugaaaaaccaccuacgcgacaucaugugcaucccuuacugcaacuacuccaaauacugguaccucaaccacaccguaaccggaaaaacauccuuaccccgcugcuggcucgucuccaacggcucuuaccucaacgaaacucacuucuccgacgacaucgaacaacaagccgacaauaugaucacagaacuacuccaaaaagaauacauggaucgccaaggcaaaaccccgcucggacucgucgaccuauucgucuucucaaccuccuucuaccuaaucuccaucuuccuccaccucguaaaaauccccacacacagacacguuguaggcaaacccugccccaaaccacaccgccuuaaccacaugggcaucugcuccugcggacuauacaaacaccccggcguccccguccgauggaaaagauaa

SEQ ID NO: 5963 - RNA, 1473 nt, Artificial Sequence
  derived and/or modified protein sequence (opt11) from LASV(Lassa virus/H.sapiens-wt/NGA/2018/ISTH_1643;Clade II)__AVV65119__GPCstabilized
augggccaaauuauaaccuucuuccaagaagucccacacgucaucgaggaagucaugaacaucguccucaucgcccucucacuccucgccauacucaaagggaucuauaacguagccacaugcggacucuucggccucgucuccuuccuccuccucugcggccguagcugcuccaccaccuauaagggugucuaugaacuccaaacccucgaacucgacauggccucucuuaacaugaccaugccacuaucaugcaccaaaaacaacucccaccacuacaucauggucggcaacgaaaccggccucgaacucacacucacaaacaccuccaucauaaaccauaaauucugcaaucuaagcgacgcccacaagaaaaaccucuacgaccacgcacuaauguccaucaucucaaccuuccaccucuccauuccaaacuucaaccaauacgaagccauguccugcgacuucaacggcggaaaaauuuccguucaauacaaccucucccacacauacgccguugacgccgccaaccacugcggcaccauagcaaacggcguucugcaaaccuucaugcgcauggccugggguggaucauacaucgcccucgacuccggcugcgggagcugggacugcauaaugaccuccuaccaauaccuaaucauacagaacaccuccugggaagaccacugccaauucucgcggcccuccccaaucggcuaccuaggccuucuaucccaacgcacccgcgacauauacaucucucgacgccgacgcggcaccuucaccuggacucucucggacucagaaggcaacgaaacccccggaggcuacugccucacucgcuggaugcuaaucgaagccgaacuaaaaugcuuuggcaacacagcagucgcuaaaugcaacgagaaacacgacgaagaguuuugcgacaugcuccgacucuucgacuucaacaaacaagcaauacgccgccucaaaacuccggcccaaauguccauccaacucaucaacaaagccgucaacgcacuaaucaacgaccaacucauaaugaaaaaccaccuacgcgacaucaugugcauccccuacugcaacuacuccaaauacugguaccuaaaucacacaguaaccggaaaaaccucacucccacgcugcuggcucguaucuaacggcaccuaccugaacgagacacacuucuccgacgacaucgaacaacaagccgacaacaugaucacagaacuacuccaaaaagaguauaucgaccgacaaggcaaaaccccacucggccucguugacuuauucgucuucucaacauccuucuaccuaaucuccaucuuccuccaccucgucaaaaucccuacccaccgccacgucaucggcaaacccugccccaaaccccaccgccucaaccacaugggaaucugcuccugcggccuauacaagcaccccggagucccuguuaaauggaaacgcuaa

SEQ ID NO: 5964 - RNA, 1473 nt, Artificial Sequence
  derived and/or modified protein sequence (opt11) from LASV(LASV003-NIG-2008;Clade II)__AIT17580__GPCstabilized
augggucaaaucauaacauucuuccaagaaguuccacacgucaucgaagaagucaugaacaucguccucauagcccucucccuccucgcaauucucaaaggcaucuacaauguagccaccuguggccuauucggacucgucagcuuccuacuccuaugcggccgcuccugcuccaccaccuacaaagguguauacgagcuacaaacacucgaacucgacauggccucacucaacaugaccaugccacucuccugcaccaaaaacaacucccaccacuauaucauggucgguaacgaaacuggccucgaacuaacgcucacaaacacauccauaauaaaucacaaauucugcaaucucucagacgcccacaagaaaaaccuuuacgaccacgcccucaugucaaucaucuccaccuuccaccucuccauccccaacuucaaccaguacgaagcaaugucaugcgacuucaacggcggaaaaaucuccguccaauacaaccucucacacaccuacgccgucgacgcagccaaccacugcgguaccauagcaaacggaguacuccaaacauucaugcgcauggccuggggcggcuccuacauugcccuggacucaggcugcggcuccugggauugcaucaugacaagcuaccaauaucucaucauccaaaacaccacaugggaagaucacugucaauucucccgccccucaccaaucggauaccucggucuucucucccaacgaacccgcgacaucuacaucucccgccgucgacgcggcaccuucaccuggacccucuccgacuccgaauccaaugaaacucccggaggcuacugccucacucgcuggaugcuaaucgaagccgaacucaaaugcuuuggcaacaccgccguugcaaaaugcaacgaaaaacacgacgaggaguucugcgacaugcuacgccuuuucgacuuuaacaaacaagccauacgacgccucaaagcccccgcacaaauguccauccaacucaucaacaaagcagucaacgcccucaucaacgaucaacucauaaugaaaaaccaccuucgcgauaucaugugcauucccuacuguaacuacucgaaauacugguaccucaaccacaccgucaccggccgcaccucacucccccgcuguuggcucgucuccaacggcucuuaccucaacgaaacccacuucucagacgacaucgaacaacaagccgacaacaugaucaccgaacuccuccagaaagaauacauggaccgacaaggcaaaacuccacucggacucguagaccucuucgucuucucuaccuccuucuaccucauauccaucuuccuccacuuggucaaaauccccacacaccgccaugucaucggaaaaccaugccccaaaccacaccgccucaaucacaugggaauaugcagcugcggccucuacaaacaccccggcguacccgucaaauggaaacgcuaa

SEQ ID NO: 5965 - RNA, 1473 nt, Artificial Sequence
  derived and/or modified protein sequence (opt11) from LASV(LASV006-NIG-2008;Clade II)__AIT17584__GPCstabilized
auggggcaaaucaucaccuucuuucaagaagucccucaaguaaucgaagaagucaugaacauaguccuaaucgcauuaucccuacuagcgauccuuaaaggcauauacaacguagccaccugcggccucuucggccucguaucauuccuccuacucugcggccgcucaugcuccaccaccuacaaaggagucuacgagcuucaaacccuggaacuagacauggcuucccucaacaugacaaugccgcucuccugcaccaaaaacaacagccaccacuacauuauggucggcaacgaaacaggacuagaacucacccuaaccaaccaguccaucaucaaccacaaauucugcaaccuaucggacgcccacaaaaaaaacuuauacgaccacgcccugauguccauaaucagcaccuuccaccuaagcauccccaacuucaaucaauaugaagcaaugagcugcgacuucaacgguggcaaaaucucaguacaauacaaccuaucacacucauucgccgucgacgccgccaaccacugcggcaccaucgcaaacggcguacuccaaacauucaugcggauggccuggggcggcuccuacaucgcgcuagacuccggaugcggcuccugggacugcauaaugacauccuaccaauaccucauaauacagaacaccaccugggaagaccacugccaguucucccgccccucucccaucggcuaccuuggacuucucagccaacgcacccgcgacaucuacaucucacgccgacgacguggcacauucaccuggacccucucagacucagaagguaacgaaacacccggcggauacugccucaccagguggaugcuuauagaagcagaacuaaaaugcuucgguaacaccgcaguagccaaaugcaacgaaaaacacgacgaagaauucugcgacaugcuccgccuuuucgauuucaacaaacaagccauccgacgucucaaaacccccgcccaaaugucuauccaacuaaucaacaaagcuguaaacgcacucaucaaugaccaacucaucaugaaaaaccaccuacgagacaucaugugcauccccuacugcaacuacagcaaauacugguaccucaaccacaccaaaaccggcaaaacaucacuaccccgcugcuggcucguaagcaacggcuccuaccucaacgaaacccacuucuccgacgacauagaacaacaagcugacaacaugaucaccgagcuccuacaaaaagaauacauggaccgccaaggcaaaaccccccucggccucgucgaccuguucguauucuccaccuccuucuaucucauauccaucuuccugcaccuagucaaaauucccacacacagacacgucaucggcaaaccuugcccaaaaccccaccgccuaaaccacaugggaauaugcucaugcggccucuacaaacacccuggaguccccgucaaauggaaacgcuga

SEQ ID NO: 5966 - RNA, 1473 nt, Artificial Sequence
  derived and/or modified protein sequence (opt11) from LASV(LASV035-NIG-2009;Clade II)__AIT17588__GPCstabilized
augggccaaaucaucaccuucuuccaagaagucccucacgucaucgaagaagucaugaacaucguccucauagcccucucucuacucgccauccucaaaggcaucuacaacgucgcaaccugcggccucuucgggcucguaucguuccuccuccucugcggaagauccugcucaaccaccuacaaaggcgucuacgaacuccaaacccucgaacucgacauggccucacuuaacaugaccaugccccucuccugcaccaaaaacaacucccaccauuacaucauggucgguaacgagaccggccuagaacuaacacucaccaacaccucuauaaucaaccacaaauucugcaaccuaucagacgcccacaagaaaaaccuuuacgaccacgcccuuauguccaucaucuccaccuuccaccuauccauacccaacuucaaccaauacgaagccauguccugcgacuucaauggcggcaaaaucuccguccaauacaaccucucccacgcauacgccgucgacgccgccaaccacuguggcaccaucgccaacgggguacuacaaaccuucaugcgcauggccuggggagguucguacaucgcccucgacucaggaugcggcucaugggacugcaucaugaccuccuaucaauaccucaucauccaaaacaccaccugggaagaccacugccaauuuucaagacccucccccauaggcuaccuaggccugcucucacaacgcacccgagacaucuacaucucccgccgacgacgcggaacauucacauggacucucuccgacucagagggcaacgaaacccccggcggcuacugccuaaccagauggaugcuaaucgaggccgaacucaaaugcuucggcaacaccgccgucgcaaaaugcaacgaaaaacacgacgaagaguucugcgacaugcuccgacucuucgacuucaacaaacaagccauucgacgccuaaaagcccccgcacagaugucaauccaacucaucaacaaagccguaaacgcccuaaucaacgaccaacuaaucaugaaaaaccaccuccgcgacaucaugugcaucccuuauugcaauuacuccaaauacugguaccucaaccacaccgucaccggaaaaacaucccuaccccgaugcuggcuaguauccaacggcuccuaccucaaugaaacgcacuucucagacgacaucgaacaacaagccgauaacaugauaaccgaacuucuccaaaaagaauacaucgacagacagggcaaaacaccccucggacucgucgaccuauucguauucucuaccucauucuaccuaauuucgaucuuccuccaccucgucaaaauacccacccaccgacacguuaucggcaaacccugccccaagccccaccgccucaaccacaugggcauaugcuccugcggccucuacaaacacccaggcguccccgucaaguggaaacgcuaa

SEQ ID NO: 5967 - RNA, 1473 nt, Artificial Sequence
  derived and/or modified protein sequence (opt11) from LASV(LASV042-NIG-2009;Clade II)__AIT17592__GPCstabilized
augggacaaauaaucaccuucuuccaagaaguaccucacgucaucgaagaagucaugaacaucguccucauugcccucucccuccuagccauccucaaaggcaucuacaacgucgcaaccugcggccucuucggccucguaucuuuucuccuccucugcggccgcuccugcucuacuaccuacaagggcgucuacgaacuucaaacucucgaacucgacauggccucccucaauaugacuaugccacucuccugcaccaagaacaacucacaccacuacaucaugguaggaaacgaaacuggacucgaacucacccucaccaacaccuccaucauaaaccacaaauucugcaaccucucagacgcccacaagaagaacuuauacgaccacacccucauguccaucaucagcaccuuccaccuuuccaucccuaacuucaaccaauacgaagccaugucuugugauuucaacggaggccgcaucuccguucaauacaaccucucacacgccuacgccgucgacgcagccaaccacugcggcaccaucgcaaacggaguacuacaaaccuucaugcgaauggccuggggcggauccuacaucgcccuagacuccggaugcggcuccugggacugcaucaugacaucuuaccaauaccuuaucauccaaaacaccaccugggaagaccacugccaauucucacgccccucgcccaucggcuaccuaggccuauuaucccaacgcacccgcgacaucuacaucucaagacgccgccgcgguaccuucacauggacccuuuccgacucagagggcaacgaaaccccaggcggcuacugccucacacgauggaugcucaucgaagccgaacucaaaugcuucggcaacaccgccgucgccaaaugcaacgaaaaacacgacgaagaguucugcgacaugcuccgacucuucgacuucaacaaacaggccauacgccgccucaaaaccccagcccagauguccauccaacuuaucaacaaagccgucaacgcccucaucaacgaccaacucaucaugaaaaaccaccuccgcgacaucaugugcauccccuauugcaauuacagcaaauacugguaccugaaccacaccaucacuggcaagacaucccucccacgcugcuggcuggucucuaacggcuccuacuuaaacgaaacacacuucuccgacgacaucgaacaacaggccgacaacaugaucaccgaacuccuacaaaaagaauacauagaccgacaaggaaaaacuccccucggucucgucgaccucuucgucuucucaaccucguuuuaccucaucagcaucuuccuacaccuagucaaaauccccacccaccgucacguagucggcaaacccugccccaaaccccaccgacuaaaccacaugggcauuugcuccugcggccucuacaaacaccccggcguccccgucaaauggaagcgcuaa

SEQ ID NO: 5968 - RNA, 1473 nt, Artificial Sequence
  derived and/or modified protein sequence (opt11) from LASV(LASV045-NIG-2009;Clade II)__AIT17596__GPCstabilized
augggccaaauaaucaccuucuuccaagaaguaccacacgucaucgaagaagucaugaauaucguccuaauagcccucagcuuacucgccauccucaaaggcaucuacaacgucgcaaccugcggccuauucggccuugucucauuccuucuacucugcggccgauccugcuccaccaccuacaaaggcgucuacgaacuccaaacccucgaacuugacauggccagccucaacaugacaaugccccuauccugcaccaaaaacaacucccaccacuauaucauggucggaaacgaaaccggccuagagcucacacuaaccaauacauccaucaucaaccacaaguucugcaaccucucagacgcccacaagaaaaaccucuacgaccacgcacuaauguccaucaucagcaccuuccaucucuccauccccaauuucaaccaauacgaagcaauguccugcgacuucaacggugguaaaauaucuguucaguacaaccucucccacaccuacgcagucgacgcagccaaccacugcggcaccaucgccaacggcguccuucaaacauucaugcgcauggccuggggcggcuccuauaucgcccuagacucaggaugcggcuccugggacugcaucaugaccuccuaccaguaccucaucauccaaaacaccuccugggaagaccacugccaauucagccgucccucucccauaggcuaccuuggccuacuaagccaacgcacacgcgauaucuacaucucccgccgccgacgcggaacuuucacuuggacccucuccgacucagaagggaacgaaaccccaggcggguauugccucacccgauggaugcucaucgaggccgaacucaaaugcuucggaaacaccgccguagcuaaaugcaacgaaaaacacgacgaagaguucugcgacaugcuccgccuauucgacuucaacaaacaagccaucagacgccuuaaaaccccggcccaaauguccauccaacucauaaacaaagcagugaacgcccuaauaaacgaccaacucaucaugaagaaucaccuccgcgacaucaugugcauuccuuacugcaacuacuccaaauacugguaccucaaccacaccgucacagguaaaacuucccuaccccgcugcuggcucgucuccaacggaagcuacuuaaacgaaacacacuucuccgacgacaucgaacagcaagccgacaauaugaucacggaacuccuucaaaaagaauacaucgaccgccaaggcaaaacaccacucggccucgucgaccuuuucgucuucuccaccuccuucuaccucaucucaaucuuccuacaccucgugaaaaucccaacccaucgccacguaaucggcaaacccugcccaaagccacaccgccucaaccacaugggaaucugcuccugcggccuauacaagcaccccggcguccccgucaaauggaaaagguaa

SEQ ID NO: 5969 - RNA, 1473 nt, Artificial Sequence
  derived and/or modified protein sequence (opt11) from LASV(LASV046-NIG-2009;Clade II)__AIT17600__GPCstabilized
augggacaaaucaucaccuuuuuccaagaagucccccacguuaucgaagagguaaugaacaucguccuuaucgcacucagccuacucgccauccucaaaggcaucuacaacgucgccacuugcggucuauucgggcucguaucauuccuccuacuaugcggaagauccugcucaaccaccuacaaaggcguauacgaacuccaaacccucgaacucgacauggccucauuaaacaugaccaugccccucuccugcacuaagaacaauucccaccacuacaucaugguggggaacgaaacaggccucgaacuaacucuaacaaacaccagcaucaucaaccacaaauucugcaaccuauccgacgcacacaagaaaaaucucuacgaccacgcacuaaugagcauaaucuccacauuccaccucucaauccccaacuucaaccaauacgaggcuaugucaugcgacuucaacggcggcaaaaucucaguacaguacaaccuaagccacgccuacgccggagacgcagccaaccacugcggcacuaucgccaacggcguccuccaaaccuucaugcgcauggccuggggcggcuccuauaucgcccuagacuccggaugcggcucaugggacuguaucaugaccucuuaccaauaccuaauaauccagaacacaaccugggaagaccacugccaguuuucccgccccucucccaucggauaccuagggcuccucucccagagaacccgcgacaucuacaucucccgccgccgccgcggcaccuucaccuggacccucuccgacuccgaaggcaacgaaacccccggcggcuacugccucacacgcuggaugcucauagaagccgaacuaaaaugcuucggcaacacagccgucgccaaaugcaacgaaaaacacgacgaagaguucugugacaugcuccgccuauucgacuucaauaaacaagcaauccgacggcucaaaacgcccgcacagaugucaauacagcucaucaacaaagcagucaacgcccuaauaaacgaccaacucauaaugaaaaaccaccuccgcgacaucaugugcauacccuacugcaacuacuccaaauacugguaucugaaccacaccgucaccggaaaaaccagccuaccacgcugcuggcucgucuccaacggcucauaccuaaacgaaacccacuucuccgacgacaucgaacaacaagccgacaacaugauaaccgagcuccuacaaaaagaauacauugaccgccaaggcaaaacgccccucggccugguagaccuauucguuuucuccaccuccuuuuaccucaucuccauuuuccuccaccucgucaagauccccacccaccgccacgucaucggcaaacccugccccaaaccccaccgccuaaaccacaugggcauaugcucauguggacuguacaaacaccccggcgucccugucaaauggaaacgauaa

SEQ ID NO: 5970 - RNA, 1473 nt, Artificial Sequence
  derived and/or modified protein sequence (opt11) from LASV(LASV049-NIG-2009;Clade II)__AIT17604__GPCstabilized
augggccaaaucaucacauucuuccaagaagucccccacguaaucgaagaggucaugaacaucguccuaaucgcgcuuucacuacucgccauccuaaaaggcaucuacaacguagccacaugcggccuauucggacucgucuccuuccuacuacucugcggccgauccugcucuaccaccuacaaaggcgucuacgaacuccaaacccucgaacucgacaugaccucacuaaacaugaccaugccacuaucaugcaccaaaaacaauucccaccacuacauaauggucggcaacgaaacaggccucgaacucacccuaaccaacacaagcauaaucaaccacaaauucugcaaccucuccgacgcacacaagaaagaccucuaugaucacgcccucaugucaauaauauccacauuccacuuaucaauucccaacuucaaccaauaugaggccaugagcugcgacuucaacggcggcaaaaucucuguccaauauaaccugucacacaccuacgcugucgacgcagccaaacacugcggcaccaucgccaacggcguccuccaaaccuucaugcgaauggccuggggcggcucauacaucgcccucgacuccggcuguggcucaugggauugcauaaugacaucauaccaauaccucaucauacaaaacacaaccugggaagaccacugccaauucucccgucccucucccgucggauaccuuggccuccuaagccaacggacccgugacaucuacauaucccgccgccgacgcggcacauucaccuggacacucuccgacuccgaaggcaacgaaaccccuggcggcuacugccuaacacgcuggaugcucaucgaagcagaacucaaaugcuucggcaacaccgccgucgccaaaugcaacgaaaaacacgacgaagaguucugcgacaugcucagacucuuugacuucaacaaacaagccauccgccgccuaaaaaccccugcccagauguccauccaacucauaaacaaagcugucaacgcccucaucaacgaccaacuaaucaugaaaaaccaccuucgugacaucaugugcauccccuacuguaacuacuccaaauacugguaucucaaccacaccgucaccggcaaaaccucccuaccccgcugcuggcucgucucaaacggcuccuaccucaacgaaacccacuucuccgacgacaucgaacagcaagcagacaacaugaucaccgaacucuuacaaaaagaauaccucgaccgccagggaaaaacgccucuaggacucguagaccuguucguauucuccaccuccuucuaccucauaagcaucuuccuccaccucguuaaaaucccaacccaccgccacgucaucggaaaacccugccccaaaccucaccggcucaaccacaugggaaucugcucaugcggucucuacaaacaccccggcguaccagucaaguggaagcgcuaa

SEQ ID NO: 5971 - RNA, 1473 nt, Artificial Sequence
  derived and/or modified protein sequence (opt11) from LASV(LASV052-NIG-2008;Clade II)__AIT17608__GPCstabilized
augggccaaauaaucaccuucuuccaggaagucccccacgucaucgaagaaguaaugaacaucguccucaucgcucucucccuacucgccauucucaaagggaucuacaacguagcaaccugcggacuuuucggccucgucuccuuccuccuacucugcggccgcuccugcuccaccaccuacaaaggagucuacgaacugcaaacacucgaacucgacauggccucccuaaacaugacaaugccccucuccugcaccaaaaacaauucccaucacuacaucauggucggcaacgagaccggacuagaacuaacacucaccaacaccuccaucaucaaucauaaauucugcaaucucuccgacgcacacaaacgaaaccucuacaaccacgcccucaugagcaucaucucaacauuccaccucagcauccccaacuucaaccaauacgaggccaugagcugcgacuucaacggcggcaaaaucuccguccaauacaauuuaucccacacauacgccguggacgccgcaaaccacugcggcaccaucgccaacggcguucuccaaaccuucaugcgcauggccuggggaggcuccuacaucgcccucgacagcggcuguggaucaugggacugcaucaugaccucauaccaauaccuaaucauacaaaacaccaccugggaagaccacugccaauucucacgccccucccccaucggcuaccuaggccuccucucacaacguacccgggacauauacauaucccgccgccgccgcggcaccuucaccuggacucuguccgacucagaaggcaacgagacaccaggcggauacugccucacacgcuggaugcucaucgaagccgaacucaagugcuucggcaauaccgccgucgccaaaugcaacgaaaaacacgaugaagaguucugcgacaugcuccgacuauucgacuucaacaagcaagcaaucagacgccucaaaacccccgcccaaauguccauacaacucaucaauaaagccgucaacgcccucaucaacgaccaacucaucaugaaaaaccaccucagggacauaaugugcauccccuacugcaacuacucgaaauacugguaccucaaccacacagucaccggcaaaaccucccucccccgcugcuggcucgucuccaauggcagcuaucucaacgaaacucacuucuccgacgacaucgaacaacaagccgacaauaugaucacagaacuccugcaaaaagaauacaucgaccgccaaggcaagacaccccucggacucguagaccucuucgucuucuccaccucauucuaccuuauuuccaucuuccuccaccucguuaaaaucccaacccaucgccauaucaucggcaaacccugccccaaaccccaccgccucaaccacauggguaucugcucuugcggacucuacaaacaccccggcguacccgugaaauggcgacgauga

SEQ ID NO: 5972 - RNA, 1473 nt, Artificial Sequence
  derived and/or modified protein sequence (opt11) from LASV(LASV056-NIG-2008;Clade II)__AIT17612__GPCstabilized
augggccaaaucaucaccuucuuccaagaagucccgcacgucauagaagaagucaugaacaucguccucaucgcccuuucacuccucgccauccucaaaggcaucuacaacgucgccacaugcggccucuucggccucgucuccuuccuccuacuaugcggccgaucaugcuccacuacauacaagggagucuacgaacuccaaacccucgaacuggacauggccucacucaacaugacaaugccccucucaugcaccaaaaacaacucacaccacuacauccgcgucggcaacgaaaccggccucgaacucacccucaccaacaccagcauaaucaaccacaaauucugcaaccuauccgaugcccacaagaaaaaccuauacgaccacucucucauguccaucauaucgaccuuccaccuaagcauccccaacuucaaucaguacgaagccauguccugcgacuucaacggcggcaaaauuuccguccaauacaaccuaucacacacuuacgccgucgacgccgccaaccacugcggcaccaucgcaaauggaguacuucaaaccuucaugcgaauggccuggggcggcucuuacauagcccucgacuccggcugcggcaacugggacugcaucaugacaucauaccaauaccucauaauacaaaacaccaccugggaagaccacugucaauucagccgcccaucucccaucggcuaccucggccuccucucacaacgaacccgcgacauauacaucagccgacgucgacguggaaccuucacauggaccuuaucggauagcgaaggaaacgaaacaccaggcggcuacugccuaacacgcuggaugcugauugaagcagaacuaaaauguuucggcaacaccgccgucgccaaaugcaacgagaaacacgacgaagaguucugcgacaugcuacgacucuucgacuucaacaaacaagccauccgucgccuaaaaacccccgcacaaaugagcauccaacucauuaacaaagccgucaacgcccucaucaacgaccaacuuaucaugaaaaaccaccuacgcgacauaaugugcauccccuacuguaacuacuccaaauacugguaccuaaaccacaccgucaccggcaaaaccucacucccccgcugcuggcucgucuccaacggcucauaccucaacgaaacccacuucuccgacgacaucgaacaacaagcagacaacaugaucaccgaacuacuacaaaaagaauacaucgaccgccaaggcaaaacuccacucggccuaguugaccucuucgucuucuccaccuccuuuuaccucaucucgauauuccuacaccuagucaaaauaccaacccaccgccacgucgucggaaaaccaugccccaaaccccaccgccucaaccacaugggcaucugcuccuguggccuauacaaacacccaggcguccccgucaaauggaaacguuaa

SEQ ID NO: 5973 - RNA, 1473 nt, Artificial Sequence
  derived and/or modified protein sequence (opt11) from LASV(LASV058-NIG-2008;Clade II)__AIT17616__GPCstabilized
augggacaaaucaucacuuucuuccaagaggucccccacgucauagaagaagucaugaacauaguccucaucgcacucucccuccucgcaauccugaaaggcaucuacaacgucgcaaccugcggccucuucggacucgucuccuuccuacuccucugcggucgauccugcuccacgaccuacaaagguguauacgaacuacaaacccuugaacuugacauggccucacuaaacaugaccaugccccucucaugcaccaaaaacaacucccaccauuacaucauggucggcaacgaaaccggccuugaacucacccucaccaacacaucuaucaucaaccacaaauuuugcaaccuaagcgaugcccacaagaaaaaccucuaugaccaugcccucaugucgaucaucagcaccuuccaucucuccauccccaacuucaaccaauacgaagccauguccugcgauuucaacgguggaaaaaucuccguucaauacaaccucucucacgccuacgccgucgacgcagccaaccacugcggcacaauagccaacggcguccuccaaacauucaugcgaauggccuggggcggauccuacaucgcacucgacucaggcugcggcucaugggacugcaucaugaccuccuaccaauaucucauuauccaaaacaccacaugggaagaccauugccaauucucccgccccuccccaaucggcuaccugggccuacucucccaacgcacccgagauaucuacaucucccgccgacgacggggcacauucaccuggacgcucucagacucagaaggcaacgaaacaccaggcggcuacugccucacccguuggaugcucaucgaagcagaacucaaaugcuucggcaacacagccguugccaaaugcaacgaaaaacacgacgaagaauuuugcgacaugcuucgacucuucgacuucaauaaacaagccauccgccgccucaaaacccccgcacaaaugagcauacaacucauaaacaaggccgucaacgcccuaauuaacgaccaacucaucaugaaaaaccaccuccgcgacaucaugugcaucccauacugcaacuacuccaaauacugguaccucaaccacacaguuacuggcaaaaccucccuaccgcgcugcuggcucgucuccaacggcucuuaccucaacgaaacacacuucuccgacgacauagaacaacaagccgacaacaugauaaccgagcuccuccaaaaagaauacaucgaccgccaaggaaaaacaccccucggccuuguagaccucuucgucuucuccaccucauucuaccucaucuccaucuuccuccaccuagucaaaauaccuacccaccgacaugucauaggcaaacccugccccaaaccucaccgccucaaccauaugggaaucugcuccugcggccuauacaaacacccaggagucccagucaaguggaaacgcuaa

SEQ ID NO: 5974 - RNA, 1473 nt, Artificial Sequence
  derived and/or modified protein sequence (opt11) from LASV(LASV063-NIG-2009;Clade II)__AIT17620__GPCstabilized
augggccagaucaucaccuucuuccaagaggucccccacguaaucgaagaagucaugaacaucguccucauagcacucucucuccucgccauccucaaaggaauauacaacgucgccacaugcggccuuuucggccuagucagcuuccuccuacucugcggacgcuccugcagcaccaccuauaaaggcgucuacgagcuccagacccucgaacucgacauggccucccucaacaugaccaugccccucuccugcacaaaaaacaacucucaccacuacauaauggucggcaacgaaacaggccuagaacuuacccuaaccaacaccuccaucaucucccacaaauucugcaaccuaucagacgcucacaaaaaaaaccucuacgaccacgcgcucauguccauaauaucuaccuuucaccucuccauaccaaacuucaaccaauacgaagcaauguccugcgacuucaacggcggcaaaaucuccguacaauacaaccugucacacgcauacgcuaucgacgccgcaaaccacuguggaaccguagccaacggaguccuacaaaccuucaugcguauggccuggggaggcuccuacaucgcccucgacucaggcugcggguccugggacuguaucaugaccuccuaccaauaccuaaucauccaaaacaccaccugggaggaccacugucaauucucccgccccagccccaucggauaccucggccuacucucucaacgcacacgagacaucuauaucagccgccgccgccgcggcacauuuaccuggacgcuauccgacuccgaaggaaacgagacaccaggcggcuacugccucacacgcuggaugcuaauagaagcagaacucaaaugcuuuggcaacaccgccgucgccaaaugcaacgaaaaacacgacgaagaauucugcgacaugcuccgucuauucgacuucaauaaacaagccauccgccgccuaaaagcacccgcacaaaugagcauccaacucaucaacaaagccguaaacgcccucaucaaugaccaacucauaaugaaaaaccaucuccgagacaucauguguaucccauacugcaauuacucuaaauacugguaccuuaaccacaccgucacaggaaaaaccagccucccccgaugcuggcucgucucuaacggaucauaccuaaacgaaacccacuucuccgacgacauugaacaacaagccgacaacaugaucaccgaacuccuacaaaaagaauacauggaccgccaaggcaaaaccccacuaggccucgucgaccucuuuguauuuuccaccuccuucuaccuaauuucaaucuuccuccaccucgucaaaaucccuacacaccgccacgucaucggcaaacccugcccaaaaccccaucgccucaaccacaugggcaucugcuccugcggccuauacaaacaccccggcguaccaguaaaauggaaacguuaa

SEQ ID NO: 5975 - RNA, 1473 nt, Artificial Sequence
  derived and/or modified protein sequence (opt11) from LASV(LASV1000-NIG-2009;Clade II)__AIT17782__GPCstabilized
augggccaaauaaucaccuucuuccaagaaguaccucacgucauagaagaagucaugaacaucguccucaucgcccucucccuccucgccauacucaaaggcaucuacaacgucgcaaccuguggccucuucggccucgucucauuccuccuacucugcggcagaucaugcucaaccacauacaaaggcguauacgaacuucagacccucgaacucgacauggccucccucaacaugaccaugccccucuccugcaccaagaacaacucccaucacuacaucauggucggcaacgaaaccggacuagaacucacacuuacgaacaccuccaucaucaaccacaaauucugcaaccuaagcgacgcccacaagaaaaaccuguacgaccacgcucucauguccauaaucuccaccuuccaccucuccauccccaacuucaaccaauacgaagcaaugagcugcgacuucaacggcggcaaaauaucaguccaauacaaccuaucccacaccuacgccgucgacgccgcaaaccacugcggcacaaucgccaacggcguccuccaaaccuucaugcgcauggccuggggcgguagcuacaucgcccucgacuccggcugcggaucaugggacuguaucaugacauccuaucaguaccuaaucauccaaaacaccaccugggaagaccacugccaauuuucccgacccucccccauagguuaccucgggcuccucucccaacgcacacgcgacaucuacaucucucgcagacgccgcggaaccuucaccuggacacucucagacucagaaggcaacgaaacucccggaggauacugccucacacgcuggaugcucaucgaagccgaacucaaaugcuucggaaacaccgcaguagcaaaaugcaacgaaaaacacgacgaagaauuuugcgacaugcucagacuauucgacuucaacaaacaagcuauaaaacgccucaaaacccccgcccaaauguccauccaacucaucaacaaagccgucaacgcacuaaucaacgaccaacuaaucaugaagaaccaccuacgcgacaucaugugcaucccuuacugcaacuacuccaaauacugguaccucaaccacacagucaccggaaaaacuucauuaccccgaugcuggcuggucuccaacggcuccuaccucaacgaaacgcacuucuccgacgacaucgaacaacaagccgacaacaugauaaccgaacuccuccaaaaagaauauaucgaccgccaaggcaaaacuccccucggccucgucgaccucuucguguucucuacauccuucuaccucaucucaaucuuccuacaucucguaaaaauuccaacccaccgccauguaguaggcaaacccugccccaaaccccaccgccucaaccacauggggaucugcucuugcggccuguacaaacaccccggcgucccaguuaaauggaaaagguag

SEQ ID NO: 5976 - RNA, 1473 nt, Artificial Sequence
  derived and/or modified protein sequence (opt11) from LASV(LASV1008-NIG-2009;Clade II)__AIT17786__GPCstabilized
augggccaaauuaucaccuucuuccaagaaguaccucacguaaucgaagaagucaugaacaucguucuaaucgcccucucacuccuagccauacuuaaagguaucuacaacguggccacaugcggacucuucggucucgucucguuccuccuacucugcggccgcuccugcuccaccacauacaaaggcgucuacgaacuccaaacccucgaacucgauauggccucccucaacaugacaaugccccucucguguaccaaaaacaacucccaccacuacauuauggucggcaacgaaaccggccuagaacucacccuuacaaacaccucaaucaucaaccacaaauucugcaaccucuccgacgcccacaagaaaaaccuauacgaccacgcucuuaugagcaucaucuccaccuuccaccuuuccauccccaacuucaaccaguacgaagccaugucaugcgacuucaacggcgggaaaaucuccguccaauacaaccucucccacgccuacgccaucgacgccgccgaccacugcggcaccaucgccaacggaguacuccagaccuuuaugcgcauggccuggggcggcucguacaucgcccucgacucaggaugcggaucuugggacugcaucaugaccucauaccaauaccucaucauccaaaacaccaccugggaggaccacugccaauucucccgccccucccccaucgguuaccucggacuacucagccaacgcacccgcgauaucuacauaucacgacgccgccgcggcacauucaccuggacccucuccgacuccgaaggaaacgaaacccccggcggcuacugccucacccgauggaugcucaucgaagccgaacucaaaugcuucggaaacaccgcaguagccaaaugcaacgagaaacacgacgaagaguucugcgacaugcuccgacucuucgacuucaacaaacaagccauccgucgccucaaaacccccgcccaaauguccauacaacucaucaacaaagccguaaacgcccucauaaacgaucaacugauaaugaaaaaccaccuacgcgacauaaugugcaucccauacugcaacuacucuaaguacugguaccucaaccacaccgucaccggcaaaacaucccuccccagaugcuggcucguauccaacgguuccuaccuaaacgaaacccacuucuccgacgauaucgaacaacaggccgacaacaugauaaccgaacuacuccaaaaagaauacauggaccgucaaggcaaaacaccccuaggucuagucgaccuauucguauucagcaccucuuucuaccucaucagcaucuuccuccaccuaguaaaaauccccacucacagacacaucaccggcaaaccaugcccuaaaccacaccgccucaaccacauggguaucugcuccugcggccucuacaaacacccgggcgucccagucaaauggaaacguuaa

SEQ ID NO: 5977 - RNA, 1473 nt, Artificial Sequence
  derived and/or modified protein sequence (opt11) from LASV(LASV1011-NIG-2009;Clade II)__AIT17790__GPCstabilized
augggccaaaucaucaccuucuuccaagaaguaccccacguaaucgaagaaguuaugaacauaguacuaaucgcccuaucccuccucgccauccuaaagggcaucuacaacgucgcaaccugcggccuguuuggccuugucuccuuccuccuacuaugcggccgcuccugcuccaccacauacaaaggcgucuacgaacuccaaacccucgaacucgacauggccucccuaaacaugacgaugccccucucaugcacuaagaacaacucccaccacuacaucaugguaggcaacgaaaccggacucgaacuuacccuaacaaacacuuccaucaucaaccacaaauucugcaaucucuccgacgcccacaagaaaaaccuuuacgaccacgcccucaugagcaucaucuccacguuucaccuaucgauaccaaacuucaaccaauacgaagccaugucaugcgacuucaauggcggaaaaauauccguucaguacaaccugucccacacguacgccgucgacgccgccaaccacuguggcacaaucgccaacggcguccuccaaacguucaugcgcauggccuggggcggcucauacauagcccucgacagcggcugcggauccugggacugcauaaugaccuccuaccaauaccucaucauccaaaacacaaccugggaagaccacugccaauucucucgccccucuccuaucggcuaccuaggccuccucucucaacggacccgcgauaucuacaucucucgcagacgccgcggcacguucaccuggacccucuccgacagcgaaggcaacgaaacccccggcggcuauugcuuaacccgauggaugcucauagaagccgaacuaaaaugcuucggcaacacagccgucgccaagugcaacgaaaaacacgacgaggaguucugcgacaugcuccgccucuucgauuucaacaaacaagccauccgacgucucaaaacccccgcacaaaugagcauccaacucaucaacaaagccguaaacgcccugaucaaugaccagcuuaucaugaagaaccaccucagagacaucaugugcauccccuacuguaacuacuccaaauacugguaccucaaccacacagucaccggcaaaaccucccucccacgcugcuggcucguauccaacggcuccuaccucaaugaaacacacuucuccgacgacaucgaacaacaagccgacaacaugaucaccgaacuacuccaaaaagaauacauggaccgccagggcaaaacaccgcucggccuagucgaccucuucgucuucuccacaucauucuaccuaaucuccaucuuccugcaccucgucaagauccccacccaccgccacaucacaggcaaacccugcccaaaaccccaccgacucaaccacaugggcauaugcucaugcggacucuauaaacaccccggcgucccagucaaauggaaacgauaa

SEQ ID NO: 5978 - RNA, 1473 nt, Artificial Sequence
  derived and/or modified protein sequence (opt11) from LASV(LASV1016-NIG-2009;Clade II)__AIT17798__GPCstabilized
augggacaaaucauaaccuucuuccaagaaguuccccacgucaucgaagaagucaugaacauaguccuaaucgcccucucacuccucgccauacugaagggcaucuacaacgucgcaaccugcggccuauucggccucguauccuuccuucuccuaugcggccgcuccugcuccaccaccuacaaaggagucuacgaacuccaaacacucgagcuagacauggccucccucaacaugaccaugccccucuccugcaccaaaaacaauucccaccacuacaucauggucgguaacgaaaccggucucgaacucacucucacaaacacauccauaaucaaccacaaauucugcaaccucuccgacgcccacaagaaaaaccuauacgaccacgcccuuauguccaucauauccaccuuccaccucuccaucccaaacuucaaccaauaugaagccauguccugcgacuucaacggaggcaaaauauccguccaauacaaccucucccacaccuacgccgucgacgccgccaaccacugcggcaccaucgcaaacggaguucuccaaaccuucaugcguauggccuggggcggaucauacauugcccucgacuccggcugcggaucuugggacugcauaaugaccuccuaccaauaccucaucauacaaaacacuacaugggaagaccacugccaauucucccgacccucccccaucggcuaccuaggccuacucucacagcgcacacgugacauauacaucucacgacgucgccgcggcaccuucacguggacccuauccgacucugaagguaacgaaaccccaggcggcuacugucucacacgauggaugcucaucgaagccgaacuuaaaugcuucggcaacaccgccgucgccaaaugcaacgaaaaacacgacgaagaguucugcgacaugcuccgccucuucgacuucaacaaacaggccaucaugcgacucaaaaccccugcccaaauguccauccaacucauaaacaaagcagucaacgcucugaucaacgaccagcucaucaugaagaaccaccuccgugacauuaugugcauccccuacugcaauuacucaaaauacugguaccucaaccacaccguaacaggcaagacaagccucccccgcugcuggcucgucagcaacggauccuaccuaaacgaaacucacuucuccgacgacaucgagcaacaagccgacaacaugaucaccgagaugcuacaaaaagaauaccucgaccgccaaggcaaaacaccccucggacucgucgaccucuucguuuucucaaccuccuucuaucucaucucaaucuuccuccaccuugucaaaauacccacccaccgccacaucaucggcaaacccugcccaaaaccccaccgccucaaccacaugggcaucugcuccugcggcuuauacaaacaccccggcgugccaguaaaauggaaacgcuaa

SEQ ID NO: 5979 - RNA, 1473 nt, Artificial Sequence
  derived and/or modified protein sequence (opt11) from LASV(LASV221-NIG-2010;Clade II)__AIT17624__GPCstabilized
augggccaaauaaucaccuucuuccaagaaguuccccacguaaucgaggaagucaugaacaucguccucaucgcccuaucccuacuugcuauacucaaaggcauauacaaugucgcaaccugcggccucuucgggcuaguaucuuuccuccuacucugcggccguuccugcuccaccaccuacaaaggcgucuacgaacuccaaacacucgagcucgacauggccucccucaacaugacaaugccccuauccuguaccaagaacaacucccaccacuacaucaugguugguaacgaaacaggccuagagcucacacucaccaacaccuccauuaucaaccacaaauucuguaaccucuccgacgcccauaagaaaaaccucuacgaccacgcccucaugagcaucaucuccaccuuccaccucuccauccccaacuucaaccaauacgaagccauguccugcgacuucaacggaggcaaaaucuccguccaauacaaccucucccacacuuacgccaucgacgccgcgaaccacugcggaaccaucgccaacggcguucuccaaaccuucaugcgcauggccuggggaggcucauacaucgcacuagacuccggaugcggcuccugggacuguaucaugaccuccuaccaauaccucauuauacaaaauacaaccugggaagaccacugccaauucucccgaccauccccaaucggauaccucggccuccucucacaacgaacccgagacaucuacaucucucgccgccgccgaggcacauucacguggacacucuccgacuccgagggcaacgaaacccccggaggcuauugccuaacucgcuggaugcucaucgaagccgaacuaaaaugcuucggcaacaccgccgucgcaaaaugcaacgaaaaacacgacgaagaguucugcgacaugcuccgacucuucgacuucaacaaacaggccauccgccgccuuaaaaccccagcacaaauguccauccaacugaucaacaaagccguaaaugcucuaaucaacgaccaacucauaaugaaaaaccaccuccgagacaucaugugcauccccuacuguaacuacuccaaauacugguaccucaaccacaccguaacaggaaaaaccucccuaccacgcugcuggcucgucagcaacggcuccuaccuaaacgaaacccacuuuucugacgacauagaacaacaagccgacaacaugauaacggaaaugcuacaaaaagaauacauggaccggcaaggcaaaaccccgcucggccucguagaccucuucgucuucuccaccuccuucuaccucaucuccaucuuccuccaccucgucaagauccccacccacagacacguaaucggcaaaccuugccccaaaccccacagguugaaccacaugggcaucugcuccugcggccuauacaaacacccaggcguaccagucaaguggaaacgcuaa

SEQ ID NO: 5980 - RNA, 1473 nt, Artificial Sequence
  derived and/or modified protein sequence (opt11) from LASV(LASV224-NIG-2010;Clade II)__AIT17626__GPCstabilized
augggccaaaucaucacuuucuuccaagaaguaccccacgucaucgaggaaguaaugaacauuguccuaaucgcccucucccuccuagcaauccuaaaaggcguuuauaacgucgcaaccugcggucucuucggccucgucuccuuucuccuccuuugcggccgauccuguuccacgaccuacaaaggcguauacgagcuacaaacccucgaacucgacauggccucacucaacaugaccaugccccucuccugcaccaaaaacaacucgcaccacuacauaauggucggcaacgaaaccggccuggaacuuacccucaccaacaccuccauaauccaacacaaauuuugcaaccucuccgacgcccacaagaaaaaccuauacgaccaugcccuaauguccauuaucuccaccuuccaccuaucaauaccaaacuucaaccaauacgaggccauguccugcgacuucaacggaggcaaaaucaccguccaauacaaucucucacacuccuacgccauagacgcagcaaaccacugcggaaccaucgccaacggaguccuccaaaccuucaugcguauggccuggggcggcucuuacaucgcccucgacagcggaugcggcuccugggacugcaucaugacaucauaccaauaccuaaucauccaaaacaccacuugggaagaccacugccaguucucucgccccagccccaucggauaccucggucuccuuucccaacgaacccgagacaucuacauaucacgccgccgccgaggcaccuuuaccuggacccucagcgacucugagggaaacgaaaccccagguggcuacugccucaccagguggaugcucaucgaagccgaacuaaaaugcuucggaaauaccgccgucgccaaaugcaacgaaaaacacgacgaagaguucugcgacaugcuccgccucuuugacuucaacaaacaagccauccgccggcuaaaaacacccgcccagauguccauacaacuuauaaacaaagccgucaacgcccuuaucaaugaccaacuaauaaugaaaaaucaucuccgcgacaucaugugcauccccuacugcaauuacucuaaguacugguaccucaaucacacagucaccggccgcaccucacucccccgaugcuggcucguauccaacggcuccuaucucaacgaaacccacuucuccgacgacaucgaacagcaggccgacaacaugaucacagaacuccuacaaaaagaauauauggacagacaaggcaaaaccccacuuggccucgucgaccucuucgucuucuccaccuccuucuaccucaucuccaucuuccuccaccuagucaaaauacccacacaccgacauaucaucggaaaacccugccccaaaccacaccgccucaaccacaugggcgucugcuccugcggacucuacaaacaccccgggguccccgucaaguggaaacgcuaa

SEQ ID NO: 5981 - RNA, 1473 nt, Artificial Sequence
  derived and/or modified protein sequence (opt11) from LASV(LASV225-NIG-2010;Clade II)__AIT17630__GPCstabilized
auggggcaaauuaucaccuucuuccaagaggucccccacgucaucgaggaaguuaugaauaucguccucaucgcccugagccuacuugcaauacucaaaggcaucuacaacguagcaaccugcggccuuuucggacuccucuccuuccugcuccuaugcggacgcucaugcucaacaacauacaaaggcgucuacgaacuccaaacacuggaacucgacauggccucccuaaacaugaccaugccacucucgugcaccaagaacaacucucaccacuacaucauggucggcaacgaaaccggccucgaacuaacgcucaccaacaccuccauaaucaaccacaaauucugcaaccuuuccgacgcacacaagaaaaaccucuacgaccacgcccucauguccaucaucuccaccuuccaccucucaauaccaaacuucaaccaauacgaagccauguccugcgacuucaacggcggcaaaaucuccguccaauacaaccucucccacgcauacgccgucgacgccgccgaacacugcggcaccaucgccaacggaguccuacaaaccuucaugcgaauggccuggggcggcuccuacaucgcccuugauuccggcugcggauccugggacugcgugaugaccagcuaccaguaccuaaucauacaaaacacuagcugggaagaccacugccaauucucccgccccuccccaaucggauaccuaggucuacuaucccaacgcacccgagacauauacaucucccgucgacgccgugggaccuuuaccuggacacucucggacuccgaaggcaacgaaacuccgggcggcuauugccucacccgcuggaugcuaaucgaagcugaacucaaaugcuucggaaacaccgccgucgccaaaugcaacgaaaaacacgaugaagaguucugcgacaugcuacgccucuuugacuucaacaaacaagccauccgcagacucaaaacaccagcccaaauguccauucaacucauaaacaaagccgucaacgcacuaaucaacgaccaacuaaucaugaaaaaccaccuacgcgauauaaugugcauccccuacugcaacuacuccaaauacugguaccuaaaccacaccguaaccggaaaaaccucccuaccccgcugcuggcuuguauccaacggcuccuauuuaaacgaaacccacuucuccgacgacaucgaacaacaagccgacaacaugaucacagaacuacugcaaaaagaauacaucgaccgacaaggaaaaacaccccuaggccucgucgaccuauucgucuucucaaccuccuucuaccucauuuccaucuuccuacaccuagucaaaaucccaacccaccgccacguaaucggcaaaccaugccccaaaccccaucgccuaaaccacaugggcaucuguuccuguggccucuacaaacaccccggaguccccgucaaauggaaacgauaa

SEQ ID NO: 5982 - RNA, 1473 nt, Artificial Sequence
  derived and/or modified protein sequence (opt11) from LASV(LASV229-NIG-2010;Clade II)__AIT17634__GPCstabilized
augggccaaauaaucaccuucuuccaagaagucccccacguaaucgaagaagucaugaacauagugcucaucgcccucucacuccuggcuauccuaaaaggcauauacaacguugcaaccugcggccucuucggacucgucuccuuccuacuccuauguggcagauccugcuccaccaucuacaaagacgucuacgaacuccaaacccuugaacucgacauggccucccucaacaugacaaugccccucuccugcacaaagaacaacagccaucacuacauaauggucggcaacgaaaccggccuagaacucacccucacaaacaccucaauaaucaaccacaaguucugcaaccucuccgacgcacacaagaaaaaccucuacgaccacgcccuuaugucaaucaucuccacauuucaccucuccauacccaacuucaaccaauacgaagcaauguccugcgacuucaacggaggcaaaauaagcguccaauacaaccucucccacaccuacgccaucgacgccgcuaaccacugcgguaccauugccaacggcguccuccaaaccuucaugcgcauggccuggggcgguuccuacaucgcccucgacuccggaugcggcucgugggacugcaucaugaccucauaccaguaccucaucauacaaaacaccacaugggaagaccacugccaauucucccgcccaucuccuauaggauaucucggccuacucucccagcguacccgcgacauauacaucucccgccgccgccgcggcacauucacauggacccucuccgacuccgaaggaaacgaaaccccagggggcuacugccugacacgcuggaugcucauagaagcagaacuaaaaugcuucggcaacacugccguagccaaaugcaacgaaaaacaugacgaagaguucugcgacaugcuucgccucuucgacuucaacaaacaagccauucgacgccuaaaaacccccgcccaaauguccauacaacuuaucaacaaagccgucaacgcccucaucaaugaccaacuaaucaugaaaaaccaccuccgugacauaauguguauccccuacugcaacuacuccagauacugguaccuaaaccacaccgucaccggacgcaccucccuaccccgcugcuggcuagucucgaacggcuccuaccuaaacgaaacccacuucuccgacgacaucgaacagcaagcagacaacaugaucaccgaacuucuccaaaaagaauacauggacaggcaaggcaaaacuccccuuggacucgucgaccuauucguuuucuccaccuccuucuaccucaucucuauauuccuccaccuagucaaaauccccacccacagacacgucauagggaaaccaugccccaaaccccaccgccuuaaccacaugggcauaugcucgugcggccucuacaaccaccccggaguccccguaaaauggaaacgcuaa

SEQ ID NO: 5983 - RNA, 1473 nt, Artificial Sequence
  derived and/or modified protein sequence (opt11) from LASV(LASV237-NIG-2010;Clade II)__AIT17638__GPCstabilized
augggccaaauaaucaccuucuuucaagaagucccccacgucaucgaagaggucaugaacauuguccucauagcccuaucccuacucgcaauccucaaaggcauuuacaacgucgcuaccugcggccuauucggccuagucagcuuccuccucuuaugcggccgcuccugcucaacaacauacaaaggcguuuacgaguuacaaacccucgaacuagacauggccucucuaaacaugaccaugccccuuuccugcacuaaaaacaacucucaccacuauauuaugguaggcaacgagacaggccuugaacucacccucaccaacaccuccaucauaaaccacaaauucugcaaccuauccgacgcccacaaaaaggaccuuuacgaccacgcccucaugucaaucauaagcaccuuccaccucagcauucccaacuucaaucaauacgaagccauguccugcgauuucaacggcggcaaaaucuccguccaauacaaccuuagccacaccuacgccgucgacgccgccaaccacugcggaaccaucgcaaacggcguacuccagacauucaugcgcauggccuggggcgguuccuacaucgcccucgacucuggcugcggcuccugggacugcaucaugaccuccuaccaauaccucauaauccaaaacacaacaugggaagaccacugccaauucucccguccaucucccaucgguuaccucggccuacuuucccaacgaacccgagacaucuacaucagccgacgucgucgcggcacauucaccuggacacuauccgacucugaaggcaacgaaacccccggcggauauugccuaacccgauggaugcucauagaagccgaacucaaaugcuucggcaacaccgccgucgccaaaugcaacgaaaaacacgacgaagaguucugcgacaugcuacgccucuucgacuucaacaaacaagccauccgucgccuaaaaaccccagcccaaaugucaauacagcucaucaacaaggccgucaacgcccucaucaacgaccaacucaucaugaagaaccaccuccgugacaucaugugcauccccuacugcaacuacucaaaauauugguaccuuaaccacacagucacgggcaaaaccucccucccccgcugcuggcucgucuccaacggauccuaccucaacgaaacucacuucuccgacgacaucgaacaacaagccgacaacaugaucaccgaacuacuccaaaaagaauacauggaccgccaaggcaagacuccccucggccucgucgaccucuucguuuucuccaccuccuucuaccucaucagcaucuuccuacaccucaucaaaaucccgacccaccgccacaucaccggcaaacccugcccgaaaccccaccggcuaaaccacaugggcaucugcuccugcggccucuauaaacaccccgguguccccgucaaauggaaacgauaa

SEQ ID NO: 5984 - RNA, 1473 nt, Artificial Sequence
  derived and/or modified protein sequence (opt11) from LASV(LASV239-NIG-2010;Clade II)__AIT17642__GPCstabilized
augggccaaaucaucacauucuuccaagaagucccccacgucaucgaagaagucaugaacaucguccuaaucgcccucucacuccuggcaauacucaaaggcgucuacaacgucgcaaccugcggucucuucggacucguauccuuccuccuccuuugcggacgcuccugcucuacgacauacaaaggaguuuacgaacuccaaacccucgaacucgacauggccagccucaacaugaccaugccccucucaugcacuaagaacaacucccaccacuauaucauggucggcaacgacacuggacuagaacucacccucacaaacaccuccaucaucaaccacaaauucugcaaccucuccgacgcccacaagaaaaaccucuacgaccacgcgcucaugagcaucaucuccaccuuccaccucuccauaccaaacuucaaccaguacgaggcuauguccugcgacuucaacggcggaaaaaucuccguccaauacaaccucucccacgcuuacgcagucgacgccgcuagccacugcggcacaaucgccaacggaguccuacaaaccuucaugcggauggccuggggcggcagcuacaucgcacucgacuccggcugcggaagcugggacugcaucaugaccucauaccaauaucuaaucauccaaaacaccacuugggaggaccacugccaauucucacgccccagccccaucggcuaccucggccuccucucacaacgcaccagagacaucuacaucagccgacgccgccgaggcacauucacauggacccuauccgacuccgaaggcaacgaaacccccggcggcuacugccucacgcgcuggaugcuaauagaagccgagcucaaauguuucggcaauacagccgucgcaaaaugcaacgaaaaacacgacgaggaauuuugcgacaugcuccgccuauucgacuucaacaaacaagccauaagacgcuuaaaaacaccagcccaaauguccauccagcucauaaacaaagcaguaaacgcucucauaaacgaccagcucaucaugaaaaaccaccuaagagacaucaugugcauccccuacugcaacuacucaaaauacugguaccuuaaccacaccgucaccggcaaaacaucacucccccgcugcuggcucgucuccaauggcucauaccucaacgagacgcacuucucagacgacaucgagcaacaagcagacaacaugaucacagagcuccuccaaaaagaauacauggacagacaagggaaaacaccccucggccucgucgaccuuuucgucuucuccaccuccuucuaccugaucucuaucuuccuccaccucguaaagauacccacccaccgccacaucaucggaaaacccugccccaaaccccaccgacucaaccauaugggaauaugcucuugcggacuauacaaacacccaggaguacccgucaaauggaaacgcuaa

SEQ ID NO: 5985 - RNA, 1473 nt, Artificial Sequence
  derived and/or modified protein sequence (opt11) from LASV(LASV241-NIG-2011;Clade II)__AIT17646__GPCstabilized
augggccaaauuauaacauucuuccaagagguuccccacgucaucgaagaaguaaugaacaucguccuaauagcacucucccuccucgccauacucaaaggcaucuacaacgucgcaacaugcggccucuucggcuuaguauccuuccuccuccuguguggucgcucaugcuccacaacuuacaaaggcgucuacgaacuccaaacccuugaacucgacauggccucccuaaacaugaccaugccccucucuugcacuaaaaacaacucccaccacuacaucaugguuggaaacgaaacuggccucgaacucacauugaccaacacuagcaucauaaaccacaaauuuugcaaccuauccgacgcccacaagaaaaaccuauacgaccacgcccugauguccaucaucuccaccuuucaccucucaauccccaacuucaaccaauacgaagccauguccugcgacuucaacggcggcaaaaucuccguccaauacaaucucucccacgcauacgccgucgacgcagccagccauugcggcacaguagcaaacggcguccuacaaaccuucaugcgcauggccuggggcggcuccuacaucgcacucgacucagggugcggcuccugggacugcauaaugaccuccuaccaauaccucaucauccaaaacaccacaugggaagaccacugccaauucucccgccccucccccaucggguaccucggacuccuuagccaacgcacccgcgacauuuacaucucccgucgccgccgcggcacuuuuaccuggacccuuuccgacuccgaaggcaacgaaacucccggcggauacugccucacccgcuggaugcucauagaagccgagcucaaaugcuuuggcaacacagccguagccaaaugcaacgaaaaacacgacgaagaauuuugcgacaugcuccgccuuuuugacuucaacaaacaagccauccgccgccucaaaacccccgcccaaauguccauccaacucaucaauaaagcaguaaacgcccuaaucaacgaccagcucaucaugaaaaaccaccuccgcgacaucauguguauacccuacugcaacuacucaaaauacugguaccucaaccacaccgucaccggaaaaacaucacucccccgcuguuggcucguauccaacggcuccuaccucaacgagacccacuucagcgacgacauugaacaacaagccgacaacaugaucaccgaguuacuacaaaaagaguacauggaccgccaaggcaaaacuccccucggucucguagaccuauucgucuucucaacuuccuucuaccucaucuccauauuccuccaccuugucaaaaucccuacccaccgacacgucaucggaaagcccugcccaaaaccacaccgccuuaaccacaugggcaucugcucuugcggacuuuacaaacaccccggcguacccgucaaauggaaacgcuaa

SEQ ID NO: 5986 - RNA, 1473 nt, Artificial Sequence
  derived and/or modified protein sequence (opt11) from LASV(LASV242-NIG-2010;Clade II)__AIT17650__GPCstabilized
augggccaaauaaucaccuucuuccaagaagucccccacguuaucgaagaagucaugaauauaguccucaucgcccucucccucuuagccauccucaaaggcauauacaacgucgcuacaugcggacucuucggccucguauccuuccuccuccuaugcggacgguccugcucaaccaccuacaaaggcguauacgaacuacaaacccuagaacuugacauggccucccucaacaugaccaugccccucuccugcaccaaaaacaacucccaccauuacaucauggucggcaacgaaaccggacucgaacucacccucaccaacaucucuauaauaaaccacaaguucugcaaccucucugaugcccacaagaaaaaccuauacgaccacgcccucauguccaucaucucaacauuccaccucuccauccccaacuucaaccaguacgaagcaaugucuugcgacuucaacggcggcaaaaucucaguccaauacaaccugucccacaccuacgccgucgacgccgccaaccacugcggaaccauagccaauggcguccuccagaccuucaugcgcauggcauggggcggcuccuacaucgcccucgacuccggaugcgguuccugggacugcaucaugacaagcuaccaauaccucauaauacagaacacgaccugggaagaccacugccaauuuucccgucccagccccaucggguaucucgggcugcuaucccaacgcacccgcgacaucuacauuucccgucgccgccgcgguacuuucaccuggacccuaucagacucugaaggaaacgaaacccccggcggcuauugccuaacccgcuggaugcucaucgaagcagaacuaaaaugcuucggcaacacagcagucgccaagugcaacgaaaaacacgacgaagaguucugcgacaugcuccgccuauuugacuucaacaagcaagcaauccgccgccuaaaagcucccgcacaaaugucaauccaacucauaaacaaagcaguaaacgcacuuauaaacgaccaacuaaucaugaaaaaucaccuccgcgacaucauguguauccccuauugcaacuacucgaaauacugguaccucaaccacaccgucaccggccgcaccucacucccucggugcuggcucguuuccaacggcuccuaucuaaacgaaacccacuucucagacgacaucgaacaacaagccgacaacaugaucacagaacuccuccaaaaagaauacaucgaccgccaaggcaaaacaccccuagggcucgucgaccuauucguauucuccaccuccuucuaccucauauccauuuuccuccaccuagucaaaauucccacccaccgccacaucaucgguaaacccugccccaaaccccaccgccuuaaccacaugggcaucugcuccugcggccucuacaaacaucccggaguacccgucaaauggaaacgcuaa

SEQ ID NO: 5987 - RNA, 1473 nt, Artificial Sequence
  derived and/or modified protein sequence (opt11) from LASV(LASV246-NIG-2010;Clade II)__AIT17658__GPCstabilized
augggccaaauaaucacauucuuucaagaagucccccacguaauagaagaagucaugaacaucguacucaucgcccucucacuccuagccauacucaaaggcguauacaacgucgccaccuguggccucuuuggccucgucucauuccuucuccuaugcgggcgaucuugcucaaucacauacaagggcguauaugaacuccaaacccucgaacucgacauggcuaaccucaacaugaccaugccacucucaugcaccaaaaacaacucacaccacuacaucauggucggcaaugaaacaggccuagagcuaacccucaccaacaccuccaucaucaaccacaaauucugcaaccuaagcgacgcccacaagaaaaaccuauacgaccacgcgcuuaugucaaucauauccaccuuccaccucuccauccccaacuucaaccaguacgaagcaauguccugcgacuucaacggaggcaaaauauccguacaauacaaucucagccacacauacgcaggcgaugccgcggaccacugcggcaccaucgcuaacggcguccuccaaaccuucaugcgcauggccuggggcggaucauacaucgcccucgacagcgguugcggcucaugggacuguaucaugaccucguaccaauaccucaucauucaaaacaccaccugggaagaccacugccaauucagccgucccucgcccaugggcuaccuaggccuccuaucccaacguacucgcgacaucuacaucucccgacggcgccgcggcaccuucaccuggacacucucagacuccgagggaaaugaaaccccaggcggauacugccuaacacgguggaugcucauagaagccgaacucaaaugcuucggaaacacagccgucgcaaaaugcaacgaaaaacacgacgaggaguucugcgacaugcuucgccuuuucgacuucaacaaacaagccauccgccgacucaaaacaccagcacaaaugucuauccaacucaucaacaaagcagucaacgcccuaaucaacgaccaacucaucaugaaaaaccaccuccgcgacaucaugugcaucccauacuguaacuacucgaaauacugguaccucaaccacaccauaacgggcaaaaccucacuuccccgaugcuggcuagucagcaacggcagcuaccucaacgaaacucacuucuccgacgacaucgaacagcaagcagauaacaugaucacagaacuccuccaaaaagaauacaucgaccgacaaggcaaaacaccucuaggccuaguagaccuauucgucuucucaaccucuuucuaccucauaagcaucuuccuccaccucgugaaaaucccaacccaccgccacaucacuggcaagccuugccccaaaccacaccgccucaaccacauggguauaugcuccugcggccucuacaaacaccccggcgucccaguccgauggaagcgcuga

SEQ ID NO: 5988 - RNA, 1473 nt, Artificial Sequence
  derived and/or modified protein sequence (opt11) from LASV(LASV251-NIG-2010;Clade II)__AIT17666__GPCstabilized
augggccaaaucgucaccuucuuccaagaaguaccccacgucaucgaagaagucaugaacaucguccucaucgcccuaucacuccuugcaauccucaaaggcaucuacaacgucgcaaccugcggccucuucggccucgucagcuuccuacuacucugcggccgcagcugcucaaccacauacaaaggagucuacgaacuccaaacccuugaacucgacauggccucccucaacaugaccaugccccucuccugcacuaaaaacaauucccaccacuacaucauggucggcaacgaaaccggccucgaacucacccucacaaauacaucaaucauuaaucacaaguucugcaaccuuucagacgcccacaagaaaaaccuguacgaccacgcccucauguccauaaucagcaccuuccaucuauccauccccaacuucaaccaauacgaagccauguccugcgauuucaacggcggcaaaaucagcguccaauacaaccucucacacaccuacgccguagacgccgccaaccacugcggcacuaucgccaacggcguacuccaaaccuucaugcguauggcguggggaggcucguacauagcacuagacuccgguuguggaucaugggacugcaucaugaccuccuaccaauaccucaucauccaaaacaccaccugggaagaccacugccaauucucccgucccucccccauaggcuaccucggccuccucucccaacguacuagagacaucuacaucucgcggcgucgccgcggaaccuucaccuggacacuaucagacuccgaaggcaacgaaacccccggcggcuacugccucacacgauggaugcucauagaagccgaacucaaaugcuucggcaacaccgccgucgcuaaaugcaacgaaaaacacgacgaagaauuuugcgacaugcucagacuauucgacuucaacaaacaagccauccgccgccucaaaaccccugcccaaaugucaauucaacucaucaauaaggccgucaacgcacuaaucaaugaucaacuaaucaugaagaaucaccuacgcgacaucaugugcaucccguacugcaacuacuccaaguacugguaccucaaccacaccguuaccgguaaaaccucccuaccccgcugcuggcucgucuccaacggcucuuaccuaaacgaaacccacuucucugacgacauagaacaacaagccgacaacaugaucacagaacuccuucaaaaagaauacauggacagacaaggaaaaacuccccucggauuagucgaccuguucgucuucucuacaucauucuaccucauauccaucuuccuacaccucgucaaaauccccacucaccgccacauaaccggcaaaccaugccccaaaccacacagacucaaccacaugggcauaugcuccugcggccucuacaagcaccccggcgucccugucaaauggaaacgcuaa

SEQ ID NO: 5989 - RNA, 1473 nt, Artificial Sequence
  derived and/or modified protein sequence (opt11) from LASV(LASV253-NIG-2011;Clade II)__AIT17670__GPCstabilized
augggccaaaucaucaccuucuuccaagaaguaccacacguaaucgaagaagucaugaacauaguccucauagcacucucccuacucgccauacuuaaaggaauuuacaacguagcaaccugcggucucuucggccuugucuccuuccucuuacugugcggccgaagcugcuccacaacauacaaaggagucuacgaacuacagacccucgaacucgacauggcaucccucaacaugaccaugccccuauccuguaccaaaaacaacucacaccacuacaucaugguagguaacgaaacaggacuugaacuaacccucaccaacacuucaaucauaaaccacaaauucugcaaccucuccgacgcccacaaaaaaaaccucuacgaccacgccuugauguccaucauauccaccuuccaccucuccaucccaaacuuuaaccaauacgaagccauguccugcgacuucaacggaggcaaaauaucaguacaauauaaccuaucccacaccuacgcagucgacgccgccaaccacugcggcaccauagccaacggaguccugcagacauucaugcgaauggcaugggguggaucuuacaucgcucuagacuccgggugcggcuccugggacugcaucaugaccucauaucaauaccucaucauacaaaacaccaccugggaggaccacugucaauucucccgcccuucccccauaggcuaccuggggcuccuaucccaaagaacccgcgacauauacauaucccgccgucgucgaggcaccuucacauggacccucagcgacucagaaggcaacgaaacccccggcggcuacugccucacccguuggaugcuaauagaagcagaacucaaaugcuucggcaacaccgcggucgccaaaugcaacgagaaacacgacgaagaauucugcgacaugcuccgccuauucgacuucaacaaacaagcaauccgccgccuuaaagcccccgcccaaaugucaauccaacucaucaacaaagccguaaacgcacucaucaacgaccaacucaucaugaaaaaccaccuccgcgacauaaugugcauccccuacugcaacuacuccaaauacugguaccucaaccacaccgucaccggccgcaccucucucccccggugcuggcuugucucaaacggcuccuaccucaaugaaacccacuucuccgacgacauagaacaacaagccgacaacaugaucacagaacuccuccaaaaagaauacaucgaccgccaaggcaaaaccccccucggacuagucgaccucuucguuuucuccaccuccuucuaccucaucuccaucuuccuccaccucgucaaaauacccacccaccgucacaucaucggcaaaccaugccccaaaccccaccgccucaaccacaugggcauaugcuccugcggacuguacaaacaccccggaguaccaguaaaauggaaacgcuaa

SEQ ID NO: 5990 - RNA, 1473 nt, Artificial Sequence
  derived and/or modified protein sequence (opt11) from LASV(LASV254-NIG-2011;Clade II)__AIT17674__GPCstabilized
augggccaaaucaucaccuucuuccaagaagucccccacgucauugaagaagucaugaacaucguccucauugcccugucccuacucgccauccucaaaggcaucuacaacgucgcaaccugcggucuauuuggccucgucagcuuccuccugcuaugcggccguuccugcuccaccaccuacaaaggcgucuacgaacuucaaacccucgaacucgacaugacaaaucuaaacaugaccaugccccugucuugcaccaaaaacaacagccaccacuacaucauggucggcaacgaaaccggccuagaacucacccuaaccaacacauccaucaucaaccacaaauucugcaaccucuccgacgcccauaagaaaaaccucuauaaccacgcccucauguccauaaucucaacauuccaccucucaauaccaaauuuuaaccaauaugaagccauguccugcgacuucaacggcggcaaaaucucaguacaauacaaucucucccacucuuacgccguagacgcagccaaccacugcggaaccauagccaacgguguccuccagaccuucaugcgcauggccuggggaggaucauacaucgcccucgacagcggcugcggaaacugggacugcaucaugaccuccuaccaauaccucaucauucaaaacaccaccugggaagaccacugccaguucucccgccccagcccaaucggauaccuaggccuccucucccaaagaacccgcgacaucuacaucucccguagacgacguggcacauucaccuggacacuaucugacuccgaaggcaacgaaacccccgguggauacugccucacccgcuggaugcucauugaagccgaacucaaaugcuucggaaacacagcagucgccaaaugcaacgaaaaacaugacgaagaguucugcgacaugcuccgccucuucgacuucaacaaacaagccaucagacgccucaaaacccccgcacaagccaacauacaacucaucaauaaagccgucaaugcacucauaaacgaccaacucaucaugaaaaaccaccuccgagacauaauguguauccccuacugcaacuauuccaaauacugguaccuuaaccacaccgucaccgguaaaaccucccucccccgcugcuggcucguauccaacggcuccuaccucaacgaaacccacuucuccgacgacaucgaacaacaagcagacaacaugaucaccgaacuucuacaaaaagaauacauggacagacagggcaaaacgccgcucggacucgucgaccuauucgucuucagcaccuccuucuaccuaauauccaucuuccuacaccuggucaaaauucccacgcaccgacacguaaucggaaaacccugucccaaaccccaccgacucaaccauaugggcaucugcagcugcggccuuuacaaacaccccggcguccccgucaaauggaaacgcuaa

SEQ ID NO: 5991 - RNA, 1473 nt, Artificial Sequence
  derived and/or modified protein sequence (opt11) from LASV(LASV256-NIG-2010;Clade II)__AIT17678__GPCstabilized
augggccaaaucaucaccuucuuucaagaagucccccacgucaucgaagaagucaugaacaucguacucaucacccucucccuccuagcaauccuaaaaggcaucuacaacaucgccacguguggacucuucggacucgucuccuucuuacuacuaugcggccgauccuguucaaccaccuacaaaggcguguacgaacuccagacccucgaacuagauaugaccucccucaacaugacaaugccccucuccugcaccaaaaacaacucccaccauuacaucauggucggcaacgaaacaggccucgaacucacacucacaaacacguccauaaucaaccacaaauucuguaacuuauccgacgcucacaagaaaaaccucuacgaccacgcccuaauguccaucaucuccaccuuccaccucucaauccccaauuucaaccaguacgaagcgaugucaugugacuucaacggaggcaaaaucuccguccaauacaaccuaucccacaccuacgcagucgacgccgccaaccacugcggcaccauagccaacggcguacuccaaaccuucaugcgaauggccuggggcggcuccuacaucgcccucgacuccggcugcggauccugggacugcaucaugacaucauaccaauaucucauaauacaaaacacuacaugggaagaccacugccaauucucccgccccuccccaauaggauaucucggacuccucucacaacgcacucgcgacauuuacaucucacgccgccgccguggaaccuucaccuggacccuauccgacucagagggcaacgaaacgcccggcggcuacugccucacccgcuggaugcuuaucgaagcugaacucaaaugcuucggaaacaccgccgucgccaaaugcaacgaaaaacacgacgaagaguucugcgacaugcuccgccucuucgacuucaacaaacaagccauccgccgacuaaaaaccccagcccaaaugucaauacaacuaaucaacaaggcagucaacgcccuaauaaacgaccaacucaucaugaaaaaccaccucagagacaucauguguaucccauacugcaacuacuccaaguacugguaccucaaccauacugucacuggcaaaacaucacuuccccgaugcuggcuagucuccaacggcagcuaccuaaacgaaacccacuucagcgacgacaucgaacaacaagccgacaauaugaucaccgaacuccuccaaaaggaauauaucgaccgccaaggcaaaacaccccucggucuaguugaccucuucguauucuccaccuccuucuaccucaucagcauauuccuacaucuggugaaaauaccaacacaccgucacaucaucggaaaacccugccccaaaccacaccgccucaaccauaugggaauaugcuccugcggccucuacaaacaccccggcauccccgucaaauggaaacgauaa

SEQ ID NO: 5992 - RNA, 1473 nt, Artificial Sequence
  derived and/or modified protein sequence (opt11) from LASV(LASV267-NIG-2010;Clade II)__AIT17686__GPCstabilized
augggccagauaaucacauucuuccaagaagucccccacgucauagaagaaguaaugaacaucgucuugaucgcacucucccuccuagccauccucaaaggcaucuacaaugucgccacgugcggccuauucggccuagucucauuccuccuccuuugcggccgcuccugcuccacaaccuacaaaggcgucuacgaacuccaaacccucgagcuagacauggccucccucaacaugaccaugccccucuccugcaccaaaaacaacucccaccacuacaucauggucggcaacgaaacgggacuggaacucacccuaaccaacaccuccauaaucaaccacaaauucugcaaccucucagacgcccacaagaaaaaccucuacgaccacgcccucaugucaaucaucuccaccuuccaccucuccauccccaacuucaaucaauaugaagccauguccugcgacuuuaacggcggcaaaaucuccguccaauacaaccuuucccacaccuacgccguagacgccgcaaaccacugcggcacgauagccaacgguguauuacaaaccuucaugcgaauggcauggggcggcucauacaucgcccuugacagccgcugcggcuccugggacugcauaaugaccucuuaccaauaccuaaucauacaaaacacaaccugggaagaccacugccaauucucccgucccucccccaucggcuaccucggccuacucucccaacggacccgagacaucuacauaucacgacgccgaagaggcaccuucacuuggacacucuccgacuccgaagggaacgaaacucccggaggcuacugucucacccgcuggaugcuaauagaagccgaacucaaaugcuucggaaauacagccguagccaaaugcaacgaaaaacacgacgaagaguucugcgauaugcuccgacucuuugacuuuaacaaacaagccauccgccgacucaaaacccccgcccaaaugucaauacaacuaaucaacaaagccgucaacgcccucauaaacgaccaacucauuaugaaaaaccaccuacgcgacaucaugugcaucccauacugcaacuacuccaaauacugguacuuaaaccacaccguuaccgguaaaacaucacuaccccguugcuggcucgucuccaacggaagcuaccucaacgaaacacacuucuccgaugacaucgaacaacaagccgacaacaugaucaccgaacuccuccaaaaagaauacauggaccgccaaggaaaaacaccccucggucuagucgaccucuucguauucucaacaucuuucuaccuaauauccaucuuucuccaucuaaucaaaaucccaacccaccgccacgucauaggcaaacccugccccaaaccccacagacucaaucacaugggaaucugcuccugcggacucuacaaacacccaggaguccccgucaaauggaaacgcuga

SEQ ID NO: 5993 - RNA, 1473 nt, Artificial Sequence
  derived and/or modified protein sequence (opt11) from LASV(LASV271-NIG-2010;Clade II)__AIT17690__GPCstabilized
augggccaaaucaucaccuucuuucaagaagucccacacguuaucgaagaagucaugaacaucguacucauagcacucucccuccucgcuauccuaaaaggcaucuacaacguagccacuugcggacucuucggccuagucucauuccuacuacucugcggacgcuccugcagcaccaccuacaaaggcguauacgaacuccaaacacucgaacucgacauggcaucucucaauaugacaaugccccucuccuguaccaaaaacaacucacaccacuacaucaugguuggaaacgaaaccggacuagaacucacacucacaaacaccuccaucaucaaccacaaauucugcaaccucucggacgcgcauaagaaaaaccucuacgaucaugcccucaugucaaucaucucgaccuuccaccuaagcauccccaacuucaaccaguacgaagcaauguccugcgacuucaacggcggcaaaauuuccguccaguacaaccucucucacgccuacgccguagaugccgccagccacugcggcacagucgccaacggcguucuccaaaccuucaugcgcauggcauggggaggcuccuacaucgcccucgacuccggcugcggcuccugggacugcaucaugaccuccuaccaauacuuaaucauccaaaacaccaccugggaagaccacugccaauucucccgaccaagccccaucggcuaccucggccuccucucccaacgaacccgcgacauauacaucucacgccgcagacgcggcacauucaccuggacccucucugacuccgaaggcaacgaaaccccaggcggauacugccuaacccgcuggaugcuaaucgaagccgaacuaaaaugcuucggcaacacagcggucgccaaaugcaacgaaaaacacgacgaagaguucugcgacaugcuccgacucuucgacuucaauaaacaagccaucagacgccucaaaaccccagcacaaaugucuauucaacucaucaacaaagccgucaacgcccugaucaacgaccaacucaucaugaaaaaccaccuccgagacauaaugugcauccccuacugcaacuacucaaaauacugguaccugaaccacaccgucaccggccgcacaucacucccccgaugcuggcucguaagcaacgguagcuaccuuaacgaaacccacuucuccgacgacauagaacaacaagccgacaacaugaucaccgaacuacuacaaaaagaauacauggaccgacaaggaaaaacaccccuaggacucgucgaccucuucgucuuuuccaccucauucuaccucaucuccauauuucuacaucucgucaaaauuccaacccaccgccacgucaucggcaaacccugucccaaaccacaccgccucaaccacaugggcaucugcuccugcggccuauacaaacaccccggaguacccgugaaguggaaacgcuaa

SEQ ID NO: 5994 - RNA, 1473 nt, Artificial Sequence
  derived and/or modified protein sequence (opt11) from LASV(LASV274-NIG-2010;Clade II)__AIT17694__GPCstabilized
augggccaaaucaucaccuucuuccaagaagucccccacgucaucgaagaagucaugaacaucguccucaucgcacucucacuccucgccauccugaaaggcaucuacaacguagccacaugcggccucuucggccuaguaucauuccuacuacuaugcggacgaucuugcucuaccaucuacaaaggaguuuacgaacuccaaacacucgaacuagacauggccucccuaaacaugaccaugccccucaguugcaccaaaaacaacucccaccacuacauaauggucggcaacgaaaccggccucgaacuaacccuaacuaacacauccaucaucaaccacaaauucugcaaccuguccgacgcccacaagaaaaaccuauacgaccacgcccucaugucaaucaucuccaccuuccaccucuccaucccaaacuucaaccaauacgaagccauguccugcgauuucaacggcggcaaaaucuccguccaauacaaccucucccacaccuacgcugucgacgcagccaaccacugcggcacaaucgccaacggcguccuacaaaccuucaugcgcauggccuggggcggaucuuacaucgcucuagacuccggcugcggcuccugggacugcauaaugaccuccuaccaauaccucaucauccagaacacaacaugggaagaccacugccaauucucacgccccagccccaucggcuaccucggccuacuaucacaacgcacccgcgacaucuacaucucccgcaggcgacgaggcaccuucacauggacacuaucagacagcgaaggaaaugagacccccggcggcuacugccucacccgcuggaugcuaaucgaagccgaacuuaaaugcuucggcaacaccgccgucgccaaaugcaacgaaaaacacgacgaggaguucugugacaugcucagacucuucgacuucaacaaacaagcaauccgccgccuaaaaacucccgcacaaauguccauccaacuaaucaacaaagccguuaacgcgcucaucaacgaccaacugaucaugaaaaaccaccuccgugacauaaugugcauccccuacugcaacuacuccaaauacugguaccucaaucacacaguaacagguaaaacgucccucccccgcugcuggcucgucuccaacggcucguaccucaacgaaacccacuucucugacgacaucgaacaacaagccgauaauaugaucaccgaacuacuacaaaaagaauacaucgaccgacaaggcaaaacaccccucggccucgucgaccucuuugucuucuccaccucauucuaccuaaucuccaucuuccuccaccucgucaagaucccuacccaccgccauguagucggcaaacccugccccaaaccccaccgacucaaccacaugggaaucugcagcugcggccuuuauaaacacccaggcguccccgucaaauggaaacgcuaa

SEQ ID NO: 5995 - RNA, 1473 nt, Artificial Sequence
  derived and/or modified protein sequence (opt11) from LASV(LASV719-NIG-2009;Clade II)__AIT17704__GPCstabilized
auggggcaaaucaucaccuucuuccaagaaguaccccacgucauagaagaagucaugaacaucguccucaucgcccuaagccuccucgccauacucaaaggcaucuacaacguugcaaccugcggccucuucggucuaguauccuuccuccuucuaugcggccgaucaugcuccacaaccuacaaaggagucuacgaacuccaaacccuagaacucgauauggccucccuaaacaugacaaugccacucucgugcaccaaaaacaacucccaccacuacaucaugguaggcaacgaaacgggccuagagcugacccucaccaacacauccaucaucaaccacaaauucugcaaccuuucugacgcccacaagaaaaaucucuacgaccacgccuuaauguccauaauauccaccuuccaccuauccauacccaacuucaaccaauacgaagccauguccugcgacuucaacgguggcaaaauaagcguacaauacaaucucucccauacauacgccgucgacgccgccaaucacugcggaacaauagccaacggcguccuccaaaccuucaugcgaauggccuggggcggcuccuacaucgcccuagacuccggcugcggaucaugggacugcauaaugaccucuuaccaauacuuaaucauccaaaacaccaccugggaagaccacugccaauucucccgcccaucacccaucggcuaccucggccuccuuucccagcgcacccgagacaucuacaucucacgccgccgcagaggcaccuucacauggacacucucugacuccgaaggaaacgaaacccccggcggcuacugccucacccguuggaugcucaucgaggccgaacucaaaugcuucggcaacaccgccguagcaaaaugcaacgaaaaacacgacgaagaguucugugacaugcuccgccuauucgacuucaacaaacaagccauccgccgccucaaaacacccgcccaaaugagcauucaacucauaaauaaagccgucaacgcccucaucaaugaccaacuaauuaugaaaaaccaccucagagacauaaugugcauuccauacuguaacuacuccaaauacugguaccucaaccacaccgucacuggcaaaacaucccucccccgaugcuggcucgucuccaacggcuccuaccuaaacgaaacccacuucagcgacgacaucgagcaacaggcggacaauaugauaacugagcuccuccaaaaagaguacaucgaccgccaagggaaaaccccacucggccucgucgaccuauucgucuucaguaccuccuucuaccucaucuccaucuuccugcaccucguaaaaauccccacccaccgccaugucauugguaaaccaugccccaaaccccaccgacucaaccacaugggcauaugcuccugcggccucuacaagcaccccggaguccccgucaaauggaaacgcuaa

SEQ ID NO: 5996 - RNA, 1473 nt, Artificial Sequence
  derived and/or modified protein sequence (opt11) from LASV(LASV738-NIG-2009;Clade II)__AIT17712__GPCstabilized
augggacaaaucaucaccuucuuccaggaaguaccccacguaaucgaagaagucaugaacaucguccucaucgcacuaucccuacucgcgauccucaaaggaaucuacaacgucgcuaccugcggccuauucggucucguuucuuuccuccuacucugcggaagaucaugcaguacaaccuacaaaggagucuacgagcuucaaacccuugaacucgacauggccucccucaacaugaccaugccccucuccugcaccaaaaacaacucacaccacuacaucaugguaggcaacgaaaccggccucgaacucacccucacaaacaccuccaucaucaaccacaaauucugcaaccuaucggacgcucacaagaaaaaccucuacgaccacgcccucauguccaucaucuccaccuuccaccucuccauaccaaacuucaaccaauacgaagccauguccugcgacuucaacggcggcaaaauauccguccaauacaaucucagccacacuuacgccgucgacgccgccaaccacugcggcacgaucgccaacggcguccuccaaaccuucaugcgcauggccuggggcggcuccuacauagcccucgauuccggaugcggagcuugggacugcaucaugaccucauaccaguaucucaucauucaaaacacuaccugggaagaccacugccaauucucccgaccaucccccaucggcuaccucggucuccucucccagcgaacacgcgacauauacaucucccgacgcagacgcggaaccuucaccuggacccuguccgacuccgaaggcaacgaaacgcccggaggauacugccuaacccgcuggaugcuaauagaagcugaacucaaaugcuucggcaacaccgccgucgccaagugcaacgaaaaacacgacgaagaguucugcgacaugcucagacucuucgacuucaacaaacaagccaucaugcgccucaaaacacccgcccaaauguccauccaacucaucaacaaagcaguaaacgcccucaucaacgaccaacuaauaaugaagaaccaccuucgggacaucaugugcauccccuacugcaacuacuccaaauacugguaccucaaucacacaguaaccggcaagaccucacucccccgaugcuggcucguaucuaauggcuccuaccucaacgaaacccacuucuccgaugacaucgaacaacaagccgacaacaugauaacagaaaugcuccaaaaagaauacaucgaccgccaaggcaaaacaccccucggccucgucgaccucuucguauucuccaccaguuucuaccuaaucucuaucuuccuacaccuagugaaaauaccuacccaccgccacgucaucggcaaacccugcccgaaaccacaccgccucaaccacaugggcaucugcucaugcggacucuacaagcacccaggaguccccguccgguggaaacgauaa

SEQ ID NO: 5997 - RNA, 1473 nt, Artificial Sequence
  derived and/or modified protein sequence (opt11) from LASV(LASV966-NIG-2009;Clade II)__AIT17718__GPCstabilized
augggccagauaaucaccuucuuccaagaggucccccacgucaucgaagaagucaugaacaucguacucaucgcccuuucccuccucgccauccuaaaaggcaucuacaacgucgccacaugcggacucuucggccuaguuuccuuccuccuacuaugcggacgcuccugcuccaccaccuacaaaggagucuacgaacuacaaacccuugaacucgacauggcaucgcucaacaugacaaugccccucuccugcaccaaaaacaacucccaccacuauaucagaguuggcaacgaaacuggacuggaacucacccuaaccaacgccuccauaaucaaccacaaauucugcaaccucuccgacgcacacaaaaaaaaccucuaugaccacgcccucaugucaauuaucucuaccuuccaccucuccauccccaacuucaaccaauacgaggcaaugagcugcgacuucaacggcggcaaaaucagcguccaauacaaccucucucacgccuacgccaucgacgccgccaaccacugcgguaccgucgcaaacggcguccuacaaaccuucaugcgaauggccuggggcggcagcuacauugcccuagacuccggcugcggcaacugggacugcaucaugacauccuaccaauaccucaucauucaaaacacaaccugggaagaccacugccaauuuucacgccccuccccuaucggguaccuuggccuccucagccaacgaacgcgcgacaucuacauaucccgccgccgucgcggcacuuucacauggacacucucggacuccgagggaaacgaaacccccggaggcuacugccucacccgcuggaugcucauagaagccgaacugaaaugcuucggcaacacugcggucgcaaaaugcaacgaaaaacaugacgaagaauucugcgacaugcuccgccucuucgacuucaacaaacaggccauccgaagacuaaaaacucccgcccaaauguccauccaacucauaaacaaagccgucaacgcccucauaaacgaccaacucauaaugaaaaaccaccuccgagacauaaugugcauccccuacugcaacuacagcaaauacugguaccuaaaccacaccgucaccggaaaaacuucacuuccccgcuguuggcucgucuccaacggaucauaccuaaacgaaacccacuucuccgacgacaucgaacaacaagccgacaacaugaucacagaacuauuacagaaagaauacauggaucgacaaggcaaaaccccacucggauuaguagaccucuucgucuucucaaccucauucuaccucaucuccaucuuccuccaccucguaaaaauaccaacccaccgccacgucaucggcaaacccugcccaaaaccccaccgccucaaccacauggguauauguuccugcgguuucuacaaacacccaggcgucccagucaaauggaaacgcuaa

SEQ ID NO: 5998 - RNA, 1473 nt, Artificial Sequence
  derived and/or modified protein sequence (opt11) from LASV(LASV969-NIG-2009;Clade II)__AIT17724__GPCstabilized
augggccaaaucauaacauucuuccaagaaguaccccacgucauagaagaagucaugaauaucguccuuaucgcccucucccuccucgccauccucaaaggcaucuacaacgucgcaacgugcggccucuucggccuugucucauuccuacuccucugcggccgcagcugcucaacgacauacaaaggcguauacgaacuacagacccucgaacucgacauggccaaccuuaacaugaccaugccccucuccugcaccaaaaacaacucacaccacuacauuauggucggcaacgaaacaggccucgaacucacacucacuaacaccuccauaaucaaccacaaguucugcaaccuaucagaugcccacaagaaaaacuuauacgaccacgcccugauguccauaauauccaccuuucaccucucaauaccaaacuucaaccaauacgaagcaaugucaugcgacuucaacgggggcaaaaucuccguccaauacaaccuaucccacacauacgcagucgaugcugccaaccacugcggcaccgucgccaacggcguccuccaaaccuuuaugcgcauggcauggggcggcuccuacaucgcacucgacucgggcugcggcuccugggacugcaucaugaccucauaccaauaccucaucauacaaaacacaacuugggaagaccacugccaauucucccgacccucccccaucggcuaccucggccugcucucacaacgcacucgagacauauacaucucccgacgacgucgcgguacauucaccuggacccucuccgacagcgaaggcaacgaaaccccaggcggcuacugucucacccgauggaugcucaucgaagccgaacuaaaaugcuuuggcaacaccgccgucgccaaaugcaacgaaaaacacgacgaggaguucugcgacaugcuacgccucuucgacuucaacaaacaagcuauccgccgccucaaaacccccgcccagauguccauacagcucauaaacaaagccgucaacgcccucaucaacgaccaacuaaucaugaaaaaccaucuacgcgacauaaugugcauccccuacugcaacuacuccaaauacugguaucucaaccacaccguaacuggcaaaaccucccucccacguugcuggcucgucuccaacggaagcuaccucaacgaaacccacuucucugacgacauagaacaacaggcagacaacaugaucaccgaacuacugcaaaaagaauacauggaccggcaaggaaaaacaccccuaggccucguagaucuauucgucuucuccacauccuucuaccucaucucaauauuccuccacuuaguaaaaauccccacccaccgacacaucaugggaaaacccugccccaagccccacagauuaaaccacaugggaaucugcucauguggccuauacaaacacccaggaguccccgucaaguggaaacgcuaa

SEQ ID NO: 5999 - RNA, 1473 nt, Artificial Sequence
  derived and/or modified protein sequence (opt11) from LASV(LASV971-NIG-2009;Clade II)__AIT17728__GPCstabilized
augggccaaaucaucaccuucuuccaagaggucccccacgucauagaagaaguaaugaacauuguucucauugcccuaucccuccucgccauccucaaagguaucuacaacgucgcaaccugcggccucuucggccuagucuccuuccuccugcucugcggccguucaugcucaaccaccuauaaaggcgucuacgaacuccaaacccucgaacucgacaugggcucccucaacaugaccaugccccucuccugcaccaaaaacaacucacaccacuacaucauggucggaaacgagaccggacucgaacuaacacuaaccaacaccuccaucaucaaccacaaguucugcaaccucagcgacgcccacaagaaaaaccucuacgaccacgcccucauguccaucauauccaccuuccaccuaucaauccccaacuucaaccaauacgaagccaugagcugcgacuucaacggaggcaaaaucucgguccaauacaaccucucccacaccuacgccguugacgccgccaaccacugcggcacaaucgccaacggaguccuacagaccuucaugcgcauggccugggguggaucauacaucgcccucgacuccggcugcggcucaugggacugcaucaugacuagcuaccaauaccuaauaauccaaaacaccacaugggaagaucauugccaauuuucccgcccuagccccaucggcuaccucggccuucucucacaacguacccgcgacauauacaucagccgucggcgacgaggaacauucaccuggacacuaucugacuccgaaggcaacgaaaccccuggcggcuacugccuaacgcgcuggaugcucaucgaagccgaacucaaaugcuuuggcaacaccgccgucgccaaaugcaacgaaaaacacgacgaggaguucugcgacaugcuacgccucuucgacuuuaacaaacaagcaauacggcgacuuaaaacacccgcccaaaugagcauccaacucaucaacaaagccguuaacgcccuaaucaacgaccaacuaaucaugaaaaaccaccuccgcgacaucaugugcauccccuauuguaauuacucaaaauacugguaccuaaaccacaccguaaccgggaagaccagccugccacgcugcuggcuaguaucaaacggcuccuaccucaacgaaacucacuuuuccgacgacauagaacaacaagccgacaacaugauaacagaacuacuacaaaaagaauacauggaccgacaaggcaaaacaccccucggccuaguagaccucuucgucuucuccacauccuucuaccucaucagcaucuuccuacaccucgucaaaauccccacacaccgccacgucaucggcaaaccaugcccaaaaccccaccgacuaaaucacaugggaaucugcucaugcggccucuacaaacaccccggagucccagucaaauggaaacgcuaa

SEQ ID NO: 6000 - RNA, 1473 nt, Artificial Sequence
  derived and/or modified protein sequence (opt11) from LASV(LASV975-NIG-2009;Clade II)__AIT17732__GPCstabilized
augggccaaauaaucaccuucuuccaagaaguaccccacgucaucgaagaagucaugaacaucguccucaucgcccucucgcuacucgcaauccuaaaaggcaucuacaacguagccacaugcggacucuucggacucgucuccuuccuccuccucugcggccgcagcugcagcaccacauacaaaggcgucuacgaacuccaaacacucgagcucgacauggcaucccucaacaugacaaugccuuuaucaugcaccaaaaacaacucccaccacuacaucauggucggcaacgagacaggccucgaauuaacccugaccaacaccuccauaaucaaccacaaguucugcaaccuuucagacgcacacaagaaaaaccuauacgaccacgcacucauguccaucaucucaacauuccaccuuucaauccccaacuucaaccaauacgaagccaugagcugcgacuucaacggcggcaaaauauccguccaguacaaucuuucccacacguacgccguagacgccgcuaaccacugcggcaccaucgccaacggcguccuccaaaccuucaugcgaauggccuggggaggcucauacauagcccucgacucaggcugcggcucuugggacugcaucaugacuagcuaccaauaccucaucauacaaaacacaaccugggaagaucacugccaauucagcagacccuccccaaucggauaccuuggacuacuaagccaacgcacgcgagacaucuacaucucacgacgccgccgaggcaccuucaccuggacccuauccgacucagaaggaaacgaaacccccggcgguuacugccucacacgcuggaugcuuaucgaagccgaacuaaaaugcuucggaaacaccgccguagccaaaugcaacgaaaagcaugacgaagaguucugcgacaugcuccggcuauucgacuucaacaaacaggcaauccgccgccucaaaacccccgcccaaaugucaauacaacucaucaauaaagccgucaacgcucucaucaacgaccagcuaauaaugaaaaaccaccuccgcgacauuaugugcauccccuacuguaacuacucuaaguacugguaccuaaaccacaccgucaccggaaagaccucucuaccacgcugcuggcucgucucaaacggcuccuaccuaaacgaaacucacuucucagacgacaucgaacaacaagccgacaacaugaucacagaacuuuuacaaaaagaauacaucgaccgccaaggcaaaaccccacucggucucgucgaccuauucguauuuuccacaucuuuuuaccucauuagcauauuccuccaccucgucaaaauccccacccaccgccauaucgucggcaaacccugcccgaaaccucaccgucucaaccacaugggcaucugcagcugcggccuguacaaacaccccggcguccccguaaaauggaaacgcuga

SEQ ID NO: 6001 - RNA, 1473 nt, Artificial Sequence
  derived and/or modified protein sequence (opt11) from LASV(LASV976-NIG-2009;Clade II)__AIT17736__GPCstabilized
augggccaaauagucaccuucuuccaagaagucccgcaugucaucgaagaaguaaugaacaucguucucauagcccuuucacucuuagccauccucaaaggcaucuacaacguagcaaccugcggccucuucggccucgucagcuuccuccuucucugcggacgguccugcuccaccaccuacaaaggcguauacgaacuccaaacccucgaacuagacauggcaucccucaacaugaccaugccccucuccugcaccaaaaacaacucccaccacuacauuaugguagguaacgaaacuggccuggaacucacccucacaaacaccuccaucauaaaccacaaauucugcaaucucuccgacgcccacaagaaagaccucuacgaccacgcccucauguccauaauauccaccuuccaucucuccauccccaacuucaaccaguacgaagccauguccugcgacuucaacggcggaaaaaucuccguccaauacaaccuaucccacaccuacgccgucgacgccgcgaaccacugcggcaccaucgccaacggcguccuucagaccuucaugcgcauggccuggggcggcuccuacaucgcacuggacucaggcugcggauccugggacugcauaaugaccuccuaccaauaccucauaauacaaaacaccacaugggaagaccacugccaauucucccgcccuucccccaucggauaccucggucuccucagccaacgcacacgagauaucuacaucucccgcagacgacgaggaaccuucaccuggacacucucggacuccgaaggaaacgaaacccccggcggauacugccucacacgcuggaugcuaaucgaagccgaguuaaaaugcuucggcaauaccgccguagcaaaaugcaacgaaaaacacgacgaagaguucugcgacaugcuccgacucuucgacuucaacaaacaagcuaucaugcgccucaaaacccccgcccaaaugucaauccagcucauuaauaaagccgucaacgcccucauuaacgaccagcuaaucaugaaaaaccaccuacgcgacaucaugugcauccccuacugcaacuacuccaaauacugguaccuuaaucacaccgucaccggcaaaacaucccucccacgcugcuggcuugucuccaacggcucauaccugaacgaaacccgauucuccgaugacaucgaacaacaagcggacaacaugaucaccgaaauguugcaaaaggaauaucucgaucgacaaggcaaaacaccccucggacucgucgaccucuucgucuucucuaccuccuuuuaccuaaucucaaucuuccuacaccucgucaaaauccccacccaccgacacaucaucggcaaacccugccccaaaccacacagacucaaccacaugggcauuugcucuugcggccucuacaaacacccaggaguaccagucaaauggaagcgguaa

SEQ ID NO: 6002 - RNA, 1473 nt, Artificial Sequence
  derived and/or modified protein sequence (opt11) from LASV(LASV978-NIG-2009;Clade II)__AIT17744__GPCstabilized
augggacagauaaucacauucuuccaagaaguaccucacgucauagaagaagucaugaacaucguacuaaucgcccucucacuccucgccaucuuaaagggcaucuacaacgucgcaaccugcggccuauucggccuaauguccuuucuacugcuaugcggccgaucaugcucaaccaccuacaaaggcguauacgaacuccaaacccuagaacucgacauggccaaccucaacaugaccaugccccuaucuugcaccaaaaacaacucccaccacuacauaauggucggcaacgagaccggccucgaacucacucucaccaauaccuccauaaucaaccacaaauucugcaaccucuccgacgcccacaagaaaaaccucuacgaccacgcccugauguccaucauauccaccuuccacuuaucaauaccaaacuucaaccaauacgaagccauguccugugacuucaacggcgguaaaaucagcguccaauacaaccuaucccacgccuacgcaguggacgccgcuaaccacugugguaccaucgcaaacggcguccuccaaaccuucaugcgaauggcauggggcgguagcuacaucgcccucgacuccggcugcggcucaugggacugcaucaugaccuccuaccaauaccuaaucauacaaaacaccucgugggaagaccauugccaauucucacgccccucccccaucggauaccuuggccuacuaucacaacgcacccgagacaucuacaucuccagacgacgacggggcacuuucaccuggaccuuauccgacucagaaggcaacgaaacccccggcggcuauugccuaacccgcuggaugcuaaucgaagccgaacucaaaugcuucggcaacaccgcagucgcaaaaugcaacgaaaaacacgacgaagaguucugcgacaugcuccgccuauucgacuuuaacaaacaagccauccgccgccucaaaaccccugcucaaauguccauccaacuaaucaacaaagccgucaacgcccucaucaacgaccaacucaucaugaaaaaccaccuccgugacaucaugugcauacccuacugcaacuacucaaaauacugguaccuaaaccacaccgucaccggcaaaaccucccucccccgaugcuggcugguaucaaacggcuccuaccucaacgaaacacacuucuccgacgacaucgaacaacaagccgacaacaugaucaccgaacuccuccaaaaagaauacauagaccgacaaggcaaaaccccucuagggcuaguagaccuuuucgucuucagcaccuccuucuaccuuaucuccaucuuccuccaccucgucaaaauccccacccaccgccacgucaucggcaaaccaugccccaaaccccaccgccucaaccacaugggcaucugcucaugcggacuauauaaacacccaggcguccccgucaaauggaaacgcuag

SEQ ID NO: 6003 - RNA, 1473 nt, Artificial Sequence
  derived and/or modified protein sequence (opt11) from LASV(LASV981-NIG-2009;Clade II)__AIT17752__GPCstabilized
augggacaaauuauaacauucuuccacgaaguaccgcacgucaucgaagaagucaugaacaucguccucauagcacucucccuccuugccauccucaaaggcaucuacaacgucgcaaccugcggccucuucggccucguaucauuccuccuccucugcggccgauccugcucuaccaccuacaaaggcgucuacgaacuccaaacccuagaacuagacauggcaucgcucaacaugacaaugccccuauccugcaccaaaaauaacucacaccacuacauaauggucggcaacgaaaccggccuagaacuuacccucacuaacacauccaucaucaaccacaaauucugcaaccucuccgacgcccacaagaaaaaccucuacgaccacgcccucauguccaucauuagcaccuuccaucuuucaaucccaaacuucaaccaauacgaagccaugucuugcgacuucaacggaggaaaaaucuccguccaauacaaccucucccacaccuacgcuaucgacgcagccaaucacugcggcaccaucgcaaacggcguacuccaaaccuucaugcgaauggccuggggcggcuccuacaucgcccuugacucaggcugcggauccugggacugcaucaugaccuccuaccaauaccucaucauccaaaacaccaccugggaagaccacugccaguucucacgcccuucuccuaucgguuaccuaggucuacucucccaaagaacucgcgacaucuacauuucacgccgcagacgcggcaccuucaccuggacccucucggacucagaaggcaacgaaaccccuggaggguacugccucacacgcuggaugcucauagaggccgaacucaaauguuuuggcaacaccgccgucgccaaaugcaacgaaaaacacgacgaagaguucugcgacaugcucagacucuucgacuucaacaaacaagccauacgccgccucaaaacccccgcccaaauguccauccaacugaucaacaaagccguaaacgcccuaaucaacgaccaacucaucaugaagaaccaccuacgcgacauaaugugcaucccauacugcaacuacagcaaauacugguaucucaaccacaccguaacaggcaaaacaucccucccccgcugcuggcucguauccaacggaucauacuuaaacgaaacucacuucuccgacgacaucgaacaacaagccgacaacaugaucacagaacuacuacagaaagaauauauagaccgacaaggcaaaaccccucucggccuaguggaccuauucguuuucuccaccucauucuaccuuaucucaaucuuccuccaccugguuaaaauccccacacaccgccaugucauaggcaagcccugccccaaaccccaccgccuaaaccacaugggcaucugcagcugcggacucuacaagcaccccggcguccccgucaaauggaaacgcuaa

SEQ ID NO: 6004 - RNA, 1473 nt, Artificial Sequence
  derived and/or modified protein sequence (opt11) from LASV(LASV982-NIG-2009;Clade II)__AIT17756__GPCstabilized
augggccaaauaaucaccuucuuccaagaagucccccacgucaucgaagaagucaugaacaucguccuaaucgcccucucgcuccucgccauacuuaaaggcaucuacaacguagccacaugcggccucuuuggccuuguuuccuuccuccuccuaugcggucgauccugcucuaucaccuacaaaggcgucuacgagcuccaaacacucgaacuggacauggccucgcuuaacaugaccaugccccucucaugcaccaaaaacaacucacaccacuacauaauggucggcaacgaaacaggucucgaacucacccucaccaacaccuccauaaucaaccacaaauucugcaaccuauccgacgcgcauaagaaaaaccucuacgaccaugcacucaugucaauaaucuccaccuuccaccucuccauaccaaacuucaaccaauacgaagccaugagcugcgacuucaacgguggcaaaaucuccguccaauacaaccuaucacacaccuacgcaguagacgccgccaaccacugcggcaccaucgcaaacggaguccuacaaacuuucaugcgcauggccuggggcggcucauacauugcacucgacucaggcugcggcuccugggacugcaucaugacauccuaccaauaccuaauuauacaaaauacaaccugggaagaccacugccaauucucgcgccccucucccaucggauaccucggacuccucagccaacgcacacgcgacaucuacaucucccgccgccgccgcggcaccuucacauggacacucucagacucggaaggcaacgaaacccccggaggauacugccuaacccgcuggaugcucaucgaagcagaacucaaaugcuucggcaacaccgccgucgccaaaugcaacgaaaaacacgacgaagaauuuugcgacaugcuacgccucuucgacuucaacaaacaagccauacgccgacucaaagcccccgcccaaauguccauccaacucaucaacaaggccgucaacgcccucaucaaugaccaacucaucaugaaaaaccaccuccgcgacaucaugugcauccccuacugcaacuacucaaaauacugguaccuuaaccacacagucaccggucguaccucccuaccccgcugcuggcucgucucaaacggcuccuaccuaaacgaaacccacuucagcgacgacauagaacaacaagccgacaacaugauaaccgaacuccuacaaaaagaguacaucgaucgacagggcaagaccccacuuggccuagucgaucuauuugucuucucaaccagcuucuaccucauauccaucuuccuccaccucguaaaaauccccacccaccgucauaucauaggaaaacccugcccaaaaccucaccgccucaaccacaugggcaucugcuccugcggacucuacaaacaccccggcgugccaguuaaauggaaacgauaa

SEQ ID NO: 6005 - RNA, 1473 nt, Artificial Sequence
  derived and/or modified protein sequence (opt11) from LASV(LASV988-NIG-2009;Clade II)__AIT17758__GPCstabilized
augggccaaaucauaaccuucuuccaagaagucccucacguaaucgaagaagucaugaacauaguccuaaucgcccuuucccuccuggcuauccugaaaggcaucuauaacgucgccacaugcggcuuauucgguuuggucagcuuccuccuccucugcggccgcucgugcuccaccaccuacaaaggcguauacgaacuccagacccucgaacucaacauggccagccucaacaugacaaugccccuaucaugcaccaaaaacaacucacaccacuacauaaugguaggaaacgaaaccggacucgagcucacccucaccaacaccuccauaaucaaccacaaauucugcaaccucuccgacgcacacaaacgcaaccucuacgaccacgcccucaugucaauaauaagcaccuuccaucucuccauccccaacuucaaccaauaugaagccauguccugcgauuucaacgguggcaaaaucucaguccaguacaaccucucccacacauacgccgucgacgccgcaaaacacugcggaaccaucgccaacggcguacuacaaaccuucaugcgcauggccuggggaggcuccuacaucgcucucgacagcggcugcggcuccugggacugcaucaugaccuccuaccaauaccuaauaauccaaaacaccaccugggaagaucacugcgaguucagucgccccucccccauuggcuaucuaggccuacucucccaaaggacccgcgacaucuacaucucccgaagaagacgcggaaccuucacauggacccucucagacuccgaagguaacgagacucccgguggcuacugccucacccgcuggaugcucaucgaagccgagcugaaaugcuucggcaacacagcaguagccaaaugcaacgaaaaacacgacgaagaguucugcgacaugcuacgacucuuugacuucaacaaacaggccauccgccgacucaaagcccccgcucaaauguccauccaacucaucaacaaagcuguaaacgcccucaucaacgaccaacuuaucaugaaaaaccaccuccgagacaucaugugcauccccuacugcaacuacuccaaauauugguaccuaaaccauaccgucaccggcaaaaccucccuaccacgcugcuggcucguauccaacggcucauaccucaacgaaacccacuuuuccgacgacauugaacaacaagccgacaacaugauaacggaacuccuccaaaaagaauacauagaccgccaaggcaaaacaccccuaggccuagucgaccuauucguuuucuccaccucauucuaccucaucuccaucuuucuccaccucgucaaaauaccaacccaccggcacgucaucggcaaaccaugccccaaaccacaccgccucaaccacaugggcaucugcuccugcggacucuacaaacaccccggcguaccagucaaauggaaacgcuaa

SEQ ID NO: 6006 - RNA, 1473 nt, Artificial Sequence
  derived and/or modified protein sequence (opt11) from LASV(LASV989-NIG-2009;Clade II)__AIT17762__GPCstabilized
augggccaaaucaucaccuucuuccaagaaguuccccacguaaucgaagaagucaugaacaucguacuuaucgcacucucccuacuagccauccucaaaggaaucuacaacguagcuaccugcggccucuucggccuugucucauuucuccuccugugcggccgcuccugcucaaccaccuacaaaggcgucuacgaacuccaaacacuagaacucgauauggccucacuaaauaugaccaugccucucuccugcaccaaaaacaacagucaccacuacauaauggucggaaacgaaaccggccucgaacucacacucaccaacaccuccaucaucucccacaaauucugcaaccuaucggacgcccacaagaaaaaccucuaugaccacgcccucauguccauaauauccaccuuccaucucuccauccccaacuucaaccaauacgaagccauguccugcgauuucaacggcggaaaaaucucuguccaauacaaccucucccacaccuacgccguagacgccgccaaucacugcggcaccaucgccaacggcguccuacaaaccuucaugcgcauggccugggguggcuccuacaucgcacuagacucaggaugcggcuccugggacugcaucaugaccuccuaccaauaccucaucauucaaaacaccaccugggaagaccacugccaauucucccgaccauccccaaucgguuaccucggccuccucucccaacgcacgcgcgacauauacaucagccgccgccgccgcggcaccuucaccuggacccucuccgacuccgaaggcaacgaggcccccggcggauacugccucacccgcuggaugcucaucgaagcagaacucaaaugcuuugggaacacagcagucgcuaaaugcaacgaaaaacacgaugaagaguucugcgacaugcucagacucuucgacuucaacaaacaagcaauccgucgacucaaaaccccugcccaaaugucuauucaacuaauaaauaaagccgucaacgcucuuauaaacgaccaacucaucaugaaaaaccaccuccgagacaucauguguauccccuacugcaacuacucccgcuacugguaccucaaccacaccgucacuggcaaaacaucccucccccgcugcuggcucguauccaacggcucauaccucaacgaaacacacuucucagacgacaucgaacaacaagccgacaacaugauaacagaacuccuccaaaaggaauacauggaccgccaaggcaaaacaccccuuggccuagucgaucucuucgucuucuccaccagcuucuaccucaucucaauauuccuccaccucgucaaaaucccaacacaccgccacgucauugguaaaccuugccccaaaccccaccgacucaaccacaugggcaucugcuccugcggacucuacaaacaccccggcguuccagucaaguggaaacgcuaa

SEQ ID NO: 6007 - RNA, 1473 nt, Artificial Sequence
  derived and/or modified protein sequence (opt11) from LASV(LASV991-NIG-2009;Clade II)__AIT17770__GPCstabilized
augggccaaaucgucaccuucuuccaggaaguaccucacgucaucgaagaagucaugaacaucguccucaucgcccucucucuccucgccauccucaaagggaucuacaacguugcaaccugcggccuuuucggccucgucucauuccucuuacucugcggccgcucuugcuccaccaccuacaaaggcgucuacgaacugcaagcccucgaacucgacaugucauccuugaacaugaccaugccccucucuugcaccaaaaacaacucccaccacuacaucauggucggcaacgaaaccggccucgaacucacacucaccaacacauccaucauccaccacaaauucugcaaccucuccgacgcgcacaagaaagaccucuacgaccacgcccucauguccauuaucuccaccuuccaccucuccauuccaaacuucaaccaauacgaagcuaugucgugcgacuucaacggcggcaagauauccguccaauacaaccuaucccacaccuacgccgucgacgcagccaaccacugcggcaccaucgccaacggcguccuccaaaccuucaugagaauggcauggggaggcuccuauauugcucucgacuccggcugcggaggcugggacugcaucaugaccagcuaccaauuccucaucauacaaaacaccaccugggaagaccacugccaauucucccgccccucacccaucgguuaccucggccuacucucacaacgaacccgagacauuuacauaucccgacgccgccgcggcaccuucacguggacacucucagacuccgaaggcaacgaaacccccggcggcuacugccuaacccgcuggaugcuaaucgaagcugaacucaaaugcuucggcaacaccgccgucgccaaaugcaacgaaaaacacgacgaagaguucugcgacaugcuacguuuauucgacuucaacaaacaagccauuaaacgccucaaaaccccagcccaaaugagcauccaucuuauaaacaaagccguaaacgcccucauuaacgaucagcucauuaugaaaaaccaccucagggacaucaugugcauccccuacuguaauuacuccaaauauugguaccucaaccauacagucacuggaaaaaccucccuaccccggugcuggcuagucuccaacggcuccuaccuaaacgaaacccacuucucagacgacauagaacagcaagcagacaacaugauaaccgaacuccuacaaaaagaauacauagaucgccaaggcaaaacaccccuugggcucguagaucuuuucgucuucucuaccucauucuaccuaauauccauauuccuccaccuggucaaaauccccacucaccgccacgucaucggcaaaccaugccccaaaccccaccgccucaaccacaugggaaucugcuccuguggccucuacaaacaccccggcguacccguccgauggaaacgcuaa

SEQ ID NO: 6008 - RNA, 1473 nt, Artificial Sequence
  derived and/or modified protein sequence (opt11) from LASV(LASV993-NIG-2009;Clade II)__AIT17778__GPCstabilized
augggccaaaucaucaccuucuuccaagaagucccccacgucaucgaagaggucaugaacaucguacucaucgcacucucccuacucgccauacucaaaggcaucuauaacgucgcaaccugcggccucuucggccucgucuccuucuuacuucucugcggccgauccuguuccaccacuuauaaaggcgucuacgagcuccaaacccuugaacuagacauggccaaccucaacaugaccaugccucuaucaugcaccaaaaacaacucccaccauuauaucauggucggcaacgaaaccggccucgaacuuacccuaaccaauacauccauaaucaaccacaaauucuguaaccugucagacgcccacaagaaaaaucucuacgaccacgcccucaugucaauaaucucaacauuccaucuaucaauccccaacuuuaaccaauacgaagcgaugagcugcgacuuuaacggcggcaaaaucuccgugcaauacaaccuaagccacaccuaugcccgagacgccgccaaccacugcggaaccaucgccaacggcguccuacaaacauuuaugcgcauggcauggggcggauccuacauagcacucgauuccggaugcggcucuugggacugcaucaugaccuccuaucaguaccucaucauacaaaacaccaccugggaagaccacugccaauucucacgccccucccccaucggauacuuaggacuccucucccaacguacccgcgacaucuacauaucccgccgccgccgcggaacguucaccuggacccucucagacuccgaaggcaacgaaacacccggagguuacugccuaacucgcuggaugcucauagaagccgaguuaaaaugcuucggaaacaccgccguagccaaaugcaacgaaaaacacgacgaagaguucugcgacaugcuucgccucuucgacuucaacaaacaagccauccggcgccucaaaacccccgcacaaaugaacauccaacucaucaacaaagccgucaacgcccuuaucaacgaccaacucauaaugaaaaaucaccuccgcgacauaaugugcauccccuacugcaacuacuccaaauacugguaccucaaccacaccgucacaggcaaaaccucacucccccgcugcuggcucgucuccaacggcagcuaccucaacgaaacacacuucuccgacgacaucgaacaacaagcagacaauaugaucaccgaacuccuccaaaaagaauacauggaccgccaaggcaaaacaccgcuaggacucgucgaccucuucguauucucaaccucauucuaucucaucuccauuuuccuccaccuugucaaaauaccaacccacagacacgucaucggcaagcccugcccaaaaccccaccgccucaaucacaugggcaucuguuccugcggccucuacaagcaccccggcguccccgucaaauggaaacgauaa

SEQ ID NO: 6009 - RNA, 1473 nt, Artificial Sequence
  derived and/or modified protein sequence (opt11) from LASV(Nig08-04;Clade II)__ADU56610__GPCstabilized
augggccaaaucgucaccuucuuccaggaagucccccacgucaucgaagaggucaugaacaucguccucaucgcacuaucccuacucgcaauccucaaaggcaucuacaacgucgcaaccugcggccucuucggccucauaucguuccuacuccuuugcggccgauccugcucaaccaccuauaagggcgucuacgaacuacaaacacucgaacuagacauggccaaccuaaacaugacuaugccccuauccugcaccaaaaacagcucccaccacuacauaaugguugggaacgaaacaggccuagaacucacccuaaccaacacauccauaaucaaucacaaauucugcaaccucuccgacgcccacaagaaaaaccuguaugaccacgcccucauguccaucaucuccacauuccaccucucuauccccaacuucaaccaguacgaagccauguccugcgacuucaacggcggaaaaauuucaguacaauacaaccuaucccacgccuacgccguugacgcagccaaccacugcggaaccaucgcaaacggcguccuccaaacauucaugcgcauggccuggggcggcucuuacaucgcccucgacagcggaugcgggaacugggacugcauuaugaccuccuaccaauaccuaaucauccaaaacacaaccugggaagaccacugccaauucagccgccccagccccaucgguuacuuaggccuccucucccaacgaacccgcgacauauacauaucccgccgccgucgcggcaccuuuaccuggacccuauccgacuccgaaggcaacgaggcgcccggcggcuacugccucacccgcuggaugcucaucgaggccgaacuuaaaugcuuuggaaauaccgccaucgcuaaauguaacgaaaaacacgacgaagaguucugcgacaugcuccgacucuuugacuucaacaaacaagccaucaaacgccuaaaagcccccgcucaaaugucaauccaacucaucaacaaggccgucaacgcucuaauaaacgaccaacucaucaugaaaaaccaccucagagauaucaugugcauccccuacugcaacuacucaaaauacugguaccucaaccacaccgucaccggaaaaacaucccucccccgcugcuggcucauuucaaacggaucauaccucaacgaaacucacuucucagacgacaucgaacaacaagccgacaacaugaucaccgaacuccuccaaaaggaauacauggaccgacaaggaaaaacaccccucggccuuguagaccucuucgucuucuccaccucauucuaccucauaucaaucuuccuucaccucgucaaaauacccacccaccgccauauaguuggccgcccaugccccaaaccucaucgccuaaaccacaugggaaucugcuccugcggccucuacaagcacccaggcguacccgucaaauggaaacgcuaa

SEQ ID NO: 6010 - RNA, 1473 nt, Artificial Sequence
  derived and/or modified protein sequence (opt11) from LASV(Nig08-A41;Clade II)__ADU56626__GPCstabilized
augggacaaaucauuaccuucuuccaagaagucccccacgucauagaagaaguuaugaauaucguccucaucgccuuaucccuccuugccauccucaaaggcaucuacaacgucgccaccuguggccucuucggccucgucucguuucuacuccucugcggccgcucaugcucaaccacauacaaaggcgucuacgaacuccaaacccucgaacucaacauggccucccucaacaugaccaugccacucuccugcaccaaaaacaacucacaccacuacaucauggucggcaacgaaaccggacuugaacuuacucucaccaacaccucuauuaucaaccacaaauucugcaaccucuccgacgcccacaaacgcaaccuauacgaccacgcccuaaugagcauaaucagcacuuuccaccucucaauccccaacuucaaccaauacgaagcgaugagcugcgacuucaacggcggcaaaauauccguccaauauaaccucucccacaccuacgcagucgacgcagccaaacacugcggaaccaucgccaacggcguacuccaaacauuuaugagaauggcuuggggugguuccuacaucgcccuagacuccggaugcggauccugggacugcaucaugaccucauaccaauaccucaucauccaaaacaccacaugggaagaccacugccaauucucccgcccaucccccaucggcuaccucggccuccugucccaacgcacccgggacaucuacaucucccgccgccgccgcggcaccuucaccuggacacucuccgacuccgagggcaacgaaacucccggcggauacugccucacccgauggaugcuaaucgaagccgaacucaaaugcuucggcaacaccgccguagccaaauguaacgaaaaacaugacgaagaguucugcgacaugcuccgacucuucgacuucaacaaacaagcuauacgccgccuuaaagcacccgcccaaaugucgauccaacucaucaacaaagcagugaacgcccuuaucaacgaccaauuaauuaugaaaaaccaccuaagagacaucaugugcaucccauacugcaacuacucgaaauacugguaccucaaccacaccgucaccggcaagacaucccuuccccgcugcuggcucgucuccaacggcuccuaccucaacgaaacucacuucuccgacgacauagaacaacaagcagacaacaugaucaccgaacuucuacaaaaagaauacaucgaccgucagggcaaaacuccacucggccucgucgacuuguucguauucucgaccagcuucuaccucauaagcaucuuccuacaccucguaaaaauccccacccaccgccacgucaucggcaaaccaugcccaaaaccccaccgccuuaaccacaugggcaucugcucuugcggccucuauaaacaucccggcgucccaguaaaauggaaacguuaa

SEQ ID NO: 6011 - RNA, 1473 nt, Artificial Sequence
  derived and/or modified protein sequence (opt11) from LASV(Nig08-A47;Clade II)__ADU56630__GPCstabilized
augggccaaaucauaaccuucuuccaggaagucccucacgucaucgaagaaguuaugaacaucguccuaaucgcccuaucucuccuagcaauucuaaaaggcaucuacaacguagcuaccuguggacuuuucggccuaguaagcuuccuucuccucugcggccgauccugcucuacaacauacaaaggcgucuacgaacuacaaacccucgaacucgacauggcaucccucaacaugacaaugccccucagcugcaccaaaaacaacucccaccacuacaucauggucggcaacgaaaccggccucgaacucacacuuaccaacacauccaucaucaaccacaaauucugcaaccuaucagacgcccacaagaagaaccuguacgaccacgcccucauguccaucauauccacauuccaccuauccauccccaacuucaaccaauacgaagcaaugagcugcgacuucaacggcggcaaaauaucuguccaauacaaccucagccacgcauacgcagucgacgccgccaaccacugcggaaccaucgccaacggcguacuacaaaccuucaugcgaauggcguggggcggcuccuacaucgcccucgacagcggcugcggaagcugggacugcauaaugaccucuuaccaauaccuaaucauccaaaacacaacaugggaagaccacugccaguucucccgcccaucuccaaucggcuaccucggucuccucagccaacgcacccgagacauauacauaucccgccgacgacgcggcaccuucaccuggacccuaagcgacucagaaggcaacgaaaccccuggcggauacugccuaacccgcuggaugcucaucgaagccgaacucaaauguuucggaaacacagccguugccaaaugcaacgaaaaacacgacgaagaauucugcgacaugcuccgccucuucgauuucaacaaacaagccaucagacgucuaaaaacccccgcccaaaugucaauacaacucauaaacaaagcaguaaacgcucucauaaacgaccaacuaaucaugaagaaccaccuucgcgacaucaugugcauccccuacugcaacuacuccaaauauugguaccuuaaccacaccguaaccggcaaaaccagccuaccccgcugcuggcucgucuccaacggcagcuaccuuaacgaaacccacuucagcgacgacaucgaacaacaggccgacaauaugaucaccgaacuccuccaaaaagaauacauggaccgacaaggaaaaacaccacuaggccucguagaccucuucgucuucuccaccuccuucuaccucaucucaaucuuccuacaccuuguacgcauacccacccaccgacacgucaucggcaagcccugcccaaagccccaccgccucaaccacaugggaaucugcagcugcggccuauacaaacaccccggagucccaguaaaauggaaacgcuaa

SEQ ID NO: 6012 - RNA, 1473 nt, Artificial Sequence
  derived and/or modified protein sequence (opt11) from LASV(CSF;Clade III)__AAL13212__GPCstabilized
augggccaaauagucaccuucuuucaagaagucccccacgucaucgaagaaaucaugaacauaguccuaaucacccuaucccuacucgcaauccucaaaggcguauacaaccuagcuaccugcggccucaucggacucaucaccuuccucuuccuuugcggccgauccugcuccaugacauacaaaggcuccuaccagcucgaaacacucgaacuaaacauggaaacccuaaacaugacaaugccccuuucuugcaccaaaaacacaucccaccacuacauacgcgucggaaacgaaacaggccuagaacucacccucaccaacaccuccaucaucaaccacaaauucugcaaccuaagcgacgcccacaaaaagaaccuauacgaccacucccuaaugucaaucaucuccaccuuccaccucucuauccccaacuucaaccaauacgaagccauguccugcgacuucaacggaggcaaaaucucgauccaauacaaccucagccacacauacgccggcgacgccgccaaacacugcggcacccuagccaacggcauccuacaaacauucaugcgcauggccugggguggcuccuacaucgcacucgacuccggcugcggaaacugggauugcaucaugacguccuaccaguaccuaaucauacaaaacaccaccugggaagaccacugccaauucucccgccccucacccauaggcuaccucggucuacuaucgcaacgcacccgcgaaauauacaucucccgaagacggcgaggcaccuucacauggacacucucagacuccgaaggcaacgaaaaucccggcggcuacugucucacccgcuggaugcucaucgaggcagaacucaaaugcuucggcaacaccgccgucgccaaaugcaacgagaaacacgacgaagaguucugcgacaugcugcgccuauucgacuucaacaagcaggccauccaacgccuuaaagccccugcucaaaugucaauacaacucauuaacaaagccguaaacgcacuaaucaacgaccaacuaaucaugaaaaaccaccuacgagacaucaugugcauccccuacugcaacuacuccaaguacugguaccucaaccacaccaccaccggccgcaccucccuaccccgcuguuggcucguaagcaacggcucauaccucaacgaaacacgcuucuccgacgacaucgaacaacaagcggacaacaugauuacagaaaugcuccaaaaagaauacaucgaccgccaaggcaaaacuccucucggccuagucgaccuauucguauucuccaccagcuucuaccucaucucuauauucuuacaccucaucaaaauccccacccaccgccacaucguagggggcccaugucccaaaccccaccgucugaaccacaaaggcaucugcuccugcggccucuacaaacgcccaggcgucuccguccgauggaaaagauaa

SEQ ID NO: 6013 - RNA, 1473 nt, Artificial Sequence
  derived and/or modified protein sequence (opt11) from LASV(ISTH2121-NIG-2012;Clade III)__AIT17540__GPCstabilized
augggccaaaucguaaccuucuuccaagaagucccccacgucaucgaagaaaucaugaauauaguccuaauuacccuaucgcuccuagccauccucaagggcauuuacaauuucgcaaccugcggccucauaggccugaucaccuuccuauuucucugcggcagaagcugcuccaccauuuacaaaggaucuuaccaacuccagacccuagagcucaacauggagacacucaauaugaccaugccucucuccugcaccaaaaacaacucacaccacuauauccgcgucggcaacgaaaccggacucgaacucacccuaaccaacaccuccauuauaaaccacaaauucugcaaccuguccgaagcccauaagaaaaaccuauacgaccacgcccuaaugucaaucaucuccaccuuccaccuauccauccccaacuucaaccaguacgaagccauguccugcgacuucaacggcggcaaaauuucuguacaauacaaccucucucacucauacgccgucgacgccgccaaccacuguggcaccgucgcaaacggcguccuccaaacauucaugcguauggccuggggcggcuccuacauugcacucgacuccggcugcggcaacugggacugcaucaugaccuccuaccaauaccucaucauccaaaacaccaccugggaagaccacugccaauucucccgaccauccccaauuggcuaccucggccuccuuagccaacgcaccagagacaucuacaucucccgccgccgccgcggcaccuucacauggacacucagugacagcgaaggcaaagaaacccccggcgguuacugccucacccgcuggaugcuaaucgaagccgaacucaaaugcuucggcaacaccgcggucgcaaaauguaacgaaaaacacgacgaagaguucugcgacaugcuacgccuauucgacuucaacaaacaagccauccaacgucucaaaacgccugcccagaugucaauccaacucaucaacaaagccgucaacgcucucaucaacgaccagcuaaucaugaaaaaccaccuccgcgacaucauguguauccccuacugcaacuacuccaaauacugguaccucaaucacacguccaccggccgcaccucccuuccuaaaugcuggcucguuucaaacggcucauaccugaacgaaacccauuucucagacgacaucgaacaacaagccgacaauaugaucaccgaaaugcugcaaaaagaauauaucgaucgccaaggcaaaacaccccucggccuagucgaccucuucgucuucucaaccagcuucuaccuaauaucaaucuuccuccaccucgucaagauccccacacacagacacauagucggaaaauccugccccaaaccccaccgacucaaccacaugggcaucugcucaugcggccucuacaaacaacccggcguccccguaaaauggaaacgcuga

SEQ ID NO: 6014 - RNA, 1473 nt, Artificial Sequence
  derived and/or modified protein sequence (opt11) from LASV(Nig08-A19;Clade III)__ADU56618__GPCstabilized
augggccaaaucgucacauucuuccaagaaguuccccacgucauagaagaagucaugaauaucguccuaaucgcccucuccauccucgccauucucaaaggacuauacaacaucgcaaccugcggccucaucggccuugucacauuccuucuacucuccggccgauccugcucaaugaccuacaagggagucuacgaacuacaaacacucgaacuaaacaugaacacccuaaacaugacuaugccccucuccugcaccaaaaacaacagccaccacuacaucauggucgggaacgaaaccggacuagagcuaacccucaccaacaccucccuccuccaccacaaguucugcaaccuauccgacgcccacaagaaaaaccucuacgaccacacccucaugucaauaaucuccaccuuccaccucuccauccccaacuucaaccaauacgaagccaugucgugcgacuuuaacggcggcaaaauaacaguccaauacaaccucucccacucguacgccauagacgccgccaaccacugcggcaccgucgcaaacggaguccuacaaaccuucaugcgcauggcauggggcggaucauacaucgcccucgacuccggcugcggcaaaugggacugcaucaugaccagcuaccaauaccucaucauccaaaacacaaccugggaggaccacugccaauucucgcgucccucacccaucggcuaccucggacuccucucccaacgcacccgcgacaucuacauaagccgacgccgccgcggcaccuucaccuggacacuuuccgacuccgaagguaacgaaacccccggaggauacugccucacgcgcuggaugcugauagaagcagaacucaaaugcuucggcaacaccgccgucgccaaaugcaacgaaaaacacgaugaagaguucugcgacaugcuucgccuuuucgauuucaacaaacaagcuauacgccgccucaaagccccagcccaaaugucaauccaacuaauuaacaaagcagucaacgcucucaucaacgaccaacucauaaugaaaaaccaccuaagagacaucaugugcauccccuacugcaacuacuccaaauacugguaucucaaccacacuuccaccggacgaaccagccucccacgcugcuggcuaguauccaacggcucauaccucaacgaaacucacuucucggacgacaucgaacaacaagcagacaacaugaucaccgaaaugcuccaaaaagaauaccucgaccgacaaggcaaaaccccucuagggcucguugaucucuucgucuucucaacaucuuucuaccucaucuccauauuccuucaccucgucaagauccccacacaccgccacaucguaggaaaacccugcccaaaaccacaccgacucaaucacaugggcaucugcagcugcggccucuacaagcaacccggcguacccguccgcuggaagcgcuag

SEQ ID NO: 6015 - RNA, 1473 nt, Artificial Sequence
  derived and/or modified protein sequence (opt11) from LASV(ONM-299;Clade III)__ANH09734__GPCstabilized
augggccaaaucgugaccuucuuccaagaagucccccacguaauagaagaaaucaugaacauuguacucaucacccuaagccuacuagcaauccuaaaaggccucuauaacuucgccacaugcggccuaaucggacucaucaccuuccuauuccucugcggccgcuccuguucaaugauauacaaaggcucauaccaacuagaaacccucgagcucaacauggaaacacucaacaugacgaugccccuaucaugcacuaaaaacaacucccaccacuauauacgcgucggcaacgaaacaggccucgaacuuacccucacaaacaccuccaucaucggacacaaauucugcaaccucuccgacgcacacaagaaaaaccuauaugaccacagccucaugucaaucaucuccaccuuccaccucucaauccccaacuucaaccaauacgaagccaugaguugcgacuucaacggaggcaaaaucuccauccaauacaaccuaucccacaccuacgcuggcgacgccgccaaacacugcgggaccgucgcgaacggcguccuccaaacauucaugcgcauggcguggggcggaagcuacaucgcccucgacuccggaugcggcaacugggacuguaucaugacaagcuaccaauaccucaucauccaaaacacgaccugggaagaccacugccaauucucacgcccaagccccaucggcuaccucggacugcucagccaaagaacccgcgacaucuacaucucccgccgccggcgaggcacuuucacauggacucuauccgacucagaaggaaaagagaccccaggcggcuacugccucacccgauggaugcucaucgaggccgaacucaaaugcuucggcaacaccgccgucgccaaaugcaacgaaaaacacgacgaagaguucugcgacaugcuccgccuauucgacuucaacaaacaagccauucaacgccucaaaacccccgcucaaaugagcauccaacucaucaacaaggccguaaacgcccucaucaaugaccaacuaaucaugaaaaaccaccuacgcgacauaaugugcauccccuacugcaacuacucaaaauacugguaccuuaaccacaccuccaccggacgcaccucucuucccaaaugcuggcugguuuccaacggcucauaccucaacgaaacccacuucucagacgauauagaacaacaggcagacaacaugauuacagaaaugcuccaaaaagaauauaucgaccgacaaggcaaaacaccccucggccuaguagacguuuucgucuucuccaccuccuuuuaccucaucucaaucuuccugcaccucgucaaaauacccacccaccgccacaucguaggcaaauccugcccaaagccacaccgccucaaccacaugggcaucugcuccugcggacuauacaaacaacccgguguccccguacgcuggaaacgcuaa

SEQ ID NO: 6016 - RNA, 1473 nt, Artificial Sequence
  derived and/or modified protein sequence (opt11) from LASV(ONM-700;Clade III)__ANH09738__GPCstabilized
augggccaaaucguaaccuuuuuccaggaagucccucacgucaucgaagaaauaaugaacaucguccucaucacacucagccuccucgcaauccucaaaggccucuauaacuucgcaacaugcggccucauuggccuuaucaccuuccuauuccucugcggucgauccugcagcaugaucuacaaaggcucguaccaacucgaaacccucgaacuaaacauggaaacucucaacaugaccaugccccuauccugcaccaaaaacaacucccaccacuacaucagaguaggaaacgaaaccggccucgaacucacccucaccaauaccuccaucauaaaucacaaauucugcaaccugucggacgcccacaaacgcaaccucuacgaccauucccuuaugagcaucaucuccacuuuccaccugucuaucccaaacuucaaccaauacgaagcaauguccugcgauuuuaacggcggcaaaaucuccauccaauacaaccuaucccauaccuacgccggcgacgccgccaaacacugcggcaccguagccaacggcguccuccaaaccuucaugcgcauggccuggggaggcuccuacaucgcccuagacuccgguugcggaaacugggacugcauuaugaccuccuaccaauaccucauaauccaaaacaccaccugggaagaccacugccaauucucccgccccagccccaucggcuaccucggccuccucucccaacgaacccgcgacaucuacaucucccgccgccgacgcggcaccuucacuuggacacucucugacucagaaggaaaagaaaccccaggcggauacugccucacccgcuggaugcucauagaagccgaacuaaaaugcuucggcaauaccgccgucgccaaaugcaacgaaaaacacgacgaagaguucugcgacaugcuacgccuauucgacuucaacaaacaagcuauccaacgccuaaaaaccccugcacagaugucaauucaacucaucaacaaagccgucaacgcacucaucaacgaccaacuuaucaugaaaaaccaccuccgcgacauuaugugcauuccuuacugcaacuacuccaaauacugguaccucaaccacacauccacuggccgaaccagccuccccaaaugcuggcucgucucaaacggcagcuaccuaaacgaaacccacuucuccgacgacaucgaacaacaagccgacaacaugauaaccgaaaugcuccaaaaagaauacaucgaccgccaaggcaaaacuccgcucggccucguagacgucuucauguucuccaccucauucuaccucaucuccaucuuccuccaccuagucaaaauccccacccaccgccacaucgucgguaaguccugccccaaaccccaccggcugaaccacaugggcaucugcuccugcggccuauacaagcaacccggcguccccgucagguggaaacgcuaa

SEQ ID NO: 6017 - RNA, 1473 nt, Artificial Sequence
  derived and/or modified protein sequence (opt11) from LASV(Weller;Clade III)__AAT49010__GPCstabilized
augggccaaaucguuaccuucuuccaggaagucccccacgucauagaagaagugaugaacaucguucucaucgcccucuccguccuagccauccuuaagggccucuacaacuucgcaaccugcggccucaucggccucgucaccuuccuacuccuauccggucgcucaugcuccaugaucuacaaagguguauacgagcuccaaacccucgaacugaacauggaaacacucaacaugacaaugccccucucaugcaccaaaaacacaucccaccacuacauccgcgucggaaacgacacugggcucgaacuuacacucacaaacgaaacccuacuccaccacaaauuuugcaaccuauccgacgcccacaaacgcaaccuauacgaccacgcacucauguccaucauauccacuuuccaccucucaauccccaacuucaaccaauacgaagccaugucaugcgacuucaacggcggaaaaaucaccguccaguacaaccuaucacacuccuacgcagucgacgccgccaaacacugcggcaccguagcaaacggcguccuccaaacauucaugcgaauggcauggggaggauccuacaucgcgcucgacucucgaugcggcaacugggacugcaucaugaccucuuaccaauaccuaauaauccaaaauaccaccugggaagaccacugccaauucucccgcccauccccuaucggcuaccuaggccuccugucgcaacgcacccgcgacaucuacaucucccgcagacgaaggggcaccuucacauggacccucuccgacagcgaaggaaacgaaacccccggcggcuauugucucacccgcuggaugcucaucgaagccgaacucaaaugcuucggcaacacugccgucgccaaaugcaacgaaaaacacgacgaagaguucugugacaugcuaagacucuuugacuucaacaaacaggccauccgacgucucaaaacccccgcccaaauguccauccaacucaucaacaaagccgucaacgcacucauaaacgaccaacucaucaugaaaaaccaccuccgagacaucaugugcaucccauacugcaauuacuccaaauacugguaccuuaaccacaccagcaccggcaaaaccucccucccccgaugcuggcucguauccaacggcucauaucucaacgaaacccacuucuccgacgacaucgaacaacaagccgacaauaugaucacagaaaugcuccaaaaagaauaccucgaccgccaaggcaaaacaccccuugggcuagucgaccuauucguuuucuccaccucauucuaccucaucaguaucuuccuacaccucaucaaaauccccacccaccgacacaucguagguaaacccugcccuaaaccccaccgccucaaccacaugggcauaugcuccugcggccuuuauaaacaaccgggaguccccguccgcuggaaacgcuaa

SEQ ID NO: 6018 - RNA, 1476 nt, Artificial Sequence
  derived and/or modified protein sequence (opt11) from LASV(BA366;Clade IV)__ADI39451__GPCstabilized
augggccaaauaguaacauucuuccaagaagucccucacgucaucgaagaagucaugaacaucguacucaucgccuuaagcguccucgcaguccuaaaaggucucuacaacgucgccacauguggacuuauaggccucauagccuuccuacuccuaugcggacgcucuugcaccaccacccuuuacaaaggcguauacgaacuccaggcccucgaacuaaacauggaaacacucaacaugacaaugccccuguccugcaccaaaaacaacucccaccacuacaucauggucggcaacgaaacuggccucgaacucacacucaccaacacauccaucaucaaccacaaauucugcaaccuaucagacgcccacaaaaagaaccuauacgaccacgcccucauguccaucaucuccacuuuccaccucuccauccccaacuucaaccaauacgaagcuaugagcugcgacuucaacggcggcaaaauauccguccaauacaaucuaucccacaccuacgccguugacgcagcaaaccacuguggcacugucgccaacggcguucuccaaaccuucaugcgcauggccuggggcggcucauacaucgcacucgacucaggauguggcagcugggacugcauaaugacauccuaccaauaccucauaauccaaaacacaacaugggaagaccacugccaauucucucgcccgucccccaucggcuaccucggccuccuaucacaacgaacccgcgacaucuacaucagccgccgacgacgcggcacuuucaccuggacgcucuccgacagcgaaggcaaagacacccccggaggcuacugccuaacccgauggaugcucaucgaagccgagcucaaaugcuucggcaacaccgccguggccaaaugcaacgaaaaacacgacgaagaguucugcgacaugcuccgccuuuucgauuucaauaaacaagccauccaacgccucaaagcccccgcccaaaugagcauccaacuaaucaacaaagccgucaacgcccuaaucaacgaccaacucaucaugaaaaaccaccuccgcgacaucauguguauuccauacugcaacuacuccaaguacugguaccuuaaccacaccauaaccggucgcacaagccucccaaaaugcuggcucguaucaaacggcagcuaccucaacgaaacccacuucuccgacgauaucgaacaacaagccgacaauaugaucaccgaaaugcuccaaaaagaauacaucgaacggcagggcaagaccccacucggacucguagaccuauucgucuucuccaccagcuucuaccuaaucuccaucuuccuacaccuuaucaaaauccccacacaccgucacauagucaacaaacccugccccaaaccacaccgccuaaaccacaugggcguuugcuccugcggucucuacaaacagccaggcguccccguccgcuggaaacgcuaa

SEQ ID NO: 6019 - RNA, 1476 nt, Artificial Sequence
  derived and/or modified protein sequence (opt11) from LASV(G1180-SLE-2010;Clade IV)__AIT17168__GPCstabilized
augggccaaauagucaccuucuuccaagaaguaccccacgucaucgaagaagucaugaacauaguccucauagcccucuccauacucgccguccucaaaggccuuuacaacuucgcaaccugcggccuagucggccugcuaaccuuccuacuacucugcggcagauccuguaccgccucacgcuacaaaggagucuacgaguuacaaacacucgaacucaacauggaaacccucaacaugacaaugccccucuccugcacgaaaaauaauucacaccacuacaucauggucggcaacgaaaccggccucgaacucacccucaccaacacaagcaucaucaaccacaaauucugcaaccuaucagacgcacacaagaaaaaccuguacgaccacgcccuaauguccaucaucucuacauuccaccuguccaucccaaacuucaaccaauacgaagcaaugagcugcgacuucaacggcgggaaaaucuccguccaauacaacuuaagccacagcuacgccggagacgccgcaaaccacugcggaacagucgcaaacggcguccuucaaaccuucaugcgcauggccuggggcggcuccuacauugcacuggacuccggcugcggcuccugggacugcaucaugaccuccuaucaauaccuaauaauacaaaacacaaccugggaagaccauugccaauucucccgcccaucacccaucggauaccuaggccuacucucccaacgaacucgagacaucuacaucucccgacgccgccgaggcaccuucaccuggacccucuccgacucagaaggcaaagacacucccggcggauacugccucacccgcuggaugcuuaucgaagccgaacucaaaugcuucggcaacacagccgucgccaaaugcaacgaaaaacacgacgaagaguucugugacaugcuccgacucuucgacuucaacaaacaagccauccaacgccuaaaagcaccagcacaaauguccauccaacucaucaacaaagccgucaaugcccucauuaacgaccaacucaucaugaaaaaccaccuccgagacaucaugugcaucccuuacugcaacuacuccaaauacugguaccuaaaccacaccacaaccggaaaaacaucccuccccaaaugcuggcuuguauccaacggcucauaucucaacgaaacccacuucuccgacgacaucgaacaacaagcagacaacaugauaacagaaaugcuacaaaaagaauacauggaacgacaaggaaaaacaccccuaggcuuggucgaucuauucgucuuuagcacaucauucuaccucauaucaauauuccuccaccucguaaaaauccccacccaccgccacauagucggcaaauccugcccaaaaccacaccgacucaaccacaugggcauauguucaugcggccucuacaaacaacccggcguacccgugaaauggaaacgcuag

SEQ ID NO: 6020 - RNA, 1476 nt, Artificial Sequence
  derived and/or modified protein sequence (opt11) from LASV(G1190-SLE-2010;Clade IV)__AIT17172__GPCstabilized
augggccaaaucguaaccuucuuucaagaggucccccacguuaucgaagaggucaugaacaucguccucaucgcacucuccauccucgcgguccuaaaaggccucuacaacuucgcgaccugcggccucgucggccucgucacauuccuccuccucugcggccgaucaugcacuacaucacucuacaaaggcgucuacgaacuccaaacccucgaacucaacauggaaacacucaacaugaccaugccccuaagcugcaccaaaaacaacucccaucacuacaucauggucgguaacgaaaccggccucgaacucacccucaccaacaccucuaucaucaaccacaaauucugcaaccuguccgaugcacacaagaaaaaccucuacgaccacgcacucaugagcaucaucuccaccuuccacuuaucuauacccaacuucaaccaauacgaagcaaugucaugcgauuucaacggcggcaaaauauccguccaauacaaccucucacacuccuacgcaggcgaugccgccaaccacugcggcaccgucgcaaacggcguccuucaaaccuucaugcgcauggccuggggcgguuccuacaucgcccucgacuccggauguggccgaugggacugcaucaugacaucguaccaauaccucaucauccaaaacaccacaugggaagaccacugccaauucucccgccccucacccaucggcuaccuuggucuccucucgcaacgcacccgugacaucuacaucuccaggagacgacgcgggaccuucaccuggacccugucagacagcgaaggcaaagacacacccgggggcuacugccucacacgcuggaugcuuauagaagccgaacucaaaugcuucggcaacaccgccgucgcuaaaugcaacgaaaaacacgacgaagaauuuugcgacaugcuccgccucuucgacuucaacaagcaagccauccaacgccucaaagccccagcccaaaugucaauccaacucaucaacaaagccgucaacgcccuaaucaacgaccaacucaucaugaaaaaccacuuacgcgacauaaugugcauccccuauugcaacuacagcaaguacugguaucucaaccacaccacaaccggcaaaacuucacuccccaaaugcuggcucgucuccaacggcucauaccucaacgaaacucacuucucggacgacauugaacaacaggccgacaacaugaucaccgagaugcuccaaaaagaguacauggaacgccaaggcaaaacaccccuaggucucgucgaccuauucguauucuccaccucauucuaccucaucuccauauuccuccaccucgucaaaauucccacccaccgacacauagucggcaagcccugcccccgcccacaccgacucaaucacaugggcaucugcuccugcggccucuacaaacaacccggcguacccgucaaauggaaacgauaa

SEQ ID NO: 6021 - RNA, 1476 nt, Artificial Sequence
  derived and/or modified protein sequence (opt11) from LASV(G1200-LIB-2010;Clade IV)__AIT17176__GPCstabilized
augggccaaauugucaccuucuuccaagaggucccacacguaauagaagaagucaugaacaucguccucauagcccucucccuccucgccguccuaaaaggccuauacaacgucgccacaugcggccucauaggccuaaucaccuuccuacugcucugcggccgcuccugcacuaccaaccuauacaaaggcgucuacgaacuccaagcacuugaacucaacauggaaacccuuaacaugaccaugccccucuccugcaccaaaaacaacucccaccacuauauaauggucgggaacgaaaccggccucgaacucacacucaccaacaccuccauaauaaaccacaaauucugcaacuugucagaugcccacaagaaaaaccuauacgaccaugcacucaugagcauaauaucaacuuuccaccucuccauccccaacuucaaccaauacgaagcaaugucuugcgacuucaacggcggccgcauuucaguccaauacaaccucucacacuccuacgccggagacgcagcaucacacugcggcaccaucgccaacggaguccuacaaacauucaugcgaauggccuggggcggcuccuauaucgccuuagacuccggcugcggcggaugggacugcaucaugaccuccuaccaauaccuaaucauccaaaacaccaccugggaagaccacugucaauuuucacgcccaagcccaauaggauaccuaggccuucucagccaacgcacaagagacaucuacauaagcagacgccgucgcggcaccuucaccuggacgcuauccgacuccgaaggcaaagacacccccggcggcuacugccucacccgcuggaugcucaucgaagccgaacucaaaugcuucggaaacacagccgucgccaaaugcaacgaaaaacacgacgaagaguucugcgacaugcuccgacucuucgacuucaacaaacaagcuauacaacgccuaaaagcccccgcccaaaugucuauccaacuaaucaacaaagcagucaaugcccucaucaaugaccaacuaauaaugaaaaaucaccuccgagacauuaugugcauccccuacugcaacuauuccaaauacugguaccucaaccacaccgucaccggcaaaaccagccuccccaaaugcuggcucgucuccaacggcucauaccucaacgaaacccacuucuccgacgacauagaacaacaggccgacaacaugaucaccgaaaugcuacaaaaagaauacauggagagacaaggcaaaaccccacucggccuggucgaucucuucgucuucuccacauccuucuaccucaucuccaucuuccuucaccucgucaaaaucccaacucaccgacacguaguaggaaaacccugccccaaaccccaccgccucaaccacaugggcaucugcucaugcggccucuacaaacagcccggaguccccguacgcuggaaacgauaa

SEQ ID NO: 6022 - RNA, 1476 nt, Artificial Sequence
  derived and/or modified protein sequence (opt11) from LASV(G1442-SLE-2011;Clade IV)__AIT17180__GPCstabilized
augggccaaaucgucaccuucuuccaagaaguaccccacguaaucgaagaagucaugaacaucguccucaucgcacucuccauccuagccguccuaaaaggacuuuacaacguugccacaugcggucuaaucggacucgucaccuuccuccuccugugcggccgcucauguaccaccacacucuacaaaggcgucuacgaacuccaaacacuagaacucaauauggagacccuuaacaugacaaugccccuaagcugcaccaaaaacaauucucaccacuacauccggguagggaaugaaacagggcuagaacucacccucaccaacaccuccaucaucaaccacaaauucugcaaccuauccgacgcccacaagaaaaaccuauacgaccacgcccucauguccaucaucagcaccuuucaccuauccauacccaacuucaaccaauacgaagccauguccugcgacuucaacggcggcaaaauauccguacaauacaaccuaucccacucuuacgccggcgacgcagccaaccacugcggcacagucgcaaacgguguccuacaaacauucaugcgcauggcauggggcggauccuacaucgcccuugacuccggcugcgguaacugggacugcaucaugaccuccuaccaauaccucaucauccaaaacaccacaugggacgaccacugccaauucagcagacccagcccuauaggcuaccuaggccuacucucacaacgcacccgcgacguuuacaucagccgacgacgccgcggaaccuucaccuggacccucuccgacagcgagggcaaagacaccccaggcggcuacugccucacccgcuggaugcucauagaagccgaauuaaaaugcuucggcaacaccgccguagccaaaugcaacgaaaaacacgacgaagaguucugcgacaugcuccgccucuucgacuucaacaaacaagccauucaacgucucaaagcccccgcccaaauguccauccaacucauaaacaaagccguaaacgcccucaucaacgaccaacucaucaugaaaaaccaucugcgagacaucaugugcaucccguacugcaauuacucaaaauacugguaccuaaacaacaccgcuacaggcaaaacaucccuccccaaaugcuggcucaucuccaacggauccuaucuaaacgaaacccacuucuccgacgacaucgaacaagaagccgauaacaugaucaccgaaaugcuccaaaaagaauacauggaacgccaagguaaaacuccccucggccuugucgaccuauucguuuucucaaccucauuuuaccucauauccauauuccuccaccuaguuaaaauacccacccaccgccacaucgucggaaaauccugccccaaaccccaccgccucaaccacaugggcaucugcucaugcggucuauacaaacaacccggaguaccaguccgcuggaaacgcuaa

SEQ ID NO: 6023 - RNA, 1476 nt, Artificial Sequence
  derived and/or modified protein sequence (opt11) from LASV(G1529-SLE-2011;Clade IV)__AIT17184__GPCstabilized
augggacaaaucgucaccuucuuccaagaagucccccacgucaucgaagaagucaugaacaucguccucaucgcccucuccauccucgcgguccugaaaggccucuacaacgucgcaaccugcggccucauaggccuagucacauuucuccuccucugcggccgaucaugcaccaccacccucuauaagggcguauacgaacuccaggcccuagaauuaaacauggaaacucuaaacaugaccaugccccucagcugcaccaaaaacaacagccaccacuauauccgcgucggaaacgaaaccggccucgaacuuacacuaaccaacaccucaaucaucgaccacaaauucugcaaucucuccgacgcccacaaaaagaaccucuacgaccacgcccuaaugucaaucauauccaccuuccaccuauccauaccuaauuucaaccaauacgaagccauguccugcgauuucaacggcggaaaaaucucaguacaauacaaccugucccacuccuacgccggcgacgccgccaaccacugcggcaccguagccaacggcguccuccaaaccuucaugcgcauggccuggggcgguuccuacaucgcccucgacuccggaugcaauggcugggacugcauuaugaccuccuaccaauaccuaaucauccagaacaccaccugggaugaccacugccaauucucacgaccauccccgaucggcuaccucggacuccuuagccagcgcacccgagacaucuacaucucccgacgccgacgcggcaccuucaccuggacucuaagcgauuccgaaggcaaggacacccccggcggauacugccucacccgcuggaugcucauagaagccgagcucaaaugcuucggaaacaccgccgucgccaaaugcaacgaaaaacacgacgaagaauuuugcgacaugcuacgacucuucgacuucaacaaacaagccauccgucgccuaaaagcccccgcccaaaugucuauccaacuaauaaauaaagccgucaacgcucuaaucaacgaccaacuuaucaugaaaaaccaccuccgcgauauaaugugcauccccuacugcaacuacuccaaauacugguaccucaacaacaccgccacaggcaagaccucccuaccgcgaugcuggcuagucucaaacggcagcuaccuuaacgaaacccacuucagcgacgacaucgaacaacaagccgacaacaugaucacagaaaugcuacaacgagaauacauggaacgccaaggcaaaaccccucuaggccucgucgaccucuucguuuucucuaccucauucuaccucauauccaucuuccugcaccucgucaaaaucccaacacaccgucauauugucggaaaacccugccccaaaccccacagacucaaccacaugggcaucugcagcugcggccucuacaaacaacccggcgucccagucaaguggaaacgcuaa

SEQ ID NO: 6024 - RNA, 1476 nt, Artificial Sequence
  derived and/or modified protein sequence (opt11) from LASV(G1618-SLE-2011;Clade IV)__AIT17188__GPCstabilized
augggccaaauagucaccuucuuccaagaagucccccacgucauugaagagguuaugaauaucguccuaaucgcccuauccauccuugccguccucaaaggccucuacaacuucgcuaccugcggcuucgucggucucguaucauuccuacuccucugcggucgaucauguacuacaucacucuacaagggcgucuacgaacuacaaacccucgaacuuaacauggaaacccucaacaugaccaugcccuuaucaugcaccaaaaacaacagccaccacuacaucauggucggcaacgaaacaggccucgaacucacacucacaaacaccagcaucaucaaccacaaauucugcaaccucucagacgcccacaagaaaaaccucuacgaccacgcccucauguccaucauauccaccuuccaucuauccauacccaacuucaaccaauacgaagcaauguccugcgacuucaacgguggcaaaaucuccguccaauacaaccucucccacagcuacgccgucgacgcagccaaccauugcggcacagucgccaacggcguccugcaaaccuucaugcgcauggcuuggggaggaucauacaucgcccuagauuccggaugcggcucaugggacugcauaaugaccucauaccaauaucucaucauucagaacacgacaugggaagaccacugccaauucagccgaccaagccccaucggcuaccuuggccuccucagccaacgcacccgcgacaucuauauaucccgacgccgccgcgguaccuucaccuggacccucuccgacagcgaaggcaaagacaccccaggcggcuacugccucacccgcuggaugcuaaucgaggccgaacucaaaugcuuuggaaacaccgccgucgccaaaugcaacgagaaacacgacgaagaguucugugacaugcuacgacuauucgacuucaacaaacaagcaauccaacgccuccgcgccccagcccaaaugucuauccaacucaucaacaaagcagucaacgcccuaauuaacgaccaacucaucaugaaaaaccaccuaagagacaucaugugcauccccuacugcaacuacucgaaauacugguaccucaaccacaccacaaccggccgcacuucucuaccuaaaugcuggcucguguccaacggcucauaccugaacgaaacccacuucuccgacgacauagaacaacaagcugauaacaugaucaccgaaaugcuccaaaaagaauacauggaacgacaaggcaaaaccccacucggauuagucgaccucuucgucuucagcaccuccuucuaccuaaucuccauauuccuccaucucgucaaaauacccacucaccgccacaucgucggcaaaucaugccccaaaccccaccgacucaaccacaugggcauaugcuccugcggacucuacggccaacccggcguccccgucaaauggaaacgcuaa

SEQ ID NO: 6025 - RNA, 1476 nt, Artificial Sequence
  derived and/or modified protein sequence (opt11) from LASV(G1646-SLE-2011;Clade IV)__AIT17192__GPCstabilized
augggucaaaucgucacauucuuccaagaaguaccccacgucaucgaagaggucaugaacaucguccucauagcacucuccauccuagccguccuaaaaggacuauacaacuucgccacaugcggcuucaucggccucgucagcuuccuacuacucugcggccgcucaugcacuaccucccucuacaaaggcguauacgaacuccaaacccucgagcucaacauggaaacccuaaacaugaccaugccccucuccugcaccaaaaacaacagucaccacuacaucauggucggcaacgaaaccggccuagaacuaacccucaccaacaccuccauaaucaaucacaaauucugcaaucuuagcgacgcccacaaaaagaaccuauacgaccacgcccucaugagcaucaucuccacauuccaccucucaauccccaacuucaaccaguucgaagccauguccugcgacuucaacggcggcaaaaucucagugcaauacaacuuaagccacucauacgccgucgacgcagccaaccacugcggcacagucgcaaacggcguucuccaaaccuucaugcgaauggccuggggcggauccuacaucgcuuuagacucuggaugcggcuccugggacugcaucaugacaucuuaccaauaccuaaucauccaaaacaccaccugggaagaccacugccaguucucccguccaucccccaucggauaccucggccuccucucccaaagaaccagagacaucuacauaucccgccgccgccgcggaaccuucaccuggacccucuccgacuccgaaggcaaagacacacccggcggguacugccucacacgcuggaugcucaucgaagcagaacuaaaaugcuucggcaacaccgcuguggccaaauguaacgaaaaacacgacgaagaguucugcgacaugcuccgucuauucgacuucaacaaacaagccauccagcgccuuaaagcacccgcccagauguccauucaacucaucaacaaagccgucaaugcccuaauaaacgaccaacuuaucaugaagaaccaccugagagacauaauguguauccccuacuguaacuacuccaaauacugguaccuuaaccacacaaccaccggccgaaccucacucccgaaaugcuggcucgucucaaacggcuccuaccucaacgaaacacacuucuccgacgacauagaacaacaagcagacaacaugauaaccgaaaugcuccaaaaagaauacauggaacgccaaggcaaaacuccacuaggccucguggaccuuuucgucuucuccacuucauucuaccucaucucaauauuccuccaccucgucaaaauacccacccaccgucacaucgucggcaaauccugccccaaaccccaccgccucaaccacaugggcaucuguuccuguggccucuacggccaacccggaguacccgucaaguggaaacgcuaa

SEQ ID NO: 6026 - RNA, 1476 nt, Artificial Sequence
  derived and/or modified protein sequence (opt11) from LASV(G1647-SLE-2011;Clade IV)__AIT17196__GPCstabilized
augggacaaaucgucaccuucuuccaagaagucccccacgucaucgaagaagucaugaacauaguccucaucgcccuaaguauacucgccguccucaaaggccucuacaaccuagccaccuguggccuagucggacugguuacguuccuccuccuaugcggccgcagcugcaccacaucccucuacaaaggcgucuacgaacuccaaacccucgaacucaacauggaaacccuuaacaugacaaugccccucagcugcaccaaaaacaacucacaccacuauaucauggucggcaacgaaaccggccucgaacucacccucacaaacacguccaucauuaaucacaaauucugcaaccucuccgaugcacacaagaaaaaccuguaugaccacgcccucaugagcaucauuagcaccuuccaccucucgauccccaacuucaaccaauacgaagcaaugucaugcgacuucaacggaggaaaaaucuccguccaauauaaucuuucccacuccuacgccggcgacgccgccaaccacugcggaaccgucgcaaacggcguccuccaaaccuucaugcggauggcauggggcggcagcuacauugcccuagacuccggcugcggacgaugggacugcauaaugaccucauaccaauaccucaucauccaaaacacaaccugggaagaccacugccaauucucacgaccaucccccaucggauauuuaggacuccucucucaacgaacccgugacaucuacauauccaggcgacgcagaggcaccuucaccuggacccucuccgacuccgaaggcaaagacaccccaggaggcuacugucucacccgauggaugcuaauagaagcagaacucaaaugcuucggcaacaccgccgucgccaaaugcaacgaaaaacacgacgaggaguucugcgacaugcuucgccucuucgacuucaacaaacaagccauccagcgccuaaaggcuccagcucaaaugaacauccaacuaaucaacaaagccguuaacgcccuaaucaacgaccagcucaucaugaaaaaucaccuacgagacauaaugugcauccccuacugcaacuacucaaaauacugguaccucaaccacacuacaaccggcaaaacuucccucccccgcugcuggcucgucuccaacggcucguaucucaacgaaacccacuucuccgacgacauugaacaacaagccgacaacaugaucacagaaaugcuacaaaaagaauacauggaacgccaaggcaaaacaccccucggccucgucgaccucuucgucuucuccaccagcuucuaccucauauccaucuuccuacaccuagucaaaauccccacccaccgacacaucgucggcaaacccugccccaagccccaccggcuaaaccacaugggaaucugcuccugcggauucuacaagcaaccaggaguccccgucaaauggaaacgcuaa

SEQ ID NO: 6027 - RNA, 1476 nt, Artificial Sequence
  derived and/or modified protein sequence (opt11) from LASV(G1774-SLE-2011;Clade IV)__AIT17204__GPCstabilized
augggccaaaucgucaccuucuuccaagaagucccucacgucauagaagaaguuaugaacaucguccuuaucgcccuguccauccuugccguacuuaagggacucuacaaccucgcaaccugcggccucguaggucuagucaccuuccuccuccucugcggccgcucgugcacaucgucccucuacaaaggcgucuacgaacuccaaacacucgaacucaacauggaaacacucaacaugaccaugccacuaagcugcacaaagaacucaucccaccacuacauccgcgucggcaacgaaaccgggcucgaacucacacucaccaacacuucgauaaucaaccacaaauucugcaaccucuccgacgcccacaagaaaaaccuauacgaccacgcccuaaugucaauaaucagcaccuuccaccucuccaucccaaacuucaaccaauacgaagccaugagcugcgacuucaacggcggcaaaaucuccgugcaauacaaccuaucccacuccuacgccggagaugccgccaaccacugcggaacugucgccaauggaguccuccaaaccuucaugcguauggcuuggggaggcuccuacauagcgcuagauucaggcugugaccgcugggacugcauuaugaccuccuaccaauaucuaaucauccaaaacacaacgugggaagaccacugccaguucucacgccccuccccaaucggcuaccucggccuacucagccaacgcacccgcgacaucuacauaucccgcagacgccggggcaccuucaccuggacccucuccgacuccgaagguaaagacacccccgggggauacugccucacacgauggaugcuaauugaagcugaacuaaaauguuuuggaaacacagccgucgcuaaaugcaacgaaaaacacgacgaagaguucugcgacaugcuccgccucuucgacuucaacaaacaagccauacaacgccucaaagcccccgcacaaauguccauucaacuaaucaacaaagccgucaacgcacuaauuaacgaccagcucaucaugaaaaaccaucuucgagacaucaugugcauccccuacugcaauuacuccaaauauugguaucuuaaccacaccauaaccggcaagaccucacuccccaaaugcuggcucgucucaaacggcucuuaccucaacaagacccacuucuccgacgacauugaacaacaagccgacaacaugaucacagaaaugcuccaaaaagaauacauggaacgccaaggcaaaacaccccuaggccucgucgaccuauucgucuucuccaccuccuucuacuuaaucucuaucuuccuccaccucaucaaaauccccacccaccgacacaucgucggaaaacccugcccgaaaccccaucgucuaaaccacaugggcaucugcagcugcggacucuacaaacaacccggcgucccagucaaauggaaacguuga

SEQ ID NO: 6028 - RNA, 1476 nt, Artificial Sequence
  derived and/or modified protein sequence (opt11) from LASV(G1792-SLE-2011;Clade IV)__AIT17208__GPCstabilized
augggccaaauagucaccuucuuucaagaagucccacacgucaucgaagaaguaaugaauaucguccucaucgcacucucuauacucgccguccucaaaggucuauacaacuuugccacaugcggccucaucggccuagucaccuuccuacuccucugcggucgaucaugcacaaccucacucuacaaaggcgucuacgaacuccaaacccucgaacucaacauggaaacccucaacaugacaaugccccucuccugcaccaaaaacaacagccaccacuacauaaugguuggcaacgagaccggacucgaacucacgcucacaaacaccuccaucaucaaccacaaauucuguaaccuauccgacgcacacaaaaagaaccuauacgaccaugcacucaugucaaucaucuccaccuuucaccuaucaaucccaaacuucaaccaauacgaagccauguccugcgacuucaacggcgguaaaaucuccguccaauacaaccuaucccacuccuaugccggcgacgccgcaaaucacugcggcaccgucgccaacggaguccuccaaaccuucaugcgcauggccuggggcggaucauacauagcccucgacuccggaugcggccaaugggacugcauaaugaccucauaccaauaccuaaucauccaaaacaccaccugggaagaucacugccaauucagccgcccuucaccgaucggcuaccucggccugcucagccagcgcacacgcgacaucuauaucucccgccgccgacguggcaccuucacauggacucucagcgacuccgaaggcaaagacaccccaggcggauacugccucacccgcuggaugcucaucgaagccgaacucaaaugcuucggaaacaccgccguagcaaaaugcaacgaaaaacacgacgaagaguucugcgacaugcuucgccucuucgacuucaacaaacaggccauccaacgccuuaaagcucccgcacagauguccauccaacucaucaacaaagccgugaacgcccucauaaacgaccaacucaucaugaaaaaccaccuccgugauauaauguguauccccuacugcaacuauuccaaguacugguaccucaaccacaccaccaccggcaaaaccucccuccccaaaugcuggcuagucuccaacggcucauaccuaaacgaaacccacuucuccgaugacauagaacaacaagccgacaacaugaucaccgaaaugcuucaaaaagaauacauggaacgccaaggaaaaaccccucucggccucgucgaccucuucgucuucuccacguccuucuaccucauauccaucuuccuccacuuagucaaaauccccacccaccgccacaucgucggcaaauccugccccaaaccccaccgccuaaaucacauggggaucugcuccugcggucucuacaaacaaccuggagucccggucaaauggaaacgcuaa

SEQ ID NO: 6029 - RNA, 1476 nt, Artificial Sequence
  derived and/or modified protein sequence (opt11) from LASV(G1897-SLE-2011;Clade IV)__AIT17210__GPCstabilized
augggccaaauagucaccuucuuccaagaaguaccccacguaauagaagaagucaugaacauaguccuuaucgcacucuccauccuugccguauuaaaaggacuauacaaccuggcaacaugcggccucguaggccucgucaccuuccuccuccucugcggccgcagcugcacaaccagccuauacaaaggagucuacgaacuccaaacacucgaacuaaacauggaaacccucaacaugaccaugccacuauccuguaccaaaaacaacucacaccacuacauaaugguaggcaacgaaaccgggcucgaacucacccuaaccaacacauccauaauaaaccacaaauucugcaaccucuccgacgcccauaagaaaaacuuauacgaccacgcccucaugagcaucaucucaaccuuccaccuaagcauccccaacuucaaccaauacgaagccauguccugcgacuucaacggcggcaaaaucagcguccaauauaaccuuucccacuccuacgccggcgacgccgcaaaccacugcggaaccguagccaacggcguccuacaaaccuucaugcgcauggccuggggcggcagcuacauagcucucgacucaggaugcgaccgcugggacugcauaaugaccucauaccaauaccugauaauccaaaacaccaccugggaagaccacugccaauucucucgcccgucacccaucggcuaccuuggacucuuaucacaacgcacacgcgacaucuacaucucccgacgccgccgcggcacauucacuuggacccucucggacuccgaaggcaaagacacucccgguggcuacugccucacacgcuggaugcucauagaagcagaacucaaaugcuucggcaacacggcagucgcaaaaugcaacgaaaaacaugacgaagaauuuugcgacaugcuccgccuauucgacuucaacaaacaagcaauccagcgacuaaaagcacccgcacaaaugucaauacaacuaaucaacaaagccguaaaugcccucauaaacgaccagcucaucaugaagaaccaucuccgugacaucaugugcaucccguacugcaacuacuccaaauacugguaccucaaccacaccacgaccggaaaaacuucccuacccaaaugcuggcucgucagcaacggcagcuaccuaaacgaaacccauuucuccgacgacaucgaacaacaagcagacaacaugaucaccgaaaugcuccaaaaagaauacauggaacgccaaggaaaaacaccccuuggccuagucgaucuauucgucuucuccacauccuucuaccuaauuuccaucuuccucagacucguaaaaauccccacucaccgacacaucgucggcaaaccaugcccaaaaccccaccgacucaaccacaugggcaucugcuccugcggccucuacaaacaacccggcguccccgucaaauggaagcgcuaa

SEQ ID NO: 6030 - RNA, 1476 nt, Artificial Sequence
  derived and/or modified protein sequence (opt11) from LASV(G1932-SLE-2011;Clade IV)__AIT17212__GPCstabilized
augggucaaauagucaccuucuuccaagaagucccccacguaauagaagaggucaugaacauaguucugaucgcccuauccauacucgcuguccucaaaggacucuacaaccucgcaaccugcggccuagucggccucguuaccuuccuccuacucugcggccgauccugcaccacaucacuuuacaaaggcgucuacgaacuccaaacccuugaacucaacauggagacccucaauaugacaaugccacucagcuguaccaaaaacaacucccaccacuacauaauggucggcaacgaaacgggacucgagcuaacgcucaccaacaccuccauaaucaaccauaaauucugcaaccuaagcgacgcccaccgcaaaaaccucuacgaccacgcccuaaugucuaucauauccacauuccaccuuuccauucccaacuucaaccaauaugaagccauguccugcgacuucaacggcggcaaaaucagcguccaauacaaccucucucacuccuacgcuggcgacgccgccaaccacugcggcaccgucgccaauggcguccuccaaaccuucaugcgaauggcauggggaggcuccuacauugcacucgacucaggcugcggcaaaugggacugcaucaugaccagcuaccaauaccugauaauacagaacacaacaugggaggaccacugccaauucucccgccccucccccaucggauaccucggccuccugucccaacgcacccgugacauauacaucagccgacgccgccgaggcaccuucaccuggacacucucagacuccgaaggcaaagacacccccggcggauacugccucacccguuggaugcuaauagaagccgaacuaaaauguuucggaaacacagccgucgccaaaugcaacgagaaacacgacgaagaguucugcgacaugcuacgacucuucgauuucaacaaacaggccauccaacgccucaaagcccccgcccagaugucaauacagcuaaucaacaaagccguaaacgcccuaaucaacgaccaacucauaaugaaaaaccaccuccgcgacaucaugugcauucccuacugcaacuacuccaaauacugguaccucaaccacacaacuacggggaaaacaucccugccccgcuguuggcuaguguccaaugguuccuaccucaacgaaacucacuucucugacgacauagaacagcaagcagacaacaugaucaccgaaaugcuccaaaaagaauauauggaacgccaaggcaaaacaccccucgggcucguugaccucuucgucuucuccaccuccuucuaccucaucuccauauuucuacaccucguaaaaauaccaacccaccgccacaucguaggcaaaccaugccccaagccccacagacuuaaccacauggggauaugcagcugcgguuuauacaaacaacccggcguccccgucaaauggaaacgauaa

SEQ ID NO: 6031 - RNA, 1476 nt, Artificial Sequence
  derived and/or modified protein sequence (opt11) from LASV(G1959-SLE-2011;Clade IV)__AIT17216__GPCstabilized
augggccaaaucgucaccuucuuccaggaggucccacacgucauagaagagguaaugaacaucguccucaucgcccucucaauucuugccguauuaaaaggccuauacaacuucgcuaccugcggucuggucggccucguaaccuuccuccuauuaugcggccgcuccugcaccaccucccucuacaagggagucuacgaacuccaaacccuagaauugaacauggaaacacucaacaugacaaugccacuuuccuguaccaaaaacaauucacaccacuauaucaugguaggaaacgaaaccggccuugaacucacccuaacaaacacauccaucaucaaccacaaauucuguaaccucucugacgcucacaagaaaaaccucuaugaccacgcccugaugucgaucauaagcaccuuccaccucuccauccccaacuucaaccaauacgaagccaugucaugcgacuucaacggcggaaaaaucuccguccaauacaaccucucccacuccuacgccggcgacgccgccaaccacugcggaacagucgccaacggaguucuccaaaccuucaugcguauggcauggggaggcuccuacaucgcccucgacucaggaugcggccgaugggacugcaucaugaccuccuaccaauaccuuaucauccaaaacaccaccugggaagaccacugccaguucucccgcccaagccccauugguuaccucggccuccuaagccaaagaacccgcgacaucuacaucucccgccgccgacgcggaaccuucacuuggacccucuccgauagcgaaggcaaagacacccccggcggcuacugccucacacgcuggaugcucaucgaagcagaacucaaaugcuucggcaacaccgccgucgccaaaugcaacgaaaaacacgaugaagaguucugcgacaugcuccgccucuucgacuucaacaaacaagccauacaaagacuaaaagcccccgcacaaauguccauccaacuaaucaacaaagccgucaacgcccucaucaaugaccaacuaaucaugaaaaaucaccuccgcgacaucaugugcaucccguacugcaacuacucuaaauacugguaccucaaccacacaaccaccggaaaaaccucccuccccaaaugcuggcucgucucaaacggcucauaccuaaacgaaacccacuucuccgacgacauagaacaacaggccgacaacaugaucacagaaaugcuccaaaaagaauacauggaacgccagggcaaaaccccucucggccucgucgaccuauucgucuucuccaccuccuuuuaccucaucuccaucuuccuccaccucgucaaaaucccuacccaccgacacaucgucggcaaaccaugccccaagccccaccgccucaacuacaugggcaucugcucgugcggucucuacaaacaacccggcguacccguccgauggaagcgcuag

SEQ ID NO: 6032 - RNA, 1476 nt, Artificial Sequence
  derived and/or modified protein sequence (opt11) from LASV(G2141-SLE-2011;Clade IV)__AIT17224__GPCstabilized
augggccaaauagucaccuucuuccaggaagucccccacguuaucgaagaagucaugaacaucguccucauagcccucagcauccucgccguacucaaaggacuauacaacgucgccacaugcggccuaaucggacucgucaccuuccuucuccuuugcggacgcuccuguaccaccacccuauacaaaggcgucuacgaacuccaagcccucgaacucaacauggaaacacucaauaugaccaugccccuauccugcaccaaaaacaacucccaccacuacauccgcguaggcaacgacaccggccucgaacucacacuuacaaacacaucuaucauccaacacaaguucugcaaucuaucagacgcacacaaaaagaaccuuuaugaccacacccuaauguccauaaucuccaccuuccaccucuccauccccaacuucaaccaguacgaagccaugucaugcgacuucaacggcggcaaaauaucaguccaauacaaccucucccacuccuacgccggcgaugccgcuagccauugcggcaccgucgcaaacggcguccuccaaacguuuaugcgcauggccuggggaggcucauacauagcccucgacucaggaugcggaaacugggacugcaucaugaccuccuaccaauaccucaucauccaaaacacaaccugggaagaccauugccaauucucacggcccuccccuauuggcuaccucggccuccucucccaacgcacccgagacauauacaucucccgccgccgacgaggcaccuucacuuggacacucucggacuccgaaggacgagacacccccggcggcuacugccucacccgcuggaugcuaaucgaagcugaacuaaaaugcuucggcaacacagccgucgccaaaugcaacgaaaaacacgacgaagaguucugcgacaugcuccgacucuucgacuucaacaaacaagccauacaacgccucaaaacgcccgcccaaaugucaauccaacucaucaacaaagccgucaacgcucuaaucaacgaccaacucaucaugaaaaaccaccuccgcgacaucaugugcauccccuacugcaauuacuccaaauacugguaccucaacaacaccauuaccggaaaauccagccuccccaaaugcuggcugguaagcaacggcagcuaccucaacgaaacccacuucucugacgacaucgaacaagaagcagacaacaugaucacagaaaugcuccaaaaagaauacauggaacgccagggcaagacuccccucggccuaguagaccuauuugucuucucaaccucauucuaccucauauccauuuuccuccaccucguaaaaauccccacccacagacacaucguaggaaaaccaugccccaaaccccacagacuaaaccacaugggcgucugcucaugcggccucuacaagcaacccggcguccccguccgcuggaaacgcuag

SEQ ID NO: 6033 - RNA, 1476 nt, Artificial Sequence
  derived and/or modified protein sequence (opt11) from LASV(G2147-SLE-2011;Clade IV)__AIT17228__GPCstabilized
augggccagauaguaacauucuuccaagaagucccccacgucauagaagaaguuaugaacauaguucuaauagcccuaagcauccucgccguccucaaaggccuauacaacuucgcuaccugcggccucguaggccuacucacguuccuccuacuuugcggccgaucaugcaccaccucacuauacaaaggcgucuacgaacuccaaacccucgaacucaacauggagacccuuaauaugaccaugccccucuccugcaccaaaaacaacucccaccacuacaucauggucggcaacgaaaccggacuugaacucacacuuacuaacaccucaauaaucgaccacaaauucugcaaccuaagcgacgcccacaagaaaaaccucuacgaccacgcccucauguccaucaucuccaccuuucaucucuccauucccaauuucaaccaauacgaagccauguccugcgacuucaacggcggcaaaaucuccguacaauacaaccucucacacuccuacgccggcgacgccgcaaaccauugcggcaccgucgcgaacggaguccugcaaaccuucaugcgcauggccuggggcggcuccuacauagcccucgacuccggaugcggaggcugggauugcaucaugaccuccuaccaauaucucaucauacaaaacacaaccugggaagaccacugccaauucucccgacccucccccauaggcuaccucggacuacuaucacagcgcacccgcgacaucuacaucucccgccgccgccgaggcacauucaccuggacccucuccgacucagagggcaaagacacuccaggaggcuacugcuuaacccgcuggaugcuaaucgaggcagaacuaaaaugcuucggcaacaccgccgucgcaaagugcaacgaaaaacacgacgaggaguucugcgacaugcuccgccucuucgacuucaacaaacaggccauacaacgccuaaaggcacccgcccaaaugagcauccaacucaucaacaaagccgucaacgcccucaucaacgaccagcuuaucaugaaaaaccaccuucgcgacaucaugugcaucccguacugcaacuacuccaaauacugguaccucaaccacaccacuaccggaaaaaccucccucccaaaaugcuggcucgucuccaacggcuccuaccucaacgaaacccacuucuccgacgacaucgaacaacaagccgacaacaugaucacagaaaugcuccaaaaggaauauauggaacgacaagguaaaacaccccuaggucuagucgaccucuucgucuucuccacuucauucuaccucauaucaaucuuccuccaccucgucaaaauccccacacacagacacaucgucggcaaauccugcccaaaaccacaccgacucaaccacaugggcauaugcagcugcggccucuacaaacaaccuggcguuccggucaaauggaagcgcuaa

SEQ ID NO: 6034 - RNA, 1476 nt, Artificial Sequence
  derived and/or modified protein sequence (opt11) from LASV(G2165-SLE-2011;Clade IV)__AIT17232__GPCstabilized
augggccaaauaguaaccuucuuccaggaagucccccacguaaucgaagaagucaugaacaucguccucaucgcccuaucaauacucgccguccucaaagggcucuacaacuucgccacgugcgggcuggucggccucgucacuuuccuccuccucugcgggcgaucaugcacuaccucccuauacaaaggcgucuacgaacuccagacucucgaacuaaacauggaaacacucaacaugacuaugccccuauccugcaccaaaaacaacagccaccacuacauccgcguaggcaacgaaaccggacuagaacucacccugacgaacaccuccaucaucaaccacaaauucugcaaccuuuccgacgcacauaagaaaaaccuuuacgaccacgcacucauguccaucauaagcaccuuccaccuuucaauaccaaacuucaaccaauacgaagccauguccugcgacuucaacgaaggaaaaaucucaguccaauacaaccucucccacucauacgcaggagacgccgccaaccacugcggaaccguagcaaacggcguccuccaaaccuucaugcgaauggccuggggcggguccuacaucgcacuagacuccgguugcggcaaaugggacugcaucaugacuucauaccaauaucucauaauccaaaacaccacaugggaagaccacugccaguucucccgccccucccccaucggcuaccucggccuccuaagccaacgcacccgagacaucuacauaucacgccgccgucgcggcaccuuuaccuggacccucagcgacagcgaaggcaaagacacccccggcggcuacugccucacacgauggaugcucaucgaggccgaacuaaaaugcuuuggcaacaccgccgucgccaaaugcaacgaaaaacacgacgaagaguucugcgacaugcuccgccuguucgacuucaacaaacaagccaucgaacgccuuaaagcccccgcccaaauguccauucaacucauaaacaaagcagucaacgcgcugaucaacgaccagcucauaaugaaaaaccaccuaagagauaucaugugcauccccuauugcaacuacuccaaauacugguaccuaaaccacacaaccaccggcaaaaccucccuuccaaaaugcuggcuagucagcaacggauccuaccucaacgaaacccacuucuccgacgauaucgaacaacaagccgacaacaugaucacagaaaugcuccagaaggaauacauggaacgccaaggcaaaaccccacucggacucguugaccucuucgucuucagcacuuccuucuaccuuaucucgauauuccuccaccucgugaaaauacccacacaucgacacauaguaggcaagucaugccccaaaccccaccgccuuaaccacaugggaaucugcucaugcggacucuacaaacaaccaggcgucccugucaaauggaaacgcuaa

SEQ ID NO: 6035 - RNA, 1476 nt, Artificial Sequence
  derived and/or modified protein sequence (opt11) from LASV(G2184-SLE-2011;Clade IV)__AIT17236__GPCstabilized
augggacaaaucgucaccuucuuccaagaagucccccacguaaucgaagaagugaugaacauaguacuaaucgcacuguccauccucgccguccucaagggccuauacaacuucgcaaccugcggccucgucggccucgucaccuuccuccuccucugcggccgcagcugcaccacaucacuuuacaaaggcgucuacgaacuccaaaccuuagaacucaacauggaaacacucaacaugaccaugccacuuuccugcaccaagaacaacucccaucacuauaucauggucggaaacgaaacaggacuagaacucacacucaccaacaccuccaucaucaaccacaaauucugcaaccuauccgacgcccacaagaaaaaccuauacgaccacgcccuaauguccaucaucucgaccuuccacuuauccauaccuaacuucaaccaauacgaagccaugagcugcgacuucaacggcggccgcauaucuguccaauacaaccucagccacucauacgccggggaagccgccaaccacugcggaaccguagccaacggcguccuccaaaccuucaugagaauggccuggggaggauccuacaucgcacuggacuccggcugcggcaaaugggacugcaucaugaccucauaccaauaccucaucauccaaaacacaacaugggaagaccacugccaauucucccgacccuccccaaucgguuaccuaggacuacucucucaacgcacccgagacaucuacaucucccgccgcagacguggcaccuucaccuggacucucagcgacucagaaggcaaagacacccccggcggcuauugccuaacgcgauggaugcucaucgaagcugaacuaaaaugcuucggcaacaccgcaguugccaaaugcaacgaaaaacacgacgaagaguucugcgacaugcuacgccucuuugacuucaacaaacaagccauccaacgccucaaggcaccagcccagauguccauccaacucauuaacaaagcagucaacgcccucaucaacgaucagcucaucaugaaaaaccaccuccgagacaucaugugcauccccuacugcaacuacuccagauacugguaccucaaccacaccacuacuggcaaaaccucccuacccaaaugcuggcuagucuccaacggcaguuaccucaacgaaacccacuucucugacgacauugaacaacaagcagauaacaugaucaccgaaaugcuccaaaaagaauacauggaacgacaaggcaaaacaccccuaggccuagucgaccucuucgucuucucaaccuccuucuaccucaucucaaucuuccuucaccucguuaaaauccccacacaccgccacaucgucgguaaauccugccccaaaccccaccgacucaaccacaugggcaucugcucaugcggccuuuauaaacaacccggcgucccagucaaauggaaacgcuaa

SEQ ID NO: 6036 - RNA, 1476 nt, Artificial Sequence
  derived and/or modified protein sequence (opt11) from LASV(G2197-SLE-2011;Clade IV)__AIT17240__GPCstabilized
augggacagaucgucacauucuuccaagaagucccacacguaaucgaagaagucaugaacaucguccucauagcacucuccauccucgccguccucaagggccucuacaacuuagcaaccugcggccucguuggccuggucaccuuccuacuacuaugcggccgcagcugcacaaccucacucuacaaaggcuucuacgaacuacaaaccuuagaacucaacauggaaacccucaauaugaccaugccccucuccugcaccaagaauaacucccaccacuacaucagaguagguaacgaaaccggccucgaacucacccuaaccaacacauccauuaucgaccacaaauucugcaaccucuccgacgcccauaagaaaaaucuauacgaccacgcacucauguccaucauauccaccuuccaccuauccauccccaacuucaaccaauacgaagccaugucaugcgacuucaacggcggaaaaaucucaguacaauacaaccucucccacuccuacgccggcgacgccgcaaaccacugcggcaccgucgccaacggaguccuccaaacauucaugcgaauggccuggggaggcuccuacauagcccucgacuccggcugcggccgcugggacugcaucaugacaucauaccaauaccuaauaauucaaaacaccaccugggaagaccacugccaauucucccggccaucccccaucggguaccucggccuccuaucccagaaaacccgcgacauuuacaucucccgccgccgacgugguaccuucaccuggacccucuccgacuccgaaggaaaagacacccccgggggcuacugccucacccgauggaugcucaucgaagcagaacuaaaaugcuuuggcaauacagccguagcaaaaugcaacgaaaaacacgacgaggaauuuugcgacaugcuccgccucuucgacuucaacaaacaagccauacaacgccucaaagcacccgcccaaaugagcauccaacuaauaaacaaagcagucaacgcccuuauuaaugaccaacucaucaugaaaaaccaccuccgcgacauuaugugcauccccuacugcaacuacagcaaauacugguaucuaaaccacaccacaaccggcaaaaccucacuccccaaaugcuggcuaguauccaacggcagcuaccugaaugaaacucacuucucagacgacaucgaacaacaagccgacaacaugaucacagagaugcuccaaaaagaauacauggaacgccagggcaaaacgccccucggccucgucgaccucuucguauucucaaccucuuucuaucucaucucaaucuuccuacaccucgucaaaauccccacccaccgacacauagucggcaaaagcugccccaaaccccaccgucucaaccauaugggcaucugcucaugcgggcucuacaaacaaccaggcgucccagucaaauggaaacgcuaa

SEQ ID NO: 6037 - RNA, 1476 nt, Artificial Sequence
  derived and/or modified protein sequence (opt11) from LASV(G2222-SLE-2011;Clade IV)__AIT17244__GPCstabilized
augggccaaauaguaaccuucuuccaagaaguaccccacguaaucgaagaaguaaugaacaucguccucaucgcgcucuccauacucgccguccucaaaggccucuacaaccuagccacuugcggcuuagugggccuagucacauuccuccuccucugcggccgcuccugcaccaccaaccuauacaaaggcgucuacgaacuacaaacccucgaacucaacauggaaacacucaauaugacaaugccacucaguugcacuaaaaacuccucacaccacuacauucgcguaggcaacgaaaccggccucgaacuaacccucaccaacaccucaaucaucgaccacaaauucugcaaccuauccgacgcccacaagaaaaaccucuacgaccacgcccucaugucaaucaucucaacuuuccaccuaucaauccccaacuucaaccaauacgaggccauguccugcgacuucaacggcggcaaaauuucaguacaauacaaccucucccacuccuacguaggugacgccgcagaucacugcggaacaguagcaaauggaguccuccaaaccuucaugcgaauggcauggggcggcucguacauagcccucgacucaggcugcggaaaaugggauugcaucauaaccucauaccaauaccucauaauacaaaauaccaccugggaggaccacugccaauucucacgacccucccccaucggcuaccucggccuccucucacagcgcacccgcgauauauacaucagccgccgccgacgcggaacauucaccuggacgcugucagacuccgaaggaaaagacacccccggcggauacugccugacccgcuggaugcucaucgaagccgaacucaaaugcuucggaaacaccgcuguugccaaaugcaacgaaaaacacgaugaagaguucugcgacaugcuccgccucuucgacuuuaacaaacaagccauacaaagacuaaaagcccccgcccagauguccauacaacuaaucaacaaagccgucaacgcccucaucaacgaccaacucaucaugaaaaaccaucugcgcgacaucaugugcauucccuacugcaacuacucgaaauacugguaccucaaccacacaaucaccggcaaaaccucccucccucgaugcuggcuggucucaaacggcuccuaccucaacgaaacucgcuucagugacgacaucgaacaacaagccgacaacaugaucacagaaaugcuucaaaaagaauauauggagcgacaaggcaaaaccccgcucggacuggucgaccucuucgucuucuccaccuccuuuuaccucaucuccaucuuccuccaccucguaaaaauccccacccaccgccacaucgucggcaaacccugccccaaaccccaccgccugaaccauauggguaucugcuccugcggccucuacaaacaacccggcguccccgucaaauggaaacgcuga

SEQ ID NO: 6038 - RNA, 1476 nt, Artificial Sequence
  derived and/or modified protein sequence (opt11) from LASV(G2230-SLE-2012;Clade IV)__AIT17246__GPCstabilized
augggacaaaucguaacguucuuccaagaaguaccccaugucaucgaagaaguaaugaacaucguccuaaucgcccucagccuccuagccguccucaaaggccucuacaacguugcuaccugcggccucaucggacucaucaccuuccuccuccucugcggccgaucaugcaccaccaaccucuacaaaggagucuacgaacuccaaacccucgaacucaacauggaaaccuuaaacaugaccaugccacuuuccugcacuaaaaacuccagccaccauuacaucauggucggcaacgaaacgggccucgaacucacacucaccaacaccagcaucaucaaccacaaauucugcaaccucagcgaugcccacaagaaaaaccucuacgaccacacucucauguccauuauaucaaccuuccaccucuccauaccaaacuucaaccaauacgaagccauguccugcgacuucaacggcggaaaaaucuccguccaauacaaccucagccacuccuacgccgucgacgcagccaaccacugcggcacugucgcaaacggcauccuacagacauucaugcgaauggccuggggcggaucauacauagcccucgacuccggaugcggcaacugggacuguaucaugaccucauaccaauaccucauaauacaaaacacgaccugggaagaccacugccaguucucaagaccuagcccaaucggcuaccucggacuacucucccaacgaacccgugacauauacauaucacgccgccggcgcgggacuuuuaccuggacccucagcgacucagaaggcaacgacaccccaggaggauacugcuuaacccgcuggaugcucaucgaagccgaacuaaaaugcuucgguaacacagcugucgccaaaugcaacgagaaacacgacgaagaguucugcgacaugcuaagauuauucgacuucaacaaacaagccauccaacgccucaaagcccccgcucaaauguccauccaacuaauaaacaaagccgucaacgcccugaucaacgaccaacucauaaugaaaaaucaccuccgcgacaucaugugcauacccuacugcaacuacagcaaauacugguaccuaaaccacaccacaaccggcaaaaccagccuacccaaaugcuggcucgucucaaacggcagcuaccucaacgaaacccacuucuccgacgacaucgaacaacaagcagacaacaugaucaccgaaaugcuacagaaagaauacauggaacgccaaggcaaaacaccccuaggccuaguagaccuauucgucuucagcaccucauucuaccuaaucuccaucuuccuccaucucgucaaaaucccaacccaccgccacauagucggaaaaccaugccccaaaccgcaccgccucaaccacaugggaaucugcucaugcggccuuuacaaacaacccggcgucccaguaagauggaaacgcuaa

SEQ ID NO: 6039 - RNA, 1476 nt, Artificial Sequence
  derived and/or modified protein sequence (opt11) from LASV(G2259-SLE-2012;Clade IV)__AIT17250__GPCstabilized
augggccagaucguuacuuucuuccaagaaguuccccacgucaucgaagaggucaugaacaucguccuaaucgcccucucacuccuagccguccucaaaggccuauacaacguagcuacaugcggacucaucggacucgucacuuuccuccuccucugcggccgcucuugcacaaccaaccuauacaagggcgucuacgaacuacaaacucucgaacucaacauggagacccuaaacaugacuaugccgcucuccugcaccaaaaacaacucucaccacuauaucaugguaggcaaugaaacaggcuuagaacucacccucacgaacaccuccauuaucaaccacaaguucugcaaucucucagacgcacacaagaaaaaccucuacgaccacacccuaauguccaucaucucgacauuccaccuaagcauacccaacuucaaccaauacgaagccauguccugcgacuucaacggcgggaaaaucuccguacaauacaaccuaucacacucauacgccguagacgcagcaaaccacugcggcaccgucgccaacggcgugcuacaaacauucaugcgcauggccuggggaggcuccuacauagcccuugacuccggaugcggcaacugggauugcaucaugaccuccuaccaauaccuuaucauccaaaacacgacaugggaggaccacugccaauucucacgccccucccccauaggcuaccucggccuacuaucccaacgcacacgagacaucuacaucucccgacgccgccgcggaaccuucaccuggacccuaucagacucagaaggcaacgacacacccggcggauacugccucacccgauggaugcucaucgaagcagaacucaaaugcuucggcaacacugcugucgcaaaaugcaaugaaaaacacgacgaagaguucugcgacaugcuccgccucuucgacuucaacaaacaagcaauccaacgccuaaaagcaccagcccaaaugucaauacaacucaucaacaaagccgucaacgcccucaucaacgaccaacucaucaugaaaaaccaccuucgagacaucaugugcauacccuacugcaacuacuccaaauacugguaccucaaccacacuaccaccggcaaaaccucacuccccaaaugcuggcucgucucaaacggcuccuaccuaaacgaaacccacuucucagacgacaucgaacaacaggccgacaauaugaucaccgaaaugcuucaaaaggaauacauggaacgucaaggcaagaccccacuaggccucgucgaccucuucgucuuuucaaccucauucuaccuaaucagcaucuuccuacaccucguaaagaucccaacccaccgccacaucgucggaaaacccugccccaaaccccaccgccucaaucauaugggaaucugcagcugcggacuauacaaacaacccggaguccccguccgcuggaaacgcuga

SEQ ID NO: 6040 - RNA, 1476 nt, Artificial Sequence
  derived and/or modified protein sequence (opt11) from LASV(G2263-SLE-2012;Clade IV)__AIT17254__GPCstabilized
augggacaaauagucacauucuuccaagaagucccacacgucaucgaagaagucaugaauaucguccucaucgcccucuccauacucgccguacuaaaaggacuguacaacuucgcaaccugcggaauagucggccucgucaccuuccuccuacucugcggccgcucaugcaccaccucacucuacaaaggcgucuacgaacuccaaacacucgaacucaacauggaaacccuaaacaugaccaugccccucucaugcaccaaaaacaacucccaucacuacauaauggucggcaacgaaacaggccucgagcuuacccucaccaacaccuccauaaucaaccacaaauucugcaaccuaucugacgcccacaagaaaaaccuauacgaccacgcccucaugagcaucaucuccaccuuccaccucagcauucccaacuucaaccaauacgaagccauguccugcgacuucaacggaggcaaaauauccguacaauacaaccuuucccacuccuacgccggcgacgccgcuaaccacugcggcaccguagcaaacggaguccuccaaaccuucaugcgaauggccuggggcggauccuacaucgcgcuugacuccggaugcgaccgcugggacugcaucaugaccucauaccaguaccucaucauccaaaacacaaccugggaagaccacugccaauucucacgacccucucccaucggauaucucggacuacucucccaacgaacccgagacauauacauaagccgucgaagacgcgguaccuucaccuggacacuauccgacucagaaggcaaaaacacacccggaggauacugccuaaccagauggaugcucauagaagccgagcugaaaugcuucggcaauacagccguagcaaaaugcaacgaaaaacacgacgaagaguucugugacaugcuccgccucuucgacuucaacaaacaagccauccagcggcucaaagcccccgcccaaaugagcaucucccugaucaacaaagccgucaacgcacuaauaaacgaccaacucauaaugaaaaaccaccuucgcgacauaaugugcaucccauacugcaacuacuccaaauacugguaccucaaccacacuaccaccggcaaaaccucccucccacgaugcuggcucgucagcaacggcuccuaccucaacgaaacccacuucuccgacgacaucgaacaacaagccgacaacaugaucaccgaaaugcuccaaaaagaauacauggaccgccaaggaaaaacaccccucggccuuguagaccuuuucgucuucuccaccuccuucuaccuaauauccaucuuccuccaucucgucaaaauccccacucaccgccacauagucggcaaaacaugcccaaaaccccaccgacuaaaccacaugggaaucugcuccugcggacucuauaaacaacccggcguccccgucaaauggaagcgcuaa

SEQ ID NO: 6041 - RNA, 1476 nt, Artificial Sequence
  derived and/or modified protein sequence (opt11) from LASV(G2280-SLE-2012;Clade IV)__AIT17258__GPCstabilized
augggccaaaucguuacauucuuccaagaaguaccccacgucaucgaagaaguaaugaacaucguccucaucgcacuauccauccucgccguccugaaaggccucuacaacaucgcaaccugcggccuuguaggccucgucaccuuccuacuccucugcggccgaagcugcaccaccucauuauacaaaggcgucuaugaacuacaaacccuagaacucaacauggaaacacucaacaugaccaugccccuauccugcaccaaaaacaacucacaccacuauaucauggucggaaacgaaaccggacucgaacuaacccucaccaacaccucaauaaucaaccacaaauucuguaaccucucagacgcccacaagaaaaaccuauacgaccacgcccuaaugagcaucguauccacauuccaccucuccauacccaacuucaaucaauacgaagccauguccugcgacuucaacggcgguaaaaucuccguacaauacaaccuuucacacagcuacgcuguagacgccgccaaccacugcggcacagucgcaaacggcguccuccaaacauucaugcgaauggccuggggcggcuccuacaucgcccucgacuccggcugcggcggcugggacugcaucaugaccucauaccaauaucuaaucauccaaaacgucaccugggaagaccacugccaauucucacgacccuccccaauaggauaccuaggccucuuaucacagcgaacacgugacguauacaucucccgccgccgccgagguacauucaccuggacacucucagacucagaaggcaacgacacacccggaggcuacugccugacccgcuggaugcucaucgaagccgaacucaaaugcuucggcaacacagccgucgccaaaugcaacgaaaaacacgacgaagaguucugcgacaugcuccgccuauucgacuucaacaaacaagcaauucaacgccuaaaagccccagcccaaauguccauccaacucauuaacaaagcagucaacgcccugaucaacgaccaacucaucaugaaaaaccaucuccgcgacaucaugugcauccccuacugcaacuauuccaaauacugguaccuaaaccacaccaccacuggcaaaacuagccuccccaaaugcuggcuagucuccaacggcuccuaccuaaacgaaacccacuucagcgacgacauagaacaacaagccgacaauaugaucaccgaaaugcuccagaaagaauacauggagcgccaaggcaaaacuccccucggcuuagucgaucuauucgucuucucaaccuccuucuaccuaaucagcaucuuccuccaccucgucaaaauccccacccaccgccacaucgucggcaaacccugcccgaaaccccacagacuuaaccacaugggaauaugcucaugcggccucuacaaacaacccggaguucccgucaaauggaaacgcuag

SEQ ID NO: 6042 - RNA, 1476 nt, Artificial Sequence
  derived and/or modified protein sequence (opt11) from LASV(G2295-SLE-2012;Clade IV)__AIT17262__GPCstabilized
auggggcaaaucgucaccuucuuucaagaagucccacacgucaucgaagaaguaaugaacaucguccuuaucgcacucuccauccucgcaguccucaaaggacucuacaaccucgcuaccugcgggcucguaggccuaguaaccuuccuccuccucugcggacgcucaugcaccaccucacucuacaaaggcguuuacgaacuacaaacccucgaacugaacauggaaacccucaacaugaccaugccccuauccuguaccaaaaacaacagccaucacuacaucaugguaggcaacgaaacaggccucgaacucacccucacaaacaccucaauaaucaaccacaaguucugcaaccuauccgacgcccacaagaaaaaccucuacgaccacgcccucaugucuaucaucuccacauuccaccucuccauacccaauuucaaccaauacgaagccauguccugcgacuucaacggcggcaaaauaagcguccaguacaaccucucccacuccuacgccggcgacgcagccacccacugcggcacagucgccaacgggguccuacaaaccuucaugcgcauggcauggggaggcagcuacaucgcacuagacuccggaugcggcaaaugggacugcaucaugaccucauaccaauaccuaaucauacaaaacaccaccugggaagaccacugucaauucuccagacccuccccaaucggauaccucggccuccuaucccaacgcacacgggacaucuacaucuccagacgccgccgcgggaccuucaccuggacccucuccgacucggaaggaaaagacacccccggcgguuacugccugacccguuggaugcucaucgaagccgaacuaaaaugcuucggcaacaccgcugucgccaaauguaacgaaaaacacgacgaagaguucugcgacaugcuccgacuauucgacuucaacaagcaagccauccaacgccuaaaaacacccgcccaaaugucuauccaacucaucaacaaagccguaaacgcccuaaucaacgaccaacucauaaugaaaaaucaccuacgagacaucaugugcauaccauacugcaacuacagcaaauacugguaccuaaaccacaccacaacaggcaaaaccucccucccacgauguuggcucguauccaacggcuccuaccucaacgaaacccauuucucagacgacaucgaacaacaagcagacaacaugauaaccgaaaugcuacaaaaagaauacauggaacgccaaggaaaaaccccucucggccuaguagaccucuucguauucagcaccuccuucuaccucauuuccaucuuccugcaccuggucaagauccccacacacagacacauagucggaaaaccgugccccaaaccccaccgucucaaccacaugggcaucugcuccugcggucucuauaaacaacccggcguccccgucaaauggaaacgauaa

SEQ ID NO: 6043 - RNA, 1476 nt, Artificial Sequence
  derived and/or modified protein sequence (opt11) from LASV(G2315-SLE-2012;Clade IV)__AIT17266__GPCstabilized
augggacaaaucgucacuuucuuucaagaagucccccacguaaucgaagaagucaugaacauaguccucaucgcccuuuccauccuagcuguccucaaaggccuauacaaccucgccacuugcggccuugucggccucgucaccuuccuccuccuaugcgggcgcagcugcaccacgucccucuacaagggagucuacgaacuccaaacccucgaacuaaacauggagacccucaacaugaccaugccccucucaugcaccaaaaacaacucccaccacuacaucauggucggcaacgaaaccggccucgaacuaacccucaccaacaccucacuaauuaaccacaaauucugcaaccucuccgacgcacacaagaaaaaccucuacgaccacgcccucaugagcaucauaucaaccuuccaccuuucaauaccaaacuucaaucaauacgaagcuaugucuugcgacuuuaacggcggcaaaaucuccguccaauacaaccucucccacucauacgccgucgacgcggcuaaccacugcggcaccgucgccaacggcguacuacaaaccuucaugcguauggccuggggcggcuccuacaucgcccucgacuccggcugcggcggcugggacugcauaaugaccuccuaccaauaccuaaucauccaaaacaccaccugggaagaccauugccaauucucacgacccucgcccauaggcuaccucggccuucucagccaacgcacacgagacaucuacauaucccgacgacgccgcggcaccuucacauggacccuaagcgacuccgaaggcaaagauacucccggcggauacugccucacccgcuggaugcucauagaagccgaacuaaaauguuucggcaacaccgccgucgccaaaugcaacgaaaaacacgacgaagaauuuugcgacaugcucagacucuucgacuucaacaaacaagccauccagcgacucaaagcacccgcccaaauguccauccaacuuauaaacaaggcagucaacgcacucaucaacgaccaguuaaucaugaagaaccaccuccgcgacauaaugugcauccccuacugcaacuacucuaaauacugguacuuaaaccacacaacaaccggacgcaccucccucccacgauguuggcuagucuccaacgguuccuaccuaaacgaaacucacuucuccgacgacaucgaacaacaagccgacaacaugaucaccgaaaugcuccaaaaggaguacauggaaagacaaggaaaaacaccccucggccucguagaccucuucgucuucuccaccucuuucuaccucaucuccaucuuccuccaccuuguaaaaauccccacccaccgacacaucgucggcaaauccugcccaaaaccacaccgccucaaccacaugggcaucugcuccugcggccucuauaaacaaccaggcgucccggucaaauggaaacgcuag

SEQ ID NO: 6044 - RNA, 1476 nt, Artificial Sequence
  derived and/or modified protein sequence (opt11) from LASV(G2318-SLE-2012;Clade IV)__AIT17270__GPCstabilized
augggccaaaucgucaccuucuuucaggaagucccccacgucaucgaagaagucaugaacauaguccuuaucgccuuaucaguccuagcaguccuaaagggacuauacaacuucgcaaccugcggacucguaggccuaguaaccuuccuccuccucugcggacgcucuugcuccacaagcgucuacaaaggaguauacgagcuccaaacccuugaacuaaacauggaaacacuaaacaugacaaugccccucucaugcacaaagaacaacucccaccacuacaucauggucggcaacgaaacaggccuagaacucacccuuaccaacacaucaaucaucaaccacaaauucugcaaccuauccgacgcccacaagaaaaaccuuuacgaucacgcccucauguccaucaucucaaccuuucaccuaagcauccccaacuucaaccaauacgaagccaugucgugcgacuucaacggcggcaaaaucuccgugcaauauaaccuaucccacuccuacgccguagacgcagccaaccacugcggcacagucgcuaacgguguacuccaaacguucaugcgcauggccuggggcggcucauacauugcacucgacagcggaugcggcgguugggacugcaucaugaccaacuaccaguaccucaucauccaaaacacaaccugggaagaccacugccaauucucacgcccauccccaaucggauaccucggccuucucucccaacgcacccgagacaucuacaucucccgaagacgacgcggaacauucaccuggacccucuccgacuccgaaggcaaagacacccccggcggcuacugccuuacccgcuggaugcuaaucgaggccgaacuaaaaugcuucggcaacaccgccguagccaaaugcaacgagaaacacgaugaagaauuuugcgacaugcuacgacuauucgacuucaauaaacaagccauccaacgccuaaaagccccugcccaaauguccauccaacuaauaaacaaagccgucaacgcacucaucaacgaccaacuaauaaugaaaaaccaccuacgcgacaucauguguaucccguacugcaacuacucaaaauacugguaccucaaccacaccacaacaggacgcacaucccuacccaaaugcuggcucgucuccaacggaucauaccuaaacgagacccacuucuccgacgacaucgaacaacaagcagacaacaugaucaccgaaaugcuccaacgagaguacauggaacgacagggcaaaaccccacucggccuaguggaccucuucguauucagcaccucauuuuaccuaaucuccaucuuccuccaccucguaaaaauccccacccaccgccauaucguaggcaaauccugccccaaaccacacagacuaaaccacaugggcauaugcucuugcggacuauauaaacaacccggugucccaguaaaauggaaacgcuag

SEQ ID NO: 6045 - RNA, 1476 nt, Artificial Sequence
  derived and/or modified protein sequence (opt11) from LASV(G2363-SLE-2012;Clade IV)__AIT17274__GPCstabilized
augggccaaaucgucaccuucuuccaagaagucccccacguaauagaagaaguaaugaacaucguucucaucgcccucagcauccucgccguacucaaaggccuauauaacgucgccacgugcggccucaccggccucgucgccuuccuccuccucugcggccgguccugcaccacuacccuauacaaaggcgucuacgaacuccaagcccucgaacuaaacauggaaacccucaacaugaccaugccuuuaucaugcaccaagaacaacucccaccauuacauccgagucgguaacgaaaccggccuagaacucacacucacaaacaccuccaucaucgaacaccgcuucugcaaccucucagacgcccacaagaaaaaccucuacgaccacgcacucaugagcauaaucucuaccuuccaccucucaauaccaaacuucaaccaauacgaagccaugucgugcgauuucaacggcgggaaaaucuccguacaauacaaccucucccauuccuacgcaguagacgccgccaaccacuguggaaccgucgccaacggcguccuccaaacauucaugcgcauggccuggggcgggagcuacauugcccucgacucgggcugcaacggcugggacugcaucaugaccucauaccaauaccucaucauccagaacaccaccugggaagaccacugccaauucucccgccccucucccaucggauaucuuggccuccucucccaacgcacccgcgacauauauaucucccgccgucgccgcggcacauucacauggacccuuuccgacucagaaggcaaagacacccccgggggcuacugccucacccgcuggaugcucaucgaagccgaacugaaaugcuuuggcaacacagccgucgccaaaugcaacgaaaaacacgacgaagaguucugcgacaugcucagacucuucgacuucaacaaacaagcaauccaacggcuaaaagcacccgcacaaauguccauccaacucaucaauaaagcagucaacgcccucauaaaugaccaacucaucaugaaaaaccacuuacgcgacauaaugugcauccccuacugcaacuacuccaaauacugguaccucaacaacaccgcgaccgguaaaaccucacucccccgcugcuggcuuguuuccaacggauccuaccucaacgaaacccacuucuccgacgacauugaacaacaagccgacaacaugaucacagaaaugcuccaaaaagaauacauggaacgucaaggaaaaacgccccucggccucgucgaccuauucgucuucucaaccuccuucuaccucauuuccauauuucuucaccucguaaaaauccccacccaccgccacauugucggcaaacccugccccaaaccccacagacucaaccacaugggcaucugcuccugcggucucuacaaacaacccggcgcccccguccgauggaaacgcuaa

SEQ ID NO: 6046 - RNA, 1476 nt, Artificial Sequence
  derived and/or modified protein sequence (opt11) from LASV(G2384-SLE-2012;Clade IV)__AIT17276__GPCstabilized
augggacagaucgucaccuucuuucaagaaguaccacacgucaucgaggaagucaugaacaucguccucaucgcccucuccauccucgccguccuaaaaggccucuacaacuuugcuaccugcggacucgucggccucgucacuuuccuccuccuaugcggacgcuccugcaccaccucccuauacaaaggagucuacgaacuacaaacccuugaacucaacauggaaacccucaacaugaccaugccacucucaugcacuaaaaacaacucccaccacuacaucauggucggcaacgaaaccggccucgaacucacccuuacgaacacuagcauaaucaaccacaaauucugcaaccucagcgacgcgcacaagaaaaaccucuacgaccacgcccucauguccaucaucuccaccuuucaccuaucuauaccgaacuuuaaccaauacgaagccauguccugcgacuucaacgguggcaaaaucuccguccaauacaaccucagccacuccuacgccggcgacgccgcaaaccacugcggcacagucgccaacggcguccuacaaaccuucaugcguauggccuggggcggcuccuacaucgcccucgacagcggcugcggcaaaugggacugcaucaugaccucuuaccaauacuuaauaauucaaaacaccaccugggaagaccacugccaguucucucgcccauccccaaucggcuaccucggccugcuaucccaacgcacccgagacauuuacauaucacgacgccgccgaggaaccuucacauggacacucuccgacuccgagggcaaagacacaccaggagguuacugccucacccgcuggaugcucaucgaagcagaacuaaaaugcuucggcaacaccgccguagccaaaugcaacgaaaagcacgacgaagaauuuugcgacaugcuacgccuguucgacuucaacaaacaagccauccagcgccucaaagcccccgcccaaaugucuauccaacuaauuaacaaagccguaaacgcccucauaaacgaccagcuuauuaugaaaaaccaccuccgcgacaucauguguauccccuacugcaacuacuccaaauacugguaccucaaccacaccaccaccggaaaaaccagccucccaaaaugcuggcucguuagcaacggcucauaucugaacgaaacacacuucagugacgacaucgaacaacaggccgacaacaugaucacugaaaugcuccaaaaagaauacauggaacgccaaggcaaaaccccacucggccuugucgaccuauucgucuuuucaaccuccuucuaccuaaucuccaucuuccuucaccucgucaaaauccccacccaccgccacaucgucggaaaguccugccccaaaccccaccgccuaaaucacaugggcaucugcuccugcggacucuauaaacaacccggcguccccgugcgauggaaacgcuaa

SEQ ID NO: 6047 - RNA, 1473 nt, Artificial Sequence
  derived and/or modified protein sequence (opt11) from LASV(G2392-SLE-2012;Clade IV)__AIT17280__GPCstabilized
augggccaaaucgucaccuucuuccaagaagucccccacgucauugaagagguuaugaauaucguacucaucgcccucuccauacuagccguccucaaaggccucuacaacuucgcaacuugcggccuaguuggacucguaacuuuucuacuccuaugcggccguuccugcaccacuucucucuacaaaggcguauacgaacuccaaacccuggaacuaaauauggaaacccugaacaugaccaugccccucagcugcaccaaaaacaacucccaccacuacauacgugucggcaacgaaacaggacuagaacucacccuaaccaacaccuccaucaucgaccacaaauucugcaaccucagcgacgcccacaagaaaaaccuauacgaccacgcccucaugagcauaaucuccacauuccaccucucaauacccaacuucaaccaauacgaagcaauguccugcgacuucaacgggggcaagaucucaguccaguacaaccucucccacuccuacgcuggagacgcugcaaaucauugcggcacagucgccaacggcguccuccaaaccuucaugcguauggcauggggcggguccuacauagcccucgacuccggcugcgaaugggacugcaucaugaccuccuaccaauaccucaucauccaaaacacaaccugggacaaucauugccaauucucacgucccucacccaucggauaccucggacuccugucccaacggacacgcgacaucuacaucucacgccgccgccgcggcaccuucaccuggacccucagcgacucagaaggcaaagauacaccuggaggauacugccuaacucgguggaugcucaucgaagccgaacucaaaugcuucggcaacaccgcggucgccaaaugcaacgaaaaacacgacgaagaguucugcgacaugcuccgacucuucgacuucaacaaacaagccauccaacgacuaaaaguccccgcccaaauguccauccaacuaaucaacaaagcagucaacgcccucaucaacgaccaacuaaucaugaaaaaccaccuaagagacaucaugugcaucccauacuguaacuacuccaaauacugguaccucaaccacaccaccaccggcaaaaccucccuccccaaaugcuggcucgucucaaacggcuccuaccucaacgaaacccacuuuuccgacgacaucgaacaacaagccgacaacaugaucacagaaaugcuccagaaggaauacauggaacgccaaggcaaaacuccccucggcuuagucgaccuauucgucuucucuacauccuucuaccucauauccaucuuccuccaccuagucaaaauccccacccaucgccacaucgucggaaaaucaugccccaaaccccaccgccucaaccacaugggaaucugcucuugcggcuucuauaaacaaccaggaguccccgucaaauggaagcguuag

SEQ ID NO: 6048 - RNA, 1476 nt, Artificial Sequence
  derived and/or modified protein sequence (opt11) from LASV(G2405-SLE-2012;Clade IV)__AIT17284__GPCstabilized
augggccaaaucgucacauucuuucaagaagucccccacguaauagaagaagucaugaacaucguccugaucgcccucuccguacuugccguacuaaaaggucucuacaauuucgcaaccugcggaauaguaggccucgucaccuuccuccuccucugcggccgaucaugcaccaccucacuauacaaaggcguuuacgaguuacaaacacucgagcuuaacauggagacacucaauaugacaaugccccucuccugcaccaagaauaacucacaccacuacaucauggucggaaacgauacuggccuagaacuaacccucacuaacaccuccauaaucaaccacaaauucugcaaccucuccgacgcccacaaaaagaaccucuaugaccaugcccucauguccaucaucucaaccuuucaccucucaauccccaacuucaaccaauacgaggccaugucaugcgacuucaacggcggcaaaaucuccguccaauacaaccuaucacacucauacgccggcgacgccgccgaccacugcggcaccguagccaacggcguucuccaaacauucaugcgcauggccuggggcggcuccuacaucgcgcucgacuccggcugcggccgcugggauugcauaaugacauccuaucaauaccuaaucauccaaaacaccacuugggaagaccacugccaauucucccgcccuuccccaauaggauaccuaggccuacuaucccaacgcacucgcgacaucuacaucucacgcagacgacgcggcaccuucacuuggacccucucggacuccgaaggcaaagacaccccaggaggauacugccucacucgcuggaugcucaucgaagccgaacucaaaugcuucggcaacaccgccgucgccaagugcaacgaaaaacacgacgaagaguucugcgauaugcuccgccucuucgacuucaacaagcaagcaauccaacgccuaaaagccccugcucaaauguccauccaacucaucaauaaagccguuaaugcccucaucaacgaccagcucaucaugaagaaccaccuacgcgacaucaugugcaucccuuacugcaacuacuccaaguacugguaccucaaccacaccaccaccgguaaaaccucacuccccaaaugcuggcucguaucgaacgguuccuaccucaacgaaacccacuucuccgacgacaucgaacagcaagccgacaacaugaucaccgaaaugcuccaaaaagaauacauggaacgccaaggcaaaacgccccucggccucgucgaucucuucgucuucuccaccucuuucuaucuaaucuccaucuuccuacaccucgucaaaauccccacccaccgccacaucgucggcaaacccugcccuaaaccacacagacucaaccacaugggcaucugcucuugcggccuguacaagcaacccggagugccaguuaaauggaaacgcuga

SEQ ID NO: 6049 - RNA, 1476 nt, Artificial Sequence
  derived and/or modified protein sequence (opt11) from LASV(G2427-SLE-2012;Clade IV)__AIT17288__GPCstabilized
augggccaaaucgucacauucuuccaagaaguaccacacguaauagaagaagucaugaacaucguccucauagcccuuagcauccucgccguccucaaaggccucuauaacuucgcaacuugcggacucgucggccucgucacauuccuccuccuaugcggccguuccugcaccacuucccuuuacaaaggcgucuacgagcuccaaacccucgaacucaacauggagacacucaacaugacaaugccccuuuccugcaccaagaacaacagccaccacuacaucauggucggaaacgaaaccggccuagaacucacccucaccaacaccuccaucaucaaccacaaauucugcaaccucuccgacgcccauaagaaaaacuuauacgaccaugcccucaugagcaucaucuccacauuccaccucuccaucccaaacuucaaccaauacgaggccaugaguugcgacuucaacggcgguaaaauuagcguccaauacaaccucagccacuccuacgccgucgacgccgccaaccacugcggcaccguugccaacggaguccuccaaaccuucaugcgcauggccuggggcggaggcuacaucgcacuagauucaggcugcggcaacugggacugcaucaugaccuccuaccaauacuuaaucauccagaauaccaccugggaagaccacugccaauucagccgccccucccccauaggguaccucggccuccucucgcaaagaaccagagacaucuacauuuccagacgacgacgcggcacauucaccuggacacuuuccgacagcgaaggcaaagacacccccggcggauacugccucacccgauggaugcuaauagaagcagaacucaaaugcuuuggcaacaccgccguagccaaaugcaacgaaaaacacgacgaagaguucugcgacaugcuccgccucuucgacuucaacaaacaagcaauccaacgccucaaagccccugcccagaugucaauccaacucauaaacaaagccgucaacgcccucauaaacgaccagcuaaucaugaaaaaccaccuccgugacauaaugugcauccccuacuguaacuacuccaaauacugguaucucaaccacaccguaaccgguaaaaccucccucccaaaaugcuggcuugucucuaacggcucuuaccucaacgaaacucacuucuccgaugacaucgaacaacaggccgauaacaugaucaccgaaaugcuccaaaaagaauacauggaacgucaaggcaaaacaccccuuggccucgucgaccucuucguauucuccaccucauucuaccuuauaucaaucuuccugcaccucgucaaaauccccacccaccgacacaucgucggcaaguccugcccaaaaccccaccgccucaaccacaugggcauuugcucaugcggccucuacaaacaacccggcgucccaguacgcuggaaacgauaa

SEQ ID NO: 6050 - RNA, 1476 nt, Artificial Sequence
  derived and/or modified protein sequence (opt11) from LASV(G2431-SLE-2012;Clade IV)__AIT17292__GPCstabilized
augggccaaaucgucacauuuuuccaagaagucccccacgucauagaagaagucaugaacaucguccucaucgcccucuccaucauggccguccucaagggccucuacaacauagccacaugcggccucgucggccucguaaccuuccuccuccucugcggccgcuccuguaccaccacccucuacaaaggcgucuacgaacuccaaacccucgaacuuaacauggaaacccucaacaugaccaugcccuugucgugcaccaaaaacaacucacaccacuacaucauggucggaaacgaaaccggccuagaacucacccuaacaaauacauccaucaucaaccacaaauucugcaaccucuccgacgcccacaagaagaaccuauacgaccacgcccucauguccauaaucuccaccuuccaccuauccauccccaacuucaaccaauaugaagccauguccugcgacuucaacggcggcaagaucucgguccaauacaaccucucccacuccuacgccggcgacgcugccaaccacugcgguaccguugccaauggaguccuccaaaccuucaugcgcauggccuggggcggaagcuacaucgcccucgacucuggcugcggcggaugggacugcauaaugaccucauaccaauaccuaaucauccaaaacaccaccugggaagaccacugucaguucacccgcccaagcccuaucggcuaccuuggccuccuaucccaacgaacccgcgacaucuacaucucccgccgccgccgcggcaccuucaccuggacccuguccgacucagaaggaaacgacacacccggcggcuacugccuaacccgcuggaugcuuauagaagcagaacuaaaaugcuuugggaacacagcuguagccaaaugcaacgaaaaacacgacgaagaguucugcgacaugcuccgacucuucgacuucaacaaacaggccauccaacgccuccgcgcccccgcacaaaugucaauccaacuaauaaacaaagccguaaacgcccuaauaaacgaccaacucauaaugaaaaaccaccuccgcgacaucaugugcauccccuacugcaacuacucaaaauacugguaccucaaccacaccaccaccggccgcaccucccugccacgcugcuggcuagucuccaacgguuccuaccuaaaugaaacacacuucagcgacgacaucgaacagcaagcagacaacaugaucacagaaaugcuacaaaaagaauacauggaacgccaaggcaaaacaccacucggccucgucgaccucuucgucuucaguaccucauucuaccuaaucucaaucuuccuccaccucauuaaaauccccacccacagacacaucgucggcaaaccguguccaaaaccccaccgccucaaccacaugggaguaugcucguguggacucuacaaacaacccggaguccccgucagauggaaacgguaa

SEQ ID NO: 6051 - RNA, 1476 nt, Artificial Sequence
  derived and/or modified protein sequence (opt11) from LASV(G2511-SLE-2012;Clade IV)__AIT17294__GPCstabilized
augggccaaaucguaaccuucuuccaagaagucccacacgucaucgaagaagucaugaacauaguacucauagcccucuccauccuagcaguacucaaaggacucuacaaccuagcaaccugcggccucguaggacucguaaccuuccuucuacuauguggccgcuccugcaccaccucccucuacaaaggcgucuacgaacuccaaacacuagaacucaacauggaaacacucaacaugaccaugccccucagcugcaccaaaaacaacagccaccacuacaucaugguaggcaacgaaacaggccucgagcugacacuaaccaacaccucaaucaucgaccauaaauucugcaaccucuccgacgcccacaagaaaaaccuauacgaccaugcccuuaugucaauaaucuccaccuuccaccucuccauacccaacuucaaccaguacgaagccauguccugcgacuucaacggcgguaaaaucuccguccaauacaaccuaucacacucauacgccggcgacgccgccaaccacugcggcaccgucgccaacggcguccuccaaaccuucaugcggauggccuggggcggcuccuacaucgcacuugacucaggcugcggcggaugggacugcauaaugaccucauaccaguacuuaaucauacaaaacacaaccugggaagaccacugccaauucuccagacccuccccugucggcuaccuaggccuccucucacaaagaacccgcgacaucuauaucucccgacgccgacgaggaaccuucaccuggacccuauccgacuccgagggaaaagacacccccggcggcuacugccuaacccgauggaugcuaaucgaagccgagcucaaauguuucggaaacacagccgucgccaaaugcaacgagaaacacgacgaagaguucugcgacaugcucaggcuauucgacuucaacaaacaagcgauccaacgccucaaaaccccagcccaaauguccauccaacuaaucaacaaagccgucaacgcacuaaucaacgaccagcucaucaugaaaaaccaccucagagacaucaugugcauaccauacugcaacuacucaaaguacugguaccucaaccacaccacaacaggcaagaccucccucccccgcugcuggcucgucuccaacggauccuaccuaaacgaaacccacuucuccgacgacauagaacaacaggccgacaacaugaucaccgaaaugcuccaaaaagaauacauggaacgucaaggcaaaacuccccucggccuaguagaccucuucguauucucaaccucauucuaccucauauccaucuuccuccaccucgucaaaauacccacccaccgacacauaguaggcaagccgugccccaaaccacaccgccuaaaccacaugggcauuugcuccugcggacucuauaaacaaccuggcguccccgucaaguggaaacgauaa

SEQ ID NO: 6052 - RNA, 1476 nt, Artificial Sequence
  derived and/or modified protein sequence (opt11) from LASV(G2554-SLE-2012;Clade IV)__AIT17298__GPCstabilized
augggccaaaucgucaccuucuuccaagaagucccccacgucaucgaagaaguaaugaacaucgucuuaaucgcccuauccauccuugccguccucaaaggacucuacaacaucgccacaugcggacuacuaggccuggucugcuuccuacugcucugcggccgcucuugcaccacaucacuauacaaaggcgucuacgaacuccaaacccuagaacucaacauggagacccuuaacaugaccaugccccucuccugcaccaaaaacaacucccaccacuacaucaugguagguaacgaaaccggacuagaauuaacgcucaccaacaccuccaucaucaaccacaaauuuuguaaccucuccgacgcccacaagaaaaaccuguacgaucacgcacucauguccaucaucuccaccuuccaccucuccaucccaaacuucaaucaauacgaagccauguccugcgacuucaacggcggcaaaaucucaguccaauacaaccugucccacucauacgccgucgacgccgccucgcauuguggcacuauagccaacggcguccuccaaaccuucaugcgcauggccuggggcggcuccuacaucgcacucgacuccggcugcgguggcugggacugcauaaugacguccuaccaauaccucauaauacagaacaccacaugggaagaccacugucaauucucgcgccccucccccaucggcuaccucggccuccucucccaacgcacccgcgacauauacauaagccgccgucgccgaggcaccuucaccuggacucucucugacagcgaaggcaaagacacucccggcggcuauugucucacccgcuggaugcucaucgaggcagaacucaaaugcuucggcaacacagccgucgcuaaaugcaacgaaaaacacgacgaggaguucugcgacaugcuccgccucuucgacuucaauaaacaagccauccagcgucucaaagcccccgcacagaugagcauacaacuaaucaacaaagccgucaaugcccucaucaacgaccagcuuaucaugaaaaaccaccuacgcgauaucaugugcauacccuauugcaauuacucaaaauacugguaccucaaccacaccaccaccggcaaaacuucccuacccaaaugcuggcuugucuccaacggcuccuaccuaaacgaaacccacuucucagacgacaucgaacaacaagcagacaacaugaucaccgaaaugcuacaaaaagaauacauggaacgucaaggcaaaacaccccuaggcuuagucgaccuauucgucuucuccaccuccuucuaccucauauccaucuuccuccaccuggucaaaaucccuacccaccgacacgucgucgguaagcccugccccaaaccccaccgacucaaccacaugggcauaugcucaugcggacuuuacggccaaccuggaguccccgucaaauggaaacgauga

SEQ ID NO: 6053 - RNA, 1476 nt, Artificial Sequence
  derived and/or modified protein sequence (opt11) from LASV(G2557-SLE-2012;Clade IV)__AIT17302__GPCstabilized
augggccaaauaguaaccuucuuccaagaagucccgcacgucaucgaagaagucaugaacauaguccucauagcccuuucccuccucgccguccucaaaggccuauacaauguagcaaccugcggucucauaggcuuaguuaccuuccuacuacucugcggacgcucgugcacaacaaaccucuacaaaggcgucuacgaacuccagacccucgaacucaacauggagacccucaacaugaccaugccccuuagcugcaccaaaaacaacucucaccacuacaucauggucggaaacgaaaccggccucgagcucacacucaccaacaccuccaucaucucccacaaauucuguaaccuuagcgacgcccacaagaaaaaccucuacgaccacacccucaugagcauaaucuccacauuccaccucagcauccccaacuuuaaccaauacgaggccaugucuugcgacuucaacggcggcaaaaucagcguacaauacaaucucucacacagcuacgccgucgacgccgcaaaccacugcggcacaguagccaacggcguccuccagacauucaugcgcauggccuggggcggcuccuacaucgcccuagacucaggaugcgggaacugggacugcaucaugaccuccuaccaauaccugaucauccaaaacaccacaugggaagaccacugccaauucucccgccccucccccaucggcuaccucggccuccucucacaacgcacccgcgacaucuacaucucucgccgaagacgcggaaccuucaccuggacucucagugacuccgaaggcaacgacacacccggcggcuacugccuaacacgcuggaugcucaucgaagccgaacucaaaugcuucggaaacaccgcagucgcuaaaugcaacgaaaaacacgaugaagaguucugcgacaugcuacgccucuucgacuucaacaaacaagccauccaacgcuuaaaagcacccgcccaaaugagcauccaacucauaaacaaagccgucaacgcccuaauaaacgaccaacuaaucaugaaaaaccaccuccgcgacauaaugugcauucccuacugcaacuacuccaaauacugguaccugaaccacacaacaaccggcaaaacaucccucccaaaaugcuggcucguauccaacggaucauaccuaaacgaaacccacuucucagacgacaucgaacaacaagccgacaacaugaucaccgaaaugcuacaaaaagaauacauggaacgccaaggaaaaacaccccuaggccucgucgaccucuucgucuucuccaccucauucuaccucaucucuaucuuccuacaccuagucaaaauaccuacccaccgucacaucgucggcaaaccaugccccaaaccucaccgccuaaaccacaugggcaucugcuccugcggacuauacaaacaacccggcguuccaguccgcuggaaacguuga

SEQ ID NO: 6054 - RNA, 1476 nt, Artificial Sequence
  derived and/or modified protein sequence (opt11) from LASV(G2587-SLE-2012;Clade IV)__AIT17310__GPCstabilized
augggucaaaucguaaccuucuuccaagaaguaccacacgucaucgaagaaguuaugaacaucguccucaucgcacuaucuauacuagccguccucaaaggccucuacaaccucgcaaccugcggucuagucggccuaguaacauuccuccuccucugcggacgauccugcacgacuucccucuacaaaggcguuuacgaacuucaaacacucgaacuuaacauggaaacccucaacaugacuaugccccuauccugcaccaagaacaacucccaccacuacauaauggucggcaacgagaccggccucgaacucacacucaccaacaccucaaucaucaaucacaaauucugcaaccuauccgacgcccacaagaaaaaccucuacgaccacgcccuuauguccauaaucuccacauuccaccucucaauccccaacuucaaccaauacgaagcaauguccugugacuucaacggcggcaaaauauccguccaauacaaccucagucacagcuacgccggcgaugccgccacccacugcggcaccgucgcaaacggcguccuccagaccuucaugcgaauggccuggggcggcuccuacauagcacucgacuccggcugcggcaaaugggacugcaucaugaccuccuaccaauaccucaucauccaaaacaccacaugggaagaccacugccaguucucucgaccauccccaaucgguuauuuaggccuccuuucccaaagaacccgagauauauacaucucacgacgccgccgcggcaccuucacauggacccuaucagacuccgaaggcaaagacacuccaggaggcuacugccucacccgguggaugcuuauugaagccgaacucaaaugcuucggaaacaccgccgucgccaaaugcaacgaaaaacacgacgaagaguucugcgacaugcucagacucuucgacuucaacaaacaagcaauacaaagacuaaagacaccagcacaaauguccauccaacuaauaaacaaagccgugaacgcacucaucaacgaccaacuuauaaugaaaaaccaccuccgcgacauaaugugcaucccauacugcaacuacagcaaauacugguaccuuaaccauaccaccaccggcaaaaccucacucccucgcugcuggcucgucuccaacggcuccuaccuuaacgaaacccacuucucugacgacaucgaacaacaagccgacaacaugaucaccgaaaugcuacaaaaagaauacauggaacgccaaggcaaaacccccuuaggccuagucgaccucuucgucuucuccaccuccuucuaccucaucuccaucuuccuccaccucguaaaaauaccuacccaccgccacaucgucggaaagcccugcccgaaaccacacagacucaacuacaugggcauaugcuccugcggccucuacaaacaacccgggguccccguaaaauggaaacgcuaa

SEQ ID NO: 6055 - RNA, 1476 nt, Artificial Sequence
  derived and/or modified protein sequence (opt11) from LASV(G2612-SLE-2012;Clade IV)__AIT17314__GPCstabilized
augggacaaaucgucacauucuuccaagaagucccccacgucauagaagaagucaugaacaucguccuaaucacucuuuccauccucgccguacucaaggggcucuauaacguggcaaccugcggccuaguaggucucguuaccuuccuucuccucugcggccgaucaugcaccaccagccucuacaaaggagucuacgaacuccaaacccucgagcucaauauggaaacucucaacaugacaaugccacucucaugcaccaaaaacaacagccaccacuacaucauggucggaaacgaaaccggccucgaacuaacccucacaaacaccuccaucaucaaucacaaauucugcaaucucuccgacgcccacaagaaagaccucuacgaccacgcccucaugucaaucaucuccaccuuccaccucucaaucccaaacuucaaccaauacgaagccaugucaugcgacuucaacggaggcaaaauaagcguacaauacaaccucucccacuccuacgccgucgacgccgccaaccacugcggaaccgucgccaacggcguccugcaaacauucaugcgcauggcauggggcggcuccuauaucgcccucgacuccgguugcggcggcugggacugcaucaugaccuccuaccaauaccuaauaauccaaaacaccaccugggaagaccacugccaauucucucgccccagcccaaucggcuaccucggccuacucucucaacgcaccagagacauauacauaucucgccgccgacguggcaccuucaccuggaccuuauccgacuccgaaggcaacgacacccccgggggcuacugccuaacccgguggaugcucauagaagcagaacuaaaaugcuucggcaauacggccguugccaaaugcaaugaaaaacacgacgaagaguucugcgacaugcuccgccuauucgacuucaacaaacaagcaauccaacgccuaaaagcacccgcccaaaugucaauccaacuuaucaacaaagccgucaacgcucucaucaacgaccaacucauaaugaaaaaccaucugcgcgacauaaugugcauccccuauugcaacuacuccaaauauugguaccuaaaccacacaaccaccggcaaaaccagccuacccaagugcuggcuaguaucaaacgguucauaccucaacgaaacccacuucucagacgacaucgaacaacaagcagacaacaugaucaccgaaaugcuccaaaaggaauacauggaacgccaaggcaaaaccccgcucggccucgucgaccucuucgucuucucaaccuccuucuaccucauuuccaucuuccuacaccucguaaaaauucccacccaccgccacauaguuggcaaaccaugcccgaaaccccacagacuaaaccacaugggcauaugcuccugcggacuauacaaacaacccggcgucccggucaaauggaaacgauaa

SEQ ID NO: 6056 - RNA, 1476 nt, Artificial Sequence
  derived and/or modified protein sequence (opt11) from LASV(G2615-SLE-2012;Clade IV)__AIT17318__GPCstabilized
augggccaaaucgucaccuucuuccaagaagucccacacguaaucgaagaaguaaugaacaucguccuaaucgcccucucacuccuugcaguccucaagggccucuacaacguggcaaccugcggccucauaggcuuagucaccuuccuccuccucugcggccgcucaugcacaaccaaccuuuacaaaggcguauacgaacuucagacgcuagagcuaaacauggaaacccucaauaugaccaugccucucagcugcaccaaaaacaacucccaccacuacaucaugguaggaaacgaaaccggccuagaacucacacucaccaacacauccaucaucaaccacaaauucugcaaccucuccgacgcacacaagaaaaaccucuacgaccacgcucucauguccauaaucucuacuuuccaccucuccaucccuaacuucaaccaauacgaagccauguccugcgacuucaacggcggaaaaaucagcguccaauacaaccucucucacuccuacgcugucgacgccgccaaccacugcggaaccgucgccaacggaguccuacaaacauucaugcgcauggcauggggaggcuccuacauugcccuagacucaggcugcggaaacugggauugcaucaugaccuccuaccaauaccucaucauacaaaauaucacuugggaagaccacugucaauucucccgccccucucccaucggcuacuuaggccuucucucacaacgcacccgcgacaucuacaucucgcgccgacgccgaggcaccuucaccuggacccucucagacuccgaaggaaacgacacacccgguggcuacugccucacccgcuggaugcuaauagaggccgaacuaaaaugcuucggcaacacugccgucgcaaaaugcaacgaaaaacacgacgaggaguucugcgacaugcucagacucuucgacuucaauaaacaagccauccaacgacucaaagcucccgcccaaauguccauccaacucaucaacaaagccgucaacgcacucaucaaugaccaacuaaucaugaaaaaccaccuccgcgauaucaugugcaucccauauugcaacuacuccaaauacugguaccucaaccacaccaccacaggaaaaaccucacuccccaaaugcuggcucguuucaaacggcuccuaccucaacgaaacccacuucucagacgauaucgaacaacaagccgacaacaugauaaccgaaaugcuucaaaaagaauacauggaacgacagggcaaaacgccccuaggccuagucgaccuauucgucuucucaaccucauucuaccucaucuccaucuuccuucaccucgucaaaaucccuacacaccggcauauagucggaaaacccugcccaaaaccacaccgccuuaaccacaugggcaucuguuccugcggacuguacaaacaacccggcguccccguucgcuggaagcgcuaa

SEQ ID NO: 6057 - RNA, 1476 nt, Artificial Sequence
  derived and/or modified protein sequence (opt11) from LASV(G2723-SLE-2012;Clade IV)__AIT17322__GPCstabilized
augggccaaaucgucaccuucuuccaagaagucccccacgucauagaagaagucaugaacaucguacuaaucgcccucucccuacucgccguccucaaaggccucuacaacgucgccacauguggacucaucggccucgucaccuuccuccuacuaugcggacgcucaugcaccacaaaccucuacaaaggcgccuacgaacuccagacccucgaacucaacauggaaacccuaaacaugaccaugccacuaucaugcaccaaaaacaacagucaccacuacaucauggucggcaacgaaacaggccucgaacuaacccuuaccaacacauccaucaucaaccacaaauucuguaaccucucagacgcccacaagaaaaaccucuacgaccacacgcucauguccaucauuuccaccuuccaccuauccauccccaacuucaaccaauacgaagccauguccugcgacuuuaacggcggcaaaaucuccguccaauacaaccuaucccacuccuacgcagucgaugcagcaaaccacugcggcacaguagccaacggcguccuccaaacauucaugcgaauggcauggggcgguucauacauagcccucgacuccggcugcggcaacugggacugcaucaugaccuccuaccaauaccucauaauccaaaacaccaccugggaagaccacugccaauuuucccgccccuccccgaucggcuaccuaggucugcucucccaacgcacccgcgacauauacauaucccgacgucgccgaggcacauucaccuggacucuuucagacuccgaaggcaacgacacccccggcggcuacugccucacccgcuggaugcucauagaagccgaacucaaaugcuucggcaacaccgccgucgcgaaaugcaacgaaaaacaugacgaagaguucugcgacaugcuccgccuuuuugacuucaauaaacaagccauccaacgccucaaagcuccagcccaaauguccauccagcuaaucaacaaagcagucaacgcacucaucaacgaccaacucauuaugaaaaaccaccuacgcgacauaaugugcauacccuacugcaacuacuccaaauacugguaccuaaaccacaccaccacaggcaaaaccucccuccccaaaugcuggcuugucagcaacggcuccuaccuuaaugaaacccacuucucagaugacaucgaacaacaagcagacaacaugauaaccgaaaugcuacaaaaagaauacauggaacgccaaggcaaaacaccacucggccucguugaccucuucgucuucuccaccagcuucuaccucaucucuaucuuccuccaccugguaaaaauacccacacaccgccauaucgucggcaaaccgugccccaaaccccaccgccucaaccacauggguaucugcagcugcggccucuacaaacaaccuggcguccccguccgcuggaaacgcuga

SEQ ID NO: 6058 - RNA, 1476 nt, Artificial Sequence
  derived and/or modified protein sequence (opt11) from LASV(G2868-SLE-2012;Clade IV)__AIT17328__GPCstabilized
augggacagaucguaaccuucuuccaagagguaccccacgucaucgaagagguaaugaauaucguccuaauaacccucucaauccucgcuguccucaaaggucuauacaacauagccacaugcggccuuguaggauuagucacauuccuccuucuaugcggaaaauccugcaccaccagccuauacaagggagucuacgaacuccaaacccucgaacuaaacauggagacccucaacaugaccaugccccucuccugcaccaaaaacaacagccaccacuacauccgcguuggaaacgaaaccggccucgaacucacccuaaccaacaccagcaucauaaaccacaaauucugcaaccuauccgacgcccauaaaaagaaccucuacgaccacgcccucaugagcaucaucuccaccuuccaccucucaauccccaauuucaaccaauacgaagccauguccugugacuucaacggcggcaaaaucagcguccaauacaaccucucccacuccuacgcaguagaugcagccaaccacugcggcaccgucgcgaacggcguccuucaaacauucaugcgaauggccuggggcggcuccuauaucgcacucgacagcggcugcggaaacugggacugcauaaugacauccuaccaauaccucaucauccaaaacacuaccugggaggaccacugccaauucucccgacccucaccuaucggcuaccucggccugcucucacagcgcaccagagacauauauaucagcagacgacgacgcggaaccuucaccuggacccuauccgacuccgagggcaacgacgcccccgguggcuacugccucacacgcuggaugcucauugaagcagaacucaaauguuucgguaacaccgcugucgccaaaugcaacgaaaaacacgacgaagaguucugcgacaugcuccgccucuucgacuucaacaaacaagccauccaacgucucaaagccccugcccaaauguccauacaacuaaucaacaaagccguaaacgcccucaucaacgaccaacucauuaugaaaaaucaccuccgagacaucaugugcauacccuacuguaacuacucaaaauacugguaccuaaaucacaccaccaccgggaaaaccucccuccccaaaugcuggcucguauccaauggcagcuaccuaaacgaaacacacuucucagaugacaucgaacaacaagccgacaacaugauaacagaaaugcuccaaaaagaauacauggaacgccaaggcaaaacuccacucggacucgucgaccucuucgucuucuccaccucauucuaccucaucuccaucuuccuucaccucgugaaaaucccaacccaccgccacgucguaggaaaauccugccccaaaccccaccgccucaaucacaugggaauaugcucaugcggccucuacaagcaacccggcgucccagucaaauggaaacgcuaa

SEQ ID NO: 6059 - RNA, 1476 nt, Artificial Sequence
  derived and/or modified protein sequence (opt11) from LASV(G2903-SLE-2012;Clade IV)__AIT17332__GPCstabilized
augggccagaucgucaccuucuuccaagaagucccccacgucauagaagaagucaugaacaucguacucaucgcacucuccauacucgccguccucaaaggccucuacaaccucgcaaccugcggccuugucggccuagucaccuuccuacuccuauguggccgcucaugcaccaccucccucuacaaaggagucuacgaacuucaaacacucgaacucaacauggaaacacuuaacaugaccaugccccucuccugcaccaaaaacaacucccaccacuacauccgcgucggaaacgaaaccggccuagaacucacucucaccaacaccucaaucauaaaccacaaauucugcaaccucuccgacgcccacaagaaaaaccucuacgaccacgcccucauguccaucaucuccacuuuccaccuuagcaucccgaacuucaaccaauacgaagccauguccugcgacuucaacggcggaaaaauaagcguccaauacaaccucucacacuccuacgccgucgacgccgccaaccacugcggcaccgucgccaacggaguucuccaaacuuucaugcgaauggccuggggcggcuccuacaucgcccuagauuccggaugcggccgcugggacugcauaaugaccuccuaccaauaccuaauuauccaaaacaccaccugggaagaccacugccuguuuucccguccaucccccaucggcuaccucggccuacuaucccaacgaacccgcgacauauacaucagccgccgccgaagaggcaccuucaccuggacccucuccgacucugaagggcgugacacccccggagguuacugucuaacccgguggaugcuuaucgaggccgagcuaaaaugcuucggcaacaccgccguagcaaaaugcaacgaaaaacacgacgaggaguucugcgacauguuacgccucuucgacuucaacaaacaagccauacaacgauuaaaagcacccgcgcaaaugucaauccaacucaucaacaaagccgucaacgcccucauaaacgaccaacucaucaugaaaaaccaccuccgagacaucaugugcauccccuacuguaacuacucaaaauacugguaccucaaccacaccacaaccggacgcaccucccucccccgcugcuggcucgucuccaacggaucauaccucaacgaaacccacuucagcgacgacauagaacaacaggccgacaacaugaucaccgaaaugcuacaaaaagaauacauggaacgacaaggcaagacaccccucggccuagucgaccucuucgucuucucuaccagcuucuaccucaucuccaucuuucuacaccucguaaaaauccccacccaccgacacauaguaggcaaauccugccccaaaccccaccgccuaaaccacaugggcauuugcuccuguggccucuacaagcaacccgguguacccgucaaguggaaacgcuaa

SEQ ID NO: 6060 - RNA, 1476 nt, Artificial Sequence
  derived and/or modified protein sequence (opt11) from LASV(G2944-SLE-2012;Clade IV)__AIT17340__GPCstabilized
augggccaaaucguaacauucuuccaagaagucccccacgugauagaagaagucaugaacaucguccucaucgcccuaucaauccucgccguccugaaaggccuuuacaacuucgcaaccugcggccuagucggacucguaaccuuucuccuccucugcggacgcuccugcaccaccucacuuuacaaaggcgucuacgaacuacaaacccucgaacucaacauggaaacgcucaacaugaccaugccacucuccugcaccaaaaacaacucccaccacuacauaauggucggcaacgaaaccggccucgaacuaacccucaccaacauuuccaucaucaaccacaaauucuguaaccuauccgacgcccacaagaaaaaccucuacgaucacgcccucauguccauaaucuccaccuuccaccucuccauccccaacuucaaccaauacgaagccauguccugcgacuucaacggcggcaaaaucuccguacaauacaaccuaucccacucuuacgccggcgacgccgccaaccacugcggcaccgucgccaacggcguucuacagacauucaugcgaauggccuggggcggcuccuacaucgcccucgacagcggaugcggcgaaugggacugcauuaugaccuccuaccaauaccucaucauccaaaacacaaccugggaagaccacugccaauucucccgccccucacccaucggauaccucgggcuccugucgcaacgcacccgagacaucuacauaucacgacgccgucgcgguacauucacauggacccucuccgacuccgaaggcaaagacacacccggaggcuacugccucacccgauggaugcucauagaagccgaacucaaaugcuucgguaacaccgccguagccaaauguaacgaaaaacaugacgaagaguucugcgacaugcuacgccuauucgacuucaacaaacaagccauucaaagacucaaagcccccgcacaaaugucaauccaacucaucaacaaagccgucaacgcauugauuaacgaccaacucaucaugaaaaaccaccuccgagacauaaugugcauuccauacugcaacuacucaaaauacugguaccucaaccacaccaccaccgggaaaaccucucucccuaaauguuggcucgucuccaacggcucauaccugaacgaaacccacuucuccgacgacaucgaacaacaagccgacaacaugauaacagaaaugcuacaaaaagaauacauggaacgacaaggcaaaacaccccucggccucgucgaccuauucguauucuccaccuccuucuaccucaucuccaucuuucuccacuuagucaaaaucccaacccaccgccacauagucggcaaaccaugcccccguccacaucgacucaaccacaugggaaucugcagcugcggucuauauaaacagcccggcguaccugucaaauggaagcgcuaa

SEQ ID NO: 6061 - RNA, 1476 nt, Artificial Sequence
  derived and/or modified protein sequence (opt11) from LASV(G3010-SLE-2013;Clade IV)__AIT17344__GPCstabilized
augggccagauagucaccuucuuucaagaagucccccacguaauagaagaggucaugaacaucguccuaauagcccucucaauccuagccguccuaaaaggccuauacaacuucgccacaugcggccuagucggccuaguaaccuuccuccuacugugcggccgcucuugcacgaccagccucuacaaaggagucuacgaacuacaaacccucgaacucaacauggaaacccuaaacaugaccaugccccucuccugcaccaaaaacaacucccaccacuacaucauggucggaaacgaaacaggccuagaacucacccuaaccaacaccucaauaaucaaccacaaguucugcaaccucucagacgcccauaagaaaaaccuauacaaccacgcacuaauguccaucauuuccaccuuucaccuaucuauccccaacuucaaccaauacgaagccaugucuugcgacuucaauggcggcaaaaucucaguccaauauaaccucagucacuccuacgccggagacgcagccucccacugcggcaccgucgccaacggcguacuccaaaccuucaugaggauggcauggggcggaagcuacaucgcccucgacuccggcugcggcaaaugggauugcaucaugacauccuaccaauaucucaucauacaaaacaccaccugggaggaccacugccaauucucccgccccagccccaucgguuaccucggccuacucucccagcgcacccgcgacaucuacaucucccgcagacgccgcggaaccuucaccuggacccuuuccgacuccgaaggcaaagacacacccggcggcuacugccucacucgauggaugcucaucgaagccgaacugaaaugcuuuggcaacacugccgucgccaaaugcaacgagaaacacgacgaagaauuuugcgacaugcuccgccucuucgacuucaacaaacaagccauucaacgccuuaaaacccccgcgcaaauguccauacaacucaucaacaaggccguaaacgcacucaucaaugaccaacuaaucaugaagaaccaccuccgagacauaaugugcauccccuacugcaacuacuccaaauacugguaucucaaccacacaacaaccggcaagaccucccuccccaaauguuggcucguaucaaacggauccuaccucaacgaaacccacuucuccgacgacaucgaacaacaagcagacaacaugaucaccgagaugcuacaaaaggaauacauggaacgccaaggaaaaacgccccuaggacucgucgaccucuucguauucagcaccuccuucuaccugaucuccaucuuccuccaucuugucaaaaucccaacccaccgccacaucgucggcaagucaugccccaaaccacaccgacuaaaccacaugggaauauguucaugcggccucuacaaacagccgggcguccccgugcgcuggaaaagauga

SEQ ID NO: 6062 - RNA, 1476 nt, Artificial Sequence
  derived and/or modified protein sequence (opt11) from LASV(G3016-SLE-2013;Clade IV)__AIT17348__GPCstabilized
augggacaaaucgucaccuucuuccaagaagucccccacgucaucgaagaagucaugaacaucguauuaaucgcccugucuauccucgcaguacuaaaaggccucuacaacaucgcaaccugcggacucaucggccucgucaccuuccuacuccucugcggccgaagcugcaccaccucccucuacaaaggcgucuacgaacuccaaacccucgaacucaacauggaaacccuuaacaugaccaugccacucuccugcaccaaaaacaacucccaccacuacaucauggucgggaacgagaccggcuuagaacugacccuuaccaacaccagcauaauuaaccacaaauucugcaaccuaagcgacgcccacaaaaagaaccuuuacgaccacgcccucauguccaucauaucaaccuuccaccucuccauacccaacuucaaccaauacgaagcgauguccugcgacuucaacggcggaaaaaucuccguucaauacaaccuaucccacuccuacgccggcgacgcugccaaccauuguggaacagucgcaaacgggguccuccaaacauucaugcgaauggccuggggaggcaguuacauagcacucgacucuggcugcggccgcugggacugcaucaugaccucauaccaauaccucaucauccaaaacacaacuugggaagaccacugccaauucucccgccccucaccgaucggcuaccucggacuccucucccaacgcacacgagacaucuauauauccagacgacgccgaggcacauucacuuggaccuugucugacuccgagggcaacgacacucccggcggcuacugccuaacccgcuggaugcucauagaagccgaacucaaaugcuucggcaacaccgccguugccaaaugcaacgaaaaacacgacgaagaauuuugcgacaugcuccgcuuauucgacuucaacaaacaagcaauccaacgccucaaagcacccgcacaaauguccauccaacucaucaacaaagccgucaacgcccuuauaaacgaccaacucaucaugaaaaaccaccuccgcgacauuaugugcauccccuacugcaacuacucaaaauacugguaccuuaaccacaccaccacgggcaagaccucccuccccaaaugcuggcuaguauccaacggcuccuaccuaaaugaaacccacuucuccgacgacaucgaacaacaggccgacaacaugaucacagagaugcuacaaaaagaauacauggaacgccaaggcaaaacaccccucggacucgucgaccucuucgucuucuccaccuccuuuuaucugauauccauauuccuccaccuagucaaaauccccacccaccgccacaucgucggcaaacccugccccaaaccccaccgucuaaaccacaugggcaucugcuccugcggacucuauaagcaaccuggcguaccagucaaauggaaacgcuag

SEQ ID NO: 6063 - RNA, 1476 nt, Artificial Sequence
  derived and/or modified protein sequence (opt11) from LASV(G3034-SLE-2013;Clade IV)__AIT17350__GPCstabilized
augggacaaaucgucaccuucuuccaagaagucccccacgucauagaagaagucaugaacaucguucuaaucgcccucucaauccucgccguccuaaaaggccuauacaacgucgccacauguggccuaauuggacuugucacauuccuccuccuaugcggacguuccugcacaaccacccuauacaaaggcguuuacgaacuccaagcccucgaacuaaacauggaaacacuaaacaugaccaugccccucuccugcaccaaaaacaacucccaccacuacauaaugguaggcaacgaaacgggccuagaacugacacucaccaacaccucaaucaucgaucacaaauucugcaacuuauccgacgcacacaagaaaaaccucuacgaccacgcacucauguccauaaucucaaccuuccaccucucaauacccaacuucaaccaauacgaagccauguccugcgacuucaauggcggaaaaauauccguacaauacaaccucucccacuccuacgccggugacgccgccaaacacugcggaacagucgccaacggcguccuacaaaccuucaugcgaauggcauggggcggauccuacaucgcccuagacucaggcugcaauggcugggacugcgucaugaccagcuaccaauaccuaaucauccaaaacaccacgugggaagaccacugccaauuuagccgacccucucccaucgguuaccuaggacuacucucccaacgcacccgcgacaucuacaucucucgacgacgccgcggaaccuucacauggacccuuuccgacagcgaaggcaaagacacuccuggcggcuacugccuaacucgcuggaugcucaucgaagcugaacucaaaugcuucgguaacacugcagucgccaaaugcaacgaaaaacacgacgaagaguucugcgacaugcuccgccucuucgacuucaacaaacaagccauccaacgccucaaaacacccgcccaaauguccauucaacugaucaacaaagccgucaacgcucucaucaacgaccaacucauaaugaaaaaccaccuccgagacaucaugugcauccccuacugcaacuacuccaaauacugguaccucaaccacaccgucacaggcaaaaccucccucccccgaugcuggcuugucagcaacggcuccuaccuaaacgaaacccacuucucagaugacaucgaacaacaagccgacaacaugaucaccgaaaugcuucaaaaagaauacaucgaacgccaaggcaaaacuccccuuggccucgucgaucucuucgucuucucaaccagcuucuaccucauauccaucuuucuacaccucgucaaaauacccacccaccgccacaucauaggcaaacccugccccaaaccccaccgccucaaccacaugggcaucugcucaugcggccucuacaaacaacccggagucccaguuagauggaaacgcuag

SEQ ID NO: 6064 - RNA, 1476 nt, Artificial Sequence
  derived and/or modified protein sequence (opt11) from LASV(G3101-SLE-2013;Clade IV)__AIT17354__GPCstabilized
augggccaaauagugaccuuuuuccaagaaguuccccacguuaucgaagaagucaugaacauaguacucauagcacucuccauacuugcaguccucaaaggacuauacaacuucgccacaugcggacucgucggacucgucaccuuccuccuccucugcggacgauccugcacaaccucccucuacaaaggcguguacgaacuacaaacccucgagcucaacauggagacccuaaacaugaccaugccccuauccugcaccaaaaacaacucacaccacuacauaauggucggcaacgagaccgggcucgaacucacccucaccaacaucagcaucaucaaccacaaauucugcaaccucuccgacgcccacaagaaaaaccuauacgaccacgcacuaauguccaucaucuccacuuuccaccucuccauacccaacuucaaccaauacgaagccauguccugcgacuucaacgguggcaaaaucuccguacaauacaaccuaucacacucauacgccggagacgccgcaaaccacugcggaacuguugcuaacggaguccuccaaaccuucaugcgcauggcauggggcgggagcuacaucgcacucgacuccggcugcggcggaugggacugcaucaugaccuccuaccaauaccucauaauccaaaacaccaccugggaggaccacugccaauucucccgccccucccccauaggauaccugggccuccucucacaacgcacacgugacauauacauaucacgucgccgccgcggcaccuucaccuggacccuguccgacuccgaaggcaaagacaccccaggcggauacugccucacacgcuggaugcuaaucgaggccgaacuuaaaugcuucgggaacaccgcagucgcuaaaugcaacgaaaaacacgaugaagaguucugcgauaugcuucgccuauucgacuucaauaaacaagccauccaacgacucaaagcccccgcccaaauguccauccaacuaauaaacaaagccgucaacgcccucaucaaugaccaacucaucaugaaaaaccaccuacgcgacaucaugugcauaccauacugcaacuacuccaaauacugguaccucaaccacaccacaaccggcaaaaccucacuaccaaaaugcuggcucguaucaaacggcuccuaccuuaacgaaacacacuucucagacgacaucgaacaacaagccgacaacaugaucaccgaaaugcuccaaaaggaauacauggaacggcaaggaaaaaccccacucggacucguagaccuuuucguauucuccacaucauucuaccucaucuccauauuccuacaccuagucaaaauccccacccaccgccacaucgucggcaagccaugcccacgaccacacaggcucaaccacauggggaucugcuccugcggccuauacaaacaaccagggguacccgucaaauggaaacgcuaa

SEQ ID NO: 6065 - RNA, 1476 nt, Artificial Sequence
  derived and/or modified protein sequence (opt11) from LASV(G3110-SLE-2013;Clade IV)__AIT17360__GPCstabilized
augggacaaaucgucaccuucuuccaggaagucccccauguaaucgaagaagucaugaacauaguacuaaucgcacucuccauccucgccguccuaaagggccucuacaacuucgccaccuguggucucgucggccucgucaccuuccuccuccucugcggacgcuccugcaccaccucccucuauaaaggcgucuacgaacuacaaacccuagaacuaaacauggaaacccucaacaugacuaugccucucagcugcaccaaaaacaacucccaccacuacauccgagucggaaacgaaacaggccucgaacuaacccucacaaacaccuccaucauaaaccaccgcuucugcaaccuauccgacgcacacaagaaaaaccucuacgaccacgcccucaugucgaucaucuccacauuccaucuauccaucccaaacuucaaccaauacgaagccaugucaugcgacuuuaauggcggcaaaauaucugugcaauacaaccucagccacucauacgccggcgacgcagcuaaccacugcggcaccgucgcgaacgguguacuccaaaccuucaugcgaauggccuggggcggcuccuacaucgcccucgacucaggcugcgggaaaugggacugcauaaugacaucauaccaauaccuaaucauacaaaacaccacuugggacgaccauugccaauucagccgcccuucacccaucggcuaccucgggcuccucucccaacgcacgcgggacaucuacaucagcagacgccgacgaggcaccuucaccuggacccucuccgacagcgagggcaaagacacccccgguggauacugccucacccgauggaugcucaucgaagcagaacucaaaugcuucggcaacaccgccguggccaaaugcaacgaaaaacacgacgaagaguucugcgacaugcuacgccucuuugacuucaacaaacaagccauacgccgccucaaagcccccgcucaaaugagcauccagcucaucaacaaagccgucaacgcccucaucaacgaccaacuaaucaugaaaaaccaccuccgcgacaucaugugcauccccuacugcaacuacuccaaauacugguaccugaaccacaccaccaccggcaaaaccuccuuaccccgaugcuggcucgucuccaacggauccuaccugaacgaaacccacuucucggaugacaucgaacaacaagccgacaacaugaucaccgaaaugcuccaaaaagaauacauggaacgccaaggcaaaacaccccugggccucgucgacuuauucgucuucucaaccuccuucuaccuaaucuccaucuuccuucaccuagucaaaauccccacccaccgccauaucgucggcaaauccugcccaaaaccccaccgccugaaccauaugggcaucugcuccugcggcuucuacaaacaacccggcguccccgucaaguggaaacgcuag

SEQ ID NO: 6066 - RNA, 1476 nt, Artificial Sequence
  derived and/or modified protein sequence (opt11) from LASV(G3148-SLE-2013;Clade IV)__AIT17364__GPCstabilized
augggccaaauagucaccuucuuccaagaagucccacacguaaucgaggaagucaugaacauaguacuaaucgcccucuccauccucgcaguccuuaaaggccuauauaacuucgccacaugcggccuaguaggccuagucaccuuccuccuccucugcggacgcucauguaccacaagccuauacaaaggcgucuacgaacuccaaacacuugaacucaacauggaaacccucaacaugacaaugccacucucaugcaccaaaaacaacucccaccacuacaucaugguaggcaacgagacuggacucgaacucacacucaccaacacauccaucaucaaccacaaauucugcaaccucuccgacgcucacaaaaagaaccuauacgaccacgcacucaugagcaucauaagcaccuuccaccucagcauccccaacuucaaccaauacgaagccaugucaugcgacuucaacggcggcaagaucucgguccaguacaaccucucacacucuuacgccggagacgccgccaaccacugcggcaccgucgcaaacggaguccugcagaccuucaugcgcauggccuggggaggaucauacaucgcucucgacuccggcugcgaccgaugggacugcaucaugaccuccuaccaauaccucaucauccaaaacaccacaugggaagaccacugccaguucagccgccccagcccaaucggauaccucggccuucugucucaacgcacacgagacaucuacaucucacgacgcagacgaggcacauucaccuggacacucagcgacucugaagguaaggacacacccggaggcuauugccucacccgcuggaugcucaucgaagccgaacugaaaugcuucggaaacaccgccgucgccaaaugcaacgagaaacacgacgaagaguucugcgacaugcuucgccuauuugacuucaacaaacaagcaauccaacgccucaaagcacccgcacaaauguccauccaacucauaaacaaagcaguaaacgcacuaaucaacgaccaacucaucaugaaaaaccaccuacgagacaucaugugcauccccuacugcaacuacucgaaauacugguacuuaaaccacaccaccaccggaaaaacuucacuacccaaaugcuggcucgucucaaacggcucguaccucaacgagacccacuucucagacgacauugaacaacaagcagacaacaugaucaccgaaaugcuccaaaaggaguacauagagagacaagggaaaacuccccuaggccucgucgaccuauucgucuucuccaccuccuucuaccuaaucuccauauuccuccaccucgucaaaauuccgacccaccgccacaucgucggaaaaccaugccccaaaccccacagacucaaccacaugggcauaugcuccugcggccucuacaaacagcccggcgucagcgucaaauggaaacgcuaa

SEQ ID NO: 6067 - RNA, 1476 nt, Artificial Sequence
  derived and/or modified protein sequence (opt11) from LASV(G3151-SLE-2013;Clade IV)__AIT17368__GPCstabilized
augggccaaaucgucaccuucuuucaagaagucccccacgucaucgaagaggucaugaacaucgucuuaauagcacuuucaauacucgccguccuuaaaggacuauacaacuuugcaaccugcggccucgucggacucgucaccuuccuccuacucugcggacgcagcugcaccacgagccucuacaaaggaguauacgaacuccaaacccucgaacucaacauggaaacccuaaacaugaccaugccccuauccugcaccaaaaacaacucccaccacuacaucauggucggaaacgagacaggacucgaacucacccuuaccaacaccuccauaaucaaccacaaauucugcaaucucucagacgcacacaagaaaaaccuauacgaccacgcccucaugucaaucaucuccaccuuccaccucucuauccccaacuucaaccaauucgaggccaugucgugugacuucaauggcgguaaaaucuccguccaauacaaccucucccacuccuacgccggcgacgccgcgaaccacugcggcaccguagccaacggaguccuucaaacguucaugcgcauggcauggggaggcuccuacaucgcacucgacuccggcugcucaaaaugggacugcaucaugaccagcuaccaauaccucaucauucaaaacaccacuugggacgaccacugccaauucucacgcccuuccccaaucggcuaccucggacuccuaucccaacgaaccagagacaucuacaucucacgccgccgccgcggaaccuucacauggacccugucugacuccgaaggcaaagacacacccggcggcuacugccucacccgcuggaugcuaaucgaagccgaacucaaaugcuucggcaacaccgccguggcaaaaugcaacgaaaaacacgacgaagaguucugcgacaugcuacgacucuucgacuuuaacaaacaagccauacaacgacucaaagccccagcccaaauguccauccaacuuaucaacaaagccguuaacgcacuaauaaacgaccaacucaucaugaaaaaccaccuccgagacaucaugugcauccccuacugcaacuacuccaaauacugguaccucaaccacaccaccacaggaaaaaccucccuccccaaaugcuggcucgucagcaacggcucauaccucaacgaaacccauuucucugacgacaucgaacaacaagcagacaacaugauaaccgaaaugcuccaaaaagaauacauggaacgccaaggcaaaaccccucucggccucguggaucuauucgucuucuccacauccuucuaccucaucuccaucuuccuacaccucgucaaaaucccaacccaccgccacauuguaggcaaauccugccccaaaccacaccgccuaaacuacaugggcaucugcuccugcggcuucuacaagcaaccaggcguccccgucaaguggaaacgauaa

SEQ ID NO: 6068 - RNA, 1476 nt, Artificial Sequence
  derived and/or modified protein sequence (opt11) from LASV(G3157-SLE-2013;Clade IV)__AIT17370__GPCstabilized
augggccaaauagugaccuucuuccaggaagucccccacgucaucgaagaagucaugaacaucguccuaauagcgcucuccauucuggcuguccucaaaggccucuacaacuucgccacaugcggccuagucggccucgucaccuuccuccuccucugcggccgauccugcaccaccucccucuacaaaggcgucuacgaacuacaaacacucgaacucaacauggaaacccuaaacaugaccaugccacuuuccugcacaaaaaacaacucucaccacuacaucauggucggcaacgaaaccggccucgaacuaacacuaacuaacaccucaaucauaaaccacaaauucugcaaccucuccgacgcacacaaaaaaaaccucuacgaccaugcucuaauguccaucaucuccaccuuccaccucuccauccccaauuucaaccaauacgaagcaaugucaugugacuucaauggcggcaaaaucuccguacaauacaaccucucccacuccuacgccggcgacgccgcaaaccacugcgggacagucgccaaugguguacuacaaaccuucaugcgaauggccuggggcggcucauacaucgcccucgacuccggcugcgaccguugggacugcaucaugacauccuaccaauaccucaucauccaaaacaccaccugggaagaccacugccaauucucaagaccaucccccaucggcuaccucggccucuuaucccaacgcacccgagacaucuacaucucaagacggcgccgcggcaccuucacuuggacccuaucggacucagaaggcaaagacacccccggaggcuacugccuaacccgcuggaugcucauagaagccgaacucaagugcuucggcaacacagccguagcaaaauguaacgaaaaacacgacgaagaauucugcgacaugcuacgacucuucgacuucaacaaacaagcaauacaacgccuaaaagcucccgcgcaaauguccauucaacucaucaacaaagcgguaaacgcucucauaaacgaccaacucaucaugaaaaaccaccuccgcgacaucaugugcauacccuacugcaacuacuccaaauacugguaccuaaaccauaccacaaccggcaaaaccucccuaccaaaaugcuggcucgucuccaacgguucuuaccucaacgaaacccacuucuccgacgacauagaacaacaagccgacaacaugauaacagaaauguuacaaaaagaauacauggaacgacaaggcaaaaccccccuaggucucgucgaccucuucgucuucuccaccuccuucuaccucaucagcaucuuccuccaccucgucaaaaucccaacccaccgacauauagucggcaaaccaugcccaaaaccccaccgacucaaccacauggguauuugcagcugcggacuuuacaagcaacccggagucagcgucaaauggaagcgcuaa

SEQ ID NO: 6069 - RNA, 1476 nt, Artificial Sequence
  derived and/or modified protein sequence (opt11) from LASV(G3206-SLE-2013;Clade IV)__AIT17378__GPCstabilized
augggacagauagucacauucuuccaagaaguaccccacguaaucgaagaagucaugaacaucguccugaucgcccucuccaucuuggccguccucaaaggacucuacaaccucgcaaccugcggccuagucggccuagucaccuuccuucuccuaugcggacguucaugcacaaccucccucuacaagggagucuacgaacuacaaacacuagaacucaacauggaaacccuaaacaugacgaugccccucuccugcaccaaaaacaacucacaccacuacaucauggucggaaacgaaaccggccuagaacucacccuaaccaacaccaguauaauaaaccacaaauucugcaaccuauccgacgcccacaagaaaaaccucuacgaucacacucucaugagcaucaucucuacguuccaccuuuccaucccgaacuucaaccaauacgaagccauguccugcgacuucaacgguggcaaaauaucuguccaguacaaccuaucccacucauacgccgucgacgccgccaaccauugcggcacagucgccaacggcguacuucaaaccuucaugcgcauggccugggguggcucauacaucgccuuagacuccggcugcucaggcugggacugcaucaugaccuccuaccaauaccucguaauccagaacaccaccugggaagaccacugccaauucucccgcccaucacccaucggcuaccucggccuccucucccaacgcacccgcgacaucuacauaucccgacgccgccguggaacauucaccuggacacucuccgacucagaagguaaaaauacacccggcggcuacugccugacgcgcuggaugcucaucgaagccgaacucaaaugcuuuggaaacacugccguagcaaagugcaacgaaaaacaugaugaagaguucugcgacaugcucagacucuucgacuucaacaaacaagcaauccaacgccucaaagcaccagcacagaugucaauacaacucaucaacaaagcggucaacgcccuaaucaacgaccaacuuaucaugaaaaaccaccuccgagacauaaugugcauccccuacugcaauuacuccaaauacugguaccucaaucacaccacaaccggccguaccagccuaccccgcuguuggcucgucuccaacggauccuaccucaacgaaacacacuucucggacgauaucgaacaacaagccgacaacaugauaaccgaaaugcuccaaaaagaauacauggaaagacaaggcaaaacaccccuaggccucguagaccucuucgucuucuccaccagcuucuaccucaucucaauauuccuccaccuaguaaaaauccccacacaucgccauauagucggcaaauccugccccaaaccgcaccgccucaaccacaugggcaucugcuccugcggauucuacaaacaacccggcguccccgucaaauggaaacgcuaa

SEQ ID NO: 6070 - RNA, 1476 nt, Artificial Sequence
  derived and/or modified protein sequence (opt11) from LASV(G3234-SLE-2013;Clade IV)__AIT17388__GPCstabilized
augggccaaaucgucaccuucuuccaagaagucccccacgucauagaagaaguuaugaacaucguacuaaucgcccuaagcauccucgccguccuaaaaggccucuacaacgucgcaaccugcggacucaucggccucgucaccuuccuccuacucugcggacgcuccugcaccaccacccuauacaaaggcgucuacgaacuacaagcccucgaacuuaacauggaaacacucaacaugaccaugccucuaagcugcacaaagaauaacucccaccacuacauccgcgucggaaacgaaaccggacucgaacuaacacucaccaacaccuccaucaucaaucacaaauucugcaaccuauccgacgcccacaagaaaaaccuuuacgaccacgcacucauguccauaaucucuaccuuccaccuauccauacccaacuucaaccaauacgaagccauguccugcgacuucaacggcggcauaauuucaguccaauacaaucucucccacuccuaugcaggagacgccgccaaccacugcgguaccgucgccaacggaguacuccaaaccuucaugagaauggccuggggaggcucauauaucgcccucgacagcggaugcaacggcugggacugcaucaugacauccuaccaauaccucaucauccaaaacacuaccugggaugaccacugucaauucucuagaccaucccccaucggcuaccugggccuccuaucucaacgcacccgugacaucuacauaagccgccgccgccguggcacuuucaccuggacccuuuccgacucagaaggcaaagacacccccggcggcuacugccuuacccgauggaugcuaaucgaagcagaacuaaaaugcuucgguaacacagccguugcaaaaugcaacgaaaagcacgaugaagaguucugcgacaugcuccgacucuucgacuucaacaaacaagcaauccaacgccucaaaaccccagcccaaaugaacauccagcuuaucaacaaggcagucaacgcccucaucaaugaccaacucauuaugaaaaaccaccucagagacauuaugugcauucccuacugcaacuacuccaaauacugguaccucaacaacaccgccaccggcaaaacaucccuaccccgcugcuggcuaguaagcaacggcucauaccucaacgaaacccacuucucugacgauaucgaacaacaagccgacaacaugaucaccgaaaugcuucaaaaagaauauauggaacgccaaggaaaaacuccgcucggucucgucgaccuauucgucuucuccacauccuucuaccucaucuccaucuuccuacaccucgucaaaaucccaacccaccggcacaucgucgguaaaccgugcccaaaaccccacagacucaaccacauuggaaucugcucgugcggccuauacaaacaaccaggcgucccgguaaaauggaagcgguaa

SEQ ID NO: 6071 - RNA, 1476 nt, Artificial Sequence
  derived and/or modified protein sequence (opt11) from LASV(G502-SLE-2009;Clade IV)__AIT17126__GPCstabilized
augggccaaaucgucaccuucuuucaagaagucccccacguuaucgaagaaguuaugaacaucguacucaucgcccucuccauccuagccgucuuaaaagggcucuacaacuucgcaaccugcggccucguaggccuacucaccuuccugcuccucugcggccgaucaugcacaaccggacuuuacaagggcguauacgaacugcaaacccucgaacuaaacauggaaacccucaacaugacuaugccccucuccugcaccaaaaacaacagccaccacuacauaauggucggcaacgaaacaggacuagagcucacccuaaccaacaccucgaucaucaaccacaaguucugcaaccuauccgacgcccacaagaaaaaccucuacgaccacgcgcucauguccauaaucuccaccuuccaccugucaauacccaacuucaaucaauacgaagcaauguccugcgacuucaacggaggcaaaaucuccguacaauacaaucugucccacuccuacgccggagacgccgccgaccacugcggcacaguagccaacggcguacuccaaacuuucaugcgaauggcauggggcggcuccuacaucgcucucgacucaggcugcggacgaugggacugcaucaugaccucauaccaauaccuaaucauccaaaacaccaccugggaagaccacugccaauucucccgacccucgccaaucggauaccugggccugcucucccaacgcacccgcgacaucuacauuucccgccgcagacgcggaaccuucaccuggacccucagcgacuccgagggcaaagacacacccgguggcuacugccuaacacgcuggaugcugaucgaagccgaacucaaaugcuucggaaacaccgccguugcaaaaugcaacgaaaaacacgacgaagaguucugcgacaugcuccgacucuucgacuucaacaaacaagccauacaacgccucaaagcccccgcccaaauguccauacaacucauaaauaaagccgucaacgcccucaucaacgaccagcuaguaaugaaaaaucaccuccgagacaucaugugcauaccauacugcaacuacuccagauacugguaccuaaaccacaccaccaccggccgcaccucccucccuaagugcuggcuaguauccaacggcucauaccucaacgaaacacacuucucagacgacaucgagcaacaagccgacaacaugaucacggaaaugcuacaaaaagaauacauggaacgccaaggaaaaaccccacucggccucgucgaccucuucgucuucuccacuucauucuaccuaaucucaaucuuccuacaccucguaaaaaucccuacccacagacacaucguaggcaaauccugccccaaaccccaccgacuaaaccacaugggaauaugcucuugcggacucuacaaacaacccggcguacccguaaaauggaaaagauaa

SEQ ID NO: 6072 - RNA, 1476 nt, Artificial Sequence
  derived and/or modified protein sequence (opt11) from LASV(G503-SLE-2009;Clade IV)__AIT17130__GPCstabilized
augggccaaauagucaccuucuuccaagaagucccacacgucaucgaggaagucaugaacaucguucuaauagcacucuccauccucgccguccucaaaggccucuacaauuucgccacuugcggauuuguuggccucgucaccuuccuccuccucuguggccgcucaugcaccaccucccucuacaaaggcgucuacgaacuccaaacccuagaauuaaacauggaaacccuaaacaugacaaugccccucagcugcaccaagaacaacucucaccacuacauccgcgucggcaacgacaccgggcucgaacucacacuaacgaacaccucgauaauaaaccacaaauucugcaaccucuccgacgcccacaagaaaaaccucuacgaccacgcccuaauguccauaaucuccaccuuccaucuaucaauacccaacuucaaccaguacgaagcaauguccugcgacuucaacggcggcaaaauauccguccaauacaaccuaagccacucauacgccgucgacgcagccucccacugcggcaccaucgccaacggcguccuccaaacauuuaugcgcauggcuuggggaggaucauacaucgcccucgacagcggcugcgaccgaugggacugcaucaugaccuccuaccaauaccuaaucauacaaaacaccacaugggaagaccacugucaauucucccgccccuccccaauaggcuaccuaggccuacucucccagcgcacccgagacaucuacaucucacgacgccgccgcggcaccuuuaccuggacccucagcgacuccgaaggcaaagacacccccgguggguacuguuugacacgcuggaugcuaaucgaagcagagcuaaaaugcuucggaaacaccgcugucgccaaaugcaaugaaaaacacgacgaagaguucugcgacaugcuacgccucuucgacuucaacaaacaagcuauccaacgccuuaaagccccggcccagauguccauucaacucaucaacaaagccguaaacgcacucauaaacgaccagcucaucaugaaaaaccaccuccgagacaucaugugcauacccuacugcaacuacuccaaguacugguaccucaaccacaccaccaccggcaaaaccucccuccccaaaugcuggcucgucuccaacggauccuaccucaacgaaacccacuucuccgaugacaucgaacaacaagccgacaacaugaucaccgagaugcuccaaaaagaguacauggaacgccaaggcaaaaccccacucggccucgucgaccucuucgucuucuccaccucauuuuaccuaaucucaauuuuucuacaccucguaaaaauccccacucaccgccacaucgucggaaaauccuguccaaaaccccaccgccucaaccacaugggaauaugcagcugcgggcucuacaaacagcccggaguccccgucaaauggaaaagauaa

SEQ ID NO: 6073 - RNA, 1476 nt, Artificial Sequence
  derived and/or modified protein sequence (opt11) from LASV(G610-SLE-2009;Clade IV)__AIT17134__GPCstabilized
augggccaaaucgucacauucuuccaagaagucccccacgucaucgaagaagucaugaacauuguacucaucgcccucuccauccucgccguacuuaaaggccucuacaauuucgccacuugcggccuagucggccucgucaccuuccuccuccucugcggccgcaguugcacaacaagccucuacaaaggcgucuacgaacuccaaacacucgaacucaacauggaaacucucaacaugacgaugccacucuccugcaccaaaaacaacucccaccacuacaucauggucggcaacgaaaccggccucgagcucacccuaaccaacacuucaaucaucaaccacaaguucugcaaccucuccgacgcccacaagaaaaaccuauacgaccacgcccucauguccaucauauccacuuuccaccucaguaucccaaacuucaaccaauacgaagccauguccugcgacuucaacgggggaaaaauauccguccaauacaaccucucccacucauacgccggcgacgccgccaaccacugcggcaccgucgccaacggcguccuccaaaccuucaugcguauggccuggggaggcucauacaucgcccuugacucaggcugcggacgcugggacugcauaaugacaagcuaccaauaccuaaucauccaaaacaccacaugggaagaccacugccaguucucccgccccucccccauuggcuaucucggccuacugucccaacgcacccgcgauauauacaucucacgccgcaggcgcggcaccuucaccuggacccuauccgacuccgaaggcaaagacacaccaggcggcuauugccucacccguuggaugcucaucgaagccgaacucaagugcuucggcaacaccgccgucgccaagugcaacgaaaaacacgacgaagaguucugcgacaugcuucgacucuucgacuucaacaagcaagccauccaacgccucaaagcccccgcccaaauguccauccaacuaaucaacaaagccguuaacgcccuaaucaacgaccaacucaucaugaaaaaccaucucagagacaucaugugcauccccuauugcaacuacaguaaauauugguaccucaaccauaccaccaccggcaaaaccucccuccccaaaugcuggcuaguaagcaacggaucauaccuaaacgaaacacacuucucagacgacauagaacaacaagcugacaacaugaucaccgaaaugcuccagaaagaauacauggaacgacaaggcaaaaccccacucggccuagucgaccuauucgucuucuccacgucauucuaucuaauaucaaucuuccuccaccucgucaaaauacccacccaccgccacauugucggcaaaucuugccccaaaccacaccgccucaaccacaugggaaucugcaguugcggccucuacaaacaacccggaguacccgucaaauggaaacgauaa

SEQ ID NO: 6074 - RNA, 1476 nt, Artificial Sequence
  derived and/or modified protein sequence (opt11) from LASV(G636-SLE-2009;Clade IV)__AIT17138__GPCstabilized
augggccaaaucgugaccuucuuccaggaagucccccacgucaucgaagaagucaugaacaucguccucauugcccucuccauacucgcaguccuaaaaggccuuuauaaccuagccacuugcggccucgucggacucgucaccuuccuccuccuuugcggacguucaugcacaaccucccucuacaaaggcguauacgaacugcaaacccucgaacuaaacauggaaacacuuaacaugaccaugccacuaagcugcaccaaaaacaacagccaccacuacaucaugguaggaaacgaaaccggccuagaacucacacucacaaacaccucccucauaaaccacaaauucuguaaccucucagacgcccacaagaaaaaccuuuacgaucacgcccucaugucuauaaucucaaccuuccaccuauccauaccaaacuucaaccaauacgaagcuaugucaugcgacuucaacgguggcaaaaucuccguacaauacaaccucucccacaguuacgccgucgacgccgccucccacugcggcaccgucgccaacggcguccuccaaaccuucaugcgcauggcguggggcggaagcuacaucgcacucgacucaggcugcggcgguugggacugcauaaugacaucauaucaauaccuaauaauccaaaacaccaccugggaagaccacugccaauucucccgcccuuccccaauaggguaccuaggccuacucucccaacgcacccgcgacaucuacaucagccgacgccgccgcggcaccuucaccuggacacucucagacucugaaggcaaagacacacccggcggauacugccuaacccgauggaugcucaucgaagcugaacuuaaaugcuucgggaacacggccguggccaaaugcaacgaaaaacacgacgaagaguucugcgacaugcuccgccucuucgacuucaacaaacaagccauccagcgccucaaagccccugcccaaauguccauacaacucauaaacaaagccgucaacgcacucauaaacgaccaacucaucaugaaaaaccaccuccgcgacaucaugugcauccccuacuguaacuacucuaaauacugguaccucaaccacacaacgaccggccgcacuucccuaccccgaugcuggcucguauccaacggauccuaccucaaugaaacucacuucuccgacgacaucgaacaacaagcagacaacaugaucaccgaaaugcuacaaaaagaauacauggaacgccaaggcaaaacaccccuaggccuagucgaccucuucgucuucagcaccuccuucuaccuaauaagcauauuccuccaccucguaaaaauccccacccaccgacacauagucggcaaauccugcccuaaaccccaccgucucaaccacaugggcaucugcuccugcggacuuuacaagcaaccaggaguacccgucaaauggaagcgauaa

SEQ ID NO: 6075 - RNA, 1476 nt, Artificial Sequence
  derived and/or modified protein sequence (opt11) from LASV(G692-SLE-2009;Clade IV)__AIT17146__GPCstabilized
augggccaaauagucaccuucuuucaagaagucccacacguuaucgaagaaguaaugaacauaguucuaaucgcccucuccauccucgcaguccucaaaggccucuacaaccucgcaacaugcggacucgucggccuagucacauuccuccuccugugcggccgcagcugcacaaccucccucuacaaaggcgucuacgaacuacaaacccucgaacucaacauggaaacccuaaacaugaccaugccacuauccugcaccaaaaacaacucccaccacuacauuauggucggaaacgaaacgggccucgaacucacccucaccaacaccucaaucauaaaccacaaguucugcaaccuauccgaugcccacaagaaaaaccucuacgaccacgcccugaugucuaucaucucaaccuuccaccucuccauccccaacuucaaccaauacgaagccaugucaugcgacuuuaacggcggcaaaauauccguacaguacaaccuaucgcacagcuacgccggagacgcagccaaccacugcggaacuguugccaacggcguacuacaaaccuucaugcguauggccuggggcggcuccuacaucgcccuagacagcggcugcggacgcugggacugcaucaugacauccuaccaauaucucaucauccaaaacacuaccugggaagaccacugcuccuucucccgccccagccccauuggcuaccucggccuccucagccaacgcacacgcgacaucuacaucucacgccgccgucgcggcaccuucacuuggacccucuccgacuccgaaggcaaagacacccccggcggauacugccuaacacguuggaugcucaucgaagccgaacuaaaauguuucgguaacacagccgucgccaaaugcaacgaaaaacacgaugaagaguucugcgacaugcuccgcuuauucgacuucaacaaacaagcaauccaacgccucaaagcacccgcccaaauguccauccaacugaucaacaaagccguuaaugcccucaucaacgaccaacucaucaugaaaaaccaucugcgagacaucaugugcauccccuauugcaacuacucaaaauacugguaccucaaccacaccacaaccggaaaaacaucccucccuaaaugcuggcucgucuccaacgguuccuaccuaaacgaaacucacuucuccgacgacaucgaacaacaagccgauaacaugaucaccgaaaugcuccaaaaagaauauauggaaagacaaggcaaaacaccccucggccuugucgaccuguucgucuucuccaccucauucuaccucaucucaaucuuccuccaccucguaaaaauccccacccaccgccacaucgucggcaaauccugccccaaaccgcaccgacucaaccacaugggcaucugcuccugcggauucuacaaacaaccaggggucccaguaaaauggaaacgauga

SEQ ID NO: 6076 - RNA, 1476 nt, Artificial Sequence
  derived and/or modified protein sequence (opt11) from LASV(G733-SLE-2010;Clade IV)__AIT17154__GPCstabilized
augggccaaaucguaaccuucuuucaagaagucccccacgucaucgaagaaguuaugaacauaguucuaaucgcccuaucaauccucgccguccucaaaggccucuacaacuucgcaaccugcggaaucguuggucuuguaucauuccuccuacuuugcggacgguccugcaccacuucccuuuacaaaggagucuacgaacuccaaacccucgaacucaacauggaaacccuaaacaugaccaugccccucucaugcaccaagaacaacucccaccacuacaucauggucggcaacgaaaccggccucgagcucacccugacaaacacaucaaucauuaaccacaaguucugcaaccuuuccgacgcccacaagaaaaaccucuacgaccacgcccucauguccauaauauccaccuuccaccucuccauccccaacuucaaccaauacgaagccauguccugcgacuucaacggcggaaaaaucucaguccaauacaaccucucccacuccuaugccggagacgccgccaaccacugcggcaccauagcaaacggcguccuccaaaccuucaugcgcauggccuggggcggcagcuacauagcccucgacagcggcugcgaccgaugggacugcauuaugacuucauaccaauaccuaaucauccaaaacacaaccugggaagaccacugccaauucucacgccccucccccauaggauaccucggccuacuaucccaacgcacccgcgacaucuacaucucccgacgccgccgaggcacguuuaccuggacauuguccgacuccgagggcaaagacacacccggcggcuacugccuaacccgauggaugcucaucgaagccgaacucaaaugcuucggcaacaccgccgucgccaaaugcaaugagaaacacgacgaagaguucugcgauaugcuccgccuauucgacuucaacaaacaagcuauccaacgccucaaagcucccgcccaaaugagcauccaacucaucaacaaagccguuaacgcccucaucaacgaccaacucauaaugaaaaaccaccuccgggacaucaugugcauccccuacugcaacuacaguaaauacugguaccuuaaccacaccacaacaggaaagaccuccuuacccaaaugcuggcucguauccaacggauccuaccuaaacgaaacacauuucuccgacgacaucgaacaacaagccgacaacaugaucacagaaaugcuccaaaaagaauacauggaacgccaaggaaaaaccccacuuggccucgucgaccuauucguauuuagcaccucuuucuaccucaucuccaucuuccuccaccuagucaagauacccacccaccgccacgucgucggcaaaagcugccccaaaccccaccgacuuaaccacaugggcauaugcuccugcggacucuauggccaacccggcguccccguuaaguggaaaagguaa

SEQ ID NO: 6077 - RNA, 1476 nt, Artificial Sequence
  derived and/or modified protein sequence (opt11) from LASV(G771-SLE-2010;Clade IV)__AIT17158__GPCstabilized
augggccaaaucgucaccuucuuucaagaagucccccacgucaucgaagaaguaaugaacauaguccuaauagcccucagcauccuugcgguccuuaaaggccuuuauaacuucgcuaccugcggucucgucggccucgucaccuuccuccuccucugcggccgcuccugcaccaccucccuauacaaaggcgucuacgaacuacaaacccuagaacucaacauggaaacccuuaacaugaccaugccccucuccugcacuaaaaacaacucccaccauuacauaaugguaggcaacgaaaccggccucgaacucacucuaaccaacacauccauaaucaaccacaaauucugcaaccucuccgacgcccacaagaaaaaccucuacgaccacgcacucaugucgauaaucuccaccuuccaccuguccauccccaacuucaaccaauacgaagcaaugucuugcgacuucaaugguggcaaaaucagcguucaauacaaccuaucccacuccuacgccggagacgcagccaaccacugcggcaccgucgccaacgggguccuacaaaccuucaugcguauggcauggggcggcucauacaucgcccuugacucuggcugcgaccgcugggacuguaucaugacaucauaccaauaccuaaucauccagaauacaaccugggaagaccacugccaauucucccgccccucucccaucgguuaccucggccuacucucacaaagaacccgagacaucuacaucucaagacgacgccgcggaacauucaccuggacccuaagcgacuccgaaggcaaagacaccccuggaggcuacugccucacucgauggaugcucauagaagccgaacucaaaugcuucgggaacaccgccgucgccaaaugcaacgagaaacacgacgaagaguucugcgacaugcuccgacucuucgacuucaacaaacaagccauccaacgccucaaagcccccgcccaaauguccauacaacucaucaacaaagcaguaaacgcccucaucaacgaccaacucauuaugaaaaaccaccuacgagacauaaugugcaucccauacugcaacuacucgaaauacugguaccucaaccacaccaccaccggcaaaaccuccuugcccaaaugcuggcugguaagcaauggcuccuaccucaacgaaacucacuucucggacgacaucgaacaacaagcagacaacaugaucaccgaaaugcuucaaaaagaauacauggaacggcaaggaaaaacaccccuaggccucgucgaccucuucgucuucuccaccucauucuaccucaucuccauauuccuccacuuaguaaaaauucccacccaccgacacauagucggcaaaagcugucccaagccacaccgacucaaccacaugggaaucugcuccugcggccuuuauaaacaacccggagucccgguaaaguggaaacgcuaa

SEQ ID NO: 6078 - RNA, 1476 nt, Artificial Sequence
  derived and/or modified protein sequence (opt11) from LASV(G808-SLE-2010;Clade IV)__AIT17164__GPCstabilized
augggacaaaucguuaccuucuuccaagaagucccacacgucaucgaagaagucaugaauaucguccucaucgcacucagcauacuagccguccuaaaaggccucuacaacuucgcaaccugcggccuagucggcuuagucaccuuccuccuccucugcggacgcagcugcaccagcucacucuacaaaggcgucuacgaacuccaaacacucgaacuaaacauggaaacacucaacaugaccaugccccuuuccugcaccaaaaacaacucacaccacuacaucagagucggcaacgaaacuggacuggaacucacccuuaccaacacauccaucaucgaccacaaauucugcaaccuguccgacgcccacaagaaaaaucuuuacgaccacgcccucaugucaaucaucucaaccuuccaccucuccauccccaauuucaaccaauacgaagccaugucaugcgacuucaacggcggcaaaaucuccguccaauacaaccugucacacuccuacgccggcgacgccgccaaacacugcggcaccguagccaacggcguacuccaaaccuucaugcgcauggccuggggcggauccuacaucgcacucgacucaggaugcggaaacugggacugcaucaugaccuccuaccaauaccuaaucauccaaaacacaaccugggaggaccacugccaauucucgcgccccucccccauaggcuaccugggucuccucucccaacgcacccgcgauauauacaucucccgccgccgccgcggaacguucaccuggacacucuccgacucugaaggcaacgacgcacccgguggcuacugucucaccagguggaugcucauccaagccgaacuaaaaugcuucggcaacacagccgucgccaaaugcaacgaaaaacacgacgaagaguucugcgacaugcuacgacuauucgacuucaacaaacaagccauccaaagacucaaagcacccgcacaaauguccauccaacucaucaacaaggccgucaacgcccucaucaacgaccaacuuaucaugaaaaaccaccuccgcgacauaaugugcaucccauacugcaacuacagcaaauacugguaccucaaccacaccaccacaggcagaaccucccucccccgaugcuggcucgucuccaacggauccuaccuaaacgaaacacacuucucagacgauaucgaacaacaagcagacaacaugaucacagaaaugcuccaaaaagaauacauggaacgccaaggcaaaacaccccuaggccucgucgaccucuucgucuucucaaccagcuucuaccuuaucuccauauuccuccaccucgucaaaauccccacccaccgacacaucgucggcaaguccugccccaaaccccaccgacucaaccacaugggcaucugcucuugcggccucuucaaacaacccggaguccccguaaaguggaaacgcuaa

SEQ ID NO: 6079 - RNA, 1476 nt, Artificial Sequence
  derived and/or modified protein sequence (opt11) from LASV(Guinea Faranah;Clade IV)__AMZ00381__GPCstabilized
augggccaaaucguaaccuucuuccaggaagucccccaugucaucgaagaagucaugaacaucguucuuaucgcccucuccauccuagcaguccucaaaggacuauacaacgucgcaaccugcggccucaucggccuuaucgccuuccuacuccucugcggccgcuccugcacauccacacuauacaaaggcgucuacgaacuacaagcucuugaacucaacauggaaacccuaaacaugaccaugccccucucaugcaccaaaaacaacucacaccacuacaucaugguaggcaacgaaaccggccuagaacuuacacucaccaacacuagcaucauaaaccacaaauucugcaaccuauccgacgcacacaagaaaaaccuguacaaccacgcacuaaugagcauaaucucaaccuuccaccucuccauccccaacuucaaccaauacgaagccaugucaugugacuucaacggcgguaaaaucuccguccaauacaaccucucccacuccuacgccgucgaugccgcaaaucacugcggaacaguagcaaacggcauccuccaaaccuucaugcgaauggccuggggcggcuccuacaucgcccucgacuccggcugcgggggaugggacugcaucauguccuccuaccaauaccucgucauccaaaacacaacgugggaagaccacugccaauucucucgccccucccccaucggcuacuuaggccuccucucccaacgcacccgcgacaucuacaucucacgccgccgacguggcacuuucacuuggacccuuucagacuccgaaggcaaagacacccccggcggcuacugccuaacccgcuggaugcucaucgaagccgaauuaaaauguuucggcaacaccgcugucgccaaauguaacgaaaaacaugacgaagaguucugcgacaugcuacgccuauucgauuucaacaaacaagcaauccaacgucuuaaagcccccgcccaaauguccauccaacucaucaacaaagccgucaacgcccuuaucaacgaccaacuaauuaugaaaaaccaccuacgcgacauaaugugcaucccguacugcaacuacagcaaauacugguaucucaaccacacuaucaccggucgcaccucacuaccgaaaugcuggcucgucagcaacggcagcuaccucaacgaaacccacuucucagacgacaucgaacaacaagccgacaacaugauaaccgaaaugcuccagaaagaauaccucgaacgccaaggcaagacaccccucggacucgucgaccucuucguauucucaaccuccuucuaccuaaucucuauauuucuccaccucaucaagauccccacacaccgccacauaguaggcaaauccugccccaagccccauagacucaaccacaugggagucugcuccugcgggcucuacaaacaacccggcguccccguccgcuggaaacgcuaa

SEQ ID NO: 6080 - RNA, 1476 nt, Artificial Sequence
  derived and/or modified protein sequence (opt11) from LASV(GUINEA Z-185a;Clade IV)__AMZ00377__GPCstabilized
augggccaaaucgucacauucuuccaagagguaccacacgucauugaagaggucaugaacaucguccucaucgcccucucaauccuagcuguccuaaagggacucuacaacguagcgaccugcggccuuaucggccucguaacauuccucuuucucugcggccgcuccugcuccaccucacucuacaaaggcgucuacgaacuccaaacacuagaauuaaacauggaaacacucaacaugacaaugccccucuccugcaccaaaaacaacucacaccacuacaucauggucggcaacgaaaccggccucgaacuaacacucacaaacaccuccaucaucaaccacaaauucugcaaccucuccgacgcccauaagaaaaaccuauacgaccauacccucaugucuaucauauccaccuuccaccucuccaucccaaacuuuaaccaauacgaagcuaugucaugcgacuucaacggcggcaaaaucuccguccaauacaaucuaucacacuccuacgccgucgacgcagccaaccacugcgguaccguagcaaacggcguacuacaaaccuucaugcguauggcguggggcggcagcuacaucgcccucgacuccggaugcggcaacugggacugcaucaugaccucauaccaauaucucgucauccaaaacaccaccugggaggaccacugccaauucucccgcccaucaccgaucggcuaccuaggccuccucucccaacgcacgcgcgacaucuacaucucccgccgccgccgcggcaccuucacauggacccucucagacucagagggcaaagacacccccggaggcuacugccucacgcgcuggaugcucaucgaagccgaacucaaaugcuucggcaacacggcagucgcuaaaugcaacgaaaaacacgacgaagaguucugcgacaugcuccgccuauucgacuucaacaaacaagcaauacagcgucucaaagccccagcacaaauguccauccaacucaucaacaaagcagucaacgcccuaaucaacgaccagcucauaaugaaaaaccaccuccgcgacaucaugugcaucccauacugcaacuacuccaaauacugguaccucaaccacaccgucaccggaaaaaccucccuccccaaaugcuggcuagucuccaacggcuccuaccucaacgaaacccacuucuccgacgauauugagcaacaagcagacaaccuaaucacagagaugcuacaaaaagaauacauggaacgccaaggaaaaacuccccuaggacucgucgaccucuucguauucagcaccuccuucuaccuaaucucuaucuuccuccaccuaguaaaaaucccaacccaccgccauaucguagguaaacccugccccaaaccccaucgccucaaccacaugggcaucugcagcugcggcguuuacaaacaaccuggcguccccguccgcuggaaacgcuaa

SEQ ID NO: 6081 - RNA, 1476 nt, Artificial Sequence
  derived and/or modified protein sequence (opt11) from MOPV/LASV reassortant(IGS-1;Clade IV)__AFY05576__GPCstabilized
augggccaaaucgucaccuucuuccaagaagucccacacgucauagaagaagucaugaauaucguccuuaucgcacuauccguacuagcaguccuuaaaggacuuuacaacuucgcaaccugcggccugguaggccuaguaaccuuccuccuccucugcggacgcucaugcaccaccagccucuacaaaggaguauacgaacuacaaacccucgaacucaacauggaaacccuuaacaugaccaugccccucuccugcacaaagaacaacucccaccacuauauaauggucggcaacgaaacaggccuggaacucacccuaacaaacaccuccauaaucaaccacaaauucugcaaccucuccgacgcccacaagaaaaaccuauacgaccacgcccuaaugucgauaaucuccacauuccaccucagcaucccaaacuucaaccaauacgaagccauguccugcgacuucaacggcggcaaaaucucuguccaauacaaccuaucacacuccuacgccggugacgccgccaaccauugcgggaccgucgccaacggcguccuccaaaccuucaugagaauggccuggggcggaucguacaucgcccuagacagcggaugcgguaacugggacugcaucaugaccagcuaccaauaccucaucauacaaaacacuaccugggaggaccacugccaguucucacgccccuccccuauaggcuaccucggccugcucagccaacgcacccgcgacauauacaucucccgacgacgacgaggcaccuucaccuggacacucuccgauuccgaaggcgaagacaccccuggcggauacugccugacacgauggaugcucauagaggccgaacucaaaugcuucggcaacacagcagucgcaaaaugcaacgaaaaacacgacgaagaguucugcgacaugcuccgccuauucgacuucaacaaacaagccauccaacgauuaaaagccccagcccaaauguccauacaacucaucaacaaagccgucaacgcacuaauaaacgaccagcuaaucaugaaaaaccaccuccgagacaucaugugcauaccauacugcaacuacuccaaauacugguaccucaaccacacaaccacuggacgcaccucucuccccaaaugcuggcucgucucaaacggcagcuaccuuaacgaaacccacuucuccgacgacaucgaacaacaagccgacaacaugaucaccgaaaugcuacaaaaagaauacauggaaagacagggcaagacaccccucggccuagucgaccucuucguauucuccaccuccuucuaccuaaucucaaucuuccuacaccuagucaaaauccccacccaccgccacauaguaggcaaauccugccccaaaccccaucgccucaaccacaugggcauaugcucaugcggucucuacaaacaacccggcguccccgucaaguggaaacgauga

SEQ ID NO: 6082 - RNA, 1476 nt, Artificial Sequence
  derived and/or modified protein sequence (opt11) from MOPV/LASV reassortant(IGS-11;Clade IV)__AFY05588__GPCstabilized
augggccaaaucgugaccuucuuccaagaagucccccacgucaucgaagaagucaugaacauuguacuaaucgcccucucaguccuagcugugcucaaaggccucuacaacuuugcaacaugcggccucgucggccucgucaccuuccuccuucucugcggccgcuccugcaccaccucgcucuacaaaggggucuacgaacugcaaacccucgaacucaacauggaaacacucaauaugacaaugccacuguccuguaccaaaaacaacagccaccacuacauaauggucggcaacgaaaccggccucgaacucacccucacgaacaccuccauaaucaaccacaaauuuugcaaccuguccgacgcccacaagaaaaaccuuuacgaucacgcccuaauguccauaaucuccaccuuccaccucagcauccccaacuucaaccaauacgaagccaugagcugcgacuucaacggcgguaaaauauccguccaauacaaccuuucacauuccuaugccggugacgcagccaaccacugcggaacagucgccaacggcguccuacaaaccuucaugcgcauggccuggggcggcuccuauaucgcccucgacucaggaugcggaaacugggacugcauaaugacaucauaccaauaccucaucauccaaaacacgaccugggaagaccacugccaauucucacgccccucccccaucggcuaccuaggccuacucucacaacgcacacgcgaccucuacaucucccgccgccgccgcggaacauucacauggacacucuccgacuccgaaggcgaggacacucccggcgguuauugucuuacccgcuggaugcucaucgaagcagaacuaaaaugcuucggcaacacagccgucgccaaauguaacgaaaaacacgacgaagaguucugugacaugcuccgccuauucgacuucaacaaacaagccauccagcgccuuaaagcaccagcccaaaugagcauacaacucaucaacaaagcagucaacgcccucauaaacgaccaacucaucaugaaaaaucaucuacgcgacauaaugugcauccccuacugcaacuacucaaaauacugguaccucaaccacacaaccaccggacgcaccagccugccaaaaugcuggcucguaucaaacggaucauaccucaacgaaacccacuucuccgacgauaucgaacaacaagccgacaacaugaucaccgaaaugcuccaaaaagaauacauggaacgccaagguaagacaccccuaggccuuguagaccuauucgucuucuccaccucuuucuaccugaucuccauauuccuccaccuaguaaaaauucccacccaccgccauaucguaggcaaauccugcccuaaaccacaccgccuuaaccacaugggaauaugcuccugcggccucuauaaacagcccggcguccccgucaaauggaaacgcuaa

SEQ ID NO: 6083 - RNA, 1476 nt, Artificial Sequence
  derived and/or modified protein sequence (opt11) from MOPV/LASV reassortant(IGS-12;Clade IV)__AFY05590__GPCstabilized
augggccaaaucguaaccuucuuccaagaggucccgcacguaaucgaggaagucaugaacaucguccugauagcacuauccguccucgccguucucaaaggccucuacaacuucgcaaccugcggacucgucggccucguuaccuuccuccuucuaugcggccguucaugcacaaccucccucuacaaaggagucuacgaacuacaaacccucgaacucaacauggaaacccucaacaugaccaugccccuaagcugcaccaaaaacaacagccaucacuauaucauggucggcaacgagaccggccuagaacucacacucacuaacaccuccaucauuaaccauaaauucugcaaccuaucagacgcccacaagaaaaaccucuacgaccacgcccuuaugucuaucaucucaacauuccaccuauccauccccaacuucaaucaauacgaagccauguccugugacuucaacggcggcaaaaucuccguccaauauaaccucucccacucauacgccggcgacgccgccaaccacugcggcacaguagccaacggaguccuccaaacauucaugcgcauggccuggggcggcuccuacaucgcccuagacaguggaugcggcaacugggacugcaucaugaccuccuaccaguaccucaucauccagaacaccaccugggaagaccacugccaauucucacgccccuccccaaucggcuaccuaggacuacuaucccaacgcacccgcgacauguacaucuccagacgcagacgcggcacuuucacauggacccuaagcgacucagaaggugaagacacacccggcggcuacugccucacccgauggaugcucauagaagccgagcucaaaugcuucggaaacaccgccgucgccaaaugcaacgaaaaacacgacgaagaauuuugcgacaugcuccgacucuucgacuucaacaaacaagcuauccaacgccuaaaagcccccgcacaaaugaguauccaacuaaucaacaaagcaguuaacgcacucauuaacgaccaacucaucaugaaaaaccaccucagagacaucaugugcaucccauacugcaacuauagcaaauacugguaccuaaaccacaccacaaccggccgcacuucccucccuaaaugcuggcuagucuccaacgguuccuaccucaacgaaacccacuuuucagacgacauagaacaacaagccgacaacaugauaaccgagaugcuccaaaaagaguauauggaaagacaaggcaaaacaccccucggccuagucgaccucuucgucuucagcaccagcuucuaccuaauaucaaucuuccuccaccucguaaaaauccccacacaccgccacauagucggaaaauccugccccaaaccucaccgccucaaccacaugggcauuugcuccugcggccucuacaaacagcccgggguccccgucaaauggaaacgauga

SEQ ID NO: 6084 - RNA, 1476 nt, Artificial Sequence
  derived and/or modified protein sequence (opt11) from LASV(LM032-SLE-2010;Clade IV)__AIT17802__GPCstabilized
augggccaaaucgucaccuucuuccaagaggucccacacgugaucgaagaaguuaugaacaucguacucaucgcccuauccauccucgcaguccucaaaggacuauacaaccuagcaaccugcggccuugugggccuagucaccuuccuccuccucugcgggcgcucuuguaccaccucccucuauaaaggcgucuaugaauugcaaacccucgagcuaaacauggagacccuaaacaugaccaugccccucuccugcaccaaaaacaacucccaccacuacaucauggucggcaacgaaacaggacuagagcuaacccuaacaaacaccucaaucaucaaccacaaauucugcaaccuuucagacgcccacaagaaaaaccuauacaaccacgcucucaugucuauaauuucaaccuuccaccucagcauccccaacuucaaccaauacgaagccauguccugcgacuucaacggcgggaaaaucuccguccaauacaaccucagccauuccuacgccggcgacgcagcaaaccacugcggaaccgucgccaacggcguccuccaaaccuucaugcggauggccuggggcggauccuauaucgcacucgacuccggcugcgaccgcugggacugcaucaugaccucuuaccaauaccuaaucauacagaacaccaccugggaagaccacugccaauucucccgcccaucucccaucggcuaucucggccuacucucccaacguacacgcgacaucuacauaucacgucgccgccgcggcaccuuuacuuggacacuaucagacuccgaagguaaagacacccccggcggcuacugccucacccgauggaugcucaucgaagcugaacucaaaugcuucggcaacacagcugucgccaaaugcaacgaaaaacaugaugaagaguucugcgacaugcuccgccucuucgacuucaacaaacaagccauccaacgucucaaagcccccgcccaaaugucaauacaacugaucaauaaagccgucaacgcccuaaucaacgaccagcucauuaugaaaaaccaccuccgugauaucaugugcauccccuacugcaauuacuccaaauacugguaccucaaucacacaaccacaggcaaaacgucccuccccaagugcuggcucgucuccaacggcuccuaucucaacgaaacccacuucuccgacgacaucgaacaacaggccgacaacaugaucaccgaaaugcuacaaaaagaauacauggaacgccucggcaaaacaccacucggccuggucgaccucuucgucuucuccaccuccuucuaccucauuucuaucuuccuacaccucguaaaaaucccaacccaccgacacaucgugggccgcuccugccccaaaccccaccggcucaaucacaugggcaucugcuccugcggucucuacaaacaacccggcguccccgucaaauggaaacguuaa

SEQ ID NO: 6085 - RNA, 1476 nt, Artificial Sequence
  derived and/or modified protein sequence (opt11) from LASV(LM222-SLE-2010;Clade IV)__AIT17806__GPCstabilized
augggccaaaucgucaccuucuuccaagaagucccccacgucaucgaagaagucaugaacauuguacucaucgcccucuccauacucgccguacucaaagggcucuacaacuuugccacaugcggccucaucggccucgucacauuccuacuccucuguggccgcucaugcaccaccucccucuacaaaggcgucuacgaacuacaaacccucgaacuuaacauggagacccuaaacaugaccaugccccucagcugcacgaaaaacaacucccaucacuacaucauggucggcaacgaaaccggacuggagcuuacccucacgaacaccagcauaaucaaccacaaauucugcaacuuaucagacgcccacaagaaaaaccucuacgaccacgcccucaugucaaucaucuccaccuuccaccuguccauccccaacuucaaccaauacgaagccauguccugcgacuucaacggcggcaaaaucuccguccaauacaaccucucccacuccuaugccggugacgccgcaaaccacugcggcacaguagccaacggcguccuccaaaccuucaugcgcauggccuggggcggauccuacaucgcccuagacucugguugcggcaaaugggauugcauuaugaccuccuaccaauaccucaucauccaaaauaccaccugggaagaccacugccaauucucacgacccucuccgaucggcuaccucggccuacuaucccaacgcacccgcgacaucuacaucucccgacgccgacgcggcaccuucaccuggacucucucagacuccgaagguaaagacacccccggcggcuauugccucacaagauggaugcucauagaagccgaacuaaaaugcuucggcaacaccgccgucgccaaaugcaacgaaaaacacgacgaagaguucugcgacaugcuccgccucuuugacuucaacaaacaagcaauccaacgacucaaagccccagcacagaugucaauccaacuaaucaacaaagccgucaacgcacucaucaaugaccagcuuauaaugaaaaaccaccuccgcgacauaaugugcauacccuacuguaacuacuccaaauacugguaccuuaaccacaccaccacagggaaaacaucccuacccaaaugcuggcucgucuccaacggcucauacuuaaaugaaacccacuucuccgacgacaucgaacaacaagcagacaacaugauuaccgaaauguuacaaaaagaauacauggaacgacaaggcaaaacaccccuuggccucguugaccuauuugucuucucaaccuccuucuaccucauuuccaucuuccuccaccucguaaaaaucccaacacaucggcacaucguaggaaaauccugcccaaaaccccaccgccuaaaccacaugggcauuugcuccugcggacucuacaaacaacccggaguccccgucaaauggaaacgcuaa

SEQ ID NO: 6086 - RNA, 1476 nt, Artificial Sequence
  derived and/or modified protein sequence (opt11) from LASV(LM395-SLE-2009;Clade IV)__AIT17810__GPCstabilized
augggacaaauugucacauuuuuccaagaagucccccauguuaucgaagaaguaaugaacaucguauuaaucgcgcucuccauccuagcaguccucaaaggccucuacaaccucgcuaccugcggccucguaggccuugucacauuccuccuccugugcggccgcucauguaccaccucccucuacaaaggcgucuacgaacuccaaacccucgaacucaacauggaaacccucaauaugacaaugccgcuaucaugcaccaaagacaacagccaccacuacauucgcguaggcaacgaaaccggacucgaacuaacacucaccaacaccuccauccucaaccacaaauucugcaaccucuccgacgcccacaagaaaaaccucuacgaccacgcccugaugucuaucaucuccaccuuccaccucucuauccccaacuuuaaccaauacgaagccaugagcugcgacuucaacggaggcagaaucuccguacaauacaaccucucccacuccuacgcgggagacgcagccaaccauugcggcaccgucgcaaacggcguccuccaaaccuucaugcgcauggcuuggggcggcuccuacauugcccuagacuccggaugcggacgcugggacugcaucaugaccuccuaccaauaccuaauaauccaaaacacuaccugggaagaccacugccaguucucccgcccuucgcccauaggcuaccucggccuccucagccaacggacccgugacauauacaucucacgccggcgccgcggaaccuucacauggacccucuccgacucugaaggcaaagacacccccggcggcuauugccucacccgcuggaugcucaucgaagcagaacucaaaugcuucggcaacacagccguagcaaaaugcaacgaaaaacacgacgaagaguucugcgacaugcuccgccucuucgacuucaacaaacaagccauacagcgacuaaaagcacccgcccaaaugucaauucaacugaucaacaaagccgucaacgcacuuaucaacgaccaacuaaucaugaaaaaccaccuucgagacaucaugugcauccccuacugcaacuacuccaaauacugguaccucaaccacacuacaaccggcaaaaccucccucccacgcugcuggcucgucuccaauggcuccuaccucaacgaaacucacuucuccgacgacaucgaacaacaagccgacaacaugaucaccgaaaugcuucaaaaagaauacauggaacgccaaggcaaaacccccuuaggccuggucgaccuuuuugucuucucaaccuccuucuaucuaaucagcaucuuccuacaccucgucaaaauucccacccaccgacacgucguuggcaaacccugccccaaaccccaccgacucaaccacaugggcauauguucaugcggccucuacaaacaaccaggaguccccgucaaguggaaacgcuga

SEQ ID NO: 6087 - RNA, 1476 nt, Artificial Sequence
  derived and/or modified protein sequence (opt11) from LASV(LM765-SLE-2012;Clade IV)__AIT17814__GPCstabilized
augggacaaaucgucaccuucuuccaagaagucccgcacgucaucgaggaagucaugaacauaguccucauagcccucucgauacuagccguccuaaaaggccuauacaacuucgcaaccugcggccucguaggccucgucaccuuccuccuccucugcggccgaucguguaccaccucacuauacaaaggagucuacgaacuccaaacucuggaacuuaacauggagacccucaacaugaccaugccccucuccugcaccaaaaacaauucccaccauuacaucauggucggaaacgaaacaggacucgaacuaacccucacgaacacuuccaucauagaucacaaauucugcaaccucagcgacgcccaccgcaaaaaccucuacgaccacgccuuaaugagcaucaucucaacauuccacuuauccauacccaacuucaaccaauacgaagccaugucaugcgauuucaacggcggcaaaaucucaguccaauacaaccuaucccacucuuacgccaaagacgccgccgaccacugcggcacagucgccaacggcguccuccaaaccuucaugcgcauggccuggggcggaagcuacaucgcacucgacucaggcugcggccgcugggacugcauaaugacauccuaccaguaccuuauaauccaaaacacaacaugggaagaccacugucaauucagcagacccagccccaucggauaccuaggccuacucucccaacgcacacgcgacauauacauaucacgccgccgucgcggcaccuucacauggacccuaucagauuccgagggcaaagacacacccggaggcuacugccucacucguuggaugcuaaucgaagcugaacucaaaugcuucgguaacacugccgucgccaaaugcaaugaaaaacacgacgaagaauuuugcgacaugcuccgccucuucgacuucaacaaacaagccauacagcgacuaaaggcccccgcccaaauguccauucaacugaucaacaaagccgucaacgcccuaaucaacgaccaacucaucaugaaaaaccaccuccgcgacauaaugugcaucccauacugcaacuacuccaaguacugguaccuaaaccacaccaccaccggcaaaaccucccuccccaaaugcuggcucgucucuaacggaucuuaccuuaacgaaacccacuucucagacgauaucgagcaacaagcugacaacaugaucaccgaaaugcuccaaaaagaauacauggaaagacaaggcaaaacaccccuaggacucgucgaccucuucgucuucucuaccuccuucuaccucauaucaaucuuucuccaccucgucaagaucccuacccaccgccacaucgucggcaaaccaugccccaaaccccaccgccucaaccacaugggcauaugcuccugcggccucuacaaacagccaggcgucccggucaaauggaaacgauag

SEQ ID NO: 6088 - RNA, 1476 nt, Artificial Sequence
  derived and/or modified protein sequence (opt11) from LASV(LM774-SLE-2012;Clade IV)__AIT17820__GPCstabilized
augggccagaucgucacguucuuucaagaagucccucacgucaucgaagaaguuaugaacaucguccucauagcccuauccauccuugccguccucaaaggccucuacaacuuugcuaccugcggauuagucggccucguaaccuuccuccuccuuugcggccgaucaugcaccaccucccucuauaaaggggucuacgaacuccaaacacuagaacuaaacauggaaacccucaacaugacaaugccccuauccuguacgaaaaacaacucccaccacuacaucauggucggaaacgaaaccggacucgaacuaacccucaccaacacauccaucaucaaccacaaauucugcaaucuauccgacgcccacaagaaaaaccuguacgaccacgcccucauguccaucaucuccaccuuccaccucagcaucccaaacuucaaccaauaugaagccauguccugcgacuucaacggcggcaaaaucucaguccaguacaaccuaucccacucuuacgccgaagacgccgccaaccacugcggcacagucgcaaacggcguacuacaaaccuucaugcgaauggccuggggcggaucauacaucgcccucgacuccggcugcggaaacugggacugcaucaugaccucguaccaauaucucaucauccaaaacacaaccugggaagaccacugccaauucucacgacccucuccgaucggcuaccucggacuacucucucaacgcacacgagacaucuacaucucccgacgccgccgcgguaccuucaccuggacucucuccgauagcgaaggcaaagacacacccggcggcuacugccuaacccgcuggaugcucaucgaggccgaacuuaaaugcuucggaaacaccgccgucgccaaaugcaacgaaaaacaugacgaagaguucugcgacaugcuccgacucuucgacuucaacaaacaggcgauacaacgucucaaagcccccgcacaaaugagcauccaacucaucaacaaagccgucaacgcccucauaaacgaccaacuaaucaugaaaaaccaccuccgcgacaucaugugcauucccuacugcaauuacuccaaauacugguaccuaaaccacaccaccacaggaaagaccucacuacccaaaugcuggcucguauccaacggcuccuaccucaacgaaacccacuucuccgacgacauugaacaacaagcagacaacaugaucacagaaaugcuacaaaaagaauacauggaacgacaaggcaaaacuccucucggccuugucgaccuauucgucuuuuccacuuccuucuaccucaucuccaucuuccuccaccucguaaagauccccacccaccgccauaucguaggcaaaucaugccccaaaccccaccgacucaaccacaugggaaucugcuccugcggccucuacaaacagcccggaguccccgucaaauggaagcgcuag

SEQ ID NO: 6089 - RNA, 1476 nt, Artificial Sequence
  derived and/or modified protein sequence (opt11) from LASV(LM776-SLE-2012;Clade IV)__AIT17824__GPCstabilized
augggccaaaucgucacauucuuccaagaagucccccacgucaucgaagaagucaugaacaucguccucaucgcccucucaauccuagccguccucaaaggccuauacaacuucgcuaccugcggccucgucggccucguaaccuuccuccuccuaugcggccgaucuugcaccaccucugucuacaaaggagucuacgaacuccaaacacucgaacuaaacauggaaacccugaacaugacaaugccccucuccuguaccaagaacaacucccaccacuacaucaugguuggcaacgaaaccggccuagaacuuacccucaccaacacuucaaucauaaaccacaaauucugcaaccucuccgacgcccacaagaaaaaccucuacgaccacgcacucauguccaucaucucaaccuuccaccucagcaucccaaacuucaaccaauacgaagccaugucaugcgacuucaacggcggcaaaaucucuguacaauacaaccuaucccacuccuacgccggcgacgcagccaaccacuguggaaccgucgcaaacggcguccuacagacguucaugcgcauggccuggggcggcucauauaucgcccucgacuccggaugcggcaaaugggacugcaucaugaccucauaccaauaccucauaauacaaaacaccacaugggaagaccauugccaguuuucccgcccuuccccgauaggauaccucggccuccuaucccaacgcacccgcgacauuuacaucucacgccgccgccgaggcacauuuacauggacccucucugacuccgaaggcaaagacacccccggaggcuacugccuaacucgcuggaugcucauagaggccgaacucaaaugcuucggcaacacagccguagccaaaugcaacgaaaaacacgaugaagaguucugcgauaugcuccgccucuucgacuucaacaaacaagcaauccaaagacuaaaagcccccgcacaaaugagcauucaacucaucaacaaagcagucaacgcccuuauaaacgaccaacuaaucaugaaaaaccaucuacgcgacaucaugugcauccccuacugcaacuacucaaaauacugguaccuaaaccacacaacaacuggcaaaaccagccuccccaaauguuggcucgucucuaacggcucauaccucaacgaaacccacuucucagacgacaucgaacaacaagccgacaacaugaucaccgaaaugcuccaaaaagaauacauggaacgccagggcaaaacuccacucggccuaguagaccucuucgucuucuccacaaguuucuaccucaucuccauauuccuacaccuagucaaaauccccacccaccgacacaucguaggcaaaucuugccccaaaccucaucgccuaaaccacaugggaaucugcagcugcggucucuacaaacaacccggcgucccaguccgauggaaacgauaa

SEQ ID NO: 6090 - RNA, 1476 nt, Artificial Sequence
  derived and/or modified protein sequence (opt11) from LASV(LM778-SLE-2012;Clade IV)__AIT17828__GPCstabilized
augggccaaaucguaaccuucuuccaagaggucccccacgucaucgaagaagucaugaacaucguccucaucgcacucuccauccucgcaguccuaaaaggacuauacaacuucgcaaccugcggucuagucggccugguuaccuuccuccuccucugcggccgcuccugcaccaccucccuauacaaaggcgacuacgaacuacaaacccucgaacucaauauggaaacccucaacaugacuaugccccucucaugcaccaaaaacaacucccaccacuacauuaugguaggcaacgagaccggccucgagcucacccuuaccaacacauccauaaucaaccacaaauucugcaaccuguccgacgcccacaagaaaaaccucuacgaccacgcccucaugucgauaaucuccaccuuccaccucucgauccccaacuucaaccaauacgaagccaugagcugcgacuucaacggcggcaaaauuuccguacaauacaaccucagccacagcuacgccggcgacgcagccaaccacugcggcaccguagcaaacggcguccuccaaacuuucaugcgcauggcguggggcggcucuuacauugcacucgacuccggcugcggaaacugggacugcaucaugacaucauaccaauaccuaaucauccaaaacaccaccugggaagaccacugccaauucucccgucccagcccaaucggcuaccucggccuccucucccaacgaacuagagacaucuacauaucucgccgccggcgcggaaccuucaccuggacacuuuccgacuccgaaggcaaagacacccccggcgguuacugccugacucgauggaugcucauagaagcagaacuaaaaugcuucggcaacacagccgucgccaaaugcaacgaaaaacacgacgaggaguucugugacaugcucagacucuucgacuucaauaaacaagccauccaaagacucaaggcgcccgcccagauguccauacaguuaaucaacaaggccgucaacgcccuaaucaacgaccaacucaucaugaaaaaccaccuacgcgacaucaugugcauccccuacugcaacuacucaaaauacugguacuuaaaccacaccaccaccggcaaaaccucccuacccaagugcuggcucgucucaaacggcuccuaucuaaacgaaacccacuucuccgacgacaucgaacaacaagccgacaacaugaucacagaaaugcuccagaaggaauacauggaacgccaaggcaaaacaccacucggccuggucgaccucuucgucuucuccaccagcuucuaccucaucuccaucuuccuacaccucgucaaaaucccaacacaucgccacaucgucggcaaaucaugcccuaaaccgcaccgacuaaaccacaugggaauaugcuccuguggccuauacaaacaaccaggagucccagucaaauggaaacgcuaa

SEQ ID NO: 6091 - RNA, 1476 nt, Artificial Sequence
  derived and/or modified protein sequence (opt11) from LASV(Mad39;Clade IV)__ANH09722__GPCstabilized
augggccaaaucgucacauucuuccaagaagucccccacgucaucgaagaagucaugaacaucgugcuaauagcacucuccauccuagccguccuaaaaggccucuauaacgucgcaaccugcggccugaucggccuugucaccuuccuacuccucugcggacgauccuguaccaccacccuuuacaaaggcgucuacgaacuccaagcccucgaauuaaauauggaaacccugaacaugaccaugccccucuccugcaccaaaaauaacucccaucacuacauucgagucggcaacgaaaccggacucgaauuaacccucaccaacacaucccuaaucaaccacaaauucugcaaccucucagacgcccacaagaaaaaccucuacgaccacgcccuuauguccaucaucucaacauuccaccucucaauacccaacuucaaccaauacgaagcaauguccugcgacuucaacgacggcaaaaucucuguccaauacaaccucucacacaccuacgccggcgacacagcaaaccacugcggcaccgucgcaaacggcguacuccaaacauucaugcgaauggcuuggggcggauccuacaucgcacuagacucaggaugcggcggcugggacuguaucaugacauccuaccaauacuuaaucauacaaaacacuaccugggaagaccacugucaauucucacgucccucuccgaucggcuaccucggccuccucucccaacgaacccgcgacaucuauaucucccgccgccgccgcggcaccuucacauggacgcuaagcgauucagagggcaaagacacccccggcggcuacugccugacccgcuggaugcuuaucgaagcagaacucaaaugcuucggcaacacagcagucgccaaaugcaacgaaaaacacgacgaggaguucugcgacaugcuccgccuauucgacuucaacaaacaagccauccaacgccucaaagccccagcacaaauguccauucaacuaaucaacaaagccguaaaugcccucaucaacgaccaacucauuaugaaaaaccaccuucgugacaucaugugcauaccauacugcaacuacuccaaauacugguaccucaaccacaccguuaccggcaaaaccucacucccaaaaugcuggcucgucuccaauggcucguaccuaaacgaaacccacuucagcgacgacaucgaacaacaagccgacaacaugaucaccgaaaugcuacaaaaagaauacauggaacgccaaggcaagacaccccugggccuaguggaccuuuucgucuucuccaccuccuucuaccucauauccauauuccuccaccucgucaaaaucccaacacaccgccacguaguaggaaaacccugcccaaaaccccaccgccucaaccacaugggcaucugcagcugcggauucuacaaacaaccuggcgucccaguccguuggaaacgauaa

SEQ ID NO: 6092 - RNA, 1476 nt, Artificial Sequence
  derived and/or modified protein sequence (opt11) from LASV(Mad41;Clade IV)__ANH09724__GPCstabilized
augggucaaauagucaccuucuuccaagaaguaccccacgucaucgaagaagugaugaacaucguacucauagcccucuccauacucgcaguccucaaaggacucuacaacguagccacaugcgggcuaaucggccuagucaccuuccuccuucucugcggacgauccugcaccaccacccucuauaaaggagucuacgaacuccaagcccuagaacuaaacauggaaaccuuaaacaugaccaugccccucuccugcaccaaaaacgacucucaccacuacaucauggucggcaacgaaaccggauuagaacuaacacucaccaacaccucaaucaucucccacaaauucugcaaccucuccgacgcccacaaacaaaaccucuacgaccacgcccucauguccaucaucucaaccuuccaucucagcauuccaaauuucaaccaguaugaagcaauguccugcgacuucaacggcggcaaaaucuccgugcaauacaaccuaagccacaccuacgccggcgacgccgccaaccacugcggcaccgucgcuaauggaguccuccaaaccuucaugcgcauggccuggggcggauccuacaucgcacucgacuccggcugcggaggaugggacugcauaaugaccucuuaccaauaccucaucauccaaaacaccacaugggaagaccacugccaguucucccgccccagcccaauagguuaccuaggccuccuaucacaacgcacccgggacauauacaucucacgccgacgccgcggaacauucaccuggacccucuccgacucagaaggcaaagacacccccggcggcuacugccucacccgauggaugcuaaucgaagccgaacuuaaauguuucggcaacacggccgucgccaaaugcaacgaaaaacacgacgaagaguucugcgacaugcuacgacucuucgacuucaacaagcaagccauccagcgccucaaagcacccgcccaaauguccauccaauuaaucaacaaagccgucaacgcccucauaaacgaccaacucauaaugaagaaccaccuccgagacaucaugugcauccccuacugcaacuacuccaaauacugguaccucaaccacaccgucacagguaaaaccucacuccccaaaugcuggcucgucuccaacggcuccuaccucaacgaaacacacuucuccgacgacaucgaacaacaagccgacaacaugaucacugaaaugcuucaaaaagaauacauggaacgccaaggcaaaaccccacucggucuagucgaccuauucgucuucaguaccuccuucuaccuaaucuccaucuuucuccaccuggucaaaauaccaacccaccgccacguagucggcaaaccgugccccaagccccacagacucaaccauaugggaauaugcuccugcggcuucuacgggcaacccggcgucccuguccgcuggaaacgcuaa

SEQ ID NO: 6093 - RNA, 1476 nt, Artificial Sequence
  derived and/or modified protein sequence (opt11) from LASV(Mad63;Clade IV)__ANH09728__GPCstabilized
augggccaaaucguuaccuucuuccaggaagucccccacgucaucgaggaagucaugaacaucguacuaaucgcacuauccguccucgccguccuaaaaggacuauacaacgucgcuaccugcggccucaucgggcucguaaccuuccuucuccuaugcggacgcagcugcaccaccacccuauacaaaggagucuacgaacuccaagcccuagaacucaacaugggcacccuuaacaugaccaugccccuaucuugcaccaaaaacaacucccaccacuacaucauggucggcaacgaaacagggcucgaacuaacucucaccaacaccagcaucauaaaccacaaauucugcaaccucagcgacgcccacaagaaagaucuauacgaccacgcacucaugagcaucaucucaaccuuccaccuuuccguacccaauuucaaccaauacgaagccaugucaugcgacuucaacggaggaaaaaucagcguccaauacaaccuaucccacgccuacgccggcgacacagccaaccacugcggcaccgucgcgaacggcguccuccaaacauucaugcgcauggccuggggcggcuccuacaucgcccuagacucaggcugcggaggcugggacugcaucaugaccagcuaccaauaccuaaucauacaaaacacaaccugggaagaccacugccaauucucccgccccucaccaaucggcuaccuaggucuccucucacaacgaacccgagacauauacaucucccgccgacgccgaggaacguucaccuggacccucuccgacuccgaaggcgaauacaccccaggcggcuacugccuaacacgcuggaugcuaaucgaagccgagcucaaaugcuucgguaauaccgcaguagcuaagugcaacgaaaaacacgaugaagaguucugcgacaugcuccgacucuucgacuucaacaaacaagcaauccaacgucuaaaggcacccgcacaaauguccauccaauuaaucaacaaagccgucaacgcucucaucaacgaccaacucauaaugaaaaaccaccuucgcgacaucaugugcauucccuacugcaacuacagcaaguacugguaccuuaaccacaccgugacaggaaagacaucccugcccaagugcuggcuagucuccaacggcuccuaccucaacgagacacauuucuccgacgacaucgaacaacaagccgacaacaugaucaccgaaaugcuccaaaaagaguacauggaacgacaaggcaaaacaccccuaggccucguagaccuauuugucuucuccaccuccuucuaccucaucuccauuuuccugcaccucgucaaaauacccacucaccgacacgucgucggcaaaccaugccccaaaccccaccgucucaaccacaugggcaucugcucuugcggauucuacaaacaacccggaguaccaguccgguggaaacgcuaa

SEQ ID NO: 6094 - RNA, 1476 nt, Artificial Sequence
  derived and/or modified protein sequence (opt11) from LASV(Mad69;Clade IV)__ANH09730__GPCstabilized
augggccaaaucguaacauucuuccaagaaguaccacacguaaucgaagaaguaaugaacaucguccucaucgcccuauccguccucgccguccucaaaggacucuacaacguagccaccugcgggcugauaggccucgucaccuuccuccuccucugcggccgcagcugcaccaccacccucuacaaaggugucuacgaacuccaagcccucgaacucaacauggaaaccuuaaacaugaccaugccccucuccugcacaaaaaacaauucacaccacuacaucaugguagggaacgaaaccggccuugaacucacccuaaccaacaccuccaucaucaaccacaaauucugcaaccuaagugacgcccacaaaaaaaaccucuacgaccacgcacuaauguccauaauauccaccuuccaccuaagcaucccuaacuucaaucaauacgaagcgauguccugcgacuucaaccaaggcaaaaucucaguccaauacaaucucagccacgcauacgccggcgacgcagcaaaccacugcggaaccgucgccaacggcguacuccaaaccuucaugcgcauggccuggggcggcucauacaucgcccuagacucuggaugcggaggcugggauugcaucaugaccuccuaccaauaccuaaucauacaaaacaccacgugggagaaccacugccaauucucacgacccucccccauaggauaccucggccuucucagccaacgcacccgcgacaucuauauaucacgacgccgccgaggcaccuuuaccuggacacucuccgacagcgaagggaaaggaacccccggcggcuacugccuaaccagauggaugcucaucgaagccgaacucaaaugcuucggcaacaccgccgucgcaaaaugcaacgaaaaacacgacgaggaauucugcgacaugcuccgccucuucgacuucaacaaacaagcaauacaacgcuucaaagcccccgcccaaaugagcauccaacucaucaacaaagcaguuaacgcacucaucaacgaccaacucaucaugaaaaaccaccuccgcgauaucaugugcauacccuacuguaacuacucaaaauacugguaccugaaccacacaguaaccggcaaaaccucacuaccuaaaugcuggcucgucagcaauggcuccuaccucaacgagacacacuucuccgacgacaucgaacagcaagccgacaacaugaucaccgaaaugcuccaaaaagaauauauggaacgccaaggccgcaccccacuuggacuagucgaccuuuucgucuucuccaccuccuuuuaccuaaucuccauauuccuacaccucgucaaaauccccacacaccgacacgucgucggcaaaccuugccccaaaccacaccgccucaaccacaugggcaucugcagcugcggcuucuacaaacagcccggagucccaguucgcuggaaacgcuaa

SEQ ID NO: 6095 - RNA, 1476 nt, Artificial Sequence
  derived and/or modified protein sequence (opt11) from LASV(Mad83;Clade IV)__ANH09732__GPCstabilized
augggccagauagucaccuucuuccaagaagucccccacgucaucgaagaaguaaugaacaucguucucaucgcacuauccauccucgcaguccucaaaggcguauacaacguagccaccuguggccuaaucggacucgucaccuuccuccuacucuccggccgcaguugcaccacaacaaucuauaaaggagucuacgaauuacaagcucuagaacucaacauggaaacccuaaacaugaccaugccccucucaugcaccaaaaacaacucccaccacuacaucauggucggaaacgaaacaggccuagaacucacccucacaaacaccuccaucaucaaccacaaauucugcaaccuaucagacgcccacaagaaaaaccuauacgaccacgcccuaaugagcaucaucuccacguuccaccuauccauccccaacuucaaccaauacgaagcaaugucuugcgacuucaacggcggaaaaaucuccguccaauacaaccuuucccacaccuacgcgggcgacgcagcaaaccauugcgggaccgucgccaacggaguccuccagacauucaugcgcauggccuggggcggcuccuacaucgcacuagacucaggcugcggcggcugggacugcaucaugaccucuuaccaauaccucauaauccaaaacacaacaugggagaaccacugccaauucuccagaccaucccccaucggauaccucggccuccucucgcaacgcacccgcgacaucuacauaucacgacgucgccgcggcaccuucacauggacccucuccgacucggaaggcaaagacacccccggaggcuacugccucacccgcuggaugcuaauugaagccgaacucaaaugcuucggcaacaccgccgucgccaaaugcaacgagaaacacgacgaagaguucugcgacaugcuaaggcuauucgacuucaacaaacaagcaauccaacgccugaaagcccccgcgcaaauguccauccaacuaauaaacaaagcaguuaacgcccuaaucaacgaccaacuuaucaugaaaaaccaccuccgagacauaaugugcauuccauacugcaacuacagcaaauacugguaccucaaucacacaguaaccggcaaaaccucccucccuaaaugcuggcucguauccaacggcagcuaccuaaacgaaacccacuucucagacgacauagaacaacaagccgacaacaugaucaccgaaaugcuccaaaaagaauauauggaacgccaaggaaaaacgccccuaggccucguagaccucuucgucuucagcaccucauucuaucuaaucuccauauuccuccaccuuguaaaaaucccuacccaccgccacaucguugguaaaccuugccccaaaccccaccgccucaaccauaugggcaucugcucuugcggauucuacaaacaacccggcguccccguccgcuggaaacgauaa

SEQ ID NO: 6096 - RNA, 1476 nt, Artificial Sequence
  derived and/or modified protein sequence (opt11) from LASV(NL;Clade IV)__AAO59512__GPCstabilized
augggucaaaucguuacauuuuuccaagaaguaccgcacgucauagaagaggucaugaauaucgugcucaucgcccuaucuauccucgccguucugaaaggucuauauaacuucgcgaccugcggacucgucggccuggucgccuuccuccuucuaugcggacgcuccugcaccucaucccuuuacaaaggagucuacgaacugcaaacucuagaacucaacauggaaacccucaacaugaccaugccacucuccugcaccaaaaacaacucccaccacuacauacgagucggcaacgaaacuggccuugagcuaacccucaccaacacaagcauaaucaaccauaaguucugcaaccucuccgacgcccacaaaaagaaccucuacgaccacgcccucauguccaucaucagcaccuuccaucucuccauccccaacuucaaccaauacgaagccauguccugcgacuucaacggcggcaagaucuccguccaauacaaccucucccacuccuacgccgucgacgccgccaaacacugcggcaccgucgcaaacggaguccuccaaaccuucaugcgcauggccugggguggauccuauaucgcccucgacuccggcugcggccgaugggacugcaucaugaccucauaccaauaccucaucauccaaaacaccacaugggaagaccauugucaauucucccgccccucaccaaucggcuaucucggccuccucucccaaagaacccgcgacaucuacaucagccggcgcagacguggcaccuucaccuggacccucucagacucagaaggaaaagacacccccggcggcuacugccucacccgauggaugcucaucgaagccgaacucaaaugcuucggcaacaccgccguugccaaaugcaacgaaaaacacgacgaagaauuuugcgauaugcuccgacucuucgacuucaacaaacaagcaauccaacgccuuaaaaccccggcccaaauguccauacaacucauaaacaaagccgucaacgcacucaucaaugaccaacucaucaugaaaaaccaccuccgcgacaucauguguauccccuacuguaacuacucccgauacugguaccucaaccacaccacaaccggaaaaaccucccuccccaaaugcuggcucguauccaacggaucauaccucaacgaaacccgcuucucagacgacaucgaacagcaggccgacaauaugaucacugaaaugcuccaaaaggaauacauggaacgccaaggcaagacaccccucgggcuaguagaccuuuuugucuucucuaccucauucuaccucaucuccaucuuccugcaccuugucaaaauacccacccacagacacaucgucggcaaaucaugcccaaagccgcaccgccuaaaccauaugggcaucugcuccugcggacucuauaaacaacccggcguccccguaaaauggaaacgcuaa

SEQ ID NO: 6097 - RNA, 1476 nt, Artificial Sequence
  derived and/or modified protein sequence (opt11) from LASV(Z0947-SLE-2011;Clade IV)__AIT17840__GPCstabilized
augggucaaaucgucacauuuuuccaagaagucccacacguaauagaagaagucaugaacaucguacuuauagcacucuccauccuugcaguccuuaaaggccucuauaacuucgccacuugcggacucgucggccuaguaacauuccuacuacuguguggccgcuccugcaccaucucacucuacaagggcguauacgaacuccaaacacuugaacucaacauggaaacccuaaacaugaccaugccccucuccugcaccaaaaacaacucucaccacuacauaauggucggaaacgaaacaggacuagaacucacccucaccaacaccucaauaaucaaccacaaauucugcaaccuuuccgaugcacacaagaaaaaccucuacgaccacgcacucauguccauaaucuccaccuuccaccucucaauccccaacuucaaccaauacgaagcaaugucgugcgacuucaacggcgggaaaaucuccguccaauacaaccucucccacuccuacgcuggagacgccgcaaaccacugcgguaccguggccaacgguguccuccagaccuucaugcgcauggccuggggcggauccuacauagcccucgacucagguugugaccgaugggauugcaucaugacauccuaccaauaccucaucauccaaaacaccaccugggaagaccacugccaauucucccgucccucccccauaggcuaccucggccuccucucccaacgcacccgcgauaucuacaucagccgccgacgccgcggcaccuucaccuggacccuuucugacuccgaaggaaaagacacccccggcggcuacugccuaacucgauggaugcucaucgaagccgaacuaaaaugcuucggcaacaccgccgucgccaaaugcaacgaaaaacacgacgaagaguucugcgacaugcuucgccucuucgacuucaacaaacaagccauccagcgccucaaagcccccgcacaaauguccauacaacuaaucaacaaagccgucaacgcccuaauaaacgaccaacucaucaugaaaaaccaccuccgcgauauaaugugcauuccauacugcaacuacuccaaauacugguaucuaaaccacacaaccaccggcaaaaccucccuacccaaaugcuggcucgucuccaacggaucguaucuaaacgaaacucacuucuccgacgacaucgaacaacaagccgacaacaugaucacugagaugcuccagaaagaauacauggaacgacaaggcaaaacaccacuaggccucgucgaccucuucgucuucuccacauccuucuaccucaucucaaucuuccuccaccucguaaaaaucccaacccaccgccacaucgucggaaaacccugccccaagccacaccgccuaaaccacaugggcaucugcuccugcggacucuacaagcaacccggaguacccgucaaauggaaacgauag

SEQ ID NO: 6098 - RNA, 1476 nt, Artificial Sequence
  derived and/or modified protein sequence (opt11) from LASV(Z0948-SLE-2011;Clade IV)__AIT17844__GPCstabilized
augggccaaaucgucaccuucuuccaagaagucccccacgucauagaggaagugaugaacauaguacucaucgcccuaagcauccuggccguccuaaaaggccucuacaacuucgcgacgugcggccuggucggccucgucacauuccuacuccuaugcggacgcucaugcacaaucucacucuacaaaggagucuaugaacuccaaacccucgagcucaauauggagacccuaaacaugacaaugccccuauccuguaccaaaaacaacagccaccacuacaucauggucggcaacgaaaccggacucgagcucacacucacaaacaccuccauaaucaaccacaaauucugcaaccuaagcgaugcccacaagaaaaaccuauacgaccacgcccuuauguccauaauauccacauuccaccucuccauccccaacuucaaccaauacgaggccaugucaugcgacuucaacggcggaaaaaucucaguccaauacaaccuaucacacagcuacgcaggcgacgcagcaaaccacugcggcaccgucgccaacgggguccuccaaaccuucaugcgaauggccuggggaggcuccuacaucgcccucgacagcggcugcgaccgcugggacugcaucaugaccucauaucaauaccucauaauacaaaacaccacgugggaagaccacugccaauucucccgacccucccccaucgguuaccuaggccugcucucucaacgcacccgcgacaucuacauuucccgccgacgccgcggcacauucaccuggacccucagcgacagcgaaggcaaagacacacccggcggcuacugccuaaccagauggaugcucaucgaagccgaacuaaaaugcuucgguaauaccgccguagccaaaugcaacgaaaaacacgacgaagaguucugcgacaugcucagacucuucgacuucaacaaacaagcaauccaaagacucaaagcgcccgcacaaauguccauacaacucauaaaccgcgccgucaacgcccucaucaacgaccaacuaaucaugaaaaaccaucuccgcgacauaaugugcauuccauacugcaacuacagcaaauacugguaccucaaccacaccaccaccggcaaaacuucacuacccaaaugcuggcucguaucaaacggcuccuaccuaaaugaaacacacuucuccgacgacaucgagcagcaagccgacaacaugaucacggaaaugcuucaaaaagaguacauggaacgacaaggaaaaaccccgcuaggccuggucgaccucuucgucuucagcacuagcuucuaccucaucucgaucuuucuacaccuagucaaaaucccaacccaccgccacaucgucggcaaaccaugccccaaaccacacagacucaaccacaugggaaucuguucgugcggacucuacaaacaacccggaguuccggucaaauggaaaagauag

SEQ ID NO: 6099 - RNA, 1476 nt, Artificial Sequence
  derived and/or modified protein sequence (opt11) from LASV(Z148;Clade IV)__AAT49008__GPCstabilized
augggccaaaucgucacauucuuccaagaaguaccacacgucaucgaagaagucaugaacaucguccuuauagcacuaagcauccuagccguccucaaaggccucuacaacguagcgaccugcggacucaucggccucgucacauuccucuuccucugcggccgcuccugcagcacaacacucuacaaaggcgucuacgagcuccagacccucgaacucaacauggaaacccucaacaugacaaugccccucuccugcaccaaaaacaacucacaccacuacaucauggucggcaacgaaacgggccuagaacucacauuaacaaauaccuccaucaucaaccacaaauucuguaaccuaagcgacgcccacaagaaaaaccucuacgaccacacacuaauguccaucaucuccaccuuccaccuaagcaucccgaauuucaaccaauacgaagccauguccugcgacuuuaacggcgguaaaauauccguccaauacaaccuuucucacucauacgccguagacgccgccaaccacugcggcaccguagccaacggcguccuccaaaccuuuaugcgaauggccuggggcggauccuacaucgcccucgacuccggaugcggcaacugggacugcauaaugaccuccuaccaauaccuaaucauccaaaacaccaccugggaggaccacugccaauucucccggccaucaccaaucggcuaccucggacuccucucccaacgcaccagagacaucuacauaucccgccgccgccgcggcaccuucaccuggacacucuccgacuccgaaggaaaagacacccccggaggcuacugccucacacgcuggaugcuuaucgaggccgaacuuaaaugcuucggcaacaccgccgucgccaaaugcaacgaaaaacacgacgaagaguucugcgacaugcuccgccuauucgacuucaacaaacaagccauacaacgccugaaagccccagcccaaaugucuauccaacuaaucaacaaagccgugaacgcccucaucaacgaccaacucaucaugaagaaccaucugcgcgacaucaugugcaucccauacugcaacuacagccgcuacugguaccuaaaccacacagucaccggcaaaaccucccuaccaaaaugcuggcucgucuccaacggcucauaccuaaacgaaacacacuucuccgacgacaucgaacaacaggcagacaaccucauaacagaaauguuacagaaagaauacauggaacgccaaggcaaaacaccccucgggcuaguagaccucuucgucuuuuccaccuccuucuaccucaucuccaucuuucuucaccucgucaaaaucccaacccaccgccacauaguaggaaaacccugcccaaaaccccacagacucaaccacaugggcauaugcuccugcggcgucuacaaacaacccggcguccccguacgcuggaaacgcuag

SEQ ID NO: 6100 - RNA, 1476 nt, Artificial Sequence
  derived and/or modified protein sequence (opt11) from LASV(Bamba-R114;Clade V)__AHC95555__GPCstabilized
augggacaaauagugacauucuuccaggaagucccacacgucaucgaagaagucaugaacaucgugcucaucgcccucuccauccucgccguccucaaaggccucuacaacaucgccacaugcggacucauuggacucgucacauuccuacuucuaugcggcagauccugcucauccaaccuuuacaaaggcgucuacgaacuccaaucccucgaccucaacauggaaacucuuaacaugacaaugccccuaucaugcaccaaaaacaacucacaccacuacauccgcgccggcaacgaaaccggccucgaacucacccugaccaacaccucccucauaaaccacaaguucugcaaccucagcgacgcacacaagaaaaaccuauacgaccacacccuaaugucaauaaucaguaccuuccaccucucaauccccaacuucaaccaauacgaagccaugagcugcgacuucaacggaggaaaaaucuccguccaauacaaccugucacacgccuacgcaaucgacgccgccgaacacugcggcaccgucgccaacggcguccugcaaaccuucaugcgcauggccuggggcgggucauacaucgcccucgacuccggaugcggcaacugggacugcaucaugacaucuuaccaguaccucaucauccaaaauaccacuugggaagaucacugccaauuuucacgaccauccccgauaggcuaccucggccuacuuucccagcguacccgugacauauacaucucccgcagacgacgcggcaccuucacauggacccucuccgauucagaaggcaacgccacacccggcggauacugccuaacccgcuggaugcucaucgaagcagagcucaaaugcuucggaaacaccgcaguagccaaaugcaacgaaaaacaugacgaagaauuuugcgacaugcucagacuauucgacuucaacaaacaagcaauaucacgacucaaaucucccgcccaaauguccauccaacuuauuaacaaagccgucaacgcccuaaucaacgaucaacucaucaugaaaaaccaccuccgcgacaucaugugcauccccuacugcaacuacuccaaauacugguaccucaaccacaccaucaccggacgcaccucccuccccaaaugcuggcucguguccaacggcagcuaccucaacgaaacacacuucagcgacgacaucgaacagcaagcggacaacaugaucacugaaaugcuccaaaaagaauauauggagcgucaaggcaaaacaccccugggccuggucgaccucuucgucuucagcaccuccuucuaccucauauccaucuuccuacaccucgucaaaaucccaacccaccgacacaucgucggaaaaccaugccccaagccacaccgccucaaucacaugggcaucugcuccugcggccuauacaagcaacccggcgucccucuuaaauggaagcguuaa

SEQ ID NO: 6101 - RNA, 1476 nt, Artificial Sequence
  derived and/or modified protein sequence (opt11) from LASV(Komina-R16;Clade V)__AHC95557__GPCstabilized
auggggcaaaucgucaccuucuuccaagaaguaccccacgucaucgaagaagucaugaacauaguccucaucgcccuaagcauccucgccguccucaaaggacucuacaacaucgcaaccugcggccucaucggccuugucaccuucuuccuccucugcggacgcucaugcucaucaaaccucuacaaaggcgucuacgaacuccaaucacucgaccuaaacauggaaacccucaacaugaccaugccacuauccugcaccaaaaacaacucccaccacuauauucguguaggaaacgaaaccggcuuagaacucacccucacaaacaccucucuccucaaccacaaauucugcaaccuaucugacgcccacaaacggaaccucuaugaccacgcccuaauguccauaaucuccaccuuccaccucuccauccccaacuucaaccaauacgaggcaauguccugcgacuucaacggaggcaaaaucaccguacaauacaaccuaucccacagcuacgccggggacaccgcaaaacacugcggcaccaucgcuaacggcguccuccaaaccuucaugagaauggccuggggcggguccuacaucgcacuagacagcggcugcggaaacugggacugcaucaugaccuccuaccaguaccucauaauccagaacacaacaugggaagaccacugccaauucucacgacccucacccaucggcuaccuuggccuacugucccaacgaacacgagacaucuacaucagccgacgccgccgaggcaccuucacuuggacccuaucugacuccgaaggcaacgcaacacccggcggcuacugccucacccgcuggaugcucaucgaagccgaacuaaaaugcuucggaaacaccgccguagccaagugcaacgaaaaacacgacgaagaguucugcgacaugcuacgccuauucgacuucaauaaacaagccaucagccgccuucgaucccccgcccaaauguccauccaacucaucaacaaagccgucaacgcccucaucaacgaccaacuuaucaugaaaaaccaccuccgggacauuaugugcauaccauacugcaacuacucaaaauacugguaccuaaaccacacaguaaccggccgcaccucccuacccaaaugcuggcucgucuccaacggcuccuaccucaacgaaacacacuucucagaugacauagaacaacaggcggacaauaugauaaccgagaugcuccagaaggaguacauggaccgccaaggcaaaacaccccucggccugguagaccuguucgucuucucaaccuccuucuaccuuauaucaaucuuccuucaccucgucaaaauaccaacccacagacacauagucggcaaacccugccccaaaccacacagacuaaaccgcaugggcaucugcuccugcggccucuauaaacaacccggcguccccguuaaauggaaacgcuag

SEQ ID NO: 6102 - RNA, 1476 nt, Artificial Sequence
  derived and/or modified protein sequence (opt11) from LASV(Ouoma-R123;Clade V)__AHC95559__GPCstabilized
augggccaaaucaucaccuucuuccaagaaguuccacacguaauagaagaagucaugaacaucguccuaaucgcccucucuauccuugccguccucaaaggccucuauaacaucgcaaccugcggccuaaucggacucgugaccuuccuacuccucugcggacgcucauguuccuccucccuguacaaaggcguauaugaacuccaauccuuagaccuaaacauggaaacccucaacaugaccaugccccuuagcugcaccaaaaacaacucccaccacuacauccgcgucggaaacgaaaccggccucgaacucacccucaccaacaccucgcucaucaaccauaaauucugcaaccugagcgacgcccacaagaaaaaccucuacgaccacgcccuuauguccaucauaucaacuuuccaccucuccauccccaacuucaaccaauacgaagccauguccugcgacuucaacggcgguaaaaucucaguccaauacaaccucucucacgccuacgccaucgacgcagcuucgcauugcggaaccgucgccaacggaguccuacaaacauucaugcgaauggccuggggcggcuccuacaucgcccuagacucaggcugcggcaacugggacugcaucaugaccuccuaccaauaccuaaucauccaaaacaccaccugggaagaccacugccaauucucccgccccuccccuauaggcuaccuuggccuccucagccaacggacccgugacaucuacaucucccgccgccgccgaggaaccuucaccuggacccuuuccgacuccgaaggcaacgccacccccggaggcuacugccucacacgauggaugcuuaucgaagccgaacucaaaugcuucggcaacaccgcugucgccaaaugcaacgaaaagcacgacgaagaauuuugcgacaugcuccgccucuucgacuucaacaaacaagcaaucucucgccuaaaauccccagcccaaauguccauccaacucaucaacaaagccguaaacgcucucaucaacgaccaacucaucaugaaaaaccaccuccgcgacaucaugugcauucccuacugcaacuacuccaaauacugguacuuaaaccacaccguaaccggcaagaccucccucccaaaaugcuggcugguauccaacgguuccuaccucaacgaaacccacuucucugaugacaucgaacaacaagcugacaacaugauaacagaaaugcuccaaaaagaauacauggaacgacaaggcaaaaccccacuaggccucguagaccuuuucgucuucucaaccuccuucuaccuaaucuccauauuccuccaccuagucaagauccccacucaccgacacaucguaggcaaacccugccccaaaccucacagacucaaccacaugggcaucugcucaugcggucuauacaaacaacccggcguccccgucaaauggaaacgcuaa

SEQ ID NO: 6103 - RNA, 1476 nt, Artificial Sequence
  derived and/or modified protein sequence (opt11) from LASV(Soromba-R;Clade V)__AHC95553__GPCstabilized
augggccaaaucgucaccuucuuccaggagguaccacacgucauagaggaagucaugaacauuguccuuauagcccuaucaauacucgccguccuaaaaggccucuacaacaucgcaaccugcggccucaucgggcuaguaacguucuuccuccucugcggaagaagcugcagcucaaaccucuacaaaggcguuuacgaacugcaaucacucgaccucaacauggaaacucuaaacaugacgaugccacucucaugcaccaaaaacaacucucaccacuacauacgcgugggcaacgaaaccggccuggaacuuacccucacaaacacuucccuccucgaccacaaauuuugcaaccucagcgacgcccacaaaaagaaucucuacgaccacgcacugauguccaucauauccaccuuccaucucuccauccccaacuucaaccaauacgaagcaaugucaugcgacuucaacggaggcaaaaucaccguccaauacaaccuaucccacucuuaugccggagaugccgcccgccacugcggcaccaucgccaacggaguccuccaaacauucaugcggauggcauggggaggcuccuacaucgcccucgacucaggcugcggcaauugggacugcaucaugaccuccuaccaguaccuaauaauacaaaacaccaccugggaagaccacugccaauucucccgcccauccccaaucggcuaucucucccuacuuucucaacggaccagagacaucuacaucagccgacgccggcgcggcacuuucaccuggacccucuccgacagugaaggcaacgccaccccaggaggauacugcuuaacccgcuggaugcugaucgaagccgaacucaaaugcuucggcaacacggccguagccaaaugcaaugagaaacacgacgaagaguucugcgacaugcugcgccuauucgacuucaacaaacaagccaucuccagacuacgcucgcccgcacaaauguccauccaauuaauaaacaaagcugucaacgcccucaucaacgaccaacucaucaugaaaaaccaucugcgagacaucaugugcauccccuacugcaacuacagcaaauacugguaccucaaccacacuguuaccggccgcaccucccuucccaaaugcuggcucguauccaacggcucuuaccuaaacgaaacccacuucuccgacgacaucgaacaacaagcagacaacaugauaaccgaaaugcuccagaaagaauacauggaccgacaaggcaaaaccccucucggacucguugaccuuuucgucuucuccaccagcuuuuaccucaucuccaucuuccuccaccuagucaagaucccaacccaccgccacauugucggcaaacccugccccaaaccccaccgacucaaccguaugggcaucugcuccugcggccucuacaaacaacccgggguccccgucaaauggaaacgcuga

SEQ ID NO: 6104 - RNA, 1473 nt, Artificial Sequence
  derived and/or modified protein sequence (opt11) from LASV(Alzey;Clade VI)__SCA79105__GPCstabilized
augggccagaucaucaccuuuuuccaggaagucccccacgugaucgaagaagucaugaacauuguucuaauagcccucucacuccuagccauccuuaaaggcgucuacaacgucgcaaccugcggcaucaucggccucgucaccuuccuauuccuuugcggacgcuccugcucccucaucuacaaaggaagcuacgaacuccaaacccuggaacucaacauggaaacccuaaacaugaccaugccacucagcugcaccaaaaacucaucccaccacuacauccguguaggcaaugaaaccgggcucgaacuuacacucacaaacacauccaucaucaaccacaaguucugcaaccucuccgacgcccacaaacgaaaccucuacgaccacgcccucauguccauccucuccaccuuccaccucuccauccccaacuucaaccaauacgaggccauguccugcgacuucaacggcggaaaaaucucaguccaauacaaccucagccacgccuacgccguagacgccgccgaacacugcggcacagucgccaacggcguccuacaaaccuucaugcgcauggcuuggggaggguccuacaucgcccuagacuccgguugcggcaacugggacugcaucaugaccucuuaccaauaccucaucauccaaaacaccaccugggaagaccacugccaauucagccgccccagcccaauuggauacuuaggccuccuaucccaacgcacccgugacaucuacaucucacgucggcgccgaggcaccuucaccuggacacugucugacuccgaaggcaacgaaacccccggcggcuacugccugacaagguggaugcucaucgaagccgaacucaaaugcuucggcaauacagccguggcaaaaugcaacgaaaaacacgacgaagaguucugcgacaugcuucgacucuucgauuucaacaagcaagccauucaacgccucaaaucaccagcacagauguccauccaacucaucaacaaagcagucaacgcgcucaucaacgaccaacucauaaugaaaaaccaccuccgcgacaugaugugcauccccuacugcaacuacucaaaauacugguaccucaaccacaccuccuccggacguacaucgcuacccaaaugcuggcuggucucaaacggaucauaccucaacgaaacccacuucuccgacgacauagaacaacaagccgacaacaugauaacggaaaugcugcaaaaagaauacaucgaccgccagggaaaaacuccccucggccucgucgaccuuuucguguucuccaccuccuucuaccuuaucuccaucuucuuacaccucaucaaaauacccacccaccgacacaucgucggcaaacccugccccaaaccccaccgucucaaucacaugggaaucugcagcuguggccucuacaaacaaccaggcguccccacccgcuggaaaagauaa

SEQ ID NO: 6105 - RNA, 1473 nt, Artificial Sequence
  derived and/or modified protein sequence (opt11) from LASV(Lassa/H.sapiens-wt/TGO/2016/201600568;Clade VI)__AVN98153__GPCstabilized
augggacaaauaaucaccuucuuccaagaagucccccacgugaucgaggaagucaugaacaucgucuuaaucgcccugagccuccuagccauccugaaaggcguauauaaugucgccacaugcggcauaaucggccucguuaccuuccucuuccuaugcggccguuccugcagccuaaucuacaaaggcuccuaugaacuccaaacacuggaacuaaacauggaaacccuaaacaugaccaugccccucucaugcaccaaaaacagcucccaccacuacaucagagucggcaacgaaaccggccucgaacucacccucaccaacaccucaauaaucaaccacaaauucugcaaucuguccgacgcccacaaacgaaaccuauacgaccaugcccucauguccauccucuccaccuuccaccucuccaucccaaacuucaaccaauacgaagccauguccugugacuucaacggcggcaaaauuucaguccaauacaaccucucgcacgcauacgccgucgacgccgccgaacacugcggcaccgucgcaaacggaguacuacaaaccuuuaugcgcauggccuggggcggcuccuacaucgcacucgacuccggaugcggcaacugggacugcaucaugaccucauaccaguaccuaauaauccaaaacacuaccugggaagaccacugccaauucuccagacccucccccaucggcuaccuaggacuacuuucccaacgcaccagagacauuuacaucucucgccgacgccgcggcaccuucaccuggacccuauccgacuccgaaggaaacgaaacacccggcggcuacugccucacgcguuggaugcucaucgaagcugaacucaaaugcuucggcaacaccgccgucgccaaauguaacgaaaaacacgacgaagaguucugcgauaugcuccgccucuucgacuucaacaaacaggcaauccaacgccucaagagcccugcucaaauguccauccaacucauaaacaaagcggucaacgcccucaucaacgaccaacuaaucaugaaaaaucaccuccgcgauaugaugugcauaccauacugcaacuacuccaaauacugguaccucaaccacaccuccuccggacgcgccucccuccccaaaugcuggcucgucucaaacggcucauaucucaacgaaacccacuucagcgacgacaucgaacaacaagccgacaacaugauaaccgaaaugcuacaaaaagaauacaucgaccgucaaggaaaaacaccccucggccucguagaccuauucgucuucuccaccuccuucuaccucaucucuauauuccuucaccuaaucaaaauccccacccaccgccacaucgucgguaagccaugcccaaaaccccaccgacuaaaccauaugggcaucugcucaugcggacuguacaaacagcccggaguccccacucgcuggaaacgauaa

SEQ ID NO: 6106 - RNA, 1473 nt, Artificial Sequence
  derived and/or modified protein sequence (opt11) from LASV(NIGERIA IKEJI;Clade II)__AMZ00373__GPCstabilized
augggacaaauaaucaccuucuuucaagaaguuccccacguuaucgaagaaguuaugaacaucguccucaucgcacucucccuacuggccauccucaaaggaauauacaacguagcaaccugcggccucuucggauuaaucuccuuccucuuccucuguggcagauccugcuccaccauguacaaaggggucuaugaacuccaaacccuugagcucgacauggccaaccucaacaugaccaugccccucuccugcaccaaaaacaacucccaccacuacauuauggucggaaacgaaaccggccucgaacuaacccucaccaaccaauccaucaucaaucacaaguucugcaaccucuccgacgcccacaagaaaaaccuauaugaucacacucuuaugucaaucaucagcaccuuccaccucuccauccccaacuucaaccaauacgaagccauguccugugacuucaacggcggaaaaaucuccguacaauacaaccucucacacuccuacgccgucgacgccgccaaccacugcggcaccgucgccaacgggguccuucaaaccuucaugcgcauggccuggggcgguuccuauaucgcacucgacuccggcugcggcaacugggacugcaucaugaccuccuaccaauaccucaucauccagaauaccaccugggaggaccacugccaauucucccgccccuccccaaucggauaccucggccuccuaagccaacgaacacgagauauauacauaucccgccgccgccgcggcaccuuuacuuggacccucuccgauuccgaggguaacgaugccccgggcggcuacugucucacccgcuggaugcucaucgaagccgaacuaaaaugcuuuggcaacacggccauagccaaaugcaacgaaaaacacgacgaagaguucugcgacaugcuccgacuauucgacuucaacaaacaggcaauaaaacgccucaaagccccagcccaaaugucaauccaacucaucaacaaagccgucaacgcucuaaucaacgaccaacucauaaugaaaaaccaccuccgcgacauuaugugcauccccuacugcaacuacuccaaauacugguaccuaaacaacaccgucaccggcaaauccucacugcccaaaugcuggcucguauccaacggauccuaccuaaacgaaacccacuucucggaugacaucgaacaacaagccgacaacaugaucaccgaaaugcugcagaaagaauacauggaccgccaaggcaaaacaccccuaggacuugucgaccucuuuguauucucaaccuccuucuaccucaucaguaucuuccuacaccucgucaaaauacccacccaucggcacaucaccggcaaacccugccccaaaccccaccgccucaaccacaugggcaucugcagcugcggacucuacaaacaaccaggcguccccgucaaauggaaacgcuaa

SEQ ID NO: 6107 - RNA, 1752 nt, Artificial Sequence
  mRNA product Design a-1 comprising derived and/or modified sequence from LASV(Josiah;Clade IV)__NP_694870__GPCstabilized (wt)
gggagagucccgcagucggcguccagcggcucugcuuguucgugugugugucguugcaggccuuauucaagcuuaccaugggacaaauagugacauucuuccaggaagugccucauguaauagaagaggugaugaacauuguucucauugcacugucuguacuagcagugcugaaaggucuguacaauuuugcaacguguggccuuguugguuuggucacuuuccuccuguugugugguaggucuugcacaaccagucuuuauaaagggguuuaugagcuucagacucuggaacuaaacauggagacacucaauaugaccaugccucucuccugcacaaagaacaacagucaucauuauauaauggugggcaaugagacaggacuagaacugaccuugaccaacacgagcauuauuaaucacaaauuuugcaaucugucugaugcccacaaaaagaaccucuaugaccacgcucuuaugagcauaaucucaacuuuccacuuguccauccccaacuucaaucaguaugaggcaaugagcugcgauuuuaaugggggaaagauuagugugcaguacaaccugagucacagcuaugcuggggaugcagccaaccauugugguacuguugcaaaugguguguuacagacuuuuaugaggauggcuuggggugggagcuacauugcucuugacucaggcugcggcaacugggacuguauuaugacuaguuaucaauaucugauaauccaaaauacaaccugggaagaucacugccaauucucgagaccaucucccaucgguuaucucgggcuccucucacaaaggacuagagauauuuauauuaguagaagacgccggggcacauucacauggacacugucagauucugaagguaaagacacaccagggggauauugucugaccagguggaugcuaauugaggcugaacuaaaaugcuucgggaacacagcuguggcaaaauguaaugagaagcaugaugaggaauuuugugacaugcugaggcuguuugacuucaacaaacaagccauucaaagguugaaagcucccgcacaaaugagcauucaguugaucaacaaagcaguaaaugcuuugauaaaugaccaacuuauaaugaagaaccaucuacgggacaucaugugcauuccauacuguaauuacagcaaguauugguaccucaaccacacaacuacugggagaacaucacugcccaaauguuggcuuguaucaaaugguucauacuugaacgagacccacuuuucugaugauauugaacaacaagcugacaauaugaucacugagauguuacagaaggaguauauggagaggcaggggaagacaccauugggucuaguugaccucuuuguguucaguacaaguuucuaucuuauuagcaucuuccuucaccuagucaaaauaccaacucauaggcauauuguaggcaagucgugucccaaaccucacagauugaaucauaugggcauuuguuccuguggacucuacaaacagccuggugugccugugaaauggaagagaugaggacuagucccuguucccagagcccacuuuuuuuucuuuuuuugaaauaaaauagccugucuuucagaucuaaaaaaaaaaaaaaaaaaaaaaaaaaaaaaaaaaaaaaaaaaaaaaaaaaaaaaaaaaaaaaaaugcaucccccccccccccccccccccccccccccccaaaggcucuuuucagagccaccagaauu

SEQ ID NO: 6108 - RNA, 1749 nt, Artificial Sequence
  mRNA product Design a-1 comprising derived and/or modified sequence from LASV(LP;Clade I)__AAF86701__GPCstabilized (wt)
gggagagucccgcagucggcguccagcggcucugcuuguucgugugugugucguugcaggccuuauucaagcuuaccauggggcagauuauuacauucuuucaagaagugccacauguaauagaggaagucaugaacauugugcuaauugcgcuuucucuauuggcaaucuugaagggcuuguauaacaucgcuacaugugggauuauuggauugguugccuuuuuauucuuguguggcaagucuuguucccuaacccuuaaagggggauaugagcugcaaaccuuagaauuaaauauggagacccuaaacaugaccaugcccuuaucaugcaccaagaacagcagucaucauuacauaagagugggcaaugagacuggauuagaauugacuuuaacuaacaccagcauuauaaaucacaaauuuugcaacuuauccgaugcucacaaaaagaaucuuuaugaucaugcucucaugagcaucaucucaacauuccaucuauccauuccaaacuucaaucaguaugaagccaugaguugugauuucaauggagggaaaaucagugugcaauacaaccucucucauuccuaugcuggggaugcggccgaacacugugggacaguugccaacggaguguugcaaacauuuaugagaauggccugggguggaagauacauugcauuagacucaggaugcggaaacugggacuguauaaugaccagcuaccaguaccugauaauucaaaauacaacaugggaggaccacugccaauucucaagaccgucuccuaucggguaccuuggccuuuugucacaaaggacaagagauauauauauaaguaggaggcgccgggggaccuucaccuggacauugucagauucugagggcaaugaaacaccaggugguuauuguuuaaccagguggaugcuaauugaagcagaacucaaguguuuugggaauacagcuguggcaaaaugcaaugagaagcaugaugaggaguuuugugacaugcugagauuguuugauuucaacaagcaagcaauccguagguugaaggcucccgcccagaugaguauucaauuaauaaauaaagccgugaaugccuuaaucaaugaucaauuaaucaugaagaaccauuuaagagacaucaugugcauucccuacugcaauuacagcaaguauugguaccuuaaucauacuaguagcgggagaacaucacuaccaaaguguuggcuuauauccaaugggucauaucuaaaugaaacccaguucucugaugacauagaacagcaagccgacaauaugaucacagagaugcuucagaaagaauacauugaaagacaagggaaaacgcccuugggacuaguggacauuuucaucuuuagcacaagcuuuuaucugaucagcauuuucuugcauuuaauuaaaaucccuacacaucgacacaucguugggaaacccugucccaaaccccauagacuaaaucacaugggaguauguuccuguggacuguacaaacacccugguguuccaacaaaguggaagagauagggacuagucccuguucccagagcccacuuuuuuuucuuuuuuugaaauaaaauagccugucuuucagaucuaaaaaaaaaaaaaaaaaaaaaaaaaaaaaaaaaaaaaaaaaaaaaaaaaaaaaaaaaaaaaaaaugcaucccccccccccccccccccccccccccccccaaaggcucuuuucagagccaccagaauu

SEQ ID NO: 6109 - RNA, 1749 nt, Artificial Sequence
  mRNA product Design a-1 comprising derived and/or modified sequence from LASV(803213;Clade II)__AAF86703__GPCstabilized (wt)
gggagagucccgcagucggcguccagcggcucugcuuguucgugugugugucguugcaggccuuauucaagcuuaccauggggcaaaucauaacauucuuccaagaggugccucaugucauagaggaggucaugaacauuguccuaauugcccucagucuccuggcgauacuaaaggggauuuacaauguugcuaccuguggucucuuuggguugaucuccuuucuucucuuauguggcagaucauguucaguaaccuauaaagguguuuaugagcuacaaacucuagaacugaacauggcaaaccuuaauaugacgaugcccuugucuuguacgaagaacaacagccaucauuacaucaugguuggaaaugaaacaggccuagagcugaccuuaacaaacacaagcaucauuaaccacaaguuuugcaaccuuucugaugcacauaaaaagaaucucuaugaccaugcucugaugagcaucaucucaacuuuccacuuaucuauuccaaacuuuaaucaguaugaagcaaugaguugugacuucaauggagggaaaauaaguguucaguacaaccucagucacuccuuugcuguggaugcagccaaccacugugggaccauugccaaugguguucugcagaccuuuaugaggauggcuugggguggcaguuacauagcacuugauuccggaugcgggaacugggauuguauaaugacuuccuaucaauacuugauaauucaaaacaccacuugggaagaucacugccaguuuucucgcccaucuccuauugguuacuuaggacuauugucacagagaacuagagauaucuauaucagucgaagacgccggggaacuuucacuuggacccuuucugauucugaagguaaugaagcaccugguggguauugucuaacuagauggauguuaauugaagcagaacugaaaugcuuugggaacacagcaguugcaaagugcaacgaaaaacaugaugaagaauuuugugacauguugagauuguuugauuucaacaaacaagcuauaaagaggcugaaaacacccgcacagaugaguauucagcugauaaacaaggcagugaaugcauuaaucaaugaccaacugauuaugaagaaccaucuaagggacaucaugugcauuccuuauugcaacuacaguagauauugguaucuaaaucacacugugacagggaagacaucacugccaagauguuggcuugugucaaaugguuccuaccuaaacgaaacacauuuuucugaugacauugaacaacaagcagacaacaugauaacagaaauguugcagaaagaguacauggacaggcaggggaaaacaccuuuaggguuaguggaccuuuuugucuuuagcacuagcuuuuaccucauaagcaucuuucuccaucuggucaagaucccaacucacaggcacaucguggggaaaccuugcccuaagccacacagacucaaccacaugggcaucugcucauguggucuguauaaacaucccgguguuccaguaaaauggaagagauaaggacuagucccuguucccagagcccacuuuuuuuucuuuuuuugaaauaaaauagccugucuuucagaucuaaaaaaaaaaaaaaaaaaaaaaaaaaaaaaaaaaaaaaaaaaaaaaaaaaaaaaaaaaaaaaaaugcaucccccccccccccccccccccccccccccccaaaggcucuuuucagagccaccagaauu

SEQ ID NO: 6110 - RNA, 1749 nt, Artificial Sequence
  mRNA product Design a-1 comprising derived and/or modified sequence from LASV(GA391;Clade III)__CAA36645__GPCstabilized (wt)
gggagagucccgcagucggcguccagcggcucugcuuguucgugugugugucguugcaggccuuauucaagcuuaccaugggacagauugugacauucuuccaagaaguuccucauguuauugaggaagugaugaauauuguccuuauugcacuauccauccuagcaauucugaagggacuauacaauguugccacguguggcuugauagggcuugucacauuccuucuacuuucaggaaggucaugcucacugaucuacaaagggacuuacgagcugcaaacccuugaguugaauauggagacucuuaauaugaccaugccgcuauccugcacaaagaacaacagucaucauuauauaaggguggggaaugagacaggacuugagcucaccuugaccaacaccagcauucuuaaucacaaauucuguaaccucucugaugcccacaaaaggaaucuuuaugaucacagccucaugaguaucaucucuaccuuucaucuguccauucccaacuucaaucaauaugaggcaaugagcugcgauuucaauggggggaaaaucacugugcaauacaaccugagucauagcuucgcaguggaugcagcaggucacugcggcacacuugcaaauggugucuuacaaacauuuaugagaauggcuuggggagggaguuauauugcucuugauucuggaugcgguaacugggacuguauaaugaccaguuaccaauaucuaaucauucagaauacaaccugggaugaccacugccaauuuuccagaccaucaccuauuggcuaccuugggcuucucucacaaagaacuagagacauauacauuagcagaaggcgccgggggacauucaccuggacacuaucagacucagagggaaaugaaacaccagggggauacugccuuacuagauggauguugauugaggccgaauuaaagugcuuuggaaacacugcaguagccaagugcaaugagaaacaugaugaagaauuuugugacaugcuaagguuguucgauuucaacaaacaggccauaaggaggcucaaaacacccgcccaaaugagcauacagcugaucaacaaggcugucaaugcuuuaauaaaugaucagcucaucaugaagaaccacuugagagacaucaugugcauaccauauuguaacuacagcagauauugguaccuuaaccacacaucaacaggaaagaccucacuaccaagguguuggcuuaucucaaauggaucauaucucaaugagaccaaguuuucagaugacaucgaacaacaagcugacaacaugauaacagagaugcuacaaaaggaauacauagauagacagggcaaaacuccacugggguuaguugaccuauuuguuuuuagcacaaguuucuaucugauaagcaucuuucuccaccuggucaaaauaccaacccauagacacauuguagguaaaccuugcccaaaaccccacaggcugaaccacaugggcaucugcuccuguggucuauacaaacagccaggugugccugucagauggaagaggugaggacuagucccuguucccagagcccacuuuuuuuucuuuuuuugaaauaaaauagccugucuuucagaucuaaaaaaaaaaaaaaaaaaaaaaaaaaaaaaaaaaaaaaaaaaaaaaaaaaaaaaaaaaaaaaaaugcaucccccccccccccccccccccccccccccccaaaggcucuuuucagagccaccagaauu

SEQ ID NO: 6111 - RNA, 1752 nt, Artificial Sequence
  mRNA product Design a-1 comprising derived and/or modified sequence from LASV(AV;Clade V)__CCA30314__GPCstabilized (wt)
gggagagucccgcagucggcguccagcggcucugcuuguucgugugugugucguugcaggccuuauucaagcuuaccauggggcaaauagugacauucuuucaagaggugccucaugugauagaagaggugaugaacauuguucuuauagcauugucuauauuggcaguguugaaaggucucuacaacauugccacaugcggccucaucggcuugaucacuuuccucuuauuauguggaaggucuugcucauccaaccucuacaagggggucuaugaacuucaaucucuggaccugaacauggagacacucaacaugaccaugccccucuccugcacaaagaacaauagucaucacuacauaaggguuggcaaugacacagggcuggaacugaccuugaccaacacgagcauacucaaucacaaauucugcaaccuaucagaugcucacaagaaagaccuauaugaucacgcacucaugagcauaaucucaacuuuccaccugucuauacccaauuucaaccaauacgaagcaaugaguugugacuucaaugggggcaaaaucagugugcaguacaaucuaagccauucuuaugcuauagaugcagcuaaucauugcggcacagucgcgaauggcaucuugcagacuuucaugagaauggcauggggugggagcuauauugcucuugacucaggcugcggaaacugggacuguauuaugacuagcuaucaauaucugauuauucagaacacaaccugggaaaaucacugucaguucucaagaccaucuccuauugguuaucuuggucuccucucacagaggacuagagacauuuacauuagcaggaggcgccggggcacauucacguggacacugucagacucugaggguaaugcuacaccaggagguuauugucugaccagguggauguuaauugaagcugaguugaaaugcuuuggaaacacagcaguagcaaaguguaaugaaaagcaugaugaagaauuuugcgacaugcucagacuuuuugauuuuaauaagcaggcuauaaguagauugaaaucucccgcacaaaugagcauccaacugaucaacaaagcagugaaugcuuugaucaacgaucaauuaauuaugaagaaccacuugcgagacaucaugugcauuccauauuguaauuacagcaaguauugguaccucaaucauacaauaacuggcaaaaccucauuaccuaaauguuggcuuguaucuaaugguucauacuugaaugaaacccauuuuucugacgacaucgagcaacaagcugacaauaugaucacagagaugcuacaaaaggaauacauggagaggcaagggaaaacgccuuuggguuuaguugaucuguuuguguuuagcacaaguuuuuaucuaauuaguaucuuccuccgacuagucaagauuccaacccauagacacauugugggcaaaccauguccuaagccccacagguugaaccacaugggcauuuguucuugcggcuuauacaagcagccuggcguccccgugagauggaagagauagggacuagucccuguucccagagcccacuuuuuuuucuuuuuuugaaauaaaauagccugucuuucagaucuaaaaaaaaaaaaaaaaaaaaaaaaaaaaaaaaaaaaaaaaaaaaaaaaaaaaaaaaaaaaaaaaugcaucccccccccccccccccccccccccccccccaaaggcucuuuucagagccaccagaauu

SEQ ID NO: 6112 - RNA, 1749 nt, Artificial Sequence
  mRNA product Design a-1 comprising derived and/or modified sequence from LASV(Togo/2016/7082;Clade VI)__AMR44577__GPCstabilized (wt)
gggagagucccgcagucggcguccagcggcucugcuuguucgugugugugucguugcaggccuuauucaagcuuaccauggggcaaauaauaaccuucuuccaggagguuccucauguuauagaggaggugaugaacauuguucugauagcacucucacuccuagcuauccugaaaggggucuacaauguggcaacaugugggauaauugggcuugugaccuuccucuuucucuguggaagaucuuguucacugaucuacaaaggcaguuaugagcugcaaacauuggaguuaaauauggagacccuaaacaugaccaugccucugucaugcacuaaaaauaguagccaccauuauauucgaguugggaacgagacuggcuuagagcugacauugaccaacaccagcauuauaaaucacaaauucuguaaccugucagaugcucacaaacguaaucuguaugaccacgcacucaugagcauccuuuccacauuccaucuguccaucccaaacuucaaccaguaugaggcgaugaguugugacuucaauggaggcaaaaucagugugcaauauaaucucagccaugcuuaugcaguugaugcugccgaacacugcggaacaguugcaaauggugugcuacaaacauucaugaggauggcuuggggaggaaguuacauugcacuugacucugggugcggcaauugggacuguauuaugacaagcuaccaauacuuaaucauucagaauacaacaugggaagaucacugccaauuuucaagaccuucuccuauugguuaucucggcuuauugucacaaagaacaagagacauuuauaucaguaggaggcgccgggguacauucaccuggacacuuucugacucagagggaaaugagacaccaggcggauacuguuuaacaagauggaugcugauagaggcugagcuaaaauguuuuggaaacacagcuguugcaaaguguaaugagaagcaugaugaggaauucugcgacauguuaagguuguuugacuucaacaaacaggcaauucagaggcucaaaucacccgcacaaaugagcauccaguuaauaaauaaagcagugaaugcauugauaaaugaucagcucauuaugaagaaccacuuaagggauaugaugugcauaccguauugcaacuacaguaaguauugguaucucaaucacaccucaucagggagaacaucguugccuaaaugcuggcuuguuuccaauggaaguuaucugaaugagacccacuucucagaugauauugaacaacaggcagacaacaugauaacugaaauguuacaaaaggaauauaucgauaggcaggguaaaacaccuuuaggacuuguugaccuuuuuguuuucagcacgaguuuuuaccuuauaaguauauucuuacacuugauaaagauaccuacucauaggcacauaguuggaaagccaugccccaagccacaccgccucaaccacauggggaucugcucuuguggacuauacaagcagccuggugucccaaccagauggaagagauaaggacuagucccuguucccagagcccacuuuuuuuucuuuuuuugaaauaaaauagccugucuuucagaucuaaaaaaaaaaaaaaaaaaaaaaaaaaaaaaaaaaaaaaaaaaaaaaaaaaaaaaaaaaaaaaaaugcaucccccccccccccccccccccccccccccccaaaggcucuuuucagagccaccagaauu

SEQ ID NO: 6113 - RNA, 1749 nt, Artificial Sequence
  mRNA product Design a-1 comprising derived and/or modified sequence from LASV(KAK-428;Clade n.d. (VII))__ANH09740__GPCstabilized (wt)
gggagagucccgcagucggcguccagcggcucugcuuguucgugugugugucguugcaggccuuauucaagcuuaccaugggucaaauagugaccuucuuccaggaaguaccucauguuauagaggaagugaugaacauaguucugauagcacuuucucucuuagccauccugaagggccucuacaauuuugccaccuguggaguaauuggacugauaacauuccuuuuacuuuguggaagauccuguucagcgaccuacaaaggccaauaugaacuccaaacuuuagaacuaaauauggagucccuaaacaugaccaugccacugucuugcacaaaaaacaacagucaucauuauaucagagcuggcaacaacacaggccuggaguugacccucaccaacaccagcauuauaucucauaaauucugcaaccuuucugaugcucacaagaagaaccuuuaugaccacacucuuaugaguauaauaacuaccuuucauuuguccaucccaaauuucaaccaguaugaggcaaugaguugugacuuuaacggugggaaaaucagcauacaguacaaccucagucacuccuacgcuggugaugcugcgcaacacuguggaacaguugcaaauggggugcugcaaaccuuuaugagaauggcuuggggagguaguuaucuggcccuugauucaggaugcagagguugggacugcauaauuuccaguuaccaauacuugaucauccaaaacacaacuugggaugaccauugccaguuuucaaggccauccccgaucggguaucuuggguuuguaucgcagaagaccagggacaucuauauaaguagaagacgccggggaacuuuuacauggacacuuucagacuccgagggacaugacaugccaggugguuacugcuugaccagauggaugcucauugaagcugauuuaaaguguuuuggaaacacagcugucgcuaaguguaaugagaaacaugacgaggaguucugugacauguggagguuguuugacuuuaauaagcaagccauucaaaggcucaaagcacccgcccagaugaacauccagcucauaaauaaagcugucaaugcucucauaaaugaccaauugaugaugaaaaaccauuuaagggauaucaugugcauucccuauugcaauuacaguaaauucugguaucucaauaacaccacgacugggagaaccucacugccaagaugcuggcugauuucaaauggguccuacuuaaaugagacucacuucucagaugauauugaacagcaagcugacaauaugauaacugagauguugcagaaagaauacauggacagacaaggaaaaacaccgcuaggacugguugaucucuuuguauucaguacaagcuuuuaccucauuaccauuuucuuacaucuugugaaaauaccaacccacagacacauaguuggcaagccgugcccuaaaccacacagacugaaucacaugggcaucugcuccugugggcucuacaaacagccuggugugccaguacgauggaagagaugaggacuagucccuguucccagagcccacuuuuuuuucuuuuuuugaaauaaaauagccugucuuucagaucuaaaaaaaaaaaaaaaaaaaaaaaaaaaaaaaaaaaaaaaaaaaaaaaaaaaaaaaaaaaaaaaaugcaucccccccccccccccccccccccccccccccaaaggcucuuuucagagccaccagaauu

SEQ ID NO: 6114 - RNA, 1749 nt, Artificial Sequence; identical to SEQ ID NO: 6108
  mRNA product Design a-1 comprising derived and/or modified sequence from LASV(Pinneo-NIG-1969;Clade I)__AIT17836__GPCstabilized (wt)

SEQ ID NO: 6115 - RNA, 1749 nt, Artificial Sequence
  mRNA product Design a-1 comprising derived and/or modified sequence from LASV(ISTH0009-NIG-2011;Clade II)__AIT17404__GPCstabilized (wt)
gggagagucccgcagucggcguccagcggcucugcuuguucgugugugugucguugcaggccuuauucaagcuuaccaugggacaaaucauaacauuuuuccaggaaguaccucaugucauagaggaagugaugaacauuguccugauugcucucagccuucuggcaauacugaaggggaucuacaauguugccaccuguggccuauuuggacugguguccuuucuccucuuaugugggagaucaugcucaacaacuuauaaggguguuuaugagcuacaaacucuagagcuggacauggcaagccuuaauaugacaaugccccuaucuugcacaaagaacaacagucaccauuacaucauggucggaaaugagacuggcuuggagcugacuuuaacaaauacaaguauuaucaaccacaaguuuuguaaccuuucugaugcacauaaaaagaaucucuaugaccaugcuuuaaugaguaucaucucaaccuuccacuuaucuauuccuaauuuuaaucaguaugaagcaaugaguugugacuucaauggggggaagauaaguguucaguacaaccuuagccacgcuuaugcuguagaugcagccaaucacugugggacuaucgccaauggcguucuucagacuuuuaugaggauggcuugggguggcaguuacauagcacuugauuccggaugcgggaguugggauuguauaaugacuuccuaccaauauuugauaauccagaacaccacuugggaagaucacugccaguuuucucgcccauccccuaucgguuaucuggggcuacugucacaaaggaccagagacauuuacaucagucgaagacgccgggggacuuuuacuuggacucucucugauucugaagguaaugaaacaccggguggguacugucuaacaagauggaugcugauugaggccgaguugaagugcuuugggaacacagcaguugcgaaaugcaaugagaaacaugaugaagaguuuugugacauguuaagacuguuugauuucaacaaacaagcuauaaggaggcuaaagacacccgcacagaugaguauccaacugauaaacaaagcagugaaugcauugaucaaugaccagcuuauuaugaagaaucacuugagagauaucaugugcauuccuuacugcaauuacagcaaguacugguaucuaaaucacacuguaacagggaagacaucguugccaaggugcuggcuugugucaaaugguuccuaccugaaugagacacauuuuucugaugacauugaacaacaggcagacaacaugauaacagaacuguugcaaaaggaguacauggacaggcaagggaaaacacccuuaggguuaguagaucuuuuugucuucagcaccagcuuuuaucucauuagcaucuuccuccaccugaucaaaaucccaacccacagacauaucacagggaaacccugcccuaaaccacacagacuuaaccacaugggcauaugcucauguggucuauacaaacauccugguguaccagucaaguggaaaagauagggacuagucccuguucccagagcccacuuuuuuuucuuuuuuugaaauaaaauagccugucuuucagaucuaaaaaaaaaaaaaaaaaaaaaaaaaaaaaaaaaaaaaaaaaaaaaaaaaaaaaaaaaaaaaaaaugcaucccccccccccccccccccccccccccccccaaaggcucuuuucagagccaccagaauu

SEQ ID NO: 6116 - RNA, 1749 nt, Artificial Sequence
  mRNA product Design a-1 comprising derived and/or modified sequence from LASV(ISTH2010-NIG-2012;Clade II)__AIT17482__GPCstabilized (wt)
gggagagucccgcagucggcguccagcggcucugcuuguucgugugugugucguugcaggccuuauucaagcuuaccaugggacaaaucauaacauuuuuccaggaaguaccucaugucauagaggaagugaugaacauuguccugauugcucucagccuucuggcaauauugaaggggaucuacaauguugcuaccuguggccucuuuggauugguguccuuccuccucuuauguggaaggucauguucaacaacuuacaaggguguuuaugagcuacaaacucuggagcuagacauggcaagccuuaauaugacaaugcccuuaucuugcacgaagaacaacagccaccauuacaucauggucggaaaugaaacuggcuuggagcuaacuuuaacaaauacaaguaucaucaaccacaaauuuuguaaccucucugaugcacauaagaagaaucuuuaugaucaugcuuuaaugaguaucauuucaaccuuccacuuauccauuccuaacuuuaaucaguaugaagcaaugagcugugacuucaaugggggaaagauaaguguucaguacaaccuuagccacgcuuaugcuguagaugcagccaaccacugugggaccaucgccaauggcguucuucagacuuuuaugaggauggcuugggguggcagcuauauagcacuugauuccggaugcgggaguugggauuguauaaugacuuccuaccaauauuugauaauccaaaacaucacuugggaagaucacugccaguuuucucgcccauccccuaucgguuaccuagggcuacugucacaaaggaccagggacauuuacaucagucgaagacgccgggggacuuuuacuuggacucucucugauucugaagguaaugaaacaccggguggguauugccuaacaagauggaugcugauugaagccgaguugaaaugcuuugggaacacagcaguugcgaaaugcaaugagaaacaugaugaagaguuuugugacauguuaagauuguuugacuuuaacaaacaggcuauaaggaggcuaaagacacccgcacagaugaguauccaacugauaaacaaagcagugaacgcacugaucaaugaccagcugauuaugaagaaucauuugagagauaucaugugcauuccuuacugcaauuacagcaaguacugguaucuaaaucauacuguaacagggaagacaucguugccaaggugcuggcuugugucaaaugguuccuaccugaaugagacacauuuuucugaugacauugaacaacaggcagacaacaugauaacagaacugcugcaaaaggaguacauagacaggcaagggaaaacaccuuuaggguuaguagaucuuuuugucuucagcaccagcuuuuaucucauuagcaucuuccuccaccugguuaaaaucccaacccacagacaugucguaggaaaacccugcccuaaaccacacagacucaaccacaugggcauauguucauguggucuauacaaacauccuggugugccagucaaguggaaaagauagggacuagucccuguucccagagcccacuuuuuuuucuuuuuuugaaauaaaauagccugucuuucagaucuaaaaaaaaaaaaaaaaaaaaaaaaaaaaaaaaaaaaaaaaaaaaaaaaaaaaaaaaaaaaaaaaugcaucccccccccccccccccccccccccccccccaaaggcucuuuucagagccaccagaauu

SEQ ID NO: 6117 - RNA, 1749 nt, Artificial Sequence
  mRNA product Design a-1 comprising derived and/or modified sequence from LASV(Lassa virus/H.sapiens-wt/NGA/2015/ISTH_0543;Clade II)__AVO03639__GPCstabilized (wt)
gggagagucccgcagucggcguccagcggcucugcuuguucgugugugugucguugcaggccuuauucaagcuuaccaugggacaaaucauaacauuuuuccaggaagugccucaugucauagaggaaguaaugaacauuguccugauugcucucagccuucuggcaauauugaaggggaucuacaauguagccaccuguggccuuuuuggacugguguccuuucuccucuuauguggaagaucaugcucaacaacuuauaagggugucuacgagcuacaaacucuagagcuggacauggcaaaccuuaauaugacaaugccccuaucuugcacaaagaacaacagucaccauuacaucauggucggaaaugaaacuggcuuggagcugacuuuaacaaauacaaguauuaucaaccacaaguuuugcaaccuuucugaugcacauaaaaagaaucucuaugaccaugcuuuaaugaguaucaucucaaccuuccacuuaucuauuccuaauuuuaaucaguaugaagcaaugaguugugacuucaauggagggaagauaaguguucaguacaaccuuagccacacuuaugcuguagaugcagccaaucacugugggacuaucgccaauggcguucuucagacuuuuaugaggauggcuugggguggcaguuacauagcacuugauucuggaugcgggaguugggauuguauaaugacuuccuaccaauaucugguaauccagaacaccacuugggaagaucacugccaauuuucucgcccauccccuaucgguuaucuggggcuacugucacaaaggaccagagacauuuacaucagucgaagacgccgggggacuuucacuuggacucucucugauucugaagguaaugaaacaccggguggguacugucuaacaagauggaugcugauugaggccgaguugaagugcuuugggaacacagcaguugcgaaaugcaaugagaaacaugaugaagaguuuugugacauguuaagacuguucgauuuuaacaaacaagcuauaaggaggcugaagacacccgcacagaugaguauccaacuaauaaacaaagcagugaaugcauugaucaaugaccagcuuauuaugaagaaucacuuaagagauaucaugugcauuccuuacugcaauuacagcaaguacugguaucuaaaucacacugugacagggaagacaucguugccaaggugcuggcuuguaucaaaugguuccuaccugaaugagacacauuuuucugaugauauugaacaacaggcagacaacaugauaacagaacuguugcaaaaggaauacauagacaggcaagggaaaacacccuuaggguuaguagaucuuuuugucuucagcaccagcuuuuaucucauuagcauuuuccuccaccuggucaaaaucccaacucacagacauaucacagggaaacccugcccuaaaccacacagacuuaaccacaugggcauaugcucauguggucuauacaaacauccugguguaccagucaaguggaaaagauagggacuagucccuguucccagagcccacuuuuuuuucuuuuuuugaaauaaaauagccugucuuucagaucuaaaaaaaaaaaaaaaaaaaaaaaaaaaaaaaaaaaaaaaaaaaaaaaaaaaaaaaaaaaaaaaaugcaucccccccccccccccccccccccccccccccaaaggcucuuuucagagccaccagaauu

SEQ ID NO: 6118 - RNA, 1749 nt, Artificial Sequence
  mRNA product Design a-1 comprising derived and/or modified sequence from LASV(Lassa virus/H.sapiens-wt/NGA/2016/ISTH_0009;Clade II)__AVO03571__GPCstabilized (wt)
gggagagucccgcagucggcguccagcggcucugcuuguucgugugugugucguugcaggccuuauucaagcuuaccaugggacaaaucauaacauuuuuccaggaaguaccucaugucauagaggaagugaugaacauuguccugauugcucucagccuucuggcaauacugaaggggaucuacaauguugccaccuguggccuccuuggacugguguccuuucuccucuuauguggaaggucaugcucaacaacuuauaaggguguuuaugagcuacaaacucuagagcuggacauggcaagccuuaauaugacaaugccccugucuugcacaaagaacaacagucaccauuacaucauggucggaaaugagacuggcuuggagcugacuuuaacaaauacaaguauuaucaaccacaaguuuuguaaccuuucugaugcacauaaaaagaaucucuaugaccaugcucuaaugaguaucaucucaaccuuccacuuaucuauuccuaauuuuaaccaguaugaagcaaugaguugugacuucaauggggggaggauaaguguucaguacaaccuuagccacucuuaugcuguagaugcagccaaucacugugggacuaucgccaauggcguucuucagacuuucaugaggauggcuugggguggcaguuacauagcacuugauuccggaugcgggaguugggauuguauaaugacuuccuaccaauacuugauaauccagaacaccacuugggaagaucacugccaguuuucucgcccauccccuaucgguuauuuggggcuacugucacagaggaccagagacauuuacaucagucgaagacgccgggggacuuuuacuuggacucucucugauucugaagguaaugaaacaccggguggguacugucuaacaagauggaugcugauugaggccgaguugaagugcuuugggaacacagcaguugcgaaaugcaaugagaaacaugaugaagaguucugugacauguuaagacuguuugauuuuaauaaacaagccauaaggaggcugaagacacccgcacagaugaguauccaacugauaaacaaagcagugaaugcauugaucaaugaccagcuuauuaugaagaaccacuugagagauaucaugugcauuccuuacugcaauuacagcaaguacugguaucuaaaucacacuguaacagggaagacaucguugccaaggugcuggcuugugucaaaugguuccuaccugaaugagacacauuuuuccgaugacauugaacaacaggcagacaacaugauaacagaauuguugcagaaggaguacauagacaggcaagggaaaacacccuugggguuaguagaucuuuuugucuucagcaccagcuuuuaucucauuagcaucuuccuccaccuggucaaaauuccaacccacagacauaucacagggaaacccugccccaaaccacacagacuuaaccacaugggcauaugcucauguggucuauacaaccauccuggugugccagucaaguggaaaagauagggacuagucccuguucccagagcccacuuuuuuuucuuuuuuugaaauaaaauagccugucuuucagaucuaaaaaaaaaaaaaaaaaaaaaaaaaaaaaaaaaaaaaaaaaaaaaaaaaaaaaaaaaaaaaaaaugcaucccccccccccccccccccccccccccccccaaaggcucuuuucagagccaccagaauu

SEQ ID NO: 6119 - RNA, 1749 nt, Artificial Sequence
  mRNA product Design a-1 comprising derived and/or modified sequence from LASV(Lassa virus/H.sapiens-wt/NGA/2016/ISTH_0017;Clade II)__AVO03567__GPCstabilized (wt)
gggagagucccgcagucggcguccagcggcucugcuuguucgugugugugucguugcaggccuuauucaagcuuaccaugggacaaaucauaacauuuuuccaggaaguaccucaugucauagaggaagugaugaacauuguccugauugcucucagccuucuggcaauacugaaagggaucuacaauguugcuaccuguggccucuuuggguugguguccuuccuccucuuaugugggagaucaugcucaacaacuuacaaggguguuuaugagcuacaaacucuagagcuagacauggcaagccuuaauaugacaaugcccuuaucuugcacgaagaacaauucccaccauuacaucauggucggaaaugagacuggcuuggagcugacuuuaacaaauacaagcauuaucaaccacaaguuuuguaaccuuucugaugcacauaaaaagaaucuuuaugaccaugccuuaaugagcaucauuucaaccuuccacuuauccauuccuaacuuuaaucaguaugaagcaaugaguugugacuucaaugggggaaaaauaaguguucaguacaaccuuagccauacuuaugcuauagaugcagcuaaccacugugggaccauugccaauggcguucuucagacuuuuaugaggauggcuugggguggcaguuacauagcacuugauuccggaugcggcagcugggacugcauuaugacuuccuaccaauauuugauaauccagaacaccacuugggaagaucacugccaguuuucucgcccaucccccaucgguuaucuggggcuacugucacaaaggaccagagacauuuacaucagucgaagacgccgggggacuuuuacauggacccucucugacucugaagguaaugaaacaccagguggguacugucuaacgagauggaugcugauugaggccgaguugaagugcuuugggaacacagcaguugcaaaaugcaaugagaaacaugaugaagaguuuugugauauguuaagauuauuugacuuuaacaaacaagcuauaaggaggcugaagacacccgcgcagaugaguauccaacugauaaacaaagcagugaacgcacugaucaaugaccagcugauuaugaagaaucauuuaagagauaucaugugcauuccuuacugcaauuacagcaaguauugguaucuaaaucacacuguaacagggaagacaucauuaccaagaugcuggcuugugucgaaugguuccuaccugaaugagacacauuuuucugaugacauugaacaacaagcagauaacaugauaacagaacuuuugcaaaaggaauauauggauaggcaagggaaaacacccuuaggguuaguagaucuuuuugucuucagcaccagcuuuuaucucauuagcaucuuccuccaccuggucagaaucccaacucacagacaugucauagggaaacccugcccuaaaccacacagacucaaccacaugggcauaugcucauguggucuguacaaacauccuggugugccagucaaauggaaaagauagggacuagucccuguucccagagcccacuuuuuuuucuuuuuuugaaauaaaauagccugucuuucagaucuaaaaaaaaaaaaaaaaaaaaaaaaaaaaaaaaaaaaaaaaaaaaaaaaaaaaaaaaaaaaaaaaugcaucccccccccccccccccccccccccccccccaaaggcucuuuucagagccaccagaauu

SEQ ID NO: 6120 - RNA, 1749 nt, Artificial Sequence
  mRNA product Design a-1 comprising derived and/or modified sequence from LASV(Lassa virus/H.sapiens-wt/NGA/2018/ISTH_0959;Clade II)__AVV65099__GPCstabilized (wt)
gggagagucccgcagucggcguccagcggcucugcuuguucgugugugugucguugcaggccuuauucaagcuuaccaugggacaaaucauaacauuuuuccaggaaguaccucaugucauagaggaagugaugaacauuguccugauugcucucagccuuuuggcaauacugaaggggaucuacaauguuguuaccuguggccucuuuggauugguguccuuccuccucuuauguggaagaucauguucaacaacuuacaaggguguuuaugagcuacaaacucuggagcuggacauggcaagccuuaauaugacaaugcccuuaucuugcacgaagaacaacagccaccauuacaucauggucggaaaugagacuggcuuggagcugacuuuaacaaauacaaguaucaucaaccauaaauuuuguaaccucucugaugcacauaaaaagaaucuuuaugaucaugcuuuaaugaguaucauuucaaccuuccacuuauccauuccaaacuuuaaucaguaugaagcaaugagcugugacuucaaugggggaaagauaaguguucaguacaaccuuagccacgccuaugcuauagaugcagccaaccacugcgggacuauugccaauggcguucuucaaacuuuuaugaggauggcuugggguggcagcuauauagcacuugauuccggaugcgggaguugggacuguauaaugacuuccuaccaguauuugauaauccaaaacaccacuugggaagaucauugucaguuuucucgcccauccccuaucgguuaccuagggcuacugucacaaaggaccagggacauuuacaucagucgaagacgccgggggacuuuuacuuggacucucucugauucugaagguaaugaaacaccggguggguauugucuaacaagauggaugcugauugaggccgaguugaaaugcuuugggaacacagcaguugcgaaaugcaaugagaaacaugaugaagaguuuugugacauguuaagauuguuugacuuuaacaaacaagcuauaaggaggcuaaagacacccgcacagaugaguauccagcugauaaacaaagcagugaacgcacugaucaaugaccagcugauuaugaaaaaucauuugagagauaucaugugcauuccuuacugcaauuacagcaaguacugguaucuaaaucauacuguaacagggaagacaucguugccaaggugcuggcuugugucaaaugguuccuaccugaaugagacacauuuuucugaugacauugaacaacaagcagacaauaugauaacagaacugcugcaaaaggaguacauagacaggcaagggaaaacaccuuuaggguuaguagaucuuuuugucuucagcaccagcuuuuaucucauuagcaucuuccuccaccugguuaaaaucccaacccacagacaugucauaggaaaacccugcccuaaaccacacagacuuaaucacaugggcauauguucauguggucuauacaaacauccuggugugccagucaaguggaaaagauagggacuagucccuguucccagagcccacuuuuuuuucuuuuuuugaaauaaaauagccugucuuucagaucuaaaaaaaaaaaaaaaaaaaaaaaaaaaaaaaaaaaaaaaaaaaaaaaaaaaaaaaaaaaaaaaaugcaucccccccccccccccccccccccccccccccaaaggcucuuuucagagccaccagaauu

SEQ ID NO: 6121 - RNA, 1749 nt, Artificial Sequence
  mRNA product Design a-1 comprising derived and/or modified sequence from LASV(LASV003-NIG-2008;Clade II)__AIT17580__GPCstabilized (wt)
gggagagucccgcagucggcguccagcggcucugcuuguucgugugugugucguugcaggccuuauucaagcuuaccauggggcaaaucauaacauuuuuccaggaagugccucaugucauagaagaagugaugaacauuguccugauugcccucagccuuuuggcaauauugaaagggaucuacaauguugcuacuuguggccucuuuggacugguguccuuucuucucuuauguggaagaucaugcucaacaacuuacaaagguguuuaugagcuacaaacucuagagcuagacauggcaagccuuaauaugacaaugcccuuaucuugcacaaagaauaauagccaccauuacaucauggucggaaaugaaacuggcuuagagcugacuuuaacaaauacaaguaucaucaaccacaaguuuuguaaccuuucugaugcacauaaaaagaaucuuuaugaccaugcuuuaaugagcaucaucucaaccuuccacuuauccauuccuaacuuuaaucaauaugaagcaaugaguugugacuucaauggggggaagauaaguguucaguacaaccuuagccacacuuaugcuguagaugcagcuaaccacugugggacuauugccaauggcguucuucagacuuucaugaggauggcuugggguggcagcuacauagcacuugauuccggaugcgggaguugggauuguauaaugacuuccuaccaauaucugauaauccagaacaccacuugggaagaucauugccaguuuucucgcccaucccccaucgguuaucuggggcuacugucacaaaggaccagggacauuuacaucagucgaagacgccgggggacuuuuacuuggacccucucugauucugaaagcaaugaaacuccagguggguauugucuaacaagguggauguugauugaggccgagcugaagugcuuugggaacacagcaguugcgaaaugcaaugaaaaacaugaugaagaguuuugugacaugcuaagauuguuugacuuuaacaaacaagcuauaaggaggcugaaagcacccgcacagaugagcauccaacuaauaaacaaagcagugaaugcacugaucaaugaccagcugauaaugaagaaucauuuaagagauaucaugugcauuccuuacugcaauuacagcaaauauugguacuugaaucacacuguaacagggaggacaucguuaccaagaugcuggcuugugucaaaugguuccuaccugaaugagacacauuuuucugacgacauugaacaacaagcagacaauaugauaacagaacuguugcagaaggaguacauggacaggcaagggaaaacaccuuuaggguuaguagaucuuuuugucuucagcaccagcuuuuaucucaucagcaucuuccuccaccugguuaaaaucccaacccacagacaugucauagggaaacccugcccuaaaccacacagacucaaccacaugggcauaugcucauguggucuguacaaacauccuggugugccagucaaguggaaaagauagggacuagucccuguucccagagcccacuuuuuuuucuuuuuuugaaauaaaauagccugucuuucagaucuaaaaaaaaaaaaaaaaaaaaaaaaaaaaaaaaaaaaaaaaaaaaaaaaaaaaaaaaaaaaaaaaugcaucccccccccccccccccccccccccccccccaaaggcucuuuucagagccaccagaauu

SEQ ID NO: 6122 - RNA, 1749 nt, Artificial Sequence
  mRNA product Design a-1 comprising derived and/or modified sequence from LASV(LASV035-NIG-2009;Clade II)__AIT17588__GPCstabilized (wt)
gggagagucccgcagucggcguccagcggcucugcuuguucgugugugugucguugcaggccuuauucaagcuuaccauggggcaaaucauaacauuuuuccaggaagugccucaugucauugaggaggugaugaacauugucuuaauugcucucagucuucuagcaauacugaaagggauuuacaauguugcuaccuguggccucuuuggguugguguccuuucuucucuuauguggaaggucaugcucaacaacuuacaaggguguuuaugagcuucaaacucuagagcuggauauggcaagccuuaauaugacaaugcccuuauccugcacgaagaacaacagccaccacuacaucaugguuggaaaugagacuggcuuggagcugacuuugacaaacacaaguaucaucaaccacaaguucugcaaccuuuccgaugcacauaaaaagaaucucuaugaccaugcuuuaaugagcaucaucucaacuuuccaccuauccaucccuaacuuuaaucaguaugaagcaaugaguugugacuucaauggggggaagauaaguguucaguacaaccucagccacgcuuaugcuguagaugcagcuaaccauugugggaccauugccaauggaguucuucaaacuuuuaugaggauggcuugggguggcaguuacauagcacuugauucuggaugcgggaguugggauuguauaaugacuuccuaccaauauuugauaauccaaaacaccacuugggaagaucacugccaguuuucucgcccauccccuauugguuaucuggggcuacugucacaaagaaccagggauauuuacaucagccgaagacgccggggaacuuuuacuuggacucucucugauucugaaggcaaugaaacaccggguggauauuguuuaacaagauggaugcugauugaggccgaauuaaagugcuuugggaacacagcaguugcgaaaugcaaugagaaacaugaugaagaguuuugugacauguuaagguuguuugacuuuaacaaacaggcuauaaggaggcuaaaggcacccgcacagaugagcauccaacuaauaaacaaagcagugaacgcacugaucaaugaccagcucauuaugaagaaucauuuaagagauaucaugugcauuccuuacugcaauuacagcaaguauugguauuuaaaucacacuguaacagggaagacaucguugccaagaugcuggcuuguaucaaaugguuccuaccugaaugaaacacauuuuucugaugacauugaacaacaagcagauaacaugauaacagaauuguuacagaaagaguacauugacaggcaagggaaaacacccuuaggguugguggaucuuuuugucuucagcacuagcuucuaccuuauuagcaucuuccuccaccugguuaaaaucccaacccacagacaugucauagggaagcccugccccaagccacacagacucaaccacaugggcauaugcucauguggucuguacaaacauccugguguaccagucaaguggaaaagauagggacuagucccuguucccagagcccacuuuuuuuucuuuuuuugaaauaaaauagccugucuuucagaucuaaaaaaaaaaaaaaaaaaaaaaaaaaaaaaaaaaaaaaaaaaaaaaaaaaaaaaaaaaaaaaaaugcaucccccccccccccccccccccccccccccccaaaggcucuuuucagagccaccagaauu

SEQ ID NO: 6123 - RNA, 1749 nt, Artificial Sequence
  mRNA product Design a-1 comprising derived and/or modified sequence from LASV(LASV1000-NIG-2009;Clade II)__AIT17782__GPCstabilized (wt)
gggagagucccgcagucggcguccagcggcucugcuuguucgugugugugucguugcaggccuuauucaagcuuaccaugggacaaaucauaacauuuuuccaggaaguuccucaugucauagaggaagugaugaacauuguccugauugcucucagccuccuggcaauacuaaaagggaucuacaauguugcuaccuguggccucuuuggauugguguccuuccuccucuuauguggaagaucaugcucaacaacuuacaaggguguuuaugagcugcaaacucuagagcuagacauggcaagccuuaauaugacaaugccucuaucuugcacgaagaauaacagccaccauuacaucauggucggaaaugagacuggcuuggagcugacuuuaacaaacacaaguauuaucaaucacaaguuuuguaaccuuucugaugcacacaaaaagaaucuuuaugaccaugcuuuaaugagcaucaucucaaccuuccauuuaucuauucccaacuucaaucaguaugaagcaaugaguugugacuucaaugggggaaagauaaguguucaguacaaccuuagccacacuuaugcuguagaugcagccaaccacugugggacuaucgccaauggcguccuucagaccuuuaugaggauggcuugggguggcaguuacauagcacuugauuccggaugcgggaguugggacuguauaaugacuuccuaucaauaucugauaauccaaaacaccacuugggaagaucacugccaguuuucucgcccaucuccuaucgguuaucuggggcuacugucacaaaggaccagagacauuuacaucagucgaagacgccgggggacuuucacuuggacucucucugauucugaagguaaugaaacaccggguggguacugucuaacaagguggaugcugauugaggccgaguugaagugcuuugggaacacagcaguugcgaaaugcaaugagaaacaugaugaagaguuuugugacauguuaagauuguuugacuuuaacaaacaagcuauaaagaggcugaagacacccgcacagaugaguauucaacugauaaacaaagcagugaacgcacugaucaaugaccagcugauuaugaagaaucauuugagagacaucaugugcauuccuuacuguaauuacagcaaguauugguaucuaaaucacaccguaacagggaagacaucguugccaaggugcuggcuugugucaaaugguuccuaccugaaugagacacacuuuucugaugacauugaacaacaagcagauaacaugauaacagaacuauugcaaaaggaguacauagacaggcaagggaaaacacccuuaggguuaguagaccuuuuugucuuuagcaccagcuuuuaucucauuagcaucuuccuccaccuggucaaaaucccaacccauagacaugucguagggaaacccugcccuaaaccacacagacucaaccacaugggcauaugcucauguggucuauacaaacauccugguguaccagucaaauggaaaagauagggacuagucccuguucccagagcccacuuuuuuuucuuuuuuugaaauaaaauagccugucuuucagaucuaaaaaaaaaaaaaaaaaaaaaaaaaaaaaaaaaaaaaaaaaaaaaaaaaaaaaaaaaaaaaaaaugcaucccccccccccccccccccccccccccccccaaaggcucuuuucagagccaccagaauu

SEQ ID NO: 6124 - RNA, 1749 nt, Artificial Sequence
  mRNA product Design a-1 comprising derived and/or modified sequence from LASV(LASV221-NIG-2010;Clade II)__AIT17624__GPCstabilized (wt)
gggagagucccgcagucggcguccagcggcucugcuuguucgugugugugucguugcaggccuuauucaagcuuaccaugggacaaaucauaacauuuuuccaggaaguaccucaugucauagaggaagugaugaacauuguccugauugcucucagccuucuggcaauacugaaagggaucuacaauguugcuaccuguggccucuuuggauugguguccuuccuccucuuauguggaagaucaugcucaacaacuuacaaggguguuuaugagcuacaaacucuagagcuagacauggcaagccuuaauaugacaaugcccuuaucuugcacgaagaacaacucccaccauuacaucauggucggaaaugagacuggcuuggagcugacuuugacaaauacaagcauuaucaaccacaaguuuuguaaccuuucugaugcgcauaaaaagaaucuuuaugaccaugcuuuaaugaguaucaucucaaccuuccacuuguccauuccuaacuuuaaucaguaugaagcaaugaguugugauuucaaugggggaaagauaaguguucaguacaaccuuagccacacuuaugcuauagaugcagccaaccacugugggaccauugccaauggcguucuucagacuuucaugagaauggcuugggguggcaguuacauagcacuugauuccggaugcgggagcugggauugcauaaugacuuccuaccaauauuugauaauccaaaacaccacaugggaagaucacugccaguuuucucgcccaucccccaucgguuaucuggggcuacuaucacaaagaaccagggacauuuacauuagucgaagacgccgggggacuuucacuuggacucucucugacucugaagguaaugaaacaccggguggguauugucuaacaagauggaugcugauugaggccgaguugaagugcuuuggaaacacagcaguugcaaaaugcaaugaaaaacaugaugaagaguuuugugauauguugagauuguuugacuucaacaaacaagcuauaaggaggcuaaagacacccgcacagaugaguauccaacugauaaacaaagcggugaacgcacugaucaaugaccagcugaucaugaagaaucauuugagagauaucaugugcauuccuuacugcaauuacagcaaguauugguaucuaaaucacacuguaacagggaagacaucguugccaagaugcuggcuugugucgaaugguucuuaccugaaugagacacauuuuucugaugacauugaacaacaagcagacaacaugauaacagaaauguugcaaaaggaguacauggacaggcaagggaaaacacccuuaggguuaguagaucuuuuugucuucagcaccagcuuuuaucucauuagcaucuuccuccaccuaguuaaaauuccaacccacagacaugucauagggaaacccugcccuaaaccacacagacucaaccacaugggcauauguucauguggucuguauaagcauccuggcgugccagucaaguggaaaagauagggacuagucccuguucccagagcccacuuuuuuuucuuuuuuugaaauaaaauagccugucuuucagaucuaaaaaaaaaaaaaaaaaaaaaaaaaaaaaaaaaaaaaaaaaaaaaaaaaaaaaaaaaaaaaaaaugcaucccccccccccccccccccccccccccccccaaaggcucuuuucagagccaccagaauu

SEQ ID NO: 6125 - RNA, 1749 nt, Artificial Sequence
  mRNA product Design a-1 comprising derived and/or modified sequence from LASV(LASV237-NIG-2010;Clade II)__AIT17638__GPCstabilized (wt)
gggagagucccgcagucggcguccagcggcucugcuuguucgugugugugucguugcaggccuuauucaagcuuaccaugggacaaaucauaacauuuuuccaggaaguaccucaugucauagaggaagugaugaacauuguccugauugcucucagccuucuggcaauacugaaggggaucuacaauguugccaccuguggccuauuuggacugguguccuuucuccucuuauguggaagaucaugcucaacaacuuauaaggguguuuaugagcuacaaacucuagagcuggauauggcaagccuuaauaugacaaugccccuaucuugcacaaagaacaacagucaccauuacaucauggucggaaaugagacuggcuuggagcugacuuuaacaaauacaaguauuaucaaccacaaguuuuguaaccuuucugaugcacauaaaaaggaucucuaugaccaugcuuuaaugaguaucaucucaaccuuccacuuaucuauuccuaauuuuaaucaguaugaagcaaugaguugugacuucaauggggggaagauaaguguucaguacaaccuuagccacacuuaugcuguagaugcagccaaucacugugggacuaucgccaauggcguucuucagacuuuuaugaggauggcuugggguggcaguuacauagcacuugauuccggaugcgggaguugggauuguauaaugacuuccuaccaauauuugauaauccagaacaccacuugggaagaucacugccaguuuucucgcccauccccuaucgguuaucuggggcuacugucacaaaggaccagagacauuuacaucagucgaagacgccgggggacuuuuacuuggacucucucugauucugaagguaaugaaacaccggguggguacugucuaacaagauggaugcugauugaggccgaguugaagugcuuugggaacacagcaguugcgaaaugcaaugagaaacaugaugaagaguuuugugacauguuaagacuguuugauuucaacaaacaagcuauaaggaggcuaaagacacccgcacagaugaguauccaacugauaaacaaagcagugaaugcauugaucaaugaccagcuuauuaugaagaaucacuugagagauaucaugugcauuccuuacugcaauuacagcaaguacugguaucugaaucacacuguaacagggaagacaucguugccgaggugcuggcuugugucaaaugguuccuaccugaaugagacacauuuuucugaugacauugaacaacaggcagacaacaugauaacagaacuguugcaaaaggaguacauggacaggcaagggaaaacacccuuaggguuaguagaccuuuuugucuucagcaccagcuuuuaucucauuagcaucuuccuccaccugaucaaaaucccaacccacagacauaucacagggaaacccugcccuaaaccacacagacuuaaccacaugggcauaugcucauguggucuauacaaacauccugguguaccagucaaguggaaaagauagggacuagucccuguucccagagcccacuuuuuuuucuuuuuuugaaauaaaauagccugucuuucagaucuaaaaaaaaaaaaaaaaaaaaaaaaaaaaaaaaaaaaaaaaaaaaaaaaaaaaaaaaaaaaaaaaugcaucccccccccccccccccccccccccccccccaaaggcucuuuucagagccaccagaauu

SEQ ID NO: 6126 - RNA, 1749 nt, Artificial Sequence
  mRNA product Design a-1 comprising derived and/or modified sequence from LASV(LASV253-NIG-2011;Clade II)__AIT17670__GPCstabilized (wt)
gggagagucccgcagucggcguccagcggcucugcuuguucgugugugugucguugcaggccuuauucaagcuuaccauggggcaaaucauaacauuuuuucaggaagugccucaugucauagaagaagugaugaacauuguccugauugcccucagccuucuggcaauauugaaagggaucuacaauguugcuacuuguggccucuuuggacugguguccuuucuucucuuauguggaagaucaugcucaacaacuuacaaagguguuuaugagcuacaaacucuagagcuagacauggcaagccuuaauaugacaaugcccuuaucuugcacaaagaauaauagccaccauuacaucauggucggaaaugaaacuggcuuagagcugacuuuaacaaauacaaguaucaucaaccacaaguuuuguaaccuuucugaugcacauaaaaagaaucuuuaugaccaugcuuuaaugagcaucaucucaaccuuccacuuauccauuccuaacuucaaucaauaugaagcaaugaguugugacuucaauggggggaagauaaguguucaguacaaccuuagccacacuuaugcuguagaugcagcuaaccacugugggacuauugccaauggcguucuucagacuuuuaugaggauggcuugggguggcagcuacauagcacuugauuccggaugcgggagcugggauuguauaaugacuuccuaccaauauuugauaauccagaacaccacuugggaggaucacugccaguuuucucgcccaucccccaucgguuaucuggggcuacugucacaaaggaccagggacauuuacaucagucgaagacgccggggaacuuuuacuuggacccucucugauucugaaggcaaugaaacuccagguggguauugucuaacaagguggauguugauugaggccgaguugaagugcuuugggaacacagcaguugcgaaaugcaaugagaaacaugaugaagaguuuugugacaugcuaagauuguuugacuuuaauaaacaagcuauaaggagacugaaagcacccgcacagaugaguauucaacuaauaaacaaagcagugaaugcacugaucaaugaccagcugauaaugaagaaucauuuaagagauaucaugugcauuccuuacugcaauuacagcaaguauugguaucugaaucacacuguaacaggaaggacaucguuaccaagaugcuggcuugugucaaaugguuccuaccugaaugagacacauuuuucugacgacauugaacaacaagcagacaacaugauaacagaacuguugcagaaggaguacauagacaggcaagggaaaacaccuuuaggguuaguggaucuuuuugucuucagcaccagcuuuuaucucaucagcaucuuccuccaccugguuaaaaucccaacccacagacauaucauagggaaacccugcccuaaaccacacagacucaaccacaugggcauaugcucauguggucuguacaaacauccuggugugccaguuaaguggaaaagauagggacuagucccuguucccagagcccacuuuuuuuucuuuuuuugaaauaaaauagccugucuuucagaucuaaaaaaaaaaaaaaaaaaaaaaaaaaaaaaaaaaaaaaaaaaaaaaaaaaaaaaaaaaaaaaaaugcaucccccccccccccccccccccccccccccccaaaggcucuuuucagagccaccagaauu

SEQ ID NO: 6127 - RNA, 1749 nt, Artificial Sequence
  mRNA product Design a-1 comprising derived and/or modified sequence from LASV(LASV254-NIG-2011;Clade II)__AIT17674__GPCstabilized (wt)
gggagagucccgcagucggcguccagcggcucugcuuguucgugugugugucguugcaggccuuauucaagcuuaccaugggacaaaucauaacauuuuuccaggaaguaccucaugucauagaggaagugaugaacauuguucugauugcucucagccuucuggcaauauugaaagggaucuacaauguugcuaccuguggccucuuuggauugguguccuuucuucucuuauguggaagaucaugcucaacaacuuacaaggguguuuaugagcuacaaacucuagagcuagacaugacaaaccucaauaugacaaugccuuuauccugcacgaaaaacaacagccaccauuacaucauggucggaaaugagacuggucuggagcugacuuuaacaaauacaagcaucaucaaccacaaguuuuguaaccuuucugaugcacauaaaaagaaucuuuauaaccaugcuuuaaugaguauuauuucaacuuuccacuuauccauuccuaacuuuaaucaguaugaagcaaugaguugugacuucaaugggggcaagauaaguguccaguacaaccuuagccauaguuaugcuguggaugcagcuaaccacugugggaccauugccaauggcgugcuucagacuuuuaugaggauggcuugggguggcaguuacauagcacuugauuccggaugcgggaauugggauuguauaaugaccuccuaccaauauuugauaauccaaaacaccacuugggaagaucacugucaguuuucucgcccauccccuauugguuaucugggguuacugucacaaaggaccagggacauuuacaucagucgaagacgccgggggacuuuuacuuggacucucucugauucugaagguaaugaaacaccagguggguauugucuaacaagauggaugcugauugaggccgaguugaagugcuuugggaacacagcaguugcgaaauguaaugagaaacaugaugaggaguuuugugacauguuaagauuguuugacuuuaacaaacaagcuauaaggaggcugaagacacccgcacaggcgaauauccaacugauaaauaaagcagugaacgcacugaucaaugaccagcugaucaugaagaaucauuugagagauaucaugugcauuccuuacugcaauuacagcaaguauugguacuuaaaucacacuguaacagggaagacaucguugccaagaugcuggcuugugucaaauggcuccuacuugaaugagacacauuuuucugaugacauugaacaacaagcagacaauaugauaacagaacuguugcagaaggaguacauggacaggcaagggaaaacacccuuaggguugguagaucuuuuugucuucagcaccagcuuuuaucucauuagcaucuuccuccaccugguuaaaaucccaacccacagacaugucauagggaaacccugcccuaaaccacacagacucaaccacaugggcauaugcucauguggucuguacaaacauccugguguaccagucaaguggaaaagauagggacuagucccuguucccagagcccacuuuuuuuucuuuuuuugaaauaaaauagccugucuuucagaucuaaaaaaaaaaaaaaaaaaaaaaaaaaaaaaaaaaaaaaaaaaaaaaaaaaaaaaaaaaaaaaaaugcaucccccccccccccccccccccccccccccccaaaggcucuuuucagagccaccagaauu

SEQ ID NO: 6128 - RNA, 1749 nt, Artificial Sequence
  mRNA product Design a-1 comprising derived and/or modified sequence from LASV(Nig08-A19;Clade III)__ADU56618__GPCstabilized (wt)
gggagagucccgcagucggcguccagcggcucugcuuguucgugugugugucguugcaggccuuauucaagcuuaccaugggacaaauugugacauucuuccaggaagucccucauguuaucgaggaagugaugaauaucguccucauagcauugucaauuuuggcaauccuaaaaggacucuacaacauugcuacauguggcuugauaggccuugucacauuccucuuacuuucuggaaggucauguucaaugaccuacaaaggaguuuaugaacuacagacccuugaacugaacaugaacacucugaauaugacuaugccgcuaucuuguacaaagaacaauagucaccacuacaucauggugggaaacgagacagggcuugagcucaccuuaaccaacacaagcuugcuccaucacaaauucugcaaccuaucagaugcucauaagaaaaaucuuuaugaucacacucucaugagcauuaucuccacauuccauuuguccauuccuaacuuuaaucaguaugaggcaaugaguugugauuuuaaugguggcaagaucacugugcaauacaaucugagucauagcuaugcaauugaugcagcaaaccauuguggcacaguggcaaacgguguguugcaaacauuuaugaggauggcuuggggagguaguuacauugcccuugauuccggaugcgggaaaugggauuguauaaugaccaguuaucaauacuuaaucauccagaacacaaccugggaagaucauugucaauuuuccagaccauccccaauuggauaucuugggcuccucucacagagaacuagagacauauacauuaguagaagacgccggggaacauuuacuuggacacuuucugacucagaaggaaaugagacaccaggagguuacugucucacuagauggauguugauugaggcugaacuaaaguguuucgggaauacagcuguagcuaagugcaaugaaaaacacgaugaagaguuuugugacaugcuaaggcuauuugacuucaauaagcaagcuauaaggagguuaaaggcacccgcccaaaugagcauacagcugaucaacaaagcaguuaaugcucuaauaaacgaucagcugaucaugaagaaucaucuaagggacaucaugugcauaccauacugcaauuacagcaaguacugguaucucaaucacaccucaacagggaggaccucauuaccgagauguuggcuuguuucaaaugggucauaucucaaugaaacucacuuuucagaugacauugagcagcaagcugauaacaugauaacugaaauguugcaaaaagaauaccuggacagacaaggaaagaccccauugggauugguagaucuuuuugucuucaguacaaguuuuuacuuaaucaguauuuuccuccaucuggucaaaauaccaacccauagacacauuguagggaagccuugccccaaaccucauagguugaaccacaugggcaucugcucuuguggucuauauaaacagccaggaguacccguuagauggaagagauaaggacuagucccuguucccagagcccacuuuuuuuucuuuuuuugaaauaaaauagccugucuuucagaucuaaaaaaaaaaaaaaaaaaaaaaaaaaaaaaaaaaaaaaaaaaaaaaaaaaaaaaaaaaaaaaaaugcaucccccccccccccccccccccccccccccccaaaggcucuuuucagagccaccagaauu

SEQ ID NO: 6129 - RNA, 1752 nt, Artificial Sequence
  mRNA product Design a-1 comprising derived and/or modified sequence from LASV(G1180-SLE-2010;Clade IV)__AIT17168__GPCstabilized (wt)
gggagagucccgcagucggcguccagcggcucugcuuguucgugugugugucguugcaggccuuauucaagcuuaccaugggacagauagugacauucuuccaggaagugccucauguaauagaagaggugaugaacauuguucucauugcacugucuauacuagcagugcugaaaggucuguacaauuuugcaacauguggccucguuggucuacucacuuuccuccuguuguguggcagaucuugcacagcuagucguuacaaagggguuuaugagcuucagacucuggaacuaaacauggagacacucaauaugaccaugccucucuccugcacaaagaacaacagucaucauuauauaaugguggguaaugagacaggacuagaacugacuuugacuaacacgagcaucauuaaucauaaauuuugcaaucugucugaugcccacaaaaagaaccuuuaugaccacgcucuuaugagcauaauuucaacuuuccacuuauccauccccaacuucaaucaguaugaggcaaugagcugcgauuuuaaugggggaaagauuagugugcaguacaaccugagucacagcuaugcuggggaugcagccaaucauugugguacuguugcaaauggugucuugcagaccuucaugaggauggcuuggggugggagcuacauugcucuugacucaggcugcggcaguugggacuguauuaugacuaguuaucaauaucugauaauccaaaauacaaccugggaagaucacugccaguucucaagaccaucucccauugguuaucucgggcuccuuucacaaagaaccagagauauuuacauuaguagaagacgccggggcacauucacauggacacugucagauucugaaggcaaggacacaccagggggauauugucugaccagauggaugcuaauugaagcugaacuaaaaugcuucgggaacacagcuguggcaaaauguaaugagaagcaugaugaggaauuuugugacaugcugaggcuguuugacuucaacaaacaagccauucaaagguugaaagcucccgcacaaaugagcauucaauugaucaacaaggcaguaaaugcuuugauaaaugaccaacuuauaaugaagaaccauuuacgagacaucaugugcaucccauacuguaauuacagcaaguauugguaccucaaccacacaaccacugggaaaacaucacugccuaaguguuggcuuguaucaaaugguucauacuuaaaugagacccacuuuucugaugauauugagcaacaagcugacaacaugaucacugagauguuacagaaggaguauauggaaaggcagggcaagacaccauugggccuaguugaccucuuuguguuuagcacaaguuucuaucucauuagcaucuuccuucaccuggucaaaauaccaacucauaggcauauuguaggcaagucgugucccaaaccucauagauugaaucacaugggcauauguuccuguggacucuacaaacagcccggugugccugugaaauggaagagaugaggacuagucccuguucccagagcccacuuuuuuuucuuuuuuugaaauaaaauagccugucuuucagaucuaaaaaaaaaaaaaaaaaaaaaaaaaaaaaaaaaaaaaaaaaaaaaaaaaaaaaaaaaaaaaaaaugcaucccccccccccccccccccccccccccccccaaaggcucuuuucagagccaccagaauu

SEQ ID NO: 6130 - RNA, 1752 nt, Artificial Sequence
  mRNA product Design a-1 comprising derived and/or modified sequence from LASV(G1442-SLE-2011;Clade IV)__AIT17180__GPCstabilized (wt)
gggagagucccgcagucggcguccagcggcucugcuuguucgugugugugucguugcaggccuuauucaagcuuaccaugggacaaauagugacauucuuucaggaagugccucaugugauagaggagguaaugaacauugugcucauugcacuauccauacuggcagugcugaagggucuauacaauguugcaacaugcggccugauugguuuagucaccuuccuauuguuaugugguaggucuugcacaacaacucuuuacaaaggaguuuacgaacuucagacucuggaauuaaacauggagacacucaauaugacuaugccucucucuuguacaaagaacaacagucaccacuauauaaggguggguaaugagacaggacuagaguugacccugaccaacacaagcaucaucaaucacaaguuuugcaaucuaucugaugcucacaaaaagaaccucuaugaucaugcuuugaugagcauaaucucgacuuuucacuuguccauucccaacuucaaccaauaugaggcaaugagcugugacuucaauggagggaagauuagugugcaguauaaccugagucacagcuaugcuggagaugcagccaaccauugugguacaguugcaaaugguguuuuacaaaccuucaugaggauggcuuggggugggaguuacaucgcccuugacucagguugcggcaauugggacuguauuaugacuaguuaucaauaccuaauaauucagaauacgaccugggaugaucauugccaauucucaagaccaucccccaucgguuaucuugggcuccucucacaaaggaccagagauguuuauaucaguagaagacgccggggcacauucacauggacacugucagauucugaaggcaaggacacaccaggaggguacugucugaccagguggaugcuaauugaagcugaacugaaaugcuuuggcaacacagcuguagcaaaauguaaugagaaacaugaugaagaauucugugacaugcuaaggcuguuugacuucaauaaacaagcuauucagagguugaaagcccccgcacaaaugaguauucaguugaucaacaaagcagugaaugcuuugauaaaugaccaacuaauaaugaaaaaccaucuacgggacaucaugugcauuccauacugcaauuacagcaaguacugguaucucaacaacacagccacugggaaaacaucacugcccaaauguuggcuuauaucaaauggcucauauuugaacgaaacucacuucucugaugacauugaacaggaagcugacaauaugaucacugagauguuacaaaaagaauacauggagaggcaggggaagacaccauuaggucugguugaccucuuuguguucagcacaaguuucuaucucauuagcaucuuccuucaccuagucaaaauaccaacucacaggcauauugugggcaaaucauguccuaaaccccauagguugaaucacauggguauuugcucuuguggacuuuauaaacaacccggugugccuguaagauggaagagaugaggacuagucccuguucccagagcccacuuuuuuuucuuuuuuugaaauaaaauagccugucuuucagaucuaaaaaaaaaaaaaaaaaaaaaaaaaaaaaaaaaaaaaaaaaaaaaaaaaaaaaaaaaaaaaaaaugcaucccccccccccccccccccccccccccccccaaaggcucuuuucagagccaccagaauu

SEQ ID NO: 6131 - RNA, 1752 nt, Artificial Sequence
  mRNA product Design a-1 comprising derived and/or modified sequence from LASV(G3010-SLE-2013;Clade IV)__AIT17344__GPCstabilized (wt)
gggagagucccgcagucggcguccagcggcucugcuuguucgugugugugucguugcaggccuuauucaagcuuaccaugggacagauaguaacauucuuccaggaagugccucaugugauagaagaggugaugaacauuguucucauugcacugucuauauuagcagugcugaaaggucuguacaauuuugcaacauguggccucguugguuugguuaccuuccuccuguuaugugguaggucuugcacaaccagucuuuacaaagggguuuaugagcuucagacucuggaacuaaacauggagacacucaauaugaccaugccucucuccuguacaaagaacaacagucaucauuauauuaugguggguaaugagacaggacuagaacugaccuugaccaacacgagcaucauuaaucauaaauuuugcaaucugucugaugcccacaaaaagaaccucuauaaucacgcucuuaugagcauaauuucaacuuuccaucuguccauucccaacuucaaucaguaugaggcaaugagcugcgauuucaaugggggaaagauuagugugcaguacaaccugagucacaguuaugcuggggaugcggccagccauuguggcacuguugcaaauggugucuuacagacuuucaugaggauggcuugggguggaagcuauauugcucuugacucaggcugcggcaagugggacugcauuaugacuaguuaucaguaccugauaauucaaaauacaaccugggaagaucacugccaauucucaagaccaucucccauuggcuaucucgggcuccucucacaaaggaccagagauauuuauauuaguagaagacgccggggcacauucacauggacacugucggauucugaagguaaggacacaccagggggauauuguuugaccagauggaugcuaauugaagcugaacuaaagugcuucgggaacacagcuguagcaaaauguaaugagaagcaugaugaggaauuuugugacaugcugaggcuguuugacuucaacaaacaagccauucaaagauugaaaacucccgcacaaaugagcauucaguugaucaacaaggcaguaaaugccuuaauaaaugaccagcuuauaaugaagaaccaucuacgagacauaaugugcauuccauacuguaacuacagcaaguauugguaccucaaccacacaaccacugggaaaacaucacugccuaaauguuggcuuguaucaaauggcucauacuugaaugagacccacuuuucugaugauauugaacaacaggcugacaacaugaucacugagauguuacagaaagaguacauggagaggcaggggaagacaccauugggccuggucgaccuuuuuguguucagcacaaguuucuaucucaucaguaucuuucuucaccuagucaaaauaccaacucauagacauauuguaggaaagucgugucccaaaccucacagauugaaucacaugggcauauguuccuguggacucuacaaacagcccggugugccugugagauggaagagaugaggacuagucccuguucccagagcccacuuuuuuuucuuuuuuugaaauaaaauagccugucuuucagaucuaaaaaaaaaaaaaaaaaaaaaaaaaaaaaaaaaaaaaaaaaaaaaaaaaaaaaaaaaaaaaaaaugcaucccccccccccccccccccccccccccccccaaaggcucuuuucagagccaccagaauu

SEQ ID NO: 6132 - RNA, 1752 nt, Artificial Sequence
  mRNA product Design a-1 comprising derived and/or modified sequence from LASV(G502-SLE-2009;Clade IV)__AIT17126__GPCstabilized (wt)
gggagagucccgcagucggcguccagcggcucugcuuguucgugugugugucguugcaggccuuauucaagcuuaccaugggacagauagugacauucuuccaggaaguaccucauguaauagaagaggugaugaacauuguucucauugcacugucuauacuagcagugcugaaaggucuguauaauuuugcaacauguggccucguuggucuacucaccuuccuccuauuguguggcaggucuugcacaaccggacuuuacaaagggguuuaugagcuucaaacucuggaacuaaacauggagacacucaauaugaccaugccucucuccugcacaaagaacaacagucaucauuauauaaugguggguaaugagacaggacuagaacugacuuugacuaacacgagcaucauuaaucauaaauuuugcaaucugucugaugcccacaaaaagaaccuuuaugaccacgcucuuaugagcauaauuucaacuuuccacuuguccauccccaacuucaaucaguaugaggcaaugagcugcgauuuuaaugggggaaagauuaguguacaguacaaccugagccacaguuaugcuggggaugcggcugaucauuguggcacuguugcaaauggugucuugcagacuuucaugaggauggccuggggugggagcuacauugcucuugacucagguugcggcaggugggacuguauuaugacuaguuaucaauauuugauaauccaaaauacaaccugggaagaucacugccaguucucaagaccaucucccaucgguuaucucgggcuccucucacaaagaacuagagacauuuacauuaguagaaggcgccggggcacauucacauggacacugucagauucugaaggcaaggacacaccaggaggauauugucugacuagauggaugcugauugaggcugaauuaaaaugcuucgggaacacagcuguagcaaaauguaaugagaagcaugaugaggaauuuugugacaugcugaggcuguuugacuucaacaaacaagccauucaaagguuaaaagcucccgcacagaugagcauucaauugaucaacaaggcaguaaaugcuuugauaaaugaccaacuuguaaugaagaaccacuuacgggacaucaugugcauuccauacuguaauuacagcagguauugguaucucaaccacacaaccacuggaagaacaucacugccuaaauguuggcuugugucaaauggcucauacuuaaacgagacccacuuuucugaugauauugagcaacaagcugacaacaugaucacugagauguuacagaaggaauauauggaaaggcagggaaagacaccauuaggucugguugaccucuuuguguucagcacaaguuucuaucuuauuagcaucuuccuucaccuggucaagauaccaacucauaggcauauugugggcaagucgugucccaaaccucauagauugaaucacaugggcauauguuccuguggacucuacaaacagcccgguguaccugugaaauggaagagaugaggacuagucccuguucccagagcccacuuuuuuuucuuuuuuugaaauaaaauagccugucuuucagaucuaaaaaaaaaaaaaaaaaaaaaaaaaaaaaaaaaaaaaaaaaaaaaaaaaaaaaaaaaaaaaaaaugcaucccccccccccccccccccccccccccccccaaaggcucuuuucagagccaccagaauu

SEQ ID NO: 6133 - RNA, 1752 nt, Artificial Sequence
  mRNA product Design a-1 comprising derived and/or modified sequence from LASV(G733-SLE-2010;Clade IV)__AIT17154__GPCstabilized (wt)
gggagagucccgcagucggcguccagcggcucugcuuguucgugugugugucguugcaggccuuauucaagcuuaccaugggacagauagugacauucuuccaggaagugccucauguaauagaagaggugaugaacauuguucucauugcacugucuauacuagcaguccugaagggucuguacaacuuugcaacauguggcaucguugguuuggucagcuuucuccuguuguguggcaggucuugcacaaccagucuuuacaaagggguuuaugagcuucagacucuggagcuaaacauggagacacuuaacaugaccaugccucucucuugcacaaagaacaacagucaucauuauauaauggugggcaaugagacgggauuggaacugaccuugaccaacacgagcauuaucaaucauaaauuuugcaaucuaucugaugcccauaagaagaaccucuaugaccacgcccuuaugaguauaaucucaaccuuccacuuguccauccccaacuucaaucaguaugaagcaaugagcugugauuucaaugggggaaagauuaguguacaguacaaccugagucacagcuaugcuggggaugcagccaaccauuguggcacaauugcaaauggugucuuacagacuuucaugaggauggccuggggugggagcuacauugcucuugacucaggcugcgacaggugggacugcauaaugaccaguuaucaauaucugauaauccaaaacacaaccugggaagaucacugccaauucucaagaccaucucccaucgguuaucuugggcuccucucacaaaggaccagagauauauauauuaguaggagacgccggggcacauuuacauggacauugucagauucugaagguaaggacacaccaggaggguauugucuaaccagauggaugcugauugaggcugagcugaaaugcuuugggaacacagcuguggcaaaaugcaaugagaaacaugaugaggaauuuugugauaugcuaaggcuguuugacuucaacaaacaagccauucaaagguuaaaagcucccgcacaaaugagcauucaguugaucaacaaagcagugaaugcuuugauaaacgaccaacuaauaaugaagaaccaucuacgggacaucaugugcauuccauacuguaauuacagcaaguacugguaccucaaccacacaacuacugggaaaacaucacugccuaaauguuggcuugugucgaaugguucauacuuaaacgagacucacuuuucugaugacauugaacaacaagcugacaauaugaucacugagauguuacagaaggaauacauggaaaggcaggggaagacaccauugggucuaguugaccucuuuguguucagcacaaguuucuaucucauuagcaucuuccuucauuuggucaaaauaccaacucauaggcauguuguaggcaagucgugucccaagccucacagauugaaucacaugggcauaugcuccugcggacucuauggacagccugguguaccugugaaauggaagagaugaggacuagucccuguucccagagcccacuuuuuuuucuuuuuuugaaauaaaauagccugucuuucagaucuaaaaaaaaaaaaaaaaaaaaaaaaaaaaaaaaaaaaaaaaaaaaaaaaaaaaaaaaaaaaaaaaugcaucccccccccccccccccccccccccccccccaaaggcucuuuucagagccaccagaauu

SEQ ID NO: 6134 - RNA, 1752 nt, Artificial Sequence
  mRNA product Design a-1 comprising derived and/or modified sequence from MOPV/LASV reassortant(IGS-1;Clade IV)__AFY05576__GPCstabilized (wt)
gggagagucccgcagucggcguccagcggcucugcuuguucgugugugugucguugcaggccuuauucaagcuuaccaugggacaaauagugacauucuuccaggaagugccucauguaauagaagaggugaugaacauuguucucauugcacugucuguacuagcagugcugaaaggucuguacaauuuugcaacguguggccuuguugguuuggucacuuuccuccuguugugugguaggucuugcacaaccagucuuuauaaagggguuuaugagcuucagacucuggaacuaaacauggagacacucaauaugaccaugccucucuccugcacaaagaacaacagucaucauuauauaauggugggcaaugagacaggacuagaacugaccuugaccaacacgagcauuauuaaucacaaauuuugcaaucugucugaugcccacaaaaagaaccucuaugaccacgcucuuaugagcauaaucucaacuuuccacuuguccauccccaacuucaaucaguaugaggcaaugagcugcgauuuuaaugggggaaagauuagugugcaguacaaccugagucacagcuaugcuggggaugcagccaaccauugugguacuguugcaaaugguguguuacagacuuuuaugaggauggcuuggggugggagcuacauugcucuugacucaggcugcggcaacugggacuguauuaugacuaguuaucaauaucugauaauccaaaauacaaccugggaagaucacugccaauucucgagaccaucucccaucgguuaucucgggcuccucucacaaaggacuagagauauuuauauuaguagaagacgccggggcacauucacauggacacugucagauucugaaggugaagacacaccagggggauauugucugaccagguggaugcuaauugaggcugaacuaaaaugcuucgggaacacagcuguggcaaaauguaaugagaagcaugaugaggaauuuugugacaugcugaggcuguuugacuucaacaaacaagccauucaaagguugaaagcucccgcacaaaugagcauucaguugaucaacaaagcaguaaaugcuuugauaaaugaccaacuuauaaugaagaaccaucuacgggacaucaugugcauuccauacuguaauuacagcaaguauugguaccucaaccacacaacuacugggagaacaucacugcccaaauguuggcuuguaucaaaugguucauacuugaacgagacccacuuuucugaugauauugaacaacaagcugacaauaugaucacugagauguuacagaaggaguauauggagaggcaggggaagacaccauugggucuaguugaccucuuuguguucagcacaaguuucuaucuuauuagcaucuuccuucaccuagucaaaauaccaacucauaggcauauuguaggcaagucgugucccaaaccucacagauugaaucauaugggcauuuguuccuguggacucuacaaacagccuggugugccugugaaauggaagagaugaggacuagucccuguucccagagcccacuuuuuuuucuuuuuuugaaauaaaauagccugucuuucagaucuaaaaaaaaaaaaaaaaaaaaaaaaaaaaaaaaaaaaaaaaaaaaaaaaaaaaaaaaaaaaaaaaugcaucccccccccccccccccccccccccccccccaaaggcucuuuucagagccaccagaauu

SEQ ID NO: 6135 - RNA, 1752 nt, Artificial Sequence
  mRNA product Design a-1 comprising derived and/or modified sequence from LASV(LM765-SLE-2012;Clade IV)__AIT17814__GPCstabilized (wt)
gggagagucccgcagucggcguccagcggcucugcuuguucgugugugugucguugcaggccuuauucaagcuuaccaugggacaaauagugacauucuuccaggaagugccccaugucauagaagaggugaugaacauuguucucauugcacuguccauacuagcagugcugaaaggucuguacaauuuugcaacauguggccucguuggcuuggucacuuuccuccuguuguguggcaggucuuguacaacuagccuuuacaaagggguuuaugagcuucagacucuggaacuaaacauggaaacacucaauaugaccaugccucucuccugcacaaagaacaauagucaucauuauauaauggugggcaaugagacaggacuagaacugaccuugaccaacacgagcauuauugaucauaaauuuugcaaucugucugaugcccacagaaagaaccucuaugaccacgcucuuaugagcauuaucucaacuuuccacuugucuaucccuaacuucaaucaguaugaggcaaugagcugcgauuucaaugggggaaagauuaguguacaguacaaccugagucacagcuaugccaaggacgcagccgaccauuguggaacuguugcaaaugguguauuacagacuuucaugaggauggcuuggggugggagcuacaucgcucuugacucaggcugcggcaggugggacuguauuaugacuaguuaucaauaucugauaauccaaaauacaaccugggaagaucacugccaauucucgagaccaucucccaucgguuaucucgggcuccucucacagaggaccagagauauuuauauuaguagaaggcgccggggcacauucacauggacacugucagauucugaaggcaaggacacaccagggggauauugucuaaccagauggaugcuaauugaggcugagcuaaagugcuucgggaauacagcuguggcaaaauguaaugagaagcaugaugaggaauuuugugacaugcugagguuguuugacuuuaacaagcaagccauucaaagguugaaagcucccgcacaaaugagcauucaguugaucaacaaagcaguaaaugcuuugauaaaugaccaacuuauaaugaagaaccaucuacgggacaucaugugcauuccauacuguaauuacagcaaguauugguaccucaaccacacaacuacuggaaaaacaucacugcccaaguguuggcuuguaucaaaugguucauaccugaacgagacccacuuuucugaugacauugaacaacaagcugacaacaugaucaccgagauguuacagaaggaguauauggagaggcaggggaagacaccauugggucugguugaccucuuuguguucagcacaagcuucuaucucauuagcaucuuccuucaccuaguuaaaauaccaacucauaggcauauuguaggcaagccgugucccaaaccucacagguugaaucauaugggcauuuguuccuguggacucuauaaacagccuggugugccuguaaaauggaagagaugaggacuagucccuguucccagagcccacuuuuuuuucuuuuuuugaaauaaaauagccugucuuucagaucuaaaaaaaaaaaaaaaaaaaaaaaaaaaaaaaaaaaaaaaaaaaaaaaaaaaaaaaaaaaaaaaaugcaucccccccccccccccccccccccccccccccaaaggcucuuuucagagccaccagaauu

SEQ ID NO: 6136 - RNA, 1752 nt, Artificial Sequence
  mRNA product Design a-1 comprising derived and/or modified sequence from LASV(LM776-SLE-2012;Clade IV)__AIT17824__GPCstabilized (wt)
gggagagucccgcagucggcguccagcggcucugcuuguucgugugugugucguugcaggccuuauucaagcuuaccaugggacagauagugacauucuuccaggaagugccucauguaauagaagaggugaugaacauuguccucauugcgcugucuauauuagcagugcugaaaggucuguacaacuuugcaacauguggccucguugguuugguuacuuuccuccuguuguguggcaggucuugcacaaccaguguuuauaaaggggucuaugagcuucagacucuggaguuaaacauggagacacucaauaugaccaugccucucuccugcacaaagaauaacagucaucauuauauaaugguagguaaugagacaggacuagaacugaccuugaccaacacaagcauuauuaaucauaaauuuugcaaucugucugaugcccacaaaaagaaccucuaugaccaugcccuuaugagcauaauuucaacuuuccacuuguccauccccaacuucaaucaguaugaagcaaugagcugugauuucaaugggggaaagauuagugugcaguacaaccugagucacagcuaugcuggggaugcugccaaccauuguggcacuguugcaaauggugucuuacagacuuucaugaggauggcuuggggugggagcuacauugcucuugacucaggcugcggcaagugggacuguauuaugacuaguuaucaauaucugauaauccaaaauacaaccugggaagaucacugccaauucucaagaccaucuccuaucgguuaucuugggcuucucucacaaaggaccagagauauuuauaucaguagaagacgccggggcacauucacauggacacugucagauucugaaggcaaggacacaccagggggauauugucugaccagauggaugcugauugaagcugaauuaaaaugcuucgggaacacagcuguagcaaaauguaaugagaagcaugaugaggaauuuugugacauguugaggcuguuugacuucaacaaacaagccauucaaagguugaaagcucccgcacaaaugagcauucaguugaucaacaaggcaguaaaugccuugauaaaugaucaacuuauaaugaagaaccaucuacgggacaucaugugcaucccauacuguaauuacagcaaauauugguaccucaaccacacaacuacugggaaaacaucacugccuaaauguuggcuugucucaaaugggucauacuugaacgagacccacuuuucugaugauauugaacaacaagcugacaacaugaucacugagauguuacagaaggaguauauggagaggcaggggaagacaccauugggccuaguugaccucuuuguguucagcacaaguuucuaucucaucagcaucuuccuucaccuagucaaaauaccaacucauaggcauauuguaggcaagucguguccuaaaccucacagauugaaucacaugggcauauguuccuguggacucuacaaacagcccggugugccugugagauggaaaagaugaggacuagucccuguucccagagcccacuuuuuuuucuuuuuuugaaauaaaauagccugucuuucagaucuaaaaaaaaaaaaaaaaaaaaaaaaaaaaaaaaaaaaaaaaaaaaaaaaaaaaaaaaaaaaaaaaugcaucccccccccccccccccccccccccccccccaaaggcucuuuucagagccaccagaauu

SEQ ID NO: 6137 - RNA, 1752 nt, Artificial Sequence
  mRNA product Design a-1 comprising derived and/or modified sequence from LASV(Mad39;Clade IV)__ANH09722__GPCstabilized (wt)
gggagagucccgcagucggcguccagcggcucugcuuguucgugugugugucguugcaggccuuauucaagcuuaccauggggcaaauugugacauucuuucaggaagugccucauguaauugaggaggugaugaacauuguacucauugcacuauccauacuggcagugcuaaagggucuguacaauguugcaacauguggccucauuggcuugguuaccuuccuccugcugugugguagaucuuguacaaccacucuuuauaaagggguuuaugagcuucaagcucuggaacuaaacauggaaacacucaacaugacuaugccucucucuugcacaaaaaacaacucucaucacuauauaagggugggcaaugaaacaggccuagaacugaccuugaccaacacaagccucauaaaucacaaguucugcaaucugucugaugcucacaaaaagaaccucuaugaucaugcucuuaugagcauaaucucaacuuuccauuuguccauccccaacuucaaucaguaugaagcaaugagcugugauuucaaugaugggaagaucaguguacaguacaaccuaagccacaccuacgcuggggauacagccaaccacugugguacuguugcgaacgguguuuuacagacuuucaugaggauggcuuggggugggaguuacauugcucuugauucaggcugcgguggaugggacugcauuaugaccagcuaucaauauuugauaauucagaacacaaccugggaagaucacugucaguucucaagaccaucucccaucggguaccuugggcuccucucacaaagaaccagagacauuuauaucaguagaagacgccggggcacauucacauggacacuaucagauucugaggguaaagacacaccagggggguacugucuaacuagguggaugcugauugaagcugaauugaaaugcuuuggcaacacagcuguagcaaaaugcaaugagaagcaugaugaggaauuuugugauauguugaggcuauuugacuuuaacaaacaagccauucaaagauugaaagcucccgcacaaaugaguauucagcugaucaacaaagcagugaaugccuugauaaaugaucaacugauaaugaaaaaccauuugcgggacauuaugugcauuccguacugcaacuacagcaaguauugguaucuuaaucacacagucaccggaaagacaucauuacccaaaugcuggcuuguaucaaauggcucauaccuaaacgagacccacuucucugaugauauugagcagcaagcugauaacaugauuacugagaugcuacagaaggaauacauggagagacaggggaagacaccacuuggucugguugaccucuuuguauuuagcacaaguuucuaucucauuagcauuuuccuucaccuagugaaaauaccaacucauaggcauguugugggcaaaccguguccuaaaccucacagacugaaccacauggguauauguucuuguggguucuacaagcaaccuggugugccugugagauggaagagaugaggacuagucccuguucccagagcccacuuuuuuuucuuuuuuugaaauaaaauagccugucuuucagaucuaaaaaaaaaaaaaaaaaaaaaaaaaaaaaaaaaaaaaaaaaaaaaaaaaaaaaaaaaaaaaaaaugcaucccccccccccccccccccccccccccccccaaaggcucuuuucagagccaccagaauu

SEQ ID NO: 6138 - RNA, 1752 nt, Artificial Sequence
  mRNA product Design a-1 comprising derived and/or modified sequence from LASV(Z0947-SLE-2011;Clade IV)__AIT17840__GPCstabilized (wt)
gggagagucccgcagucggcguccagcggcucugcuuguucgugugugugucguugcaggccuuauucaagcuuaccaugggacaaauagugacauucuuccaggaagugccccaugucauagaagaggugaugaacaucguucucauugcacugucuauacuagcaguguugaaaggucuguacaauuuugcaacauguggccucguuggcuuggucacuuuccuccuguuguguggcaggucuugcacaauuagccuuuacaaggggguuuaugagcuucagacucuggaacuaaacauggaaacacucaauaugaccaugccucucuccuguacaaagaacaacagucaucauuauauaauggugggcaaugagacaggacuagaacugaccuugaccaacacgagcauuauuaaucauaaauuuugcaaucugucugaugcccacaaaaagaaccucuaugaccaugcucuuaugagcauuaucucaacuuuccacuuguccaucccuaacuucaaucaguaugaggcaaugagcugcgauuucaaugggggaaagauuagugugcaguacaaccugagucacagcuaugccggggacgcagccaaccauugugguacuguugcaaaugguguauuacagacuuucaugaggauggcuuggggugggagcuacaucgcucuugacucaggcugcgacaggugggacuguauuaugacuaguuaucaauaucugauaauccaaaauacaaccugggaagaucacugccaauucucgagaccaucucccaucgguuaucucgggcuccucucacaaaggaccagagauauuuauauuaguagaaggcgccggggcacauucacauggacacugucagauucugaaggcaaggacacaccagggggauauugucuaaccagauggaugcuaauugaggcugagcuaaagugcuucgggaacacagccguggcaaaauguaaugagaagcaugaugaggaauuuugugacaugcugagguuguuugacuuuaacaaacaagccauucaaagguugaaagcucccgcacaaaugagcauucaguugaucaacaaagcaguaaaugcuuugauaaaugaccaacuuauaaugaagaaccaucuacgggacaucaugugcauuccauacuguaauuacagcaaguauugguaccucaaccacacaacuacuggaaaaacaucacugcccaaguguuggcuuguaucaaaugguucauaccugaacgagacccacuuuucugaugacaucgaacaacaagcugacaacaugaucacugagauguuacagaaggaguauauggagaggcaggggaagacaccauugggucugguugaccucuuuguguucagcacaagcuucuaucucauuagcaucuuccuucaccuaguuaaaauaccaacucauaggcauauuguaggcaagccgugucccaaaccucacagguugaaucauaugggcauuuguuccuguggacucuauaaacagccuggugugccugugaaauggaagagaugaggacuagucccuguucccagagcccacuuuuuuuucuuuuuuugaaauaaaauagccugucuuucagaucuaaaaaaaaaaaaaaaaaaaaaaaaaaaaaaaaaaaaaaaaaaaaaaaaaaaaaaaaaaaaaaaaugcaucccccccccccccccccccccccccccccccaaaggcucuuuucagagccaccagaauu

SEQ ID NO: 6139 - RNA, 1752 nt, Artificial Sequence
  mRNA product Design a-1 comprising derived and/or modified sequence from LASV(Josiah;Clade IV)__NP_694870__GPCstabilized (opt1)
gggagagucccgcagucggcguccagcggcucugcuuguucgugugugugucguugcaggccuuauucaagcuuaccaugggccagaucgugaccuucuuccaggaggucccccacgugaucgaggaggugaugaacaucguccugaucgcccucagcgugcuggccgugcugaaggggcucuacaacuucgcgaccugcggccuggucgggcuggugacguuccuccugcugugcggccgcuccugcaccaccagccucuacaaggggguguacgagcugcagacccuggagcucaacauggagacgcugaacaugaccaugccgcuguccugcaccaagaacaacagccaccacuacaucauggucggcaacgagaccggccucgagcugacgcugaccaacaccuccaucaucaaccacaaguucugcaaccucagcgacgcccacaagaagaaccuguacgaccacgcccugauguccaucaucagcaccuuccaccucuccauccccaacuucaaccaguacgaggccaugagcugcgacuucaacgggggcaagaucuccgugcaguacaaccugagccacuccuacgccggggacgcggccaaccacugcggcacgguggccaacgggguccugcagaccuucaugcggauggccuggggcggcagcuacaucgcgcucgacuccgggugcggcaacugggacugcaucaugaccagcuaccaguaccugaucauccagaacaccacgugggaggaccacugccaguucucccggcccagccccaucggguaccugggccuccugucccagcgcacccgggacaucuacaucagccgccggcgccggggcaccuucaccuggacgcugagcgacuccgaggggaaggacaccccgggcggguacugccugacccgcuggaugcucaucgaggccgagcugaagugcuucggcaacaccgccguggccaagugcaacgagaagcacgacgaggaguucugcgacaugcugcggcuguucgacuucaacaagcaggccauccagcgccugaaggcgcccgcccagaugagcauccagcugaucaacaaggccgugaacgcccucaucaacgaccagcugaucaugaagaaccaccuccgggacaucaugugcauccccuacugcaacuacuccaaguacugguaccucaaccacacgaccaccggccgcaccagccugcccaagugcuggcuggucuccaacggcagcuaccucaacgagacgcacuucuccgacgacaucgagcagcaggccgacaacaugaucaccgagaugcugcagaaggaguacauggagcggcaggggaagacgccccugggccucguggaccuguucguguucagcaccuccuucuaccugaucagcaucuuccugcaccucgucaagaucccgacccaccgccacaucguggggaaguccugccccaagccccaccggcugaaccacaugggcaucugcagcugcgggcuguacaagcagcccggcgugccggucaaguggaagcgcugaggacuagucccuguucccagagcccacuuuuuuuucuuuuuuugaaauaaaauagccugucuuucagaucuaaaaaaaaaaaaaaaaaaaaaaaaaaaaaaaaaaaaaaaaaaaaaaaaaaaaaaaaaaaaaaaaugcaucccccccccccccccccccccccccccccccaaaggcucuuuucagagccaccagaauu

SEQ ID NO: 6140 - RNA, 1749 nt, Artificial Sequence
  mRNA product Design a-1 comprising derived and/or modified sequence from LASV(LP;Clade I)__AAF86701__GPCstabilized (opt1)
gggagagucccgcagucggcguccagcggcucugcuuguucgugugugugucguugcaggccuuauucaagcuuaccaugggccagaucaucaccuucuuccaggaggugccccacgucaucgaggaggugaugaacaucgugcugaucgcccucagccugcuggccauccucaaggggcuguacaacaucgcgaccugcggcaucaucgggcuggucgccuuccucuuccugugcggcaaguccugcagccugacgcucaagggcggguacgagcugcagacccuggagcucaacauggagacccugaacaugaccaugccgcuguccugcacgaagaacagcucccaccacuacauccgcgugggcaacgagaccgggcucgagcugacccugaccaacacgagcaucaucaaccacaaguucugcaaccucuccgacgcccacaagaagaaccuguacgaccacgcccugaugagcaucaucuccaccuuccaccucagcauccccaacuucaaccaguacgaggccauguccugcgacuucaacggcgggaagaucagcgugcaguacaaccugucccacagcuacgcgggcgacgccgccgagcacugcgggaccgucgccaacggcgugcugcagaccuucaugcggauggcguggggcgggcgcuacaucgcccucgacuccggcugcgggaacugggacugcaucaugacgagcuaccaguaccugaucauccagaacaccaccugggaggaccacugccaguucucccggcccagccccaucggcuaccugggccuccugucccagcgcacccgggacaucuacaucagccgccggcgccgggggacguucaccuggacccugagcgacuccgagggcaacgagacccccgggggcuacugccugacgcgcuggaugcucaucgaggccgagcugaagugcuucgggaacaccgccguggccaagugcaacgagaagcacgacgaggaguucugcgacaugcugcggcuguucgacuucaacaagcaggcgauccgccggcugaaggcccccgcccagaugagcauccagcugaucaacaaggccgucaacgcccucaucaacgaccagcugaucaugaagaaccaccuccgcgacaucaugugcauccccuacugcaacuacuccaaguacugguaccucaaccacaccagcuccggccggaccagccugcccaagugcuggcugaucuccaacgggagcuaccucaacgagacgcaguucuccgacgacaucgagcagcaggcggacaacaugaucaccgagaugcugcagaaggaguacaucgagcgccagggcaagaccccgcuggggcucguggacaucuucaucuucagcaccuccuucuaccugaucagcaucuuccugcaccugaucaagaucccgacgcaccggcacaucgugggcaagcccugccccaagccccaccgccucaaccacaugggggucugcuccugcggccuguacaagcacccgggcgugcccaccaaguggaagcggugaggacuagucccuguucccagagcccacuuuuuuuucuuuuuuugaaauaaaauagccugucuuucagaucuaaaaaaaaaaaaaaaaaaaaaaaaaaaaaaaaaaaaaaaaaaaaaaaaaaaaaaaaaaaaaaaaugcaucccccccccccccccccccccccccccccccaaaggcucuuuucagagccaccagaauu

SEQ ID NO: 6141 - RNA, 1749 nt, Artificial Sequence
  mRNA product Design a-1 comprising derived and/or modified sequence from LASV(803213;Clade II)__AAF86703__GPCstabilized (opt1)
gggagagucccgcagucggcguccagcggcucugcuuguucgugugugugucguugcaggccuuauucaagcuuaccaugggccagaucaucaccuucuuccaggaggugccccacgucaucgaggaggugaugaacaucgugcugaucgcccucagccugcuggccauccucaaggggaucuacaacgucgcgaccugcggccuguucgggcugaucuccuuccuccugcugugcggccgcagcugcuccgugacguacaaggggguguacgagcuccagacccuggagcugaacauggccaaccucaacaugaccaugccgcugagcugcaccaagaacaacucccaccacuacaucauggucggcaacgagacgggccuggagcucacccugaccaacaccagcaucaucaaccacaaguucugcaaccuguccgacgcccacaagaagaaccucuacgaccacgcccugaugagcaucaucuccacguuccaccugagcauccccaacuucaaccaguacgaggccauguccugcgacuucaacgggggcaagaucagcgugcaguacaaccucucccacagcuucgcgguggacgccgccaaccacugcgggaccaucgccaacggcguccugcagaccuucaugcggauggcguggggcggguccuacaucgcccuggacagcggcugcgggaacugggacugcaucaugaccuccuaccaguaccucaucauccagaacacgaccugggaggaccacugccaguucagccgccccucccccaucggcuaccuggggcugcucagccagcggacccgcgacaucuacaucagccggcgccgccggggcaccuucacguggacccucuccgacagcgagggcaacgaggcccccgggggcuacugccugacccgguggaugcugaucgaggccgagcucaagugcuucgggaacaccgccguggcgaagugcaacgagaagcacgacgaggaguucugcgacaugcugcgccuguucgacuucaacaagcaggccaucaagcggcucaagacgcccgcccagauguccauccagcugaucaacaaggccgugaacgcccugaucaacgaccagcucaucaugaagaaccaccuccgcgacaucaugugcauccccuacugcaacuacagccgguacugguaccugaaccacaccgucaccgggaagaccucccugccccgcugcuggcuggugagcaacggcuccuaccugaacgagacgcacuucagcgacgacaucgagcagcaggcggacaacaugaucaccgagaugcuccagaaggaguacauggaccggcagggcaagaccccgcuggggcugguggaccucuucgucuucuccaccagcuucuaccugaucuccaucuuccugcaccuggugaagaucccgacgcaccgccacaucgugggcaagcccugccccaagccccaccggcucaaccacauggggaucugcagcugcggccuguacaagcacccggggguccccgugaaguggaagcgcugaggacuagucccuguucccagagcccacuuuuuuuucuuuuuuugaaauaaaauagccugucuuucagaucuaaaaaaaaaaaaaaaaaaaaaaaaaaaaaaaaaaaaaaaaaaaaaaaaaaaaaaaaaaaaaaaaugcaucccccccccccccccccccccccccccccccaaaggcucuuuucagagccaccagaauu

SEQ ID NO: 6142 - RNA, 1749 nt, Artificial Sequence
  mRNA product Design a-1 comprising derived and/or modified sequence from LASV(GA391;Clade III)__CAA36645__GPCstabilized (opt1)
gggagagucccgcagucggcguccagcggcucugcuuguucgugugugugucguugcaggccuuauucaagcuuaccaugggccagaucgugaccuucuuccaggaggucccccacgugaucgaggaggugaugaacaucguccugaucgcccucagcauccuggccauccugaaggggcucuacaacguggcgaccugcggccugaucgggcuggugacguuccuccugcuguccggccgcagcugcucccucaucuacaaggggaccuacgagcugcagacccuggagcucaacauggagacccugaacaugacgaugccgcugagcugcaccaagaacaacucccaccacuacauccgggucggcaacgagaccggccucgagcugacccugacgaacaccagcauccucaaccacaaguucugcaaccuguccgacgcccacaagcgcaaccuguacgaccacagccucauguccaucaucagcaccuuccaccuguccauccccaacuucaaccaguacgaggccaugagcugcgacuucaacgggggcaagaucaccgugcaguacaaccugucccacagcuucgccguggacgccgcggggcacugcggcacgcucgccaacgggguccugcagaccuucaugcggauggccuggggcggcuccuacaucgcccuggacagcgggugcggcaacugggacugcaucaugaccuccuaccaguaccucaucauccagaacaccacgugggacgaccacugccaguucagccggcccucccccaucggguaccugggccugcucagccagcgcacccgggacaucuacaucagccgccggcgccggggcaccuucaccuggacgcucuccgacagcgaggggaacgagaccccgggcggguacugccugacccgcuggaugcugaucgaggcggagcucaagugcuucggcaacaccgccguggccaagugcaacgagaagcacgacgaggaguucugcgacaugcugcggcuguucgacuucaacaagcaggccauccgccggcucaagacgcccgcccagauguccauccagcugaucaacaaggcggugaacgcccugaucaacgaccagcucaucaugaagaaccaccuccgcgacaucaugugcauccccuacugcaacuacagccgguacugguaccugaaccacaccuccaccggcaagaccagccugccccgcugcuggcugaucuccaacggcagcuaccugaacgagacgaaguucuccgacgacaucgagcagcaggccgacaacaugaucaccgagaugcuccagaaggaguacaucgaccggcaggggaagacgccccugggccuggucgaccuguucguguucagcaccuccuucuaccucaucagcaucuuccugcaccuggugaagaucccgacccaccgccacaucgucgggaagcccugccccaagccccaccggcucaaccacaugggcaucugcuccugcgggcuguacaagcagccgggcgugcccgugcgcuggaagcggugaggacuagucccuguucccagagcccacuuuuuuuucuuuuuuugaaauaaaauagccugucuuucagaucuaaaaaaaaaaaaaaaaaaaaaaaaaaaaaaaaaaaaaaaaaaaaaaaaaaaaaaaaaaaaaaaaugcaucccccccccccccccccccccccccccccccaaaggcucuuuucagagccaccagaauu

SEQ ID NO: 6143 - RNA, 1752 nt, Artificial Sequence
  mRNA product Design a-1 comprising derived and/or modified sequence from LASV(AV;Clade V)__CCA30314__GPCstabilized (opt1)
gggagagucccgcagucggcguccagcggcucugcuuguucgugugugugucguugcaggccuuauucaagcuuaccaugggccagaucgugaccuucuuccaggaggucccccacgugaucgaggaggugaugaacaucguccugaucgcccucagcauccuggccgugcugaaggggcucuacaacaucgcgaccugcggccugaucgggcugaucacguuccuccugcugugcggccgcuccugcagcuccaaccucuacaaggggguguacgagcugcagagccuggaccucaacauggagacccugaacaugaccaugccgcuguccugcaccaagaacaacagccaccacuacauccgggucggcaacgacacgggccucgagcugacccugaccaacaccuccauccucaaccacaaguucugcaaccugagcgacgcccacaagaaggaccuguacgaccacgcccucauguccaucaucagcacguuccaccuguccauccccaacuucaaccaguacgaggccaugagcugcgacuucaacgggggcaagaucuccgugcaguacaaccugagccacuccuacgccaucgacgcggccaaccacugcgggaccguggccaacggcauccuccagaccuucaugcgcauggccuggggcgggagcuacaucgcgcuggacuccggcugcgggaacugggacugcaucaugaccagcuaccaguaccugaucauccagaacacgaccugggagaaccacugccaguucucccgccccagccccaucggcuaccucgggcugcugagccagcggacccgcgacaucuacaucucccggcgccgccggggcaccuucacguggacccugagcgacuccgagggcaacgccacccccgggggcuacugccucacccgguggaugcugaucgaggccgagcugaagugcuucgggaacacggccgucgccaagugcaacgagaagcacgacgaggaguucugcgacaugcuccgccuguucgacuucaacaagcaggcgaucagccggcugaagucccccgcccagaugagcauccagcucaucaacaaggccgugaacgcccugaucaacgaccagcugaucaugaagaaccaccuccgcgacaucaugugcauccccuacugcaacuacuccaaguacugguaccugaaccacaccaucaccgggaagaccagccugcccaagugcuggcucguguccaacggcagcuaccugaacgagacgcacuucuccgacgacaucgagcagcaggccgacaacaugaucaccgagaugcugcagaaggaguacauggagcggcagggcaagaccccgcucgggcuggucgaccuguucguguucagcaccuccuucuaccugaucagcaucuuccuccgccuggugaagaucccgacgcaccggcacaucgucggcaagcccugccccaagccccaccgccugaaccacauggggaucugcuccugcggccucuacaagcagccgggggugcccgugcgguggaagcgcugaggacuagucccuguucccagagcccacuuuuuuuucuuuuuuugaaauaaaauagccugucuuucagaucuaaaaaaaaaaaaaaaaaaaaaaaaaaaaaaaaaaaaaaaaaaaaaaaaaaaaaaaaaaaaaaaaugcaucccccccccccccccccccccccccccccccaaaggcucuuuucagagccaccagaauu

SEQ ID NO: 6144 - RNA, 1749 nt, Artificial Sequence
  mRNA product Design a-1 comprising derived and/or modified sequence from LASV(Togo/2016/7082;Clade VI)__AMR44577__GPCstabilized (opt1)
gggagagucccgcagucggcguccagcggcucugcuuguucgugugugugucguugcaggccuuauucaagcuuaccaugggccagaucaucaccuucuuccaggaggugccccacgucaucgaggaggugaugaacaucgugcugaucgcccucagccugcuggccauccucaagggggucuacaacguggcgaccugcggcaucaucgggcuggugacguuccuguuccucugcggccgcuccugcagccugaucuacaagggguccuacgagcugcagacccucgagcugaacauggagacccugaacaugaccaugccgcucagcugcacgaagaacuccagccaccacuacauccgggucggcaacgagaccggccuggagcugacccucaccaacacguccaucaucaaccacaaguucugcaaccugagcgacgcccacaagcgcaaccuguacgaccacgcccucauguccauccugagcaccuuccaccuguccauccccaacuucaaccaguacgaggccaugagcugcgacuucaacgggggcaagaucuccgugcaguacaaccucagccacgccuacgcgguggacgccgccgagcacugcgggaccgucgccaacggcgugcugcagaccuucaugcggauggcguggggcggguccuacaucgcccuggacagcggcugcgggaacugggacugcaucaugacguccuaccaguaccucaucauccagaacaccaccugggaggaccacugccaguucagccggcccucccccaucggcuaccuggggcugcucagccagcgcacccgggacaucuacaucagccgccggcgccggggcacguucaccuggacccucuccgacagcgagggcaacgagacccccgggggcuacugccugacgcgcuggaugcugaucgaggccgagcucaagugcuucgggaacaccgccguggccaagugcaacgagaagcacgacgaggaguucugcgacaugcugcggcuguucgacuucaacaagcaggcgauccagcgccucaagucccccgcccagaugagcauccagcugaucaacaaggccgucaacgcccugaucaacgaccagcucaucaugaagaaccaccuccgggacaugaugugcauccccuacugcaacuacuccaaguacugguaccugaaccacaccagcuccgggcgcaccagccugcccaagugcuggcugguguccaacggcagcuaccugaacgagacgcacuucuccgacgacaucgagcagcaggccgacaacaugaucaccgagaugcuccagaaggaguacaucgaccggcagggcaagaccccgcuggggcugguggaccucuucgucuucagcaccuccuucuaccugaucagcaucuuccugcaccugaucaagaucccgacgcaccgccacaucgugggcaagcccugccccaagccccaccggcucaaccacauggggaucugcuccugcggccuguacaagcagccgggggugcccacccgcuggaagcggugaggacuagucccuguucccagagcccacuuuuuuuucuuuuuuugaaauaaaauagccugucuuucagaucuaaaaaaaaaaaaaaaaaaaaaaaaaaaaaaaaaaaaaaaaaaaaaaaaaaaaaaaaaaaaaaaaugcaucccccccccccccccccccccccccccccccaaaggcucuuuucagagccaccagaauu

SEQ ID NO: 6145 - RNA, 1749 nt, Artificial Sequence
  mRNA product Design a-1 comprising derived and/or modified sequence from LASV(KAK-428;Clade n.d. (VII))__ANH09740__GPCstabilized (opt1)
gggagagucccgcagucggcguccagcggcucugcuuguucgugugugugucguugcaggccuuauucaagcuuaccaugggccagaucgugaccuucuuccaggaggucccccacgugaucgaggaggugaugaacaucguccugaucgcccucagccugcuggccauccucaaggggcuguacaacuucgcgaccugcggcgugaucgggcugaucacguuccuccugcugugcggccgcuccugcagcgccaccuacaaggggcaguacgagcuccagacccuggagcugaacauggagucccucaacaugaccaugccgcugagcugcacgaagaacaacucccaccacuacauccgggccggcaacaacaccggccuggagcucacccugaccaacacgagcaucaucucccacaaguucugcaaccugagcgacgcccacaagaagaaccucuacgaccacacccugauguccaucaucaccaccuuccaccugagcauccccaacuucaaccaguacgaggccauguccugcgacuucaacgggggcaagaucagcauccaguacaaccucucccacagcuacgcgggggacgccgcccagcacugcggcacgguggccaacgggguccugcagaccuucaugcgcauggcguggggcggcuccuaccuggcccucgacagcgggugccgcggcugggacugcaucaucuccagcuaccaguaccugaucauccagaacaccaccugggacgaccacugccaguucucccggcccagccccaucggguaccugggcuucgugagccagaagacgcgcgacaucuacaucucccggcgccgccggggcaccuucaccuggacccugagcgacuccgaggggcacgacaugccgggcggguacugccucacgcgguggaugcugaucgaggccgaccugaagugcuucggcaacaccgccguggccaagugcaacgagaagcacgacgaggaguucugcgacauguggcgccucuucgacuucaacaagcaggcgauccagcggcugaaggcccccgcccagaugaacauccagcugaucaacaaggccgucaacgcccucaucaacgaccagcugaugaugaagaaccaccuccgcgacaucaugugcauccccuacugcaacuacagcaaguucugguaccugaacaacaccaccacgggccggaccucccugccccgcugcuggcugaucagcaacggcuccuaccucaacgagacccacuucagcgacgacaucgagcagcaggcggacaacaugaucaccgagaugcugcagaaggaguacauggaccggcaggggaagacgccccugggccucguggaccuguucguguucuccaccagcuucuaccugaucaccaucuuccuccaccuggucaagaucccgacccaccgccacaucguggggaagcccugccccaagccccaccggcugaaccacaugggcaucugcuccugcgggcuguacaagcagccgggcgugcccguccgcuggaagcggugaggacuagucccuguucccagagcccacuuuuuuuucuuuuuuugaaauaaaauagccugucuuucagaucuaaaaaaaaaaaaaaaaaaaaaaaaaaaaaaaaaaaaaaaaaaaaaaaaaaaaaaaaaaaaaaaaugcaucccccccccccccccccccccccccccccccaaaggcucuuuucagagccaccagaauu

SEQ ID NO: 6146 - RNA, 1749 nt, Artificial Sequence; identical to SEQ ID NO: 6140
  mRNA product Design a-1 comprising derived and/or modified sequence from LASV(Pinneo-NIG-1969;Clade I)__AIT17836__GPCstabilized (opt1)

SEQ ID NO: 6147 - RNA, 1749 nt, Artificial Sequence
  mRNA product Design a-1 comprising derived and/or modified sequence from LASV(ISTH0009-NIG-2011;Clade II)__AIT17404__GPCstabilized (opt1)
gggagagucccgcagucggcguccagcggcucugcuuguucgugugugugucguugcaggccuuauucaagcuuaccaugggccagaucaucaccuucuuccaggaggugccccacgucaucgaggaggugaugaacaucgugcugaucgcccucagccugcuggccauccucaaggggaucuacaacgucgcgaccugcggccuguucgggcugguguccuuccuccugcugugcggccgcagcugcuccacgaccuacaaggggguguacgagcuccagacccuggagcuggacauggccagccucaacaugaccaugccgcuguccugcacgaagaacaacagccaccacuacaucauggucggcaacgagaccggccuggagcucacccugaccaacacguccaucaucaaccacaaguucugcaaccugagcgacgcccacaagaagaaccucuacgaccacgcccugauguccaucaucagcaccuuccaccuguccauccccaacuucaaccaguacgaggccaugagcugcgacuucaacgggggcaagaucuccgugcaguacaaccucagccacgcguacgccguggacgccgccaaccacugcgggaccaucgcgaacggcguccugcagaccuucaugcggauggccuggggcggguccuacaucgcccuggacagcggcugcggguccugggacugcaucaugacgagcuaccaguaccucaucauccagaacaccaccugggaggaccacugccaguucucccgccccagccccaucggcuaccuggggcugcucagccagcggacccgcgacaucuacaucucccggcgccgccggggcacguucaccuggacccucagcgacuccgagggcaacgagacccccgggggcuacugccugacgcgguggaugcugaucgaggccgagcucaagugcuucgggaacaccgccguggcgaagugcaacgagaagcacgacgaggaguucugcgacaugcugcgccuguucgacuucaacaagcaggccauccggcgccucaagacccccgcccagaugagcauccagcugaucaacaaggccgugaacgcccugaucaacgaccagcucaucaugaagaaccaccuccgggacaucaugugcaucccguacugcaacuacuccaaguacugguaccugaaccacaccgucacggggaagaccagccugccccgcugcuggcugguguccaacggcagcuaccugaacgagacccacuucuccgacgacaucgagcagcaggcggacaacaugaucaccgagcuccugcagaaggaguacauggaccggcagggcaagacgccccuggggcucguggaccuguucgucuucagcaccuccuucuaccugaucagcaucuuccugcaccucaucaagaucccgacccaccgccacaucaccggcaagcccugccccaagccccaccggcugaaccacauggggaucugcuccugcggccuguacaagcacccgggggugcccgugaaguggaagcgcugaggacuagucccuguucccagagcccacuuuuuuuucuuuuuuugaaauaaaauagccugucuuucagaucuaaaaaaaaaaaaaaaaaaaaaaaaaaaaaaaaaaaaaaaaaaaaaaaaaaaaaaaaaaaaaaaaugcaucccccccccccccccccccccccccccccccaaaggcucuuuucagagccaccagaauu

SEQ ID NO: 6148 - RNA, 1749 nt, Artificial Sequence
  mRNA product Design a-1 comprising derived and/or modified sequence from LASV(ISTH2010-NIG-2012;Clade II)__AIT17482__GPCstabilized (opt1)
gggagagucccgcagucggcguccagcggcucugcuuguucgugugugugucguugcaggccuuauucaagcuuaccaugggccagaucaucaccuucuuccaggaggugccccacgucaucgaggaggugaugaacaucgugcugaucgcccucagccugcuggccauccucaaggggaucuacaacgucgcgaccugcggccuguucgggcugguguccuuccuccugcugugcggccgcagcugcuccacgaccuacaaggggguguacgagcuccagacccuggagcuggacauggccagccucaacaugaccaugccgcuguccugcacgaagaacaacagccaccacuacaucauggucggcaacgagaccggccuggagcucacccugaccaacacguccaucaucaaccacaaguucugcaaccugagcgacgcccacaagaagaaccucuacgaccacgcccugauguccaucaucagcaccuuccaccuguccauccccaacuucaaccaguacgaggccaugagcugcgacuucaacgggggcaagaucuccgugcaguacaaccucagccacgcguacgccguggacgccgccaaccacugcgggaccaucgcgaacggcguccugcagaccuucaugcggauggccuggggcggguccuacaucgcccuggacagcggcugcggguccugggacugcaucaugacgagcuaccaguaccucaucauccagaacaucaccugggaggaccacugccaguucucccgccccagccccaucggcuaccuggggcugcucagccagcggacccgcgacaucuacaucucccggcgccgccggggcaccuucacguggacccucagcgacuccgagggcaacgagacccccgggggcuacugccugacccgguggaugcugaucgaggccgagcucaagugcuucgggaacacggccguggcgaagugcaacgagaagcacgacgaggaguucugcgacaugcugcgccuguucgacuucaacaagcaggccauccggcgccucaagacccccgcccagaugagcauccagcugaucaacaaggccgugaacgcccugaucaacgaccagcucaucaugaagaaccaccuccgggacaucaugugcauccccuacugcaacuacuccaaguacugguaccugaaccacaccgucaccgggaagacgagccugccccgcugcuggcugguguccaacggcagcuaccugaacgagacccacuucuccgacgacaucgagcagcaggcggacaacaugaucaccgagcuccugcagaaggaguacaucgaccggcagggcaagaccccgcuggggcucguggaccuguucgucuucagcacguccuucuaccugaucagcaucuuccugcaccucgugaagaucccgacccaccgccacguggucggcaagcccugccccaagccccaccggcugaaccacauggggaucugcuccugcggccuguacaagcacccgggggugcccgugaaguggaagcgcugaggacuagucccuguucccagagcccacuuuuuuuucuuuuuuugaaauaaaauagccugucuuucagaucuaaaaaaaaaaaaaaaaaaaaaaaaaaaaaaaaaaaaaaaaaaaaaaaaaaaaaaaaaaaaaaaaugcaucccccccccccccccccccccccccccccccaaaggcucuuuucagagccaccagaauu

SEQ ID NO: 6149 - RNA, 1749 nt, Artificial Sequence
  mRNA product Design a-1 comprising derived and/or modified sequence from LASV(Lassa virus/H.sapiens-wt/NGA/2015/ISTH_0543;Clade II)__AVO03639__GPCstabilized (opt1)
gggagagucccgcagucggcguccagcggcucugcuuguucgugugugugucguugcaggccuuauucaagcuuaccaugggccagaucaucaccuucuuccaggaggugccccacgucaucgaggaggugaugaacaucgugcugaucgcccucagccugcuggccauccucaaggggaucuacaacgucgcgaccugcggccuguucgggcugguguccuuccuccugcugugcggccgcagcugcuccacgaccuacaaggggguguacgagcuccagacccuggagcuggacauggccaaccucaacaugaccaugccgcugagcugcacgaagaacaacucccaccacuacaucauggucggcaacgagaccggccuggagcucacccugaccaacacgagcaucaucaaccacaaguucugcaaccuguccgacgcccacaagaagaaccucuacgaccacgcccugaugagcaucaucuccaccuuccaccugagcauccccaacuucaaccaguacgaggccauguccugcgacuucaacgggggcaagaucagcgugcaguacaaccucucccacaccuacgcgguggacgccgccaaccacugcgggaccaucgccaacggcguccugcagacguucaugcggauggcguggggcgggagcuacaucgcccuggacuccggcugcgggagcugggacugcaucaugaccuccuaccaguaccucgugauccagaacaccaccugggaggaccacugccaguucagccgccccucccccaucggcuaccuggggcugcucagccagcggacgcgcgacaucuacaucagccggcgccgccggggcaccuucaccuggacccucuccgacagcgagggcaacgagacgcccgggggcuacugccugacccgguggaugcugaucgaggccgagcucaagugcuucgggaacaccgccguggccaagugcaacgagaagcacgacgaggaguucugcgacaugcugcgccuguucgacuucaacaagcaggcgauccggcgccucaagacccccgcccagauguccauccagcugaucaacaaggccgucaacgcccugaucaacgaccagcucaucaugaagaaccaccuccgggacaucaugugcauccccuacugcaacuacagcaaguacugguaccugaaccacacggugaccgggaagaccucccugccccgcugcuggcuggugagcaacggcuccuaccugaacgagacccacuucagcgacgacaucgagcagcaggccgacaacaugaucacggagcuccugcagaaggaguacaucgaccggcagggcaagaccccgcuggggcucgucgaccuguucguguucuccaccagcuucuaccugaucuccaucuuccugcaccucgugaagaucccgacccaccgccacaucacgggcaagcccugccccaagccccaccggcugaaccacauggggaucugcagcugcggccuguacaagcacccggggguccccgugaaguggaagcgcugaggacuagucccuguucccagagcccacuuuuuuuucuuuuuuugaaauaaaauagccugucuuucagaucuaaaaaaaaaaaaaaaaaaaaaaaaaaaaaaaaaaaaaaaaaaaaaaaaaaaaaaaaaaaaaaaaugcaucccccccccccccccccccccccccccccccaaaggcucuuuucagagccaccagaauu

SEQ ID NO: 6150 - RNA, 1749 nt, Artificial Sequence
  mRNA product Design a-1 comprising derived and/or modified sequence from LASV(Lassa virus/H.sapiens-wt/NGA/2016/ISTH_0009;Clade II)__AVO03571__GPCstabilized (opt1)
gggagagucccgcagucggcguccagcggcucugcuuguucgugugugugucguugcaggccuuauucaagcuuaccaugggccagaucaucaccuucuuccaggaggugccccacgucaucgaggaggugaugaacaucgugcugaucgcccucagccugcuggccauccucaaggggaucuacaacgucgcgaccugcggccugcuggggcucguguccuuccugcugcucugcggccgcagcugcuccacgaccuacaaggggguguacgagcugcagacccuggagcucgacauggccagccugaacaugaccaugccgcuguccugcacgaagaacaacagccaccacuacaucauggucggcaacgagaccggccucgagcugacccugaccaacacguccaucaucaaccacaaguucugcaaccucagcgacgcccacaagaagaaccuguacgaccacgcccugauguccaucaucagcaccuuccaccucuccauccccaacuucaaccaguacgaggccaugagcugcgacuucaacgggggccggaucuccgugcaguacaaccugagccacuccuacgcgguggacgccgccaaccacugcgggaccaucgccaacggcguccugcagaccuucaugcgcauggcguggggcgggagcuacaucgcccucgacuccggcugcgggagcugggacugcaucaugacguccuaccaguaccugaucauccagaacaccaccugggaggaccacugccaguucagccggcccagccccaucggcuaccuggggcuccugucccagcgcacccgggacaucuacaucagccgccggcgccggggcacguucaccuggacccuguccgacagcgagggcaacgagacccccgggggcuacugccugacgcgcuggaugcucaucgaggccgagcugaagugcuucgggaacaccgccguggccaagugcaacgagaagcacgacgaggaguucugcgacaugcugcggcuguucgacuucaacaagcaggcgauccgccggcugaagacccccgcccagauguccauccagcugaucaacaaggccgugaacgcccucaucaacgaccagcugaucaugaagaaccaccuccgcgacaucaugugcaucccguacugcaacuacagcaaguacugguaccucaaccacaccgucacggggaagaccucccugccccggugcuggcuggugagcaacggcuccuaccucaacgagacccacuucagcgacgacaucgagcagcaggccgacaacaugaucaccgagcugcugcagaaggaguacaucgaccgccagggcaagacgccccucgggcugguggaccuguucgucuucuccaccagcuucuaccugaucuccaucuuccuccaccuggugaagaucccgacccaccggcacaucaccggcaagcccugccccaagccccaccgccugaaccacauggggaucugcagcugcggccucuacaaccacccgggggugcccgucaaguggaagcggugaggacuagucccuguucccagagcccacuuuuuuuucuuuuuuugaaauaaaauagccugucuuucagaucuaaaaaaaaaaaaaaaaaaaaaaaaaaaaaaaaaaaaaaaaaaaaaaaaaaaaaaaaaaaaaaaaugcaucccccccccccccccccccccccccccccccaaaggcucuuuucagagccaccagaauu

SEQ ID NO: 6151 - RNA, 1749 nt, Artificial Sequence
  mRNA product Design a-1 comprising derived and/or modified sequence from LASV(Lassa virus/H.sapiens-wt/NGA/2016/ISTH_0017;Clade II)__AVO03567__GPCstabilized (opt1)
gggagagucccgcagucggcguccagcggcucugcuuguucgugugugugucguugcaggccuuauucaagcuuaccaugggccagaucaucaccuucuuccaggaggugccccacgucaucgaggaggugaugaacaucgugcugaucgcccucagccugcuggccauccucaaggggaucuacaacgucgcgaccugcggccuguucgggcugguguccuuccuccugcugugcggccgcagcugcuccacgaccuacaaggggguguacgagcuccagacccuggagcuggacauggccagccucaacaugaccaugccgcuguccugcacgaagaacaacagccaccacuacaucauggucggcaacgagaccggccuggagcucacccugaccaacacguccaucaucaaccacaaguucugcaaccugagcgacgcccacaagaagaaccucuacgaccacgcccugauguccaucaucagcaccuuccaccuguccauccccaacuucaaccaguacgaggccaugagcugcgacuucaacgggggcaagaucuccgugcaguacaaccucagccacaccuacgcgaucgacgccgccaaccacugcgggaccaucgccaacggcgugcugcagacguucaugcggauggcguggggcggguccuacaucgcccuggacagcggcugcggguccugggacugcaucaugaccagcuaccaguaccucaucauccagaacaccaccugggaggaccacugccaguucucccgccccagccccaucggcuaccuggggcugcucagccagcggacgcgcgacaucuacaucucccggcgccgccggggcaccuucaccuggacccucagcgacuccgagggcaacgagacgcccgggggcuacugccugacccgguggaugcugaucgaggccgagcucaagugcuucgggaacaccgccgucgccaagugcaacgagaagcacgacgaggaguucugcgacaugcugcgccuguucgacuucaacaagcaggcgauccggcgccucaagacccccgcccagaugagcauccagcugaucaacaaggccgugaacgcccugaucaacgaccagcucaucaugaagaaccaccuccgggacaucaugugcauccccuacugcaacuacuccaaguacugguaccugaaccacacggugaccgggaagaccagccugccccgcugcuggcuggucuccaacggcagcuaccugaacgagacccacuucuccgacgacaucgagcagcaggccgacaacaugaucacggagcuccugcagaaggaguacauggaccggcagggcaagaccccgcuggggcucguggaccuguucguguucagcaccuccuucuaccugaucagcaucuuccugcaccucguccgcaucccgacccaccggcacgugaucggcaagcccugccccaagccccaccgccugaaccacauggggaucugcuccugcggccuguacaagcacccgggggugcccgucaaguggaagcggugaggacuagucccuguucccagagcccacuuuuuuuucuuuuuuugaaauaaaauagccugucuuucagaucuaaaaaaaaaaaaaaaaaaaaaaaaaaaaaaaaaaaaaaaaaaaaaaaaaaaaaaaaaaaaaaaaugcaucccccccccccccccccccccccccccccccaaaggcucuuuucagagccaccagaauu

SEQ ID NO: 6152 - RNA, 1749 nt, Artificial Sequence
  mRNA product Design a-1 comprising derived and/or modified sequence from LASV(Lassa virus/H.sapiens-wt/NGA/2018/ISTH_0959;Clade II)__AVV65099__GPCstabilized (opt1)
gggagagucccgcagucggcguccagcggcucugcuuguucgugugugugucguugcaggccuuauucaagcuuaccaugggccagaucaucaccuucuuccaggaggugccccacgucaucgaggaggugaugaacaucgugcugaucgcccucagccugcuggccauccucaaggggaucuacaacgucgugaccugcggccuguucgggcugguguccuuccuccugcugugcggccgcagcugcuccacgaccuacaagggggucuacgagcuccagacccuggagcuggacauggcgagccucaacaugaccaugccgcuguccugcacgaagaacaacagccaccacuacaucauggugggcaacgagaccggccuggagcucacccugaccaacacguccaucaucaaccacaaguucugcaaccugagcgacgcccacaagaagaaccucuacgaccacgcccugauguccaucaucagcaccuuccaccuguccauccccaacuucaaccaguacgaggccaugagcugcgacuucaacgggggcaagaucuccgugcaguacaaccucagccacgccuacgcgaucgacgccgccaaccacugcgggaccaucgccaacggcguccugcagaccuucaugcggauggcguggggcggguccuacaucgcccuggacagcggcugcggguccugggacugcaucaugacgagcuaccaguaccucaucauccagaacaccaccugggaggaccacugccaguucucccgccccagccccaucggcuaccuggggcugcucagccagcggacccgcgacaucuacaucucccggcgccgccggggcacguucaccuggacccucagcgacuccgagggcaacgagacccccgggggcuacugccugacgcgguggaugcugaucgaggccgagcucaagugcuucgggaacaccgccguggccaagugcaacgagaagcacgacgaggaguucugcgacaugcugcgccuguucgacuucaacaagcaggcgauccggcgccucaagacccccgcccagaugagcauccagcugaucaacaaggccgugaacgcccugaucaacgaccagcucaucaugaagaaccaccuccgggacaucaugugcaucccguacugcaacuacuccaaguacugguaccugaaccacaccgucacggggaagaccagccugccccgcugcuggcugguguccaacggcagcuaccugaacgagacccacuucuccgacgacaucgagcagcaggccgacaacaugaucaccgagcuccugcagaaggaguacaucgaccggcagggcaagacgccccuggggcucguggaccuguucgucuucagcaccuccuucuaccugaucagcaucuuccugcaccucgugaagaucccgacccaccgccacgugaucggcaagcccugccccaagccccaccggcugaaccacauggggaucugcuccugcggccuguacaagcacccggggguccccgugaaguggaagcgcugaggacuagucccuguucccagagcccacuuuuuuuucuuuuuuugaaauaaaauagccugucuuucagaucuaaaaaaaaaaaaaaaaaaaaaaaaaaaaaaaaaaaaaaaaaaaaaaaaaaaaaaaaaaaaaaaaugcaucccccccccccccccccccccccccccccccaaaggcucuuuucagagccaccagaauu

SEQ ID NO: 6153 - RNA, 1749 nt, Artificial Sequence
  mRNA product Design a-1 comprising derived and/or modified sequence from LASV(LASV003-NIG-2008;Clade II)__AIT17580__GPCstabilized (opt1)
gggagagucccgcagucggcguccagcggcucugcuuguucgugugugugucguugcaggccuuauucaagcuuaccaugggccagaucaucaccuucuuccaggaggugccccacgucaucgaggaggugaugaacaucgugcugaucgcccucagccugcuggccauccucaaggggaucuacaacgucgcgaccugcggccuguucgggcugguguccuuccuccugcugugcggccgcagcugcuccacgaccuacaaggggguguacgagcuccagacccuggagcuggacauggccagccucaacaugaccaugccgcuguccugcacgaagaacaacagccaccacuacaucauggucggcaacgagaccggccuggagcucacccugaccaacacguccaucaucaaccacaaguucugcaaccugagcgacgcccacaagaagaaccucuacgaccacgcccugauguccaucaucagcaccuuccaccuguccauccccaacuucaaccaguacgaggccaugagcugcgacuucaacgggggcaagaucuccgugcaguacaaccucagccacaccuacgcgguggacgccgccaaccacugcgggaccaucgccaacggcguccugcagacguucaugcggauggcguggggcggguccuacaucgcccuggacagcggcugcggguccugggacugcaucaugaccagcuaccaguaccucaucauccagaacaccaccugggaggaccacugccaguucucccgccccagccccaucggcuaccuggggcugcucagccagcggacgcgcgacaucuacaucucccggcgccgccggggcaccuucaccuggacccucagcgacuccgagagcaacgagacgccgggcggguacugccugacccgguggaugcugaucgaggccgagcucaagugcuucggcaacaccgccguggccaagugcaacgagaagcacgacgaggaguucugcgacaugcugcgccuguucgacuucaacaagcaggcgauccggcgccucaaggcccccgcccagauguccauccagcugaucaacaaggccgugaacgcccugaucaacgaccagcucaucaugaagaaccaccuccgggacaucaugugcauccccuacugcaacuacagcaaguacugguaccugaaccacaccgucacgggccgcaccucccugccccggugcuggcuggugagcaacggguccuaccugaacgagacccacuucagcgacgacaucgagcagcaggcggacaacaugaucaccgagcuccugcagaaggaguacauggaccgccagggcaagacgccccugggccucguggaccuguucgucuucuccaccagcuucuaccugaucuccaucuuccugcaccucgugaagaucccgacccaccggcacgugaucgggaagcccugccccaagccccaccgccugaaccacaugggcaucugcagcugcgggcuguacaagcacccgggcguccccgugaaguggaagcggugaggacuagucccuguucccagagcccacuuuuuuuucuuuuuuugaaauaaaauagccugucuuucagaucuaaaaaaaaaaaaaaaaaaaaaaaaaaaaaaaaaaaaaaaaaaaaaaaaaaaaaaaaaaaaaaaaugcaucccccccccccccccccccccccccccccccaaaggcucuuuucagagccaccagaauu

SEQ ID NO: 6154 - RNA, 1749 nt, Artificial Sequence
  mRNA product Design a-1 comprising derived and/or modified sequence from LASV(LASV035-NIG-2009;Clade II)__AIT17588__GPCstabilized (opt1)
gggagagucccgcagucggcguccagcggcucugcuuguucgugugugugucguugcaggccuuauucaagcuuaccaugggccagaucaucaccuucuuccaggaggugccccacgucaucgaggaggugaugaacaucgugcugaucgcccucagccugcuggccauccucaaggggaucuacaacgucgcgaccugcggccuguucgggcugguguccuuccuccugcugugcggccgcagcugcuccacgaccuacaaggggguguacgagcuccagacccuggagcuggacauggccagccucaacaugaccaugccgcuguccugcacgaagaacaacagccaccacuacaucauggucggcaacgagaccggccuggagcucacccugaccaacacguccaucaucaaccacaaguucugcaaccugagcgacgcccacaagaagaaccucuacgaccacgcccugauguccaucaucagcaccuuccaccuguccauccccaacuucaaccaguacgaggccaugagcugcgacuucaacgggggcaagaucuccgugcaguacaaccucagccacgcguacgccguggacgccgccaaccacugcgggaccaucgcgaacggcguccugcagaccuucaugcggauggccuggggcggguccuacaucgcccuggacagcggcugcggguccugggacugcaucaugacgagcuaccaguaccucaucauccagaacaccaccugggaggaccacugccaguucucccgccccagccccaucggcuaccuggggcugcucagccagcggacccgcgacaucuacaucucccggcgccgccggggcacguucaccuggacccucagcgacuccgagggcaacgagacccccgggggcuacugccugacgcgguggaugcugaucgaggccgagcucaagugcuucgggaacaccgccguggcgaagugcaacgagaagcacgacgaggaguucugcgacaugcugcgccuguucgacuucaacaagcaggccauccggcgccucaaggcccccgcccagaugagcauccagcugaucaacaaggccgugaacgcgcugaucaacgaccagcucaucaugaagaaccaccuccgggacaucaugugcauccccuacugcaacuacuccaaguacugguaccugaaccacaccgucaccgggaagacgagccugccccgcugcuggcugguguccaacggcagcuaccugaacgagacccacuucuccgacgacaucgagcagcaggccgacaacaugaucaccgagcuccugcagaaggaguacaucgaccggcagggcaagaccccgcuggggcucguggaccuguucgucuucagcacguccuucuaccugaucagcaucuuccugcaccucgugaagaucccgacccaccgccacgugaucggcaagcccugccccaagccccaccggcugaaccacauggggaucugcuccugcggccuguacaagcacccggggguccccgugaaguggaagcgcugaggacuagucccuguucccagagcccacuuuuuuuucuuuuuuugaaauaaaauagccugucuuucagaucuaaaaaaaaaaaaaaaaaaaaaaaaaaaaaaaaaaaaaaaaaaaaaaaaaaaaaaaaaaaaaaaaugcaucccccccccccccccccccccccccccccccaaaggcucuuuucagagccaccagaauu

SEQ ID NO: 6155 - RNA, 1749 nt, Artificial Sequence
  mRNA product Design a-1 comprising derived and/or modified sequence from LASV(LASV1000-NIG-2009;Clade II)__AIT17782__GPCstabilized (opt1)
gggagagucccgcagucggcguccagcggcucugcuuguucgugugugugucguugcaggccuuauucaagcuuaccaugggccagaucaucaccuucuuccaggaggugccccacgucaucgaggaggugaugaacaucgugcugaucgcccucagccugcuggccauccucaaggggaucuacaacgucgcgaccugcggccuguucgggcugguguccuuccuccugcugugcggccgcagcugcuccacgaccuacaaggggguguacgagcuccagacccuggagcuggacauggccagccucaacaugaccaugccgcuguccugcacgaagaacaacagccaccacuacaucauggucggcaacgagaccggccuggagcucacccugaccaacacguccaucaucaaccacaaguucugcaaccugagcgacgcccacaagaagaaccucuacgaccacgcccugauguccaucaucagcaccuuccaccuguccauccccaacuucaaccaguacgaggccaugagcugcgacuucaacgggggcaagaucuccgugcaguacaaccucagccacaccuacgcgguggacgccgccaaccacugcgggaccaucgccaacggcguccugcagacguucaugcggauggcguggggcggguccuacaucgcccuggacagcggcugcggguccugggacugcaucaugaccagcuaccaguaccucaucauccagaacaccaccugggaggaccacugccaguucucccgccccagccccaucggcuaccuggggcugcucagccagcggacgcgcgacaucuacaucucccggcgccgccggggcaccuucaccuggacccucagcgacuccgagggcaacgagacgcccgggggcuacugccugacccgguggaugcugaucgaggccgagcucaagugcuucgggaacaccgccguggccaagugcaacgagaagcacgacgaggaguucugcgacaugcugcgccuguucgacuucaacaagcaggcgaucaagcggcucaagacccccgcccagaugagcauccagcugaucaacaaggccgugaacgcccugaucaacgaccagcucaucaugaagaaccaccuccgcgacaucaugugcauccccuacugcaacuacuccaaguacugguaccugaaccacacggucaccgggaagaccagccugccccggugcuggcugguguccaacggcagcuaccugaacgagacccacuucuccgacgacaucgagcagcaggccgacaacaugaucacggagcuccugcagaaggaguacaucgaccgccagggcaagaccccgcuggggcucguggaccuguucgucuucagcaccuccuucuaccugaucagcaucuuccugcaccucgugaagaucccgacccaccggcacguggucggcaagcccugccccaagccccaccgccugaaccacauggggaucugcuccugcggccuguacaagcacccgggggugcccgugaaguggaagcggugaggacuagucccuguucccagagcccacuuuuuuuucuuuuuuugaaauaaaauagccugucuuucagaucuaaaaaaaaaaaaaaaaaaaaaaaaaaaaaaaaaaaaaaaaaaaaaaaaaaaaaaaaaaaaaaaaugcaucccccccccccccccccccccccccccccccaaaggcucuuuucagagccaccagaauu

SEQ ID NO: 6156 - RNA, 1749 nt, Artificial Sequence
  mRNA product Design a-1 comprising derived and/or modified sequence from LASV(LASV221-NIG-2010;Clade II)__AIT17624__GPCstabilized (opt1)
gggagagucccgcagucggcguccagcggcucugcuuguucgugugugugucguugcaggccuuauucaagcuuaccaugggccagaucaucaccuucuuccaggaggugccccacgucaucgaggaggugaugaacaucgugcugaucgcccucagccugcuggccauccucaaggggaucuacaacgucgcgaccugcggccuguucgggcugguguccuuccuccugcugugcggccgcagcugcuccacgaccuacaaggggguguacgagcuccagacccuggagcuggacauggccagccucaacaugaccaugccgcuguccugcacgaagaacaacagccaccacuacaucauggucggcaacgagaccggccuggagcucacccugaccaacacguccaucaucaaccacaaguucugcaaccugagcgacgcccacaagaagaaccucuacgaccacgcccugauguccaucaucagcaccuuccaccuguccauccccaacuucaaccaguacgaggccaugagcugcgacuucaacgggggcaagaucuccgugcaguacaaccucagccacaccuacgcgaucgacgccgccaaccacugcgggaccaucgccaacggcgugcugcagacguucaugcggauggcguggggcggguccuacaucgcccuggacagcggcugcggguccugggacugcaucaugaccagcuaccaguaccucaucauccagaacaccaccugggaggaccacugccaguucucccgccccagccccaucggcuaccuggggcugcucagccagcggacgcgcgacaucuacaucucccggcgccgccggggcaccuucaccuggacccucagcgacuccgagggcaacgagacgcccgggggcuacugccugacccgguggaugcugaucgaggccgagcucaagugcuucgggaacaccgccgucgccaagugcaacgagaagcacgacgaggaguucugcgacaugcugcgccuguucgacuucaacaagcaggcgauccggcgccucaagacccccgcccagaugagcauccagcugaucaacaaggccgugaacgcccugaucaacgaccagcucaucaugaagaaccaccuccgggacaucaugugcauccccuacugcaacuacuccaaguacugguaccugaaccacacggugaccgggaagaccagccugccccgcugcuggcuggucuccaacggcagcuaccugaacgagacccacuucuccgacgacaucgagcagcaggccgacaacaugaucacggagaugcuccagaaggaguacauggaccggcagggcaagaccccgcuggggcugguggaccucuucguguucagcaccuccuucuaccugaucagcaucuuccugcaccuggucaagaucccgacccaccgccacgugaucggcaagcccugccccaagccccaccggcucaaccacauggggaucugcuccugcggccuguacaagcacccgggggugcccgucaaguggaagcgcugaggacuagucccuguucccagagcccacuuuuuuuucuuuuuuugaaauaaaauagccugucuuucagaucuaaaaaaaaaaaaaaaaaaaaaaaaaaaaaaaaaaaaaaaaaaaaaaaaaaaaaaaaaaaaaaaaugcaucccccccccccccccccccccccccccccccaaaggcucuuuucagagccaccagaauu

SEQ ID NO: 6157 - RNA, 1749 nt, Artificial Sequence
  mRNA product Design a-1 comprising derived and/or modified sequence from LASV(LASV237-NIG-2010;Clade II)__AIT17638__GPCstabilized (opt1)
gggagagucccgcagucggcguccagcggcucugcuuguucgugugugugucguugcaggccuuauucaagcuuaccaugggccagaucaucaccuucuuccaggaggugccccacgucaucgaggaggugaugaacaucgugcugaucgcccucagccugcuggccauccucaaggggaucuacaacgucgcgaccugcggccuguucgggcugguguccuuccuccugcugugcggccgcagcugcuccacgaccuacaaggggguguacgagcuccagacccuggagcuggacauggccagccucaacaugaccaugccgcuguccugcacgaagaacaacagccaccacuacaucauggucggcaacgagaccggccuggagcucacccugaccaacacguccaucaucaaccacaaguucugcaaccugagcgacgcccacaagaaggaccucuacgaccacgcccugauguccaucaucagcaccuuccaccuguccauccccaacuucaaccaguacgaggccaugagcugcgacuucaacgggggcaagaucuccgugcaguacaaccucagccacaccuacgcgguggacgccgccaaccacugcgggaccaucgccaacggcguccugcagacguucaugcggauggcguggggcggguccuacaucgcccuggacagcggcugcggguccugggacugcaucaugaccagcuaccaguaccucaucauccagaacaccaccugggaggaccacugccaguucucccgccccagccccaucggcuaccuggggcugcucagccagcggacgcgcgacaucuacaucucccggcgccgccggggcaccuucaccuggacccucagcgacuccgagggcaacgagacgcccgggggcuacugccugacccgguggaugcugaucgaggccgagcucaagugcuucgggaacaccgccguggccaagugcaacgagaagcacgacgaggaguucugcgacaugcugcgccuguucgacuucaacaagcaggcgauccggcgccucaagacccccgcccagaugagcauccagcugaucaacaaggccgugaacgcccugaucaacgaccagcucaucaugaagaaccaccuccgggacaucaugugcauccccuacugcaacuacuccaaguacugguaccugaaccacacggucaccgggaagaccagccugccccgcugcuggcugguguccaacggcagcuaccugaacgagacccacuucuccgacgacaucgagcagcaggccgacaacaugaucacggagcuccugcagaaggaguacauggaccggcagggcaagaccccgcuggggcucguggaccuguucgucuucagcaccuccuucuaccugaucagcaucuuccugcaccucaucaagaucccgacccaccgccacaucacgggcaagcccugccccaagccccaccggcugaaccacauggggaucugcuccugcggccuguacaagcacccgggggugcccgugaaguggaagcgcugaggacuagucccuguucccagagcccacuuuuuuuucuuuuuuugaaauaaaauagccugucuuucagaucuaaaaaaaaaaaaaaaaaaaaaaaaaaaaaaaaaaaaaaaaaaaaaaaaaaaaaaaaaaaaaaaaugcaucccccccccccccccccccccccccccccccaaaggcucuuuucagagccaccagaauu

SEQ ID NO: 6158 - RNA, 1749 nt, Artificial Sequence
  mRNA product Design a-1 comprising derived and/or modified sequence from LASV(LASV253-NIG-2011;Clade II)__AIT17670__GPCstabilized (opt1)
gggagagucccgcagucggcguccagcggcucugcuuguucgugugugugucguugcaggccuuauucaagcuuaccaugggccagaucaucaccuucuuccaggaggugccccacgucaucgaggaggugaugaacaucgugcugaucgcccucagccugcuggccauccucaaggggaucuacaacgucgcgaccugcggccuguucgggcugguguccuuccuccugcugugcggccgcagcugcuccacgaccuacaaggggguguacgagcuccagacccuggagcuggacauggccagccucaacaugaccaugccgcuguccugcacgaagaacaacagccaccacuacaucauggucggcaacgagaccggccuggagcucacccugaccaacacguccaucaucaaccacaaguucugcaaccugagcgacgcccacaagaagaaccucuacgaccacgcccugauguccaucaucagcaccuuccaccuguccauccccaacuucaaccaguacgaggccaugagcugcgacuucaacgggggcaagaucuccgugcaguacaaccucagccacaccuacgcgguggacgccgccaaccacugcgggaccaucgccaacggcguccugcagacguucaugcggauggcguggggcggguccuacaucgcccuggacagcggcugcggguccugggacugcaucaugaccagcuaccaguaccucaucauccagaacaccaccugggaggaccacugccaguucucccgccccagccccaucggcuaccuggggcugcucagccagcggacgcgcgacaucuacaucucccggcgccgccggggcaccuucaccuggacccucagcgacuccgagggcaacgagacgcccgggggcuacugccugacccgguggaugcugaucgaggccgagcucaagugcuucgggaacaccgccguggccaagugcaacgagaagcacgacgaggaguucugcgacaugcugcgccuguucgacuucaacaagcaggcgauccggcgccucaaggcccccgcccagaugagcauccagcugaucaacaaggccgugaacgcccugaucaacgaccagcucaucaugaagaaccaccuccgggacaucaugugcaucccguacugcaacuacuccaaguacugguaccugaaccacaccgucacggggcgcaccagccugccccggugcuggcugguguccaacggcagcuaccugaacgagacccacuucuccgacgacaucgagcagcaggcggacaacaugaucaccgagcuccugcagaaggaguacaucgaccgccagggcaagacgccccuggggcucguggaccuguucgucuucagcaccuccuucuaccugaucagcaucuuccugcaccucgugaagaucccgacccaccggcacaucaucggcaagcccugccccaagccccaccgccugaaccacauggggaucugcuccugcggccuguacaagcacccgggggugcccgucaaguggaagcggugaggacuagucccuguucccagagcccacuuuuuuuucuuuuuuugaaauaaaauagccugucuuucagaucuaaaaaaaaaaaaaaaaaaaaaaaaaaaaaaaaaaaaaaaaaaaaaaaaaaaaaaaaaaaaaaaaugcaucccccccccccccccccccccccccccccccaaaggcucuuuucagagccaccagaauu

SEQ ID NO: 6159 - RNA, 1749 nt, Artificial Sequence
  mRNA product Design a-1 comprising derived and/or modified sequence from LASV(LASV254-NIG-2011;Clade II)__AIT17674__GPCstabilized (opt1)
gggagagucccgcagucggcguccagcggcucugcuuguucgugugugugucguugcaggccuuauucaagcuuaccaugggccagaucaucaccuucuuccaggaggugccccacgucaucgaggaggugaugaacaucgugcugaucgcccucagccugcuggccauccucaaggggaucuacaacgucgcgaccugcggccuguucgggcugguguccuuccuccugcugugcggccgcagcugcuccacgaccuacaaggggguguacgagcuccagacccuggagcuggacaugaccaaccucaacaugacgaugccgcugagcugcaccaagaacaacucccaccacuacaucauggucggcaacgagaccggccuggagcucacccugacgaacaccagcaucaucaaccacaaguucugcaaccuguccgacgcccacaagaagaaccucuacaaccacgcccugaugagcaucaucuccaccuuccaccugagcauccccaacuucaaccaguacgaggccauguccugcgacuucaacgggggcaagaucagcgugcaguacaaccucucccacagcuacgccguggacgcggccaaccacugcgggaccaucgccaacggcguccugcagacguucaugcggauggccuggggcggguccuacaucgcgcuggacagcggcugcgggaacugggacugcaucaugaccuccuaccaguaccucaucauccagaacaccaccugggaggaccacugccaguucagccgccccucccccaucggcuaccuggggcugcucagccagcggacgcgcgacaucuacaucagccggcgccgccggggcaccuucaccuggacccucuccgacagcgagggcaacgagacgcccgggggcuacugccugacccgguggaugcugaucgaggccgagcucaagugcuucgggaacaccgccguggccaagugcaacgagaagcacgacgaggaguucugcgacaugcugcgccuguucgacuucaacaagcaggccauccggcgccucaagacccccgcgcaggccaacauccagcugaucaacaaggccgugaacgcccugaucaacgaccagcucaucaugaagaaccaccuccgggacaucaugugcauccccuacugcaacuacuccaaguacugguaccugaaccacacggucaccgggaagaccagccugccccgcugcuggcugguguccaacggcagcuaccugaacgagacccacuucuccgacgacaucgagcagcaggccgacaacaugaucacggagcuccugcagaaggaguacauggaccggcagggcaagaccccgcuggggcucguggaccuguucgucuucagcaccuccuucuaccugaucagcaucuuccugcaccucgugaagaucccgacccaccgccacgugaucggcaagcccugccccaagccccaccggcugaaccacauggggaucugcuccugcggccuguacaagcacccggggguccccgugaaguggaagcgcugaggacuagucccuguucccagagcccacuuuuuuuucuuuuuuugaaauaaaauagccugucuuucagaucuaaaaaaaaaaaaaaaaaaaaaaaaaaaaaaaaaaaaaaaaaaaaaaaaaaaaaaaaaaaaaaaaugcaucccccccccccccccccccccccccccccccaaaggcucuuuucagagccaccagaauu

SEQ ID NO: 6160 - RNA, 1749 nt, Artificial Sequence
  mRNA product Design a-1 comprising derived and/or modified sequence from LASV(Nig08-A19;Clade III)__ADU56618__GPCstabilized (opt1)
gggagagucccgcagucggcguccagcggcucugcuuguucgugugugugucguugcaggccuuauucaagcuuaccaugggccagaucgugaccuucuuccaggaggucccccacgugaucgaggaggugaugaacaucguccugaucgcccucagcauccuggccauccugaaggggcucuacaacaucgcgaccugcggccugaucgggcuggugacguuccuccugcuguccggccgcagcugcuccaugaccuacaaggggguguacgagcuccagacccuggagcugaacaugaacacccucaacaugacgaugccgcugagcugcaccaagaacaacucccaccacuacaucauggucggcaacgagaccggccuggagcucacccugacgaacaccagccugcuccaccacaaguucugcaaccuguccgacgcccacaagaagaaccuguacgaccacacccucaugagcaucaucuccaccuuccaccugagcauccccaacuucaaccaguacgaggccauguccugcgacuucaacgggggcaagaucacggugcaguacaaccugagccacuccuacgccaucgacgccgcgaaccacugcgggaccguggccaacggcguccuccagaccuucaugcggauggccuggggcgggagcuacaucgcccuggacuccggcugcgggaagugggacugcaucaugaccagcuaccaguaccugaucauccagaacacgaccugggaggaccacugccaguucucccggcccagccccaucggcuaccucgggcugcugucccagcgcacccgggacaucuacaucagccgccggcgccggggcaccuucacguggacccugagcgacuccgagggcaacgagacccccgggggcuacugccucacccgcuggaugcugaucgaggcggagcugaagugcuucgggaacacggccguggccaagugcaacgagaagcacgacgaggaguucugcgacaugcuccggcuguucgacuucaacaagcaggccauccgccggcugaaggcccccgcgcagaugagcauccagcucaucaacaaggccgugaacgcccugaucaacgaccagcugaucaugaagaaccaccuccgcgacaucaugugcauccccuacugcaacuacuccaaguacugguaccugaaccacaccagcaccgggcggaccucccugccccgcugcuggcucgucagcaacggcuccuaccugaacgagacgcacuucagcgacgacaucgagcagcaggccgacaacaugaucaccgagaugcugcagaaggaguaccucgaccggcagggcaagaccccgcuggggcugguggaccuguucguguucuccaccagcuucuaccucaucuccaucuuccugcaccuggucaagaucccgacgcaccgccacaucgugggcaagcccugccccaagccccaccggcucaaccacauggggaucugcagcugcggccuguacaagcagccgggggugcccguccgcuggaagcggugaggacuagucccuguucccagagcccacuuuuuuuucuuuuuuugaaauaaaauagccugucuuucagaucuaaaaaaaaaaaaaaaaaaaaaaaaaaaaaaaaaaaaaaaaaaaaaaaaaaaaaaaaaaaaaaaaugcaucccccccccccccccccccccccccccccccaaaggcucuuuucagagccaccagaauu

SEQ ID NO: 6161 - RNA, 1752 nt, Artificial Sequence
  mRNA product Design a-1 comprising derived and/or modified sequence from LASV(G1180-SLE-2010;Clade IV)__AIT17168__GPCstabilized (opt1)
gggagagucccgcagucggcguccagcggcucugcuuguucgugugugugucguugcaggccuuauucaagcuuaccaugggccagaucgugaccuucuuccaggaggucccccacgugaucgaggaggugaugaacaucguccugaucgcccucagcauccuggccgugcugaaggggcucuacaacuucgcgaccugcggccugguggggcugcucaccuuccugcugcucugcggccgcuccugcaccgccagccgguacaagggggucuacgagcugcagacccuggagcucaacauggagacccugaacaugacgaugccgcuguccugcaccaagaacaacagccaccacuacaucauggugggcaacgagaccggccucgagcugacccugacgaacaccuccaucaucaaccacaaguucugcaaccucagcgacgcccacaagaagaaccuguacgaccacgcccugauguccaucaucagcaccuuccaccucuccauccccaacuucaaccaguacgaggccaugagcugcgacuucaacgggggcaagaucuccgugcaguacaaccugagccacuccuacgcgggggacgccgccaaccacugcggcaccgucgccaacggggugcugcagacguucaugcgcauggcguggggcggcagcuacaucgcccucgacuccgggugcggcagcugggacugcaucaugaccuccuaccaguaccugaucauccagaacaccaccugggaggaccacugccaguucagccggcccucccccaucggguaccugggccuccugagccagcgcacgcgggacaucuacaucagccgccggcgccggggcaccuucaccuggacccuguccgacagcgaggggaaggacacgccgggcggguacugccugacccgcuggaugcucaucgaggccgagcugaagugcuucggcaacaccgccguggccaagugcaacgagaagcacgacgaggaguucugcgacaugcugcggcuguucgacuucaacaagcaggcgauccagcgccugaaggcccccgcccagauguccauccagcugaucaacaaggccgucaacgcccucaucaacgaccagcugaucaugaagaaccaccuccgggacaucaugugcauccccuacugcaacuacagcaaguacugguaccucaaccacaccacgaccggcaagaccucccugcccaagugcuggcuggugagcaacggcuccuaccucaacgagacccacuucagcgacgacaucgagcagcaggcggacaacaugaucacggagaugcugcagaaggaguacauggagcgccaggggaagacgccccugggccucguggaccuguucgucuucuccaccagcuucuaccugaucuccaucuuccugcaccucgugaagaucccgacccaccggcacaucgugggcaagagcugccccaagccccaccgccugaaccacauggggaucugcuccugcgggcuguacaagcagcccggcgucccggugaaguggaagcggugaggacuagucccuguucccagagcccacuuuuuuuucuuuuuuugaaauaaaauagccugucuuucagaucuaaaaaaaaaaaaaaaaaaaaaaaaaaaaaaaaaaaaaaaaaaaaaaaaaaaaaaaaaaaaaaaaugcaucccccccccccccccccccccccccccccccaaaggcucuuuucagagccaccagaauu

SEQ ID NO: 6162 - RNA, 1752 nt, Artificial Sequence
  mRNA product Design a-1 comprising derived and/or modified sequence from LASV(G1442-SLE-2011;Clade IV)__AIT17180__GPCstabilized (opt1)
gggagagucccgcagucggcguccagcggcucugcuuguucgugugugugucguugcaggccuuauucaagcuuaccaugggccagaucgugaccuucuuccaggaggucccccacgugaucgaggaggugaugaacaucguccugaucgcccucagcauccuggccgugcugaaggggcucuacaacguggcgaccugcggccugaucgggcuggucacguuccuccugcugugcggccgcuccugcaccaccacccucuacaaggggguguacgagcugcagacgcuggagcucaacauggagacccugaacaugaccaugccgcugagcugcaccaagaacaacucccaccacuacauccgggugggcaacgagacgggccucgagcugacccugaccaacaccagcaucaucaaccacaaguucugcaaccucuccgacgcccacaagaagaaccuguacgaccacgcccugaugagcaucaucuccacguuccaccucagcauccccaacuucaaccaguacgaggccauguccugcgacuucaacgggggcaagaucagcguccaguacaaccugucccacagcuacgccggggacgcggccaaccacugcggcaccguggccaacggggugcugcagaccuucaugcgcauggccuggggcggcuccuacaucgcgcucgacagcgggugcggcaacugggacugcaucaugaccuccuaccaguaccugaucauccagaacacgaccugggacgaccacugccaguucagccgccccucccccaucggguaccugggccuccugagccagcggacccgcgacgucuacaucucccggcgccgccggggcaccuucacguggacccugagcgacagcgaggggaaggacaccccgggcggguacugccugacccgguggaugcucaucgaggccgagcugaagugcuucggcaacacggccguggccaagugcaacgagaagcacgacgaggaguucugcgacaugcugcgccucuucgacuucaacaagcaggccauccagcggcugaaggcgcccgcccagauguccauccagcugaucaacaaggccgugaacgcccucaucaacgaccagcugaucaugaagaaccaccuccgcgacaucaugugcauccccuacugcaacuacagcaaguacugguaccugaacaacaccgccaccggcaagaccucccugcccaagugcuggcugaucagcaacggcuccuaccucaacgagacgcacuucagcgacgacaucgagcaggaggcggacaacaugaucaccgagaugcugcagaaggaguacauggagcggcaggggaagacgccccugggccucgucgaccuguucguguucuccaccagcuucuaccugaucuccaucuuccugcaccucgugaagaucccgacccaccgccacaucgucggcaagagcugccccaagccccaccggcugaaccacauggggaucugcuccugcgggcuguacaagcagcccggcgugccggugcgcuggaagcggugaggacuagucccuguucccagagcccacuuuuuuuucuuuuuuugaaauaaaauagccugucuuucagaucuaaaaaaaaaaaaaaaaaaaaaaaaaaaaaaaaaaaaaaaaaaaaaaaaaaaaaaaaaaaaaaaaugcaucccccccccccccccccccccccccccccccaaaggcucuuuucagagccaccagaauu

SEQ ID NO: 6163 - RNA, 1752 nt, Artificial Sequence
  mRNA product Design a-1 comprising derived and/or modified sequence from LASV(G3010-SLE-2013;Clade IV)__AIT17344__GPCstabilized (opt1)
gggagagucccgcagucggcguccagcggcucugcuuguucgugugugugucguugcaggccuuauucaagcuuaccaugggccagaucgugaccuucuuccaggaggucccccacgugaucgaggaggugaugaacaucguccugaucgcccucagcauccuggccgugcugaaggggcucuacaacuucgcgaccugcggccugguggggcuggucacguuccuccugcugugcggccgcuccugcaccaccagccucuacaaggggguguacgagcugcagacccuggagcucaacauggagacgcugaacaugaccaugccgcuguccugcaccaagaacaacagccaccacuacaucauggugggcaacgagaccggccucgagcugacgcugaccaacaccuccaucaucaaccacaaguucugcaaccucagcgacgcccacaagaagaaccuguacaaccacgcccugauguccaucaucagcaccuuccaccucuccauccccaacuucaaccaguacgaggccaugagcugcgacuucaacgggggcaagaucuccguccaguacaaccugagccacuccuacgccggggacgcggccagccacugcggcacgguggccaacggggugcugcagaccuucaugcggauggccuggggcggcuccuacaucgcgcucgacagcgggugcggcaagugggacugcaucaugaccuccuaccaguaccugaucauccagaacaccacgugggaggaccacugccaguucagccgccccucccccaucggguaccugggccuccugagccagcggacccgcgacaucuacaucagccggcgccgccggggcaccuucaccuggacgcuguccgacagcgaggggaaggacaccccgggcggguacugccugacccgguggaugcucaucgaggccgagcugaagugcuucggcaacaccgccgucgccaagugcaacgagaagcacgacgaggaguucugcgacaugcugcgccucuucgacuucaacaagcaggccauccagcggcugaagacgcccgcgcagauguccauccagcugaucaacaaggccgugaacgcccucaucaacgaccagcugaucaugaagaaccaccuccgcgacaucaugugcauccccuacugcaacuacagcaaguacugguaccugaaccacaccaccaccggcaagacgucccugcccaagugcuggcuggugagcaacggcuccuaccucaacgagacccacuucagcgacgacaucgagcagcaggccgacaacaugaucaccgagaugcugcagaaggaguacauggagcggcaggggaagacgccccugggccucgucgaccuguucguguucuccaccagcuucuaccugaucuccaucuuccugcaccucgugaagaucccgacccaccgccacaucgucggcaagagcugccccaagccccaccggcugaaccacauggggaucugcuccugcgggcuguacaagcagcccggcgugccggugcgcuggaagcggugaggacuagucccuguucccagagcccacuuuuuuuucuuuuuuugaaauaaaauagccugucuuucagaucuaaaaaaaaaaaaaaaaaaaaaaaaaaaaaaaaaaaaaaaaaaaaaaaaaaaaaaaaaaaaaaaaugcaucccccccccccccccccccccccccccccccaaaggcucuuuucagagccaccagaauu

SEQ ID NO: 6164 - RNA, 1752 nt, Artificial Sequence
  mRNA product Design a-1 comprising derived and/or modified sequence from LASV(G502-SLE-2009;Clade IV)__AIT17126__GPCstabilized (opt1)
gggagagucccgcagucggcguccagcggcucugcuuguucgugugugugucguugcaggccuuauucaagcuuaccaugggccagaucgugaccuucuuccaggaggucccccacgugaucgaggaggugaugaacaucguccugaucgcccucagcauccuggccgugcugaaggggcucuacaacuucgcgaccugcggccugguggggcugcucacguuccugcugcucugcggccgcuccugcaccaccgggcuguacaagggcgucuacgagcugcagacccucgagcugaacauggagacgcugaacaugaccaugccgcucagcugcaccaagaacaacucccaccacuacaucauggugggcaacgagaccgggcuggagcugacgcucaccaacaccagcaucaucaaccacaaguucugcaaccuguccgacgcccacaagaagaaccuguacgaccacgcccucaugagcaucaucuccaccuuccaccugagcauccccaacuucaaccaguacgaggccauguccugcgacuucaacggcgggaagaucagcgugcaguacaaccugucccacagcuacgccggcgacgcggccgaccacugcgggacggucgccaacggcgugcuccagaccuucaugcggauggccuggggcggguccuacaucgcgcuggacagcggcugcgggcggugggacugcaucaugaccuccuaccaguaccugaucauccagaacaccacgugggaggaccacugccaguucagccgccccucccccaucggcuaccucggccugcugagccagcggacccgcgacaucuacaucucccggcgccgccgggggaccuucaccuggacgcugagcgacagcgagggcaaggacacccccgggggcuacugccucacccgguggaugcugaucgaggccgagcugaagugcuucgggaacaccgccguggccaagugcaacgagaagcacgacgaggaguucugcgacaugcuccgccuguucgacuucaacaagcaggccauccagcggcugaaggcgcccgcccagauguccauccagcucaucaacaaggccgucaacgcccugaucaacgaccagcuggugaugaagaaccaccuccgcgacaucaugugcauccccuacugcaacuacagccgguacugguaccugaaccacacgaccaccggccgcaccucccugcccaagugcuggcucgugagcaacggguccuaccugaacgagacgcacuucagcgacgacaucgagcagcaggccgacaacaugaucaccgagaugcugcagaaggaguacauggagcggcagggcaagaccccgcucgggcuggucgaccuguucguguucuccaccagcuucuaccugaucuccaucuuccuccaccuggugaagaucccgacgcaccgccacaucgucggcaagagcugccccaagccccaccggcugaaccacauggggaucugcuccugcggccucuacaagcagcccggcgugccggugaaguggaagcgcugaggacuagucccuguucccagagcccacuuuuuuuucuuuuuuugaaauaaaauagccugucuuucagaucuaaaaaaaaaaaaaaaaaaaaaaaaaaaaaaaaaaaaaaaaaaaaaaaaaaaaaaaaaaaaaaaaugcaucccccccccccccccccccccccccccccccaaaggcucuuuucagagccaccagaauu

SEQ ID NO: 6165 - RNA, 1752 nt, Artificial Sequence
  mRNA product Design a-1 comprising derived and/or modified sequence from LASV(G733-SLE-2010;Clade IV)__AIT17154__GPCstabilized (opt1)
gggagagucccgcagucggcguccagcggcucugcuuguucgugugugugucguugcaggccuuauucaagcuuaccaugggccagaucgugaccuucuuccaggaggucccccacgugaucgaggaggugaugaacaucguccugaucgcccucagcauccuggccgugcugaaggggcucuacaacuucgcgaccugcggcaucguggggcuggucuccuuccugcuccugugcggccgcagcugcacgaccucccuguacaaggggguguacgagcuccagacccuggagcugaacauggagacccucaacaugacgaugccgcugagcugcaccaagaacaacucccaccacuacaucauggugggcaacgagaccggccuggagcucacccugacgaacaccagcaucaucaaccacaaguucugcaaccuguccgacgcccacaagaagaaccucuacgaccacgcccugaugagcaucaucuccaccuuccaccugagcauccccaacuucaaccaguacgaggccauguccugcgacuucaacgggggcaagaucagcguccaguacaaccucucccacagcuacgccggggacgcggccaaccacugcggcaccaucgccaacggggugcugcagacguucaugcggauggccuggggcggcuccuacaucgcgcuggacagcgggugcgaccggugggacugcaucaugaccuccuaccaguaccucaucauccagaacaccaccugggaggaccacugccaguucagccgccccucccccaucggcuaccuggggcugcucagccagcggacgcgcgacaucuacaucagccggcgccgccggggcaccuucaccuggacccucuccgacagcgagggcaaggacacgcccgggggcuacugccugacccgguggaugcugaucgaggccgagcucaagugcuucgggaacaccgccguggccaagugcaacgagaagcacgacgaggaguucugcgacaugcugcgccuguucgacuucaacaagcaggccauccagcggcucaaggcgcccgcccagauguccauccagcugaucaacaaggccgucaacgcccugaucaacgaccagcucaucaugaagaaccaccuccgcgacaucaugugcauccccuacugcaacuacagcaaguacugguaccugaaccacaccacgaccgggaagaccucccugcccaagugcuggcuggugagcaacggcuccuaccugaacgagacccacuucagcgacgacaucgagcagcaggccgacaacaugaucacggagaugcuccagaaggaguacauggagcggcagggcaagaccccgcuggggcugguggaccucuucgucuucuccaccagcuucuaccugaucuccaucuuccugcaccuggugaagaucccgacccaccgccacguggucggcaagagcugccccaagccccaccggcucaaccacauggggaucugcuccugcggccuguacgggcagcccggcgugccggugaaguggaagcgcugaggacuagucccuguucccagagcccacuuuuuuuucuuuuuuugaaauaaaauagccugucuuucagaucuaaaaaaaaaaaaaaaaaaaaaaaaaaaaaaaaaaaaaaaaaaaaaaaaaaaaaaaaaaaaaaaaugcaucccccccccccccccccccccccccccccccaaaggcucuuuucagagccaccagaauu

SEQ ID NO: 6166 - RNA, 1752 nt, Artificial Sequence
  mRNA product Design a-1 comprising derived and/or modified sequence from MOPV/LASV reassortant(IGS-1;Clade IV)__AFY05576__GPCstabilized (opt1)
gggagagucccgcagucggcguccagcggcucugcuuguucgugugugugucguugcaggccuuauucaagcuuaccaugggccagaucgugaccuucuuccaggaggucccccacgugaucgaggaggugaugaacaucguccugaucgcccucagcgugcuggccgugcugaaggggcucuacaacuucgcgaccugcggccuggucgggcuggugacguuccuccugcugugcggccgcuccugcaccaccagccucuacaaggggguguacgagcugcagacccuggagcucaacauggagacgcugaacaugaccaugccgcuguccugcaccaagaacaacagccaccacuacaucauggucggcaacgagaccggccucgagcugacgcugaccaacaccuccaucaucaaccacaaguucugcaaccucagcgacgcccacaagaagaaccuguacgaccacgcccugauguccaucaucagcaccuuccaccucuccauccccaacuucaaccaguacgaggccaugagcugcgacuucaacgggggcaagaucuccgugcaguacaaccugagccacuccuacgccggggacgcggccaaccacugcggcacgguggccaacgggguccugcagaccuucaugcggauggccuggggcggcagcuacaucgcgcucgacuccgggugcggcaacugggacugcaucaugaccagcuaccaguaccugaucauccagaacaccacgugggaggaccacugccaguucucccggcccagccccaucggguaccugggccuccugucccagcgcacccgggacaucuacaucagccgccggcgccggggcaccuucaccuggacgcugagcgacuccgagggggaggacaccccgggcggguacugccugacccgcuggaugcucaucgaggccgagcugaagugcuucggcaacaccgccguggccaagugcaacgagaagcacgacgaggaguucugcgacaugcugcggcuguucgacuucaacaagcaggccauccagcgccugaaggcgcccgcccagaugagcauccagcugaucaacaaggccgugaacgcccucaucaacgaccagcugaucaugaagaaccaccuccgggacaucaugugcauccccuacugcaacuacuccaaguacugguaccucaaccacacgaccaccggccgcaccagccugcccaagugcuggcuggucuccaacggcagcuaccucaacgagacgcacuucuccgacgacaucgagcagcaggccgacaacaugaucaccgagaugcugcagaaggaguacauggagcggcaggggaagacgccccugggccucguggaccuguucguguucagcaccuccuucuaccugaucagcaucuuccugcaccucgucaagaucccgacccaccgccacaucguggggaaguccugccccaagccccaccggcugaaccacaugggcaucugcagcugcgggcuguacaagcagcccggcgugccggucaaguggaagcgcugaggacuagucccuguucccagagcccacuuuuuuuucuuuuuuugaaauaaaauagccugucuuucagaucuaaaaaaaaaaaaaaaaaaaaaaaaaaaaaaaaaaaaaaaaaaaaaaaaaaaaaaaaaaaaaaaaugcaucccccccccccccccccccccccccccccccaaaggcucuuuucagagccaccagaauu

SEQ ID NO: 6167 - RNA, 1752 nt, Artificial Sequence
  mRNA product Design a-1 comprising derived and/or modified sequence from LASV(LM765-SLE-2012;Clade IV)__AIT17814__GPCstabilized (opt1)
gggagagucccgcagucggcguccagcggcucugcuuguucgugugugugucguugcaggccuuauucaagcuuaccaugggccagaucgugaccuucuuccaggaggucccccacgugaucgaggaggugaugaacaucguccugaucgcccucagcauccuggccgugcugaaggggcucuacaacuucgcgaccugcggccugguggggcuggucacguuccuccugcugugcggccgcuccugcaccaccagccucuacaaggggguguacgagcugcagacccuggagcucaacauggagacgcugaacaugaccaugccgcuguccugcaccaagaacaacagccaccacuacaucauggugggcaacgagaccggccucgagcugacgcugaccaacaccuccaucaucgaccacaaguucugcaaccucagcgacgcccaccggaagaaccuguacgaccacgcccugauguccaucaucagcaccuuccaccucuccauccccaacuucaaccaguacgaggccaugagcugcgacuucaacgggggcaagaucuccguccaguacaaccugagccacuccuacgccaaggacgcggccgaccacugcgggacgguggccaacggcgugcugcagaccuucaugcgcauggccuggggcgggagcuacaucgcgcucgacuccggcugcgggcgcugggacugcaucaugaccagcuaccaguaccugaucauccagaacaccacgugggaggaccacugccaguucucccggcccagccccaucggcuaccuggggcuccugucccagcgcacccgggacaucuacaucagccgccggcgccggggcaccuucaccuggacgcugagcgacuccgagggcaaggacacccccgggggcuacugccugacccgcuggaugcucaucgaggccgagcugaagugcuucgggaacaccgccgucgccaagugcaacgagaagcacgacgaggaguucugcgacaugcugcggcuguucgacuucaacaagcaggccauccagcgccugaaggcgcccgcccagaugagcauccagcugaucaacaaggccgugaacgcccucaucaacgaccagcugaucaugaagaaccaccuccgggacaucaugugcauccccuacugcaacuacuccaaguacugguaccucaaccacacgaccaccgggaagaccagccugcccaagugcuggcugguguccaacggcagcuaccucaacgagacgcacuucuccgacgacaucgagcagcaggccgacaacaugaucaccgagaugcugcagaaggaguacauggagcgccagggcaagaccccgcuggggcucgucgaccuguucguguucagcaccuccuucuaccugaucagcaucuuccugcaccucgugaagaucccgacgcaccggcacaucgucggcaagcccugccccaagccccaccgccugaaccacauggggaucugcuccugcggccuguacaagcagccgggggugcccgugaaguggaagcggugaggacuagucccuguucccagagcccacuuuuuuuucuuuuuuugaaauaaaauagccugucuuucagaucuaaaaaaaaaaaaaaaaaaaaaaaaaaaaaaaaaaaaaaaaaaaaaaaaaaaaaaaaaaaaaaaaugcaucccccccccccccccccccccccccccccccaaaggcucuuuucagagccaccagaauu

SEQ ID NO: 6168 - RNA, 1752 nt, Artificial Sequence
  mRNA product Design a-1 comprising derived and/or modified sequence from LASV(LM776-SLE-2012;Clade IV)__AIT17824__GPCstabilized (opt1)
gggagagucccgcagucggcguccagcggcucugcuuguucgugugugugucguugcaggccuuauucaagcuuaccaugggccagaucgugaccuucuuccaggaggucccccacgugaucgaggaggugaugaacaucguccugaucgcccucagcauccuggccgugcugaaggggcucuacaacuucgcgaccugcggccugguggggcuggucacguuccuccugcugugcggccgcuccugcaccaccagcguguacaaggggguguacgagcuccagacccuggagcugaacauggagacgcucaacaugaccaugccgcuguccugcaccaagaacaacagccaccacuacaucauggucggcaacgagaccggccuggagcucacgcugaccaacaccuccaucaucaaccacaaguucugcaaccugagcgacgcccacaagaagaaccucuacgaccacgcccugauguccaucaucagcaccuuccaccuguccauccccaacuucaaccaguacgaggccaugagcugcgacuucaacgggggcaagaucuccgugcaguacaaccucagccacuccuacgccggggacgcggccaaccacugcggcacgguggccaacgggguccugcagaccuucaugcggauggccuggggcggcagcuacaucgcgcuggacuccgggugcggcaagugggacugcaucaugaccagcuaccaguaccucaucauccagaacaccacgugggaggaccacugccaguucucccgccccagccccaucggguaccugggccugcucucccagcggacccgcgacaucuacaucagccggcgccgccggggcaccuucaccuggacgcucagcgacuccgaggggaaggacaccccgggcggguacugccugacccgguggaugcugaucgaggccgagcucaagugcuucggcaacaccgccguggccaagugcaacgagaagcacgacgaggaguucugcgacaugcugcgccuguucgacuucaacaagcaggccauccagcggcucaaggcgcccgcccagaugagcauccagcugaucaacaaggccgugaacgcccugaucaacgaccagcucaucaugaagaaccaccuccgcgacaucaugugcauccccuacugcaacuacuccaaguacugguaccugaaccacacgaccaccggcaagaccagccugcccaagugcuggcuggucuccaacggcagcuaccugaacgagacgcacuucuccgacgacaucgagcagcaggccgacaacaugaucaccgagaugcuccagaaggaguacauggagcggcaggggaagacgccccugggccugguggaccucuucguguucagcaccuccuucuaccugaucagcaucuuccugcaccuggucaagaucccgacccaccgccacaucguggggaaguccugccccaagccccaccggcucaaccacaugggcaucugcagcugcgggcuguacaagcagcccggcgugccgguccgcuggaagcggugaggacuagucccuguucccagagcccacuuuuuuuucuuuuuuugaaauaaaauagccugucuuucagaucuaaaaaaaaaaaaaaaaaaaaaaaaaaaaaaaaaaaaaaaaaaaaaaaaaaaaaaaaaaaaaaaaugcaucccccccccccccccccccccccccccccccaaaggcucuuuucagagccaccagaauu

SEQ ID NO: 6169 - RNA, 1752 nt, Artificial Sequence
  mRNA product Design a-1 comprising derived and/or modified sequence from LASV(Mad39;Clade IV)__ANH09722__GPCstabilized (opt1)
gggagagucccgcagucggcguccagcggcucugcuuguucgugugugugucguugcaggccuuauucaagcuuaccaugggccagaucgugaccuucuuccaggaggucccccacgugaucgaggaggugaugaacaucguccugaucgcccucagcauccuggccgugcugaaggggcucuacaacguggcgaccugcggccugaucgggcuggucacguuccuccugcugugcggccgcuccugcaccaccacccucuacaaggggguguacgagcugcaggcccuggagcucaacauggagacgcugaacaugaccaugccgcugagcugcaccaagaacaacucccaccacuacauccgggugggcaacgagaccggccucgagcugacgcugaccaacaccagccucaucaaccacaaguucugcaaccuguccgacgcccacaagaagaaccuguacgaccacgcccucaugagcaucaucuccaccuuccaccugagcauccccaacuucaaccaguacgaggccauguccugcgacuucaacgacgggaagaucagcguccaguacaaccugucccacacguacgcgggcgacaccgccaaccacugcgggaccguggccaacggcgugcuccagaccuucaugcgcauggccuggggcgggagcuacaucgcgcuggacuccggcugcgggggcugggacugcaucaugacgagcuaccaguaccugaucauccagaacaccaccugggaggaccacugccaguucucccggcccagccccaucggguaccucggccugcugucccagcggacccgcgacaucuacaucagccggcgccgccggggcacguucaccuggacccuguccgacagcgaggggaaggacaccccgggcggguacugccucacgcgguggaugcugaucgaggccgagcugaagugcuucggcaacaccgccgucgccaagugcaacgagaagcacgacgaggaguucugcgacaugcuccgccuguucgacuucaacaagcaggccauccagcggcugaaggcgcccgcccagaugagcauccagcucaucaacaaggccgugaacgcccugaucaacgaccagcugaucaugaagaaccaccuccgcgacaucaugugcauccccuacugcaacuacuccaaguacugguaccugaaccacaccgugaccggcaagacgagccugcccaagugcuggcucgucuccaacggcagcuaccugaacgagacccacuucuccgacgacaucgagcagcaggccgacaacaugaucaccgagaugcugcagaaggaguacauggagcggcaggggaagacgccccucggccugguggaccuguucguguucagcaccuccuucuaccugaucagcaucuuccuccaccuggucaagaucccgacccaccgccacgugguggggaagcccugccccaagccccaccggcugaaccacaugggcaucugcuccugcggguucuacaagcagccgggcguccccgugcgcuggaagcggugaggacuagucccuguucccagagcccacuuuuuuuucuuuuuuugaaauaaaauagccugucuuucagaucuaaaaaaaaaaaaaaaaaaaaaaaaaaaaaaaaaaaaaaaaaaaaaaaaaaaaaaaaaaaaaaaaugcaucccccccccccccccccccccccccccccccaaaggcucuuuucagagccaccagaauu

SEQ ID NO: 6170 - RNA, 1752 nt, Artificial Sequence
  mRNA product Design a-1 comprising derived and/or modified sequence from LASV(Z0947-SLE-2011;Clade IV)__AIT17840__GPCstabilized (opt1)
gggagagucccgcagucggcguccagcggcucugcuuguucgugugugugucguugcaggccuuauucaagcuuaccaugggccagaucgugaccuucuuccaggaggucccccacgugaucgaggaggugaugaacaucguccugaucgcccucagcauccuggccgugcugaaggggcucuacaacuucgcgaccugcggccugguggggcuggucacguuccuccugcugugcggccgcuccugcaccaucagccucuacaaggggguguacgagcugcagacccuggagcucaacauggagacccugaacaugacgaugccgcuguccugcaccaagaacaacagccaccacuacaucauggugggcaacgagaccggccucgagcugacccugacgaacaccuccaucaucaaccacaaguucugcaaccucagcgacgcccacaagaagaaccuguacgaccacgcccugauguccaucaucagcaccuuccaccucuccauccccaacuucaaccaguacgaggccaugagcugcgacuucaacgggggcaagaucuccguccaguacaaccugagccacuccuacgccggggacgcggccaaccacugcggcaccguggccaacggggugcugcagacguucaugcggauggccuggggcggcagcuacaucgcgcucgacuccgggugcgaccggugggacugcaucaugaccagcuaccaguaccugaucauccagaacaccaccugggaggaccacugccaguucucccgccccagccccaucggcuaccuggggcuccugucccagcggacgcgcgacaucuacaucagccggcgccgccggggcaccuucaccuggacccugagcgacuccgagggcaaggacacgcccgggggcuacugccugacccgguggaugcucaucgaggccgagcugaagugcuucgggaacaccgccgucgccaagugcaacgagaagcacgacgaggaguucugcgacaugcugcgccucuucgacuucaacaagcaggccauccagcggcugaaggcgcccgcccagaugagcauccagcugaucaacaaggccgugaacgcccucaucaacgaccagcugaucaugaagaaccaccuccgcgacaucaugugcauccccuacugcaacuacuccaaguacugguaccugaaccacaccacgaccgggaagaccagccugcccaagugcuggcugguguccaacggcagcuaccucaacgagacccacuucuccgacgacaucgagcagcaggccgacaacaugaucacggagaugcugcagaaggaguacauggagcggcagggcaagaccccgcuggggcucgucgaccuguucguguucagcaccuccuucuaccugaucagcaucuuccugcaccucgugaagaucccgacccaccgccacaucgucggcaagcccugccccaagccccaccggcugaaccacauggggaucugcuccugcggccuguacaagcagccgggggugcccgugaaguggaagcgcugaggacuagucccuguucccagagcccacuuuuuuuucuuuuuuugaaauaaaauagccugucuuucagaucuaaaaaaaaaaaaaaaaaaaaaaaaaaaaaaaaaaaaaaaaaaaaaaaaaaaaaaaaaaaaaaaaugcaucccccccccccccccccccccccccccccccaaaggcucuuuucagagccaccagaauu

SEQ ID NO: 6171 - RNA, 1752 nt, Artificial Sequence
  mRNA product Design a-1 comprising derived and/or modified sequence from LASV(Josiah;Clade IV)__NP_694870__GPCstabilized (opt1)
gggagagucccgcagucggcguccagcggcucugcuuguucgugugugugucguugcaggccuuauucaagcuuaccaugggccagaucgugaccuucuuccaggaggucccccacgugaucgaggaggugaugaacaucguccugaucgcccucagcgugcuggccgugcugaaggggcucuacaacuucgcgaccugcggccuggucgggcuggugacguuccuccugcugugcggccgcuccugcaccaccagccucuacaaggggguguacgagcugcagacccuggagcucaacauggagacgcugaacaugaccaugccgcuguccugcaccaagaacaacagccaccacuacaucauggucggcaacgagaccggccucgagcugacgcugaccaacaccuccaucaucaaccacaaguucugcaaccucagcgacgcccacaagaagaaccuguacgaccacgcccugauguccaucaucagcaccuuccaccucuccauccccaacuucaaccaguacgaggccaugagcugcgacuucaacgggggcaagaucuccgugcaguacaaccugagccacuccuacgccggggacgcggccaaccacugcggcacgguggccaacgggguccugcagaccuucaugcggauggccuggggcggcagcuacaucgcgcucgacuccgggugcggcaacugggacugcaucaugaccagcuaccaguaccugaucauccagaacaccacgugggaggaccacugccaguucucccgccccagccccaucggguaccugggccuccugucccagcggacccgcgacaucuacaucagccggcgccggcgcggcaccuucaccuggacgcugagcgacuccgaggggaaggacaccccgggcggguacugccucacccgguggaugcugaucgaggccgagcugaagugcuucggcaacaccgccguggccaagugcaacgagaagcacgacgaggaguucugcgacaugcuccgccuguucgacuucaacaagcaggccauccagcggcugaaggcgcccgcccagaugagcauccagcucaucaacaaggccgugaacgcccugaucaacgaccagcugaucaugaagaaccaccuccgcgacaucaugugcauccccuacugcaacuacuccaaguacugguaccugaaccacacgaccaccgggcggaccagccugcccaagugcuggcucgucuccaacggcagcuaccugaacgagacgcacuucuccgacgacaucgagcagcaggccgacaacaugaucaccgagaugcugcagaaggaguacauggagcgccagggcaagaccccgcucgggcugguggaccuguucguguucagcaccuccuucuaccucaucagcaucuuccugcaccuggucaagauccccacgcaccggcacaucgugggcaaguccugccccaagccccaccgccugaaccacauggggaucugcagcugcggccucuacaagcagccgggggugcccgucaaguggaagcggugaggacuagucccuguucccagagcccacuuuuuuuucuuuuuuugaaauaaaauagccugucuuucagaucuaaaaaaaaaaaaaaaaaaaaaaaaaaaaaaaaaaaaaaaaaaaaaaaaaaaaaaaaaaaaaaaaugcaucccccccccccccccccccccccccccccccaaaggcucuuuucagagccaccagaauu

SEQ ID NO: 6172 - RNA, 1749 nt, Artificial Sequence
  mRNA product Design a-1 comprising derived and/or modified sequence from LASV(LP;Clade I)__AAF86701__GPCstabilized (opt1)
gggagagucccgcagucggcguccagcggcucugcuuguucgugugugugucguugcaggccuuauucaagcuuaccaugggccagaucaucaccuucuuccaggaggugccccacgucaucgaggaggugaugaacaucgugcugaucgcccucagccugcuggccauccucaaggggcuguacaacaucgcgaccugcggcaucaucgggcuggucgccuuccucuuccugugcggcaaguccugcagccugacgcucaagggcggguacgagcugcagacccuggagcucaacauggagacccugaacaugaccaugccgcuguccugcacgaagaacagcucccaccacuacauccgcgugggcaacgagaccgggcucgagcugacccugaccaacacgagcaucaucaaccacaaguucugcaaccucuccgacgcccacaagaagaaccuguacgaccacgcccugaugagcaucaucuccaccuuccaccucagcauccccaacuucaaccaguacgaggccauguccugcgacuucaacggcgggaagaucagcgugcaguacaaccugucccacagcuacgcgggcgacgccgccgagcacugcgggaccgucgccaacggcgugcugcagaccuucaugcggauggcguggggcgggcgcuacaucgcccucgacuccggcugcgggaacugggacugcaucaugacgagcuaccaguaccugaucauccagaacaccaccugggaggaccacugccaguucucccggcccagccccaucggcuaccugggccuccugucccagcgcacccgggacaucuacaucagccgccggcgccgggggacguucaccuggacccugagcgacuccgagggcaacgagacccccgggggcuacugccucacgcgcuggaugcugaucgaggccgagcugaagugcuucgggaacaccgccguggccaagugcaacgagaagcacgacgaggaguucugcgacaugcuccggcuguucgacuucaacaagcaggcgauccgccggcugaaggccccggcccagaugagcauccagcucaucaacaaggccgucaacgcccugaucaacgaccagcugaucaugaagaaccaccuccgcgacaucaugugcauccccuacugcaacuacuccaaguacugguaccugaaccacaccagcuccggccggaccagccugcccaagugcuggcucaucuccaacggcagcuaccugaacgagacgcaguucuccgacgacaucgagcagcaggcggacaacaugaucaccgagaugcugcagaaggaguacaucgagcgccaggggaagaccccgcucggccugguggacaucuucaucuucagcaccuccuucuaccugaucagcaucuuccuccaccugaucaagauccccacgcaccggcacaucguggggaagcccugccccaagccgcaccgccugaaccacaugggcgucugcuccugcgggcuguacaagcaccccggcgugcccaccaaguggaagcggugaggacuagucccuguucccagagcccacuuuuuuuucuuuuuuugaaauaaaauagccugucuuucagaucuaaaaaaaaaaaaaaaaaaaaaaaaaaaaaaaaaaaaaaaaaaaaaaaaaaaaaaaaaaaaaaaaugcaucccccccccccccccccccccccccccccccaaaggcucuuuucagagccaccagaauu

SEQ ID NO: 6173 - RNA, 1749 nt, Artificial Sequence
  mRNA product Design a-1 comprising derived and/or modified sequence from LASV(803213;Clade II)__AAF86703__GPCstabilized (opt1)
gggagagucccgcagucggcguccagcggcucugcuuguucgugugugugucguugcaggccuuauucaagcuuaccaugggccagaucaucaccuucuuccaggaggugccccacgucaucgaggaggugaugaacaucgugcugaucgcccucagccugcuggccauccucaaggggaucuacaacgucgcgaccugcggccuguucgggcugaucuccuuccuccugcugugcggccgcagcugcuccgugacguacaaggggguguacgagcuccagacccuggagcugaacauggccaaccucaacaugaccaugccgcugagcugcaccaagaacaacucccaccacuacaucauggucggcaacgagacgggccuggagcucacccugaccaacaccagcaucaucaaccacaaguucugcaaccuguccgacgcccacaagaagaaccucuacgaccacgcccugaugagcaucaucuccacguuccaccugagcauccccaacuucaaccaguacgaggccauguccugcgacuucaacgggggcaagaucagcgugcaguacaaccucucccacagcuucgcgguggacgccgccaaccacugcgggaccaucgccaacggcguccugcagaccuucaugcggauggcguggggcggguccuacaucgcccuggacagcggcugcgggaacugggacugcaucaugaccuccuaccaguaccucaucauccagaacacgaccugggaggaccacugccaguucagccgccccucccccaucggcuaccuggggcugcucagccagcggacccgcgacaucuacaucagccggcgccggcgcggcaccuucacguggacccuguccgacagcgagggcaacgaggcccccgggggcuacugccugacccgguggaugcucaucgaggccgagcugaagugcuucgggaacaccgccguggcgaagugcaacgagaagcacgacgaggaguucugcgacaugcugcgccucuucgacuucaacaagcaggccaucaagcggcugaagacgccggcccagauguccauccagcugaucaacaaggccgugaacgcccucaucaacgaccagcugaucaugaagaaccaccuccgcgacaucaugugcauccccuacugcaacuacagccgguacugguaccugaaccacaccgucaccggcaagaccucccugccccgcugcuggcuggugagcaacggguccuaccucaacgagacgcacuucagcgacgacaucgagcagcaggcggacaacaugaucaccgagaugcugcagaaggaguacauggaccggcagggcaagaccccgcugggccucguggaccuguucgucuucuccaccagcuucuaccugaucuccaucuuccuccaccuggugaagauccccacgcaccgccacaucguggggaagcccugccccaagccgcaccggcugaaccacaugggcaucugcagcugcgggcuguacaagcaccccggcguccccgugaaguggaagcgcugaggacuagucccuguucccagagcccacuuuuuuuucuuuuuuugaaauaaaauagccugucuuucagaucuaaaaaaaaaaaaaaaaaaaaaaaaaaaaaaaaaaaaaaaaaaaaaaaaaaaaaaaaaaaaaaaaugcaucccccccccccccccccccccccccccccccaaaggcucuuuucagagccaccagaauu

SEQ ID NO: 6174 - RNA, 1749 nt, Artificial Sequence
  mRNA product Design a-1 comprising derived and/or modified sequence from LASV(GA391;Clade III)__CAA36645__GPCstabilized (opt1)
gggagagucccgcagucggcguccagcggcucugcuuguucgugugugugucguugcaggccuuauucaagcuuaccaugggccagaucgugaccuucuuccaggaggucccccacgugaucgaggaggugaugaacaucguccugaucgcccucagcauccuggccauccugaaggggcucuacaacguggcgaccugcggccugaucgggcuggugacguuccuccugcuguccggccgcagcugcucccucaucuacaaggggaccuacgagcugcagacccuggagcucaacauggagacccugaacaugacgaugccgcugagcugcaccaagaacaacucccaccacuacauccgggucggcaacgagaccggccucgagcugacccugacgaacaccagcauccucaaccacaaguucugcaaccuguccgacgcccacaagcgcaaccuguacgaccacagccucauguccaucaucagcaccuuccaccuguccauccccaacuucaaccaguacgaggccaugagcugcgacuucaacgggggcaagaucaccgugcaguacaaccugucccacagcuucgccguggacgccgcggggcacugcggcacgcucgccaacgggguccugcagaccuucaugcggauggccuggggcggcuccuacaucgcccuggacagcgggugcggcaacugggacugcaucaugaccuccuaccaguaccucaucauccagaacaccacgugggacgaccacugccaguucagccgccccucccccaucggguaccugggccugcucagccagcggacccgcgacaucuacaucagccggcgccggcgcggcaccuucaccuggacgcuguccgacagcgaggggaacgagaccccgggcggguacugccugacccgguggaugcucaucgaggcggagcugaagugcuucggcaacaccgccguggccaagugcaacgagaagcacgacgaggaguucugcgacaugcugcgccucuucgacuucaacaagcaggccauccggcgccugaagacgcccgcccagauguccauccagcugaucaacaaggcggugaacgcccucaucaacgaccagcugaucaugaagaaccaccuccgggacaucaugugcauccccuacugcaacuacagccgcuacugguaccugaaccacaccuccaccgggaagaccagccugccccggugcuggcugaucuccaacggcagcuaccucaacgagacgaaguucuccgacgacaucgagcagcaggccgacaacaugaucaccgagaugcugcagaaggaguacaucgaccgccagggcaagaccccgcuggggcucgucgaccuguucguguucagcaccuccuucuaccugaucagcaucuuccugcaccucgugaagauccccacgcaccggcacaucgucggcaagcccugccccaagccgcaccgccugaaccacauggggaucugcuccugcggccuguacaagcagcccggggugcccgugcgguggaagcgcugaggacuagucccuguucccagagcccacuuuuuuuucuuuuuuugaaauaaaauagccugucuuucagaucuaaaaaaaaaaaaaaaaaaaaaaaaaaaaaaaaaaaaaaaaaaaaaaaaaaaaaaaaaaaaaaaaugcaucccccccccccccccccccccccccccccccaaaggcucuuuucagagccaccagaauu

SEQ ID NO: 6175 - RNA, 1752 nt, Artificial Sequence
  mRNA product Design a-1 comprising derived and/or modified sequence from LASV(AV;Clade V)__CCA30314__GPCstabilized (opt1)
gggagagucccgcagucggcguccagcggcucugcuuguucgugugugugucguugcaggccuuauucaagcuuaccaugggccagaucgugaccuucuuccaggaggucccccacgugaucgaggaggugaugaacaucguccugaucgcccucagcauccuggccgugcugaaggggcucuacaacaucgcgaccugcggccugaucgggcugaucacguuccuccugcugugcggccgcuccugcagcuccaaccucuacaaggggguguacgagcugcagagccuggaccucaacauggagacccugaacaugaccaugccgcuguccugcaccaagaacaacagccaccacuacauccgggucggcaacgacacgggccucgagcugacccugaccaacaccuccauccucaaccacaaguucugcaaccugagcgacgcccacaagaaggaccuguacgaccacgcccucauguccaucaucagcacguuccaccuguccauccccaacuucaaccaguacgaggccaugagcugcgacuucaacgggggcaagaucuccgugcaguacaaccugagccacuccuacgccaucgacgcggccaaccacugcgggaccguggccaacggcauccuccagaccuucaugcgcauggccuggggcgggagcuacaucgcgcuggacuccggcugcgggaacugggacugcaucaugaccagcuaccaguaccugaucauccagaacacgaccugggagaaccacugccaguucucccggcccagccccaucggcuaccucgggcugcugagccagcgcacccgggacaucuacaucucccgccggcgccggggcaccuucacguggacccucagcgacuccgagggcaacgccacccccgggggcuacugccugacccgcuggaugcugaucgaggccgagcucaagugcuucgggaacacggccgucgccaagugcaacgagaagcacgacgaggaguucugcgacaugcugcggcuguucgacuucaacaagcaggcgaucagccgccucaaguccccggcccagaugagcauccagcugaucaacaaggccgugaacgcccugaucaacgaccagcucaucaugaagaaccaccuccgggacaucaugugcauccccuacugcaacuacuccaaguacugguaccugaaccacaccaucaccggcaagaccagccugcccaagugcuggcugguguccaacgggagcuaccugaacgagacgcacuucuccgacgacaucgagcagcaggccgacaacaugaucaccgagaugcuccagaaggaguacauggagcgccagggcaagaccccgcugggccuggucgaccucuucguguucagcaccuccuucuaccugaucagcaucuuccugcggcuggugaagauccccacgcaccgccacaucgucgggaagcccugccccaagccgcaccggcucaaccacaugggcaucugcuccugcgggcuguacaagcagcccggcgugcccgugcgcuggaagcggugaggacuagucccuguucccagagcccacuuuuuuuucuuuuuuugaaauaaaauagccugucuuucagaucuaaaaaaaaaaaaaaaaaaaaaaaaaaaaaaaaaaaaaaaaaaaaaaaaaaaaaaaaaaaaaaaaugcaucccccccccccccccccccccccccccccccaaaggcucuuuucagagccaccagaauu

SEQ ID NO: 6176 - RNA, 1749 nt, Artificial Sequence
  mRNA product Design a-1 comprising derived and/or modified sequence from LASV(Togo/2016/7082;Clade VI)__AMR44577__GPCstabilized (opt1)
gggagagucccgcagucggcguccagcggcucugcuuguucgugugugugucguugcaggccuuauucaagcuuaccaugggccagaucaucaccuucuuccaggaggugccccacgucaucgaggaggugaugaacaucgugcugaucgcccucagccugcuggccauccucaagggggucuacaacguggcgaccugcggcaucaucgggcuggugacguuccuguuccucugcggccgcuccugcagccugaucuacaagggguccuacgagcugcagacccucgagcugaacauggagacccugaacaugaccaugccgcucagcugcacgaagaacuccagccaccacuacauccgggucggcaacgagaccggccuggagcugacccucaccaacacguccaucaucaaccacaaguucugcaaccugagcgacgcccacaagcgcaaccuguacgaccacgcccucauguccauccugagcaccuuccaccuguccauccccaacuucaaccaguacgaggccaugagcugcgacuucaacgggggcaagaucuccgugcaguacaaccucagccacgccuacgcgguggacgccgccgagcacugcgggaccgucgccaacggcgugcugcagaccuucaugcggauggcguggggcggguccuacaucgcccuggacagcggcugcgggaacugggacugcaucaugacguccuaccaguaccucaucauccagaacaccaccugggaggaccacugccaguucagccgccccucccccaucggcuaccuggggcugcucagccagcggacccgcgacaucuacaucagccggcgccggcgcggcacguucaccuggacccuguccgacagcgagggcaacgagacccccgggggcuacugccugacgcgguggaugcucaucgaggccgagcugaagugcuucgggaacaccgccguggccaagugcaacgagaagcacgacgaggaguucugcgacaugcugcgccucuucgacuucaacaagcaggcgauccagcggcugaaguccccggcccagaugagcauccagcugaucaacaaggccgucaacgcccucaucaacgaccagcugaucaugaagaaccaccuccgcgacaugaugugcauccccuacugcaacuacuccaaguacugguaccugaaccacaccagcuccggccggaccagccugcccaagugcuggcugguguccaacgggagcuaccucaacgagacgcacuucuccgacgacaucgagcagcaggccgacaacaugaucaccgagaugcugcagaaggaguacaucgaccgccagggcaagaccccgcugggccucguggaccuguucgucuucagcaccuccuucuaccugaucagcaucuuccuccaccugaucaagauccccacgcaccggcacaucguggggaagcccugccccaagccgcaccgccugaaccacaugggcaucugcuccugcgggcuguacaagcagcccggcgugcccacccgguggaagcgcugaggacuagucccuguucccagagcccacuuuuuuuucuuuuuuugaaauaaaauagccugucuuucagaucuaaaaaaaaaaaaaaaaaaaaaaaaaaaaaaaaaaaaaaaaaaaaaaaaaaaaaaaaaaaaaaaaugcaucccccccccccccccccccccccccccccccaaaggcucuuuucagagccaccagaauu

SEQ ID NO: 6177 - RNA, 1749 nt, Artificial Sequence
  mRNA product Design a-1 comprising derived and/or modified sequence from LASV(KAK-428;Clade n.d. (VII))__ANH09740__GPCstabilized (opt1)
gggagagucccgcagucggcguccagcggcucugcuuguucgugugugugucguugcaggccuuauucaagcuuaccaugggccagaucgugaccuucuuccaggaggucccccacgugaucgaggaggugaugaacaucguccugaucgcccucagccugcuggccauccucaaggggcuguacaacuucgcgaccugcggcgugaucgggcugaucacguuccuccugcugugcggccgcuccugcagcgccaccuacaaggggcaguacgagcuccagacccuggagcugaacauggagucccucaacaugaccaugccgcugagcugcacgaagaacaacucccaccacuacauccgggccggcaacaacaccggccuggagcucacccugaccaacacgagcaucaucucccacaaguucugcaaccugagcgacgcccacaagaagaaccucuacgaccacacccugauguccaucaucaccaccuuccaccugagcauccccaacuucaaccaguacgaggccauguccugcgacuucaacgggggcaagaucagcauccaguacaaccucucccacagcuacgcgggggacgccgcccagcacugcggcacgguggccaacgggguccugcagaccuucaugcgcauggcguggggcggcuccuaccuggcccucgacagcgggugccggggcugggacugcaucaucuccagcuaccaguaccugaucauccagaacaccaccugggacgaccacugccaguucucccgccccagccccaucggguaccugggcuucgugagccagaagacgcgggacaucuacaucucccgccggcgccggggcaccuucaccuggacccucagcgacuccgaggggcacgacaugccgggcggguacugccugacgcgcuggaugcugaucgaggccgaccucaagugcuucggcaacaccgccguggccaagugcaacgagaagcacgacgaggaguucugcgacauguggcggcuguucgacuucaacaagcaggcgauccagcgccugaaggcccccgcccagaugaacauccagcucaucaacaaggccgucaacgcccugaucaacgaccagcugaugaugaagaaccaccuccgggacaucaugugcauccccuacugcaacuacagcaaguucugguaccugaacaacaccaccacggggcgcaccucccugccccggugcuggcucaucagcaacggcuccuaccugaacgagacccacuucagcgacgacaucgagcagcaggcggacaacaugaucaccgagaugcugcagaaggaguacauggaccgccagggcaagacgccgcucgggcugguggaccuguucguguucuccaccagcuucuaccucaucaccaucuuccugcaccuggucaagauccccacccaccggcacaucgugggcaagcccugccccaagccgcaccgccucaaccacauggggaucugcuccugcggccuguacaagcagcccggggugcccguccgguggaagcgcugaggacuagucccuguucccagagcccacuuuuuuuucuuuuuuugaaauaaaauagccugucuuucagaucuaaaaaaaaaaaaaaaaaaaaaaaaaaaaaaaaaaaaaaaaaaaaaaaaaaaaaaaaaaaaaaaaugcaucccccccccccccccccccccccccccccccaaaggcucuuuucagagccaccagaauu

SEQ ID NO: 6178 - RNA, 1749 nt, Artificial Sequence; identical to SEQ ID NO: 6172
  mRNA product Design a-1 comprising derived and/or modified sequence from LASV(Pinneo-NIG-1969;Clade I)__AIT17836__GPCstabilized (opt1)

SEQ ID NO: 6179 - RNA, 1749 nt, Artificial Sequence
  mRNA product Design a-1 comprising derived and/or modified sequence from LASV(ISTH0009-NIG-2011;Clade II)__AIT17404__GPCstabilized (opt1)
gggagagucccgcagucggcguccagcggcucugcuuguucgugugugugucguugcaggccuuauucaagcuuaccaugggccagaucaucaccuucuuccaggaggugccccacgucaucgaggaggugaugaacaucgugcugaucgcccucagccugcuggccauccucaaggggaucuacaacgucgcgaccugcggccuguucgggcugguguccuuccuccugcugugcggccgcagcugcuccacgaccuacaaggggguguacgagcuccagacccuggagcuggacauggccagccucaacaugaccaugccgcuguccugcacgaagaacaacagccaccacuacaucauggucggcaacgagaccggccuggagcucacccugaccaacacguccaucaucaaccacaaguucugcaaccugagcgacgcccacaagaagaaccucuacgaccacgcccugauguccaucaucagcaccuuccaccuguccauccccaacuucaaccaguacgaggccaugagcugcgacuucaacgggggcaagaucuccgugcaguacaaccucagccacgcguacgccguggacgccgccaaccacugcgggaccaucgcgaacggcguccugcagaccuucaugcggauggccuggggcggguccuacaucgcccuggacagcggcugcggguccugggacugcaucaugacgagcuaccaguaccucaucauccagaacaccaccugggaggaccacugccaguucucccgccccagccccaucggcuaccuggggcugcucagccagcggacccgcgacaucuacaucucccggcgccggcgcggcacguucaccuggacccugagcgacuccgagggcaacgagacccccgggggcuacugccugacgcgguggaugcucaucgaggccgagcugaagugcuucgggaacaccgccguggcgaagugcaacgagaagcacgacgaggaguucugcgacaugcugcgccucuucgacuucaacaagcaggccauccggcgccugaagaccccggcccagaugagcauccagcugaucaacaaggccgugaacgcccucaucaacgaccagcugaucaugaagaaccaccuccgggacaucaugugcauccccuacugcaacuacuccaaguacugguaccugaaccacaccgucacgggcaagaccagccugccccgcugcuggcugguguccaacgggagcuaccucaacgagacccacuucuccgacgacaucgagcagcaggcggacaacaugaucaccgagcugcugcagaaggaguacauggaccggcagggcaagacgccgcucggccugguggaccuguucgucuucagcaccuccuucuaccucaucagcaucuuccugcaccugaucaagauccccacccaccgccacaucaccgggaagcccugccccaagccgcaccggcugaaccacaugggcaucugcuccugcgggcucuacaagcaccccggcgugcccgugaaguggaagcgcugaggacuagucccuguucccagagcccacuuuuuuuucuuuuuuugaaauaaaauagccugucuuucagaucuaaaaaaaaaaaaaaaaaaaaaaaaaaaaaaaaaaaaaaaaaaaaaaaaaaaaaaaaaaaaaaaaugcaucccccccccccccccccccccccccccccccaaaggcucuuuucagagccaccagaauu

SEQ ID NO: 6180 - RNA, 1749 nt, Artificial Sequence
  mRNA product Design a-1 comprising derived and/or modified sequence from LASV(ISTH2010-NIG-2012;Clade II)__AIT17482__GPCstabilized (opt1)
gggagagucccgcagucggcguccagcggcucugcuuguucgugugugugucguugcaggccuuauucaagcuuaccaugggccagaucaucaccuucuuccaggaggugccccacgucaucgaggaggugaugaacaucgugcugaucgcccucagccugcuggccauccucaaggggaucuacaacgucgcgaccugcggccuguucgggcugguguccuuccuccugcugugcggccgcagcugcuccacgaccuacaaggggguguacgagcuccagacccuggagcuggacauggccagccucaacaugaccaugccgcuguccugcacgaagaacaacagccaccacuacaucauggucggcaacgagaccggccuggagcucacccugaccaacacguccaucaucaaccacaaguucugcaaccugagcgacgcccacaagaagaaccucuacgaccacgcccugauguccaucaucagcaccuuccaccuguccauccccaacuucaaccaguacgaggccaugagcugcgacuucaacgggggcaagaucuccgugcaguacaaccucagccacgcguacgccguggacgccgccaaccacugcgggaccaucgcgaacggcguccugcagaccuucaugcggauggccuggggcggguccuacaucgcccuggacagcggcugcggguccugggacugcaucaugacgagcuaccaguaccucaucauccagaacaucaccugggaggaccacugccaguucucccgccccagccccaucggcuaccuggggcugcucagccagcggacccgcgacaucuacaucucccggcgccggcgcggcaccuucacguggacccugagcgacuccgagggcaacgagacccccgggggcuacugccugacccgguggaugcucaucgaggccgagcugaagugcuucgggaacacggccguggcgaagugcaacgagaagcacgacgaggaguucugcgacaugcugcgccucuucgacuucaacaagcaggccauccggcgccugaagaccccggcccagaugagcauccagcugaucaacaaggccgugaacgcccucaucaacgaccagcugaucaugaagaaccaccuccgggacaucaugugcauccccuacugcaacuacuccaaguacugguaccugaaccacaccgucaccggcaagacgagccugccccgcugcuggcugguguccaacgggagcuaccucaacgagacccacuucuccgacgacaucgagcagcaggcggacaacaugaucaccgagcugcugcagaaggaguacaucgaccggcagggcaagaccccgcucggccugguggaccuguucgucuucagcacguccuucuaccucaucagcaucuuccugcaccuggugaagauccccacccaccgccacguggucgggaagcccugccccaagccgcaccggcugaaccacaugggcaucugcuccugcgggcucuacaagcaccccggcgugcccgugaaguggaagcgcugaggacuagucccuguucccagagcccacuuuuuuuucuuuuuuugaaauaaaauagccugucuuucagaucuaaaaaaaaaaaaaaaaaaaaaaaaaaaaaaaaaaaaaaaaaaaaaaaaaaaaaaaaaaaaaaaaugcaucccccccccccccccccccccccccccccccaaaggcucuuuucagagccaccagaauu

SEQ ID NO: 6181 - RNA, 1749 nt, Artificial Sequence
  mRNA product Design a-1 comprising derived and/or modified sequence from LASV(Lassa virus/H.sapiens-wt/NGA/2015/ISTH_0543;Clade II)__AVO03639__GPCstabilized (opt1)
gggagagucccgcagucggcguccagcggcucugcuuguucgugugugugucguugcaggccuuauucaagcuuaccaugggccagaucaucaccuucuuccaggaggugccccacgucaucgaggaggugaugaacaucgugcugaucgcccucagccugcuggccauccucaaggggaucuacaacgucgcgaccugcggccuguucgggcugguguccuuccuccugcugugcggccgcagcugcuccacgaccuacaaggggguguacgagcuccagacccuggagcuggacauggccaaccucaacaugaccaugccgcugagcugcacgaagaacaacucccaccacuacaucauggucggcaacgagaccggccuggagcucacccugaccaacacgagcaucaucaaccacaaguucugcaaccuguccgacgcccacaagaagaaccucuacgaccacgcccugaugagcaucaucuccaccuuccaccugagcauccccaacuucaaccaguacgaggccauguccugcgacuucaacgggggcaagaucagcgugcaguacaaccucucccacaccuacgcgguggacgccgccaaccacugcgggaccaucgccaacggcguccugcagacguucaugcggauggcguggggcgggagcuacaucgcccuggacuccggcugcgggagcugggacugcaucaugaccuccuaccaguaccucgugauccagaacaccaccugggaggaccacugccaguucagccgccccucccccaucggcuaccuggggcugcucagccagcggacgcgcgacaucuacaucagccggcgccggcgcggcaccuucaccuggacccuguccgacagcgagggcaacgagacgcccgggggcuacugccugacccgguggaugcucaucgaggccgagcugaagugcuucgggaacaccgccguggccaagugcaacgagaagcacgacgaggaguucugcgacaugcugcgccucuucgacuucaacaagcaggcgauccggcgccugaagaccccggcccagauguccauccagcugaucaacaaggccgucaacgcccucaucaacgaccagcugaucaugaagaaccaccuccgggacaucaugugcauccccuacugcaacuacagcaaguacugguaccugaaccacacggugaccggcaagaccucccugccccgcugcuggcuggugagcaacggguccuaccucaacgagacccacuucagcgacgacaucgagcagcaggccgacaacaugaucacggagcugcugcagaaggaguacaucgaccggcagggcaagaccccgcucggccuggucgaccuguucguguucuccaccagcuucuaccucaucuccaucuuccugcaccuggugaagauccccacccaccgccacaucacggggaagcccugccccaagccgcaccggcugaaccacaugggcaucugcagcugcgggcucuacaagcaccccggcguccccgugaaguggaagcgcugaggacuagucccuguucccagagcccacuuuuuuuucuuuuuuugaaauaaaauagccugucuuucagaucuaaaaaaaaaaaaaaaaaaaaaaaaaaaaaaaaaaaaaaaaaaaaaaaaaaaaaaaaaaaaaaaaugcaucccccccccccccccccccccccccccccccaaaggcucuuuucagagccaccagaauu

SEQ ID NO: 6182 - RNA, 1749 nt, Artificial Sequence
  mRNA product Design a-1 comprising derived and/or modified sequence from LASV(Lassa virus/H.sapiens-wt/NGA/2016/ISTH_0009;Clade II)__AVO03571__GPCstabilized (opt1)
gggagagucccgcagucggcguccagcggcucugcuuguucgugugugugucguugcaggccuuauucaagcuuaccaugggccagaucaucaccuucuuccaggaggugccccacgucaucgaggaggugaugaacaucgugcugaucgcccucagccugcuggccauccucaaggggaucuacaacgucgcgaccugcggccugcuggggcucguguccuuccugcugcucugcggccgcagcugcuccacgaccuacaaggggguguacgagcugcagacccuggagcucgacauggccagccugaacaugaccaugccgcuguccugcacgaagaacaacagccaccacuacaucauggucggcaacgagaccggccucgagcugacccugaccaacacguccaucaucaaccacaaguucugcaaccucagcgacgcccacaagaagaaccuguacgaccacgcccugauguccaucaucagcaccuuccaccucuccauccccaacuucaaccaguacgaggccaugagcugcgacuucaacgggggccggaucuccgugcaguacaaccugagccacuccuacgcgguggacgccgccaaccacugcgggaccaucgccaacggcguccugcagaccuucaugcgcauggcguggggcgggagcuacaucgcccucgacuccggcugcgggagcugggacugcaucaugacguccuaccaguaccugaucauccagaacaccaccugggaggaccacugccaguucagccggcccagccccaucggcuaccuggggcuccugucccagcgcacccgggacaucuacaucagccgccggcgccggggcacguucaccuggacccuguccgacagcgagggcaacgagacccccgggggcuacugccucacgcgcuggaugcugaucgaggccgagcugaagugcuucgggaacaccgccguggccaagugcaacgagaagcacgacgaggaguucugcgacaugcuccggcuguucgacuucaacaagcaggcgauccgccggcugaagaccccggcccagauguccauccagcucaucaacaaggccgugaacgcccugaucaacgaccagcugaucaugaagaaccaccuccgcgacaucaugugcauccccuacugcaacuacagcaaguacugguaccugaaccacaccgucacgggcaagaccucccugccccggugcuggcucgugagcaacggguccuaccugaacgagacccacuucagcgacgacaucgagcagcaggccgacaacaugaucaccgagcugcuccagaaggaguacaucgaccgccagggcaagacgccgcugggccugguggaccucuucgucuucuccaccagcuucuaccugaucuccaucuuccugcaccuggugaagauccccacccaccggcacaucaccgggaagcccugccccaagccgcaccgccucaaccacaugggcaucugcagcugcgggcuguacaaccaccccggcgugcccgucaaguggaagcggugaggacuagucccuguucccagagcccacuuuuuuuucuuuuuuugaaauaaaauagccugucuuucagaucuaaaaaaaaaaaaaaaaaaaaaaaaaaaaaaaaaaaaaaaaaaaaaaaaaaaaaaaaaaaaaaaaugcaucccccccccccccccccccccccccccccccaaaggcucuuuucagagccaccagaauu

SEQ ID NO: 6183 - RNA, 1749 nt, Artificial Sequence
  mRNA product Design a-1 comprising derived and/or modified sequence from LASV(Lassa virus/H.sapiens-wt/NGA/2016/ISTH_0017;Clade II)__AVO03567__GPCstabilized (opt1)
gggagagucccgcagucggcguccagcggcucugcuuguucgugugugugucguugcaggccuuauucaagcuuaccaugggccagaucaucaccuucuuccaggaggugccccacgucaucgaggaggugaugaacaucgugcugaucgcccucagccugcuggccauccucaaggggaucuacaacgucgcgaccugcggccuguucgggcugguguccuuccuccugcugugcggccgcagcugcuccacgaccuacaaggggguguacgagcuccagacccuggagcuggacauggccagccucaacaugaccaugccgcuguccugcacgaagaacaacagccaccacuacaucauggucggcaacgagaccggccuggagcucacccugaccaacacguccaucaucaaccacaaguucugcaaccugagcgacgcccacaagaagaaccucuacgaccacgcccugauguccaucaucagcaccuuccaccuguccauccccaacuucaaccaguacgaggccaugagcugcgacuucaacgggggcaagaucuccgugcaguacaaccucagccacaccuacgcgaucgacgccgccaaccacugcgggaccaucgccaacggcgugcugcagacguucaugcggauggcguggggcggguccuacaucgcccuggacagcggcugcggguccugggacugcaucaugaccagcuaccaguaccucaucauccagaacaccaccugggaggaccacugccaguucucccgccccagccccaucggcuaccuggggcugcucagccagcggacgcgcgacaucuacaucucccggcgccggcgcggcaccuucaccuggacccugagcgacuccgagggcaacgagacgcccgggggcuacugccugacccgguggaugcucaucgaggccgagcugaagugcuucgggaacaccgccgucgccaagugcaacgagaagcacgacgaggaguucugcgacaugcugcgccucuucgacuucaacaagcaggcgauccggcgccugaagaccccggcccagaugagcauccagcugaucaacaaggccgugaacgcccucaucaacgaccagcugaucaugaagaaccaccuccgggacaucaugugcauccccuacugcaacuacuccaaguacugguaccugaaccacacggugaccggcaagaccagccugccccgcugcuggcuggucuccaacgggagcuaccucaacgagacccacuucuccgacgacaucgagcagcaggccgacaacaugaucacggagcugcugcagaaggaguacauggaccggcagggcaagaccccgcucggccugguggaccuguucguguucagcaccuccuucuaccucaucagcaucuuccugcaccugguccgcauccccacccaccggcacgugaucgggaagcccugccccaagccgcaccgccugaaccacaugggcaucugcuccugcgggcucuacaagcaccccggcgugcccgucaaguggaagcggugaggacuagucccuguucccagagcccacuuuuuuuucuuuuuuugaaauaaaauagccugucuuucagaucuaaaaaaaaaaaaaaaaaaaaaaaaaaaaaaaaaaaaaaaaaaaaaaaaaaaaaaaaaaaaaaaaugcaucccccccccccccccccccccccccccccccaaaggcucuuuucagagccaccagaauu

SEQ ID NO: 6184 - RNA, 1749 nt, Artificial Sequence
  mRNA product Design a-1 comprising derived and/or modified sequence from LASV(Lassa virus/H.sapiens-wt/NGA/2018/ISTH_0959;Clade II)__AVV65099__GPCstabilized (opt1)
gggagagucccgcagucggcguccagcggcucugcuuguucgugugugugucguugcaggccuuauucaagcuuaccaugggccagaucaucaccuucuuccaggaggugccccacgucaucgaggaggugaugaacaucgugcugaucgcccucagccugcuggccauccucaaggggaucuacaacgucgugaccugcggccuguucgggcugguguccuuccuccugcugugcggccgcagcugcuccacgaccuacaagggggucuacgagcuccagacccuggagcuggacauggcgagccucaacaugaccaugccgcuguccugcacgaagaacaacagccaccacuacaucauggugggcaacgagaccggccuggagcucacccugaccaacacguccaucaucaaccacaaguucugcaaccugagcgacgcccacaagaagaaccucuacgaccacgcccugauguccaucaucagcaccuuccaccuguccauccccaacuucaaccaguacgaggccaugagcugcgacuucaacgggggcaagaucuccgugcaguacaaccucagccacgccuacgcgaucgacgccgccaaccacugcgggaccaucgccaacggcguccugcagaccuucaugcggauggcguggggcggguccuacaucgcccuggacagcggcugcggguccugggacugcaucaugacgagcuaccaguaccucaucauccagaacaccaccugggaggaccacugccaguucucccgccccagccccaucggcuaccuggggcugcucagccagcggacccgcgacaucuacaucucccggcgccggcgcggcacguucaccuggacccugagcgacuccgagggcaacgagacccccgggggcuacugccugacgcgguggaugcucaucgaggccgagcugaagugcuucgggaacaccgccguggccaagugcaacgagaagcacgacgaggaguucugcgacaugcugcgccucuucgacuucaacaagcaggcgauccggcgccugaagaccccggcccagaugagcauccagcugaucaacaaggccgugaacgcccucaucaacgaccagcugaucaugaagaaccaccuccgggacaucaugugcauccccuacugcaacuacuccaaguacugguaccugaaccacaccgucacgggcaagaccagccugccccgcugcuggcugguguccaacgggagcuaccucaacgagacccacuucuccgacgacaucgagcagcaggccgacaacaugaucaccgagcugcugcagaaggaguacaucgaccggcagggcaagacgccgcucggccugguggaccuguucgucuucagcaccuccuucuaccucaucagcaucuuccugcaccuggugaagauccccacccaccgccacgugaucgggaagcccugccccaagccgcaccggcugaaccacaugggcaucugcuccugcgggcucuacaagcaccccggcguccccgugaaguggaagcgcugaggacuagucccuguucccagagcccacuuuuuuuucuuuuuuugaaauaaaauagccugucuuucagaucuaaaaaaaaaaaaaaaaaaaaaaaaaaaaaaaaaaaaaaaaaaaaaaaaaaaaaaaaaaaaaaaaugcaucccccccccccccccccccccccccccccccaaaggcucuuuucagagccaccagaauu

SEQ ID NO: 6185 - RNA, 1749 nt, Artificial Sequence
  mRNA product Design a-1 comprising derived and/or modified sequence from LASV(LASV003-NIG-2008;Clade II)__AIT17580__GPCstabilized (opt1)
gggagagucccgcagucggcguccagcggcucugcuuguucgugugugugucguugcaggccuuauucaagcuuaccaugggccagaucaucaccuucuuccaggaggugccccacgucaucgaggaggugaugaacaucgugcugaucgcccucagccugcuggccauccucaaggggaucuacaacgucgcgaccugcggccuguucgggcugguguccuuccuccugcugugcggccgcagcugcuccacgaccuacaaggggguguacgagcuccagacccuggagcuggacauggccagccucaacaugaccaugccgcuguccugcacgaagaacaacagccaccacuacaucauggucggcaacgagaccggccuggagcucacccugaccaacacguccaucaucaaccacaaguucugcaaccugagcgacgcccacaagaagaaccucuacgaccacgcccugauguccaucaucagcaccuuccaccuguccauccccaacuucaaccaguacgaggccaugagcugcgacuucaacgggggcaagaucuccgugcaguacaaccucagccacaccuacgcgguggacgccgccaaccacugcgggaccaucgccaacggcguccugcagacguucaugcggauggcguggggcggguccuacaucgcccuggacagcggcugcggguccugggacugcaucaugaccagcuaccaguaccucaucauccagaacaccaccugggaggaccacugccaguucucccgccccagccccaucggcuaccuggggcugcucagccagcggacgcgcgacaucuacaucucccggcgccggcgcggcaccuucaccuggacccugagcgacuccgagagcaacgagacgccgggcggguacugccugacccgguggaugcucaucgaggccgagcugaagugcuucggcaacaccgccguggccaagugcaacgagaagcacgacgaggaguucugcgacaugcugcgccucuucgacuucaacaagcaggcgauccggcgccugaaggcccccgcccagauguccauccagcugaucaacaaggccgugaacgcccucaucaacgaccagcugaucaugaagaaccaccuccgggacaucaugugcauccccuacugcaacuacagcaaguacugguaccugaaccacaccgucacggggcgcaccucccugccccggugcuggcuggugagcaacggcuccuaccucaacgagacccacuucagcgacgacaucgagcagcaggcggacaacaugaucaccgagcugcugcagaaggaguacauggaccgccaggggaagacgccgcucggccugguggaccuguucgucuucuccaccagcuucuaccucaucuccaucuuccugcaccuggugaagauccccacccaccggcacgugaucggcaagcccugccccaagccgcaccgccugaaccacauggggaucugcagcugcggccucuacaagcaccccgggguccccgugaaguggaagcggugaggacuagucccuguucccagagcccacuuuuuuuucuuuuuuugaaauaaaauagccugucuuucagaucuaaaaaaaaaaaaaaaaaaaaaaaaaaaaaaaaaaaaaaaaaaaaaaaaaaaaaaaaaaaaaaaaugcaucccccccccccccccccccccccccccccccaaaggcucuuuucagagccaccagaauu

SEQ ID NO: 6186 - RNA, 1749 nt, Artificial Sequence
  mRNA product Design a-1 comprising derived and/or modified sequence from LASV(LASV035-NIG-2009;Clade II)__AIT17588__GPCstabilized (opt1)
gggagagucccgcagucggcguccagcggcucugcuuguucgugugugugucguugcaggccuuauucaagcuuaccaugggccagaucaucaccuucuuccaggaggugccccacgucaucgaggaggugaugaacaucgugcugaucgcccucagccugcuggccauccucaaggggaucuacaacgucgcgaccugcggccuguucgggcugguguccuuccuccugcugugcggccgcagcugcuccacgaccuacaaggggguguacgagcuccagacccuggagcuggacauggccagccucaacaugaccaugccgcuguccugcacgaagaacaacagccaccacuacaucauggucggcaacgagaccggccuggagcucacccugaccaacacguccaucaucaaccacaaguucugcaaccugagcgacgcccacaagaagaaccucuacgaccacgcccugauguccaucaucagcaccuuccaccuguccauccccaacuucaaccaguacgaggccaugagcugcgacuucaacgggggcaagaucuccgugcaguacaaccucagccacgcguacgccguggacgccgccaaccacugcgggaccaucgcgaacggcguccugcagaccuucaugcggauggccuggggcggguccuacaucgcccuggacagcggcugcggguccugggacugcaucaugacgagcuaccaguaccucaucauccagaacaccaccugggaggaccacugccaguucucccgccccagccccaucggcuaccuggggcugcucagccagcggacccgcgacaucuacaucucccggcgccggcgcggcacguucaccuggacccugagcgacuccgagggcaacgagacccccgggggcuacugccugacgcgguggaugcucaucgaggccgagcugaagugcuucgggaacaccgccguggcgaagugcaacgagaagcacgacgaggaguucugcgacaugcugcgccucuucgacuucaacaagcaggccauccggcgccugaaggccccggcccagaugagcauccagcugaucaacaaggccgugaacgcgcucaucaacgaccagcugaucaugaagaaccaccuccgggacaucaugugcauccccuacugcaacuacuccaaguacugguaccugaaccacaccgucaccggcaagacgagccugccccgcugcuggcugguguccaacgggagcuaccucaacgagacccacuucuccgacgacaucgagcagcaggccgacaacaugaucaccgagcugcugcagaaggaguacaucgaccggcagggcaagaccccgcucggccugguggaccuguucgucuucagcacguccuucuaccucaucagcaucuuccugcaccuggugaagauccccacccaccgccacgugaucgggaagcccugccccaagccgcaccggcugaaccacaugggcaucugcuccugcgggcucuacaagcaccccggcguccccgugaaguggaagcgcugaggacuagucccuguucccagagcccacuuuuuuuucuuuuuuugaaauaaaauagccugucuuucagaucuaaaaaaaaaaaaaaaaaaaaaaaaaaaaaaaaaaaaaaaaaaaaaaaaaaaaaaaaaaaaaaaaugcaucccccccccccccccccccccccccccccccaaaggcucuuuucagagccaccagaauu

SEQ ID NO: 6187 - RNA, 1749 nt, Artificial Sequence
  mRNA product Design a-1 comprising derived and/or modified sequence from LASV(LASV1000-NIG-2009;Clade II)__AIT17782__GPCstabilized (opt1)
gggagagucccgcagucggcguccagcggcucugcuuguucgugugugugucguugcaggccuuauucaagcuuaccaugggccagaucaucaccuucuuccaggaggugccccacgucaucgaggaggugaugaacaucgugcugaucgcccucagccugcuggccauccucaaggggaucuacaacgucgcgaccugcggccuguucgggcugguguccuuccuccugcugugcggccgcagcugcuccacgaccuacaaggggguguacgagcuccagacccuggagcuggacauggccagccucaacaugaccaugccgcuguccugcacgaagaacaacagccaccacuacaucauggucggcaacgagaccggccuggagcucacccugaccaacacguccaucaucaaccacaaguucugcaaccugagcgacgcccacaagaagaaccucuacgaccacgcccugauguccaucaucagcaccuuccaccuguccauccccaacuucaaccaguacgaggccaugagcugcgacuucaacgggggcaagaucuccgugcaguacaaccucagccacaccuacgcgguggacgccgccaaccacugcgggaccaucgccaacggcguccugcagacguucaugcggauggcguggggcggguccuacaucgcccuggacagcggcugcggguccugggacugcaucaugaccagcuaccaguaccucaucauccagaacaccaccugggaggaccacugccaguucucccgccccagccccaucggcuaccuggggcugcucagccagcggacgcgcgacaucuacaucucccggcgccggcgcggcaccuucaccuggacccugagcgacuccgagggcaacgagacgcccgggggcuacugccugacccgguggaugcucaucgaggccgagcugaagugcuucgggaacaccgccguggccaagugcaacgagaagcacgacgaggaguucugcgacaugcugcgccucuucgacuucaacaagcaggcgaucaagcggcugaagaccccggcccagaugagcauccagcugaucaacaaggccgugaacgcccucaucaacgaccagcugaucaugaagaaccaccuccgcgacaucaugugcauccccuacugcaacuacuccaaguacugguaccugaaccacacggucaccggcaagaccagccugccccggugcuggcugguguccaacgggagcuaccucaacgagacccacuucuccgacgacaucgagcagcaggccgacaacaugaucacggagcugcugcagaaggaguacaucgaccgccagggcaagaccccgcucggccugguggaccuguucgucuucagcaccuccuucuaccucaucagcaucuuccugcaccuggugaagauccccacccaccggcacguggucgggaagcccugccccaagccgcaccgccugaaccacaugggcaucugcuccugcgggcucuacaagcaccccggcgugcccgugaaguggaagcggugaggacuagucccuguucccagagcccacuuuuuuuucuuuuuuugaaauaaaauagccugucuuucagaucuaaaaaaaaaaaaaaaaaaaaaaaaaaaaaaaaaaaaaaaaaaaaaaaaaaaaaaaaaaaaaaaaugcaucccccccccccccccccccccccccccccccaaaggcucuuuucagagccaccagaauu

SEQ ID NO: 6188 - RNA, 1749 nt, Artificial Sequence
  mRNA product Design a-1 comprising derived and/or modified sequence from LASV(LASV221-NIG-2010;Clade II)__AIT17624__GPCstabilized (opt1)
gggagagucccgcagucggcguccagcggcucugcuuguucgugugugugucguugcaggccuuauucaagcuuaccaugggccagaucaucaccuucuuccaggaggugccccacgucaucgaggaggugaugaacaucgugcugaucgcccucagccugcuggccauccucaaggggaucuacaacgucgcgaccugcggccuguucgggcugguguccuuccuccugcugugcggccgcagcugcuccacgaccuacaaggggguguacgagcuccagacccuggagcuggacauggccagccucaacaugaccaugccgcuguccugcacgaagaacaacagccaccacuacaucauggucggcaacgagaccggccuggagcucacccugaccaacacguccaucaucaaccacaaguucugcaaccugagcgacgcccacaagaagaaccucuacgaccacgcccugauguccaucaucagcaccuuccaccuguccauccccaacuucaaccaguacgaggccaugagcugcgacuucaacgggggcaagaucuccgugcaguacaaccucagccacaccuacgcgaucgacgccgccaaccacugcgggaccaucgccaacggcgugcugcagacguucaugcggauggcguggggcggguccuacaucgcccuggacagcggcugcggguccugggacugcaucaugaccagcuaccaguaccucaucauccagaacaccaccugggaggaccacugccaguucucccgccccagccccaucggcuaccuggggcugcucagccagcggacgcgcgacaucuacaucucccggcgccggcgcggcaccuucaccuggacccugagcgacuccgagggcaacgagacgcccgggggcuacugccugacccgguggaugcucaucgaggccgagcugaagugcuucgggaacaccgccgucgccaagugcaacgagaagcacgacgaggaguucugcgacaugcugcgccucuucgacuucaacaagcaggcgauccggcgccugaagaccccggcccagaugagcauccagcugaucaacaaggccgugaacgcccucaucaacgaccagcugaucaugaagaaccaccuccgggacaucaugugcauccccuacugcaacuacuccaaguacugguaccugaaccacacggugaccggcaagaccagccugccccgcugcuggcuggucuccaacgggagcuaccucaacgagacccacuucuccgacgacaucgagcagcaggccgacaacaugaucacggagaugcugcagaaggaguacauggaccggcagggcaagaccccgcugggccucguggaccuguucguguucagcaccuccuucuaccugaucagcaucuuccuccaccuggucaagauccccacccaccgccacgugaucgggaagcccugccccaagccgcaccggcugaaccacaugggcaucugcuccugcgggcuguacaagcaccccggcgugcccgucaaguggaagcgcugaggacuagucccuguucccagagcccacuuuuuuuucuuuuuuugaaauaaaauagccugucuuucagaucuaaaaaaaaaaaaaaaaaaaaaaaaaaaaaaaaaaaaaaaaaaaaaaaaaaaaaaaaaaaaaaaaugcaucccccccccccccccccccccccccccccccaaaggcucuuuucagagccaccagaauu

SEQ ID NO: 6189 - RNA, 1749 nt, Artificial Sequence
  mRNA product Design a-1 comprising derived and/or modified sequence from LASV(LASV237-NIG-2010;Clade II)__AIT17638__GPCstabilized (opt1)
gggagagucccgcagucggcguccagcggcucugcuuguucgugugugugucguugcaggccuuauucaagcuuaccaugggccagaucaucaccuucuuccaggaggugccccacgucaucgaggaggugaugaacaucgugcugaucgcccucagccugcuggccauccucaaggggaucuacaacgucgcgaccugcggccuguucgggcugguguccuuccuccugcugugcggccgcagcugcuccacgaccuacaaggggguguacgagcuccagacccuggagcuggacauggccagccucaacaugaccaugccgcuguccugcacgaagaacaacagccaccacuacaucauggucggcaacgagaccggccuggagcucacccugaccaacacguccaucaucaaccacaaguucugcaaccugagcgacgcccacaagaaggaccucuacgaccacgcccugauguccaucaucagcaccuuccaccuguccauccccaacuucaaccaguacgaggccaugagcugcgacuucaacgggggcaagaucuccgugcaguacaaccucagccacaccuacgcgguggacgccgccaaccacugcgggaccaucgccaacggcguccugcagacguucaugcggauggcguggggcggguccuacaucgcccuggacagcggcugcggguccugggacugcaucaugaccagcuaccaguaccucaucauccagaacaccaccugggaggaccacugccaguucucccgccccagccccaucggcuaccuggggcugcucagccagcggacgcgcgacaucuacaucucccggcgccggcgcggcaccuucaccuggacccugagcgacuccgagggcaacgagacgcccgggggcuacugccugacccgguggaugcucaucgaggccgagcugaagugcuucgggaacaccgccguggccaagugcaacgagaagcacgacgaggaguucugcgacaugcugcgccucuucgacuucaacaagcaggcgauccggcgccugaagaccccggcccagaugagcauccagcugaucaacaaggccgugaacgcccucaucaacgaccagcugaucaugaagaaccaccuccgggacaucaugugcauccccuacugcaacuacuccaaguacugguaccugaaccacacggucaccggcaagaccagccugccccgcugcuggcugguguccaacgggagcuaccucaacgagacccacuucuccgacgacaucgagcagcaggccgacaacaugaucacggagcugcugcagaaggaguacauggaccggcagggcaagaccccgcucggccugguggaccuguucgucuucagcaccuccuucuaccucaucagcaucuuccugcaccugaucaagauccccacccaccgccacaucacggggaagcccugccccaagccgcaccggcugaaccacaugggcaucugcuccugcgggcucuacaagcaccccggcgugcccgugaaguggaagcgcugaggacuagucccuguucccagagcccacuuuuuuuucuuuuuuugaaauaaaauagccugucuuucagaucuaaaaaaaaaaaaaaaaaaaaaaaaaaaaaaaaaaaaaaaaaaaaaaaaaaaaaaaaaaaaaaaaugcaucccccccccccccccccccccccccccccccaaaggcucuuuucagagccaccagaauu

SEQ ID NO: 6190 - RNA, 1749 nt, Artificial Sequence
  mRNA product Design a-1 comprising derived and/or modified sequence from LASV(LASV253-NIG-2011;Clade II)__AIT17670__GPCstabilized (opt1)
gggagagucccgcagucggcguccagcggcucugcuuguucgugugugugucguugcaggccuuauucaagcuuaccaugggccagaucaucaccuucuuccaggaggugccccacgucaucgaggaggugaugaacaucgugcugaucgcccucagccugcuggccauccucaaggggaucuacaacgucgcgaccugcggccuguucgggcugguguccuuccuccugcugugcggccgcagcugcuccacgaccuacaaggggguguacgagcuccagacccuggagcuggacauggccagccucaacaugaccaugccgcuguccugcacgaagaacaacagccaccacuacaucauggucggcaacgagaccggccuggagcucacccugaccaacacguccaucaucaaccacaaguucugcaaccugagcgacgcccacaagaagaaccucuacgaccacgcccugauguccaucaucagcaccuuccaccuguccauccccaacuucaaccaguacgaggccaugagcugcgacuucaacgggggcaagaucuccgugcaguacaaccucagccacaccuacgcgguggacgccgccaaccacugcgggaccaucgccaacggcguccugcagacguucaugcggauggcguggggcggguccuacaucgcccuggacagcggcugcggguccugggacugcaucaugaccagcuaccaguaccucaucauccagaacaccaccugggaggaccacugccaguucucccgccccagccccaucggcuaccuggggcugcucagccagcggacgcgcgacaucuacaucucccggcgccggcgcggcaccuucaccuggacccugagcgacuccgagggcaacgagacgcccgggggcuacugccugacccgguggaugcucaucgaggccgagcugaagugcuucgggaacaccgccguggccaagugcaacgagaagcacgacgaggaguucugcgacaugcugcgccucuucgacuucaacaagcaggcgauccggcgccugaaggccccggcccagaugagcauccagcugaucaacaaggccgugaacgcccucaucaacgaccagcugaucaugaagaaccaccuccgggacaucaugugcauccccuacugcaacuacuccaaguacugguaccugaaccacaccgucacgggccgcaccagccugccccggugcuggcugguguccaacgggagcuaccucaacgagacccacuucuccgacgacaucgagcagcaggcggacaacaugaucaccgagcugcugcagaaggaguacaucgaccgccagggcaagacgccgcucggccugguggaccuguucgucuucagcaccuccuucuaccucaucagcaucuuccugcaccuggugaagauccccacccaccggcacaucaucgggaagcccugccccaagccgcaccgccugaaccacaugggcaucugcuccugcgggcucuacaagcaccccggcgugcccgucaaguggaagcggugaggacuagucccuguucccagagcccacuuuuuuuucuuuuuuugaaauaaaauagccugucuuucagaucuaaaaaaaaaaaaaaaaaaaaaaaaaaaaaaaaaaaaaaaaaaaaaaaaaaaaaaaaaaaaaaaaugcaucccccccccccccccccccccccccccccccaaaggcucuuuucagagccaccagaauu

SEQ ID NO: 6191 - RNA, 1749 nt, Artificial Sequence
  mRNA product Design a-1 comprising derived and/or modified sequence from LASV(LASV254-NIG-2011;Clade II)__AIT17674__GPCstabilized (opt1)
gggagagucccgcagucggcguccagcggcucugcuuguucgugugugugucguugcaggccuuauucaagcuuaccaugggccagaucaucaccuucuuccaggaggugccccacgucaucgaggaggugaugaacaucgugcugaucgcccucagccugcuggccauccucaaggggaucuacaacgucgcgaccugcggccuguucgggcugguguccuuccuccugcugugcggccgcagcugcuccacgaccuacaaggggguguacgagcuccagacccuggagcuggacaugaccaaccucaacaugacgaugccgcugagcugcaccaagaacaacucccaccacuacaucauggucggcaacgagaccggccuggagcucacccugacgaacaccagcaucaucaaccacaaguucugcaaccuguccgacgcccacaagaagaaccucuacaaccacgcccugaugagcaucaucuccaccuuccaccugagcauccccaacuucaaccaguacgaggccauguccugcgacuucaacgggggcaagaucagcgugcaguacaaccucucccacagcuacgccguggacgcggccaaccacugcgggaccaucgccaacggcguccugcagacguucaugcggauggccuggggcggguccuacaucgcgcuggacagcggcugcgggaacugggacugcaucaugaccuccuaccaguaccucaucauccagaacaccaccugggaggaccacugccaguucagccgccccucccccaucggcuaccuggggcugcucagccagcggacgcgcgacaucuacaucagccggcgccggcgcggcaccuucaccuggacccuguccgacagcgagggcaacgagacgcccgggggcuacugccugacccgguggaugcucaucgaggccgagcugaagugcuucgggaacaccgccguggccaagugcaacgagaagcacgacgaggaguucugcgacaugcugcgccucuucgacuucaacaagcaggccauccggcgccugaagaccccggcgcaggccaacauccagcugaucaacaaggccgugaacgcccucaucaacgaccagcugaucaugaagaaccaccuccgggacaucaugugcauccccuacugcaacuacuccaaguacugguaccugaaccacacggucaccggcaagaccagccugccccgcugcuggcugguguccaacgggagcuaccucaacgagacccacuucuccgacgacaucgagcagcaggccgacaacaugaucacggagcugcugcagaaggaguacauggaccggcagggcaagaccccgcucggccugguggaccuguucgucuucagcaccuccuucuaccucaucagcaucuuccugcaccuggugaagauccccacccaccgccacgugaucgggaagcccugccccaagccgcaccggcugaaccacaugggcaucugcuccugcgggcucuacaagcaccccggcguccccgugaaguggaagcgcugaggacuagucccuguucccagagcccacuuuuuuuucuuuuuuugaaauaaaauagccugucuuucagaucuaaaaaaaaaaaaaaaaaaaaaaaaaaaaaaaaaaaaaaaaaaaaaaaaaaaaaaaaaaaaaaaaugcaucccccccccccccccccccccccccccccccaaaggcucuuuucagagccaccagaauu

SEQ ID NO: 6192 - RNA, 1749 nt, Artificial Sequence
  mRNA product Design a-1 comprising derived and/or modified sequence from LASV(Nig08-A19;Clade III)__ADU56618__GPCstabilized (opt1)
gggagagucccgcagucggcguccagcggcucugcuuguucgugugugugucguugcaggccuuauucaagcuuaccaugggccagaucgugaccuucuuccaggaggucccccacgugaucgaggaggugaugaacaucguccugaucgcccucagcauccuggccauccugaaggggcucuacaacaucgcgaccugcggccugaucgggcuggugacguuccuccugcuguccggccgcagcugcuccaugaccuacaaggggguguacgagcuccagacccuggagcugaacaugaacacccucaacaugacgaugccgcugagcugcaccaagaacaacucccaccacuacaucauggucggcaacgagaccggccuggagcucacccugacgaacaccagccugcuccaccacaaguucugcaaccuguccgacgcccacaagaagaaccuguacgaccacacccucaugagcaucaucuccaccuuccaccugagcauccccaacuucaaccaguacgaggccauguccugcgacuucaacgggggcaagaucacggugcaguacaaccugagccacuccuacgccaucgacgccgcgaaccacugcgggaccguggccaacggcguccuccagaccuucaugcggauggccuggggcgggagcuacaucgcccuggacuccggcugcgggaagugggacugcaucaugaccagcuaccaguaccugaucauccagaacacgaccugggaggaccacugccaguucucccgccccagccccaucggcuaccucgggcugcugucccagcggacccgcgacaucuacaucagccggcgccggcgcggcaccuucacguggacccucagcgacuccgagggcaacgagacccccgggggcuacugccugacccgguggaugcugaucgaggcggagcucaagugcuucgggaacacggccguggccaagugcaacgagaagcacgacgaggaguucugcgacaugcugcgccuguucgacuucaacaagcaggccauccggcgccucaaggccccggcgcagaugagcauccagcugaucaacaaggccgugaacgcccugaucaacgaccagcucaucaugaagaaccaccuccgggacaucaugugcauccccuacugcaacuacuccaaguacugguaccugaaccacaccagcaccggccgcaccucccugccccggugcuggcuggucagcaacggguccuaccugaacgagacgcacuucagcgacgacaucgagcagcaggccgacaacaugaucaccgagaugcuccagaaggaguaccuggaccgccagggcaagaccccgcugggccucguggaccuguucguguucuccaccagcuucuaccugaucuccaucuuccugcaccucgucaagauccccacgcaccggcacaucguggggaagcccugccccaagccgcaccgccugaaccacaugggcaucugcagcugcgggcuguacaagcagcccggcgugcccguccgguggaagcgcugaggacuagucccuguucccagagcccacuuuuuuuucuuuuuuugaaauaaaauagccugucuuucagaucuaaaaaaaaaaaaaaaaaaaaaaaaaaaaaaaaaaaaaaaaaaaaaaaaaaaaaaaaaaaaaaaaugcaucccccccccccccccccccccccccccccccaaaggcucuuuucagagccaccagaauu

SEQ ID NO: 6193 - RNA, 1752 nt, Artificial Sequence
  mRNA product Design a-1 comprising derived and/or modified sequence from LASV(G1180-SLE-2010;Clade IV)__AIT17168__GPCstabilized (opt1)
gggagagucccgcagucggcguccagcggcucugcuuguucgugugugugucguugcaggccuuauucaagcuuaccaugggccagaucgugaccuucuuccaggaggucccccacgugaucgaggaggugaugaacaucguccugaucgcccucagcauccuggccgugcugaaggggcucuacaacuucgcgaccugcggccugguggggcugcucacguuccugcugcucugcggccgcuccugcaccgccagccgguacaagggggucuacgagcugcagacccuggagcucaacauggagacccugaacaugacgaugccgcuguccugcaccaagaacaacagccaccacuacaucauggugggcaacgagaccggccucgagcugacccugacgaacaccuccaucaucaaccacaaguucugcaaccucagcgacgcccacaagaagaaccuguacgaccacgcccugauguccaucaucagcaccuuccaccucuccauccccaacuucaaccaguacgaggccaugagcugcgacuucaacgggggcaagaucuccgugcaguacaaccugagccacuccuacgcgggggacgccgccaaccacugcggcaccgucgccaacggggugcugcagacguucaugcgcauggcguggggcggcagcuacaucgcccucgacuccgggugcggcagcugggacugcaucaugaccuccuaccaguaccugaucauccagaacaccaccugggaggaccacugccaguucagccggcccucccccaucggguaccugggccuccugagccagcgcacgcgggacaucuacaucagccgccggcgccggggcaccuucaccuggacccuguccgacagcgaggggaaggacacgccgggcggguacugccucacccgcuggaugcugaucgaggccgagcugaagugcuucggcaacaccgccguggccaagugcaacgagaagcacgacgaggaguucugcgacaugcuccggcuguucgacuucaacaagcaggcgauccagcgccugaaggcccccgcccagauguccauccagcucaucaacaaggccgucaacgcccugaucaacgaccagcugaucaugaagaaccaccuccgggacaucaugugcauccccuacugcaacuacagcaaguacugguaccugaaccacaccacgaccgggaagaccucccugcccaagugcuggcucgugagcaacggcuccuaccugaacgagacccacuucagcgacgacaucgagcagcaggcggacaacaugaucacggagaugcugcagaaggaguacauggagcgccagggcaagaccccgcucgggcugguggaccuguucgucuucuccaccagcuucuaccucaucuccaucuuccugcaccuggugaagauccccacccaccggcacaucgugggcaagagcugccccaagccccaccgccugaaccacauggggaucugcuccugcggccucuacaagcagccggggguccccgugaaguggaagcggugaggacuagucccuguucccagagcccacuuuuuuuucuuuuuuugaaauaaaauagccugucuuucagaucuaaaaaaaaaaaaaaaaaaaaaaaaaaaaaaaaaaaaaaaaaaaaaaaaaaaaaaaaaaaaaaaaugcaucccccccccccccccccccccccccccccccaaaggcucuuuucagagccaccagaauu

SEQ ID NO: 6194 - RNA, 1752 nt, Artificial Sequence
  mRNA product Design a-1 comprising derived and/or modified sequence from LASV(G1442-SLE-2011;Clade IV)__AIT17180__GPCstabilized (opt1)
gggagagucccgcagucggcguccagcggcucugcuuguucgugugugugucguugcaggccuuauucaagcuuaccaugggccagaucgugaccuucuuccaggaggucccccacgugaucgaggaggugaugaacaucguccugaucgcccucagcauccuggccgugcugaaggggcucuacaacguggcgaccugcggccugaucgggcuggucacguuccuccugcugugcggccgcuccugcaccaccacccucuacaaggggguguacgagcugcagacgcuggagcucaacauggagacccugaacaugaccaugccgcugagcugcaccaagaacaacucccaccacuacauccgggugggcaacgagacgggccucgagcugacccugaccaacaccagcaucaucaaccacaaguucugcaaccucuccgacgcccacaagaagaaccuguacgaccacgcccugaugagcaucaucuccacguuccaccucagcauccccaacuucaaccaguacgaggccauguccugcgacuucaacgggggcaagaucagcguccaguacaaccugucccacagcuacgccggggacgcggccaaccacugcggcaccguggccaacggggugcugcagaccuucaugcgcauggccuggggcggcuccuacaucgcgcucgacagcgggugcggcaacugggacugcaucaugaccuccuaccaguaccugaucauccagaacacgaccugggacgaccacugccaguucagccggcccucccccaucggguaccugggccuccugagccagcgcacccgggacgucuacaucucccgccggcgccggggcaccuucacguggacccugagcgacagcgaggggaaggacaccccgggcggguacugccucacccgcuggaugcugaucgaggccgagcugaagugcuucggcaacacggccguggccaagugcaacgagaagcacgacgaggaguucugcgacaugcuccggcuguucgacuucaacaagcaggccauccagcgccugaaggcgcccgcccagauguccauccagcucaucaacaaggccgugaacgcccugaucaacgaccagcugaucaugaagaaccaccuccgggacaucaugugcauccccuacugcaacuacagcaaguacugguaccugaacaacaccgccaccgggaagaccucccugcccaagugcuggcucaucagcaacggcuccuaccugaacgagacgcacuucagcgacgacaucgagcaggaggcggacaacaugaucaccgagaugcugcagaaggaguacauggagcgccagggcaagaccccgcucgggcuggucgaccuguucguguucuccaccagcuucuaccucaucuccaucuuccugcaccuggugaagauccccacgcaccggcacaucgucggcaagagcugccccaagccccaccgccugaaccacauggggaucugcuccugcggccucuacaagcagccgggggugcccgugcgguggaagcgcugaggacuagucccuguucccagagcccacuuuuuuuucuuuuuuugaaauaaaauagccugucuuucagaucuaaaaaaaaaaaaaaaaaaaaaaaaaaaaaaaaaaaaaaaaaaaaaaaaaaaaaaaaaaaaaaaaugcaucccccccccccccccccccccccccccccccaaaggcucuuuucagagccaccagaauu

SEQ ID NO: 6195 - RNA, 1752 nt, Artificial Sequence
  mRNA product Design a-1 comprising derived and/or modified sequence from LASV(G3010-SLE-2013;Clade IV)__AIT17344__GPCstabilized (opt1)
gggagagucccgcagucggcguccagcggcucugcuuguucgugugugugucguugcaggccuuauucaagcuuaccaugggccagaucgugaccuucuuccaggaggucccccacgugaucgaggaggugaugaacaucguccugaucgcccucagcauccuggccgugcugaaggggcucuacaacuucgcgaccugcggccugguggggcuggucacguuccuccugcugugcggccgcuccugcaccaccagccucuacaaggggguguacgagcugcagacccuggagcucaacauggagacgcugaacaugaccaugccgcuguccugcaccaagaacaacagccaccacuacaucauggugggcaacgagaccggccucgagcugacgcugaccaacaccuccaucaucaaccacaaguucugcaaccucagcgacgcccacaagaagaaccuguacaaccacgcccugauguccaucaucagcaccuuccaccucuccauccccaacuucaaccaguacgaggccaugagcugcgacuucaacgggggcaagaucuccguccaguacaaccugagccacuccuacgccggggacgcggccagccacugcggcacgguggccaacggggugcugcagaccuucaugcggauggccuggggcggcuccuacaucgcgcucgacagcgggugcggcaagugggacugcaucaugaccuccuaccaguaccugaucauccagaacaccacgugggaggaccacugccaguucagccgccccucccccaucggguaccugggccuccugagccagcggacccgcgacaucuacaucagccggcgccggcgcggcaccuucaccuggacgcuguccgacagcgaggggaaggacaccccgggcggguacugccucacccgguggaugcugaucgaggccgagcugaagugcuucggcaacaccgccgucgccaagugcaacgagaagcacgacgaggaguucugcgacaugcuccgccuguucgacuucaacaagcaggccauccagcggcugaagacgcccgcgcagauguccauccagcucaucaacaaggccgugaacgcccugaucaacgaccagcugaucaugaagaaccaccuccgcgacaucaugugcauccccuacugcaacuacagcaaguacugguaccugaaccacaccaccaccgggaagacgucccugcccaagugcuggcucgugagcaacggcuccuaccugaacgagacccacuucagcgacgacaucgagcagcaggccgacaacaugaucaccgagaugcugcagaaggaguacauggagcggcagggcaagaccccgcucgggcuggucgaccuguucguguucuccacgagcuucuaccucaucuccaucuuccugcaccuggugaagauccccacccaccgccacaucgucggcaagagcugccccaagccccaccggcugaaccacauggggaucugcuccugcggccucuacaagcagccgggggugcccgugcgcuggaagcggugaggacuagucccuguucccagagcccacuuuuuuuucuuuuuuugaaauaaaauagccugucuuucagaucuaaaaaaaaaaaaaaaaaaaaaaaaaaaaaaaaaaaaaaaaaaaaaaaaaaaaaaaaaaaaaaaaugcaucccccccccccccccccccccccccccccccaaaggcucuuuucagagccaccagaauu

SEQ ID NO: 6196 - RNA, 1752 nt, Artificial Sequence
  mRNA product Design a-1 comprising derived and/or modified sequence from LASV(G502-SLE-2009;Clade IV)__AIT17126__GPCstabilized (opt1)
gggagagucccgcagucggcguccagcggcucugcuuguucgugugugugucguugcaggccuuauucaagcuuaccaugggccagaucgugaccuucuuccaggaggucccccacgugaucgaggaggugaugaacaucguccugaucgcccucagcauccuggccgugcugaaggggcucuacaacuucgcgaccugcggccugguggggcugcucacguuccugcugcucugcggccgcuccugcaccaccgggcuguacaagggcgucuacgagcugcagacccucgagcugaacauggagacgcugaacaugaccaugccgcucagcugcaccaagaacaacucccaccacuacaucauggugggcaacgagaccgggcuggagcugacgcucaccaacaccagcaucaucaaccacaaguucugcaaccuguccgacgcccacaagaagaaccuguacgaccacgcccucaugagcaucaucuccaccuuccaccugagcauccccaacuucaaccaguacgaggccauguccugcgacuucaacggcgggaagaucagcgugcaguacaaccugucccacagcuacgccggcgacgcggccgaccacugcgggacggucgccaacggcgugcuccagaccuucaugcggauggccuggggcggguccuacaucgcgcuggacagcggcugcgggcgcugggacugcaucaugaccuccuaccaguaccugaucauccagaacaccacgugggaggaccacugccaguucagccggcccucccccaucggcuaccucggccugcugagccagcgcacccgggacaucuacaucucccgccggcgccgggggaccuucaccuggacgcucagcgacagcgagggcaaggacacccccgggggcuacugccugacccgcuggaugcugaucgaggccgagcucaagugcuucgggaacaccgccguggccaagugcaacgagaagcacgacgaggaguucugcgacaugcugcggcuguucgacuucaacaagcaggccauccagcgccucaaggcgccggcccagauguccauccagcugaucaacaaggccgucaacgcccugaucaacgaccagcucgugaugaagaaccaccuccgggacaucaugugcauccccuacugcaacuacagccgcuacugguaccugaaccacacgaccaccggccggaccucccugcccaagugcuggcuggugagcaacggcuccuaccugaacgagacgcacuucagcgacgacaucgagcagcaggccgacaacaugaucaccgagaugcuccagaaggaguacauggagcgccaggggaagaccccgcugggccuggucgaccucuucguguucuccaccagcuucuaccugaucuccaucuuccugcaccuggugaagauccccacgcaccggcacaucgucggcaagagcugccccaagccccaccgccucaaccacauggggaucugcuccugcgggcuguacaagcagccgggcgugcccgugaaguggaagcggugaggacuagucccuguucccagagcccacuuuuuuuucuuuuuuugaaauaaaauagccugucuuucagaucuaaaaaaaaaaaaaaaaaaaaaaaaaaaaaaaaaaaaaaaaaaaaaaaaaaaaaaaaaaaaaaaaugcaucccccccccccccccccccccccccccccccaaaggcucuuuucagagccaccagaauu

SEQ ID NO: 6197 - RNA, 1752 nt, Artificial Sequence
  mRNA product Design a-1 comprising derived and/or modified sequence from LASV(G733-SLE-2010;Clade IV)__AIT17154__GPCstabilized (opt1)
gggagagucccgcagucggcguccagcggcucugcuuguucgugugugugucguugcaggccuuauucaagcuuaccaugggccagaucgugaccuucuuccaggaggucccccacgugaucgaggaggugaugaacaucguccugaucgcccucagcauccuggccgugcugaaggggcucuacaacuucgcgaccugcggcaucguggggcuggucuccuuccugcuccugugcggccgcagcugcacgaccucccuguacaaggggguguacgagcuccagacccuggagcugaacauggagacccucaacaugacgaugccgcugagcugcaccaagaacaacucccaccacuacaucauggugggcaacgagaccggccuggagcucacccugacgaacaccagcaucaucaaccacaaguucugcaaccuguccgacgcccacaagaagaaccucuacgaccacgcccugaugagcaucaucuccaccuuccaccugagcauccccaacuucaaccaguacgaggccauguccugcgacuucaacgggggcaagaucagcguccaguacaaccucucccacagcuacgccggggacgcggccaaccacugcggcaccaucgccaacggggugcugcagacguucaugcggauggccuggggcggcuccuacaucgcgcuggacagcgggugcgaccgcugggacugcaucaugaccuccuaccaguaccucaucauccagaacaccaccugggaggaccacugccaguucagccggcccucccccaucggcuaccuggggcugcucagccagcgcacgcgggacaucuacaucagccgccggcgccggggcaccuucaccuggacccuguccgacagcgagggcaaggacacgcccgggggcuacugccugacccgcuggaugcucaucgaggccgagcugaagugcuucgggaacaccgccguggccaagugcaacgagaagcacgacgaggaguucugcgacaugcugcggcuguucgacuucaacaagcaggccauccagcgccugaaggcgccggcccagauguccauccagcugaucaacaaggccgucaacgcccucaucaacgaccagcugaucaugaagaaccaccuccgggacaucaugugcauccccuacugcaacuacagcaaguacugguaccucaaccacaccacgaccggcaagaccucccugcccaagugcuggcuggugagcaacggguccuaccucaacgagacccacuucagcgacgacaucgagcagcaggccgacaacaugaucacggagaugcugcagaaggaguacauggagcgccagggcaagaccccgcugggccucguggaccuguucgucuucuccaccagcuucuaccugaucuccaucuuccuccaccuggugaagauccccacccaccggcacguggucggcaagagcugccccaagccccaccgccugaaccacauggggaucugcuccugcgggcuguacggccagccgggggugcccgugaaguggaagcggugaggacuagucccuguucccagagcccacuuuuuuuucuuuuuuugaaauaaaauagccugucuuucagaucuaaaaaaaaaaaaaaaaaaaaaaaaaaaaaaaaaaaaaaaaaaaaaaaaaaaaaaaaaaaaaaaaugcaucccccccccccccccccccccccccccccccaaaggcucuuuucagagccaccagaauu

SEQ ID NO: 6198 - RNA, 1752 nt, Artificial Sequence
  mRNA product Design a-1 comprising derived and/or modified sequence from MOPV/LASV reassortant(IGS-1;Clade IV)__AFY05576__GPCstabilized (opt1)
gggagagucccgcagucggcguccagcggcucugcuuguucgugugugugucguugcaggccuuauucaagcuuaccaugggccagaucgugaccuucuuccaggaggucccccacgugaucgaggaggugaugaacaucguccugaucgcccucagcgugcuggccgugcugaaggggcucuacaacuucgcgaccugcggccuggucgggcuggugacguuccuccugcugugcggccgcuccugcaccaccagccucuacaaggggguguacgagcugcagacccuggagcucaacauggagacgcugaacaugaccaugccgcuguccugcaccaagaacaacagccaccacuacaucauggucggcaacgagaccggccucgagcugacgcugaccaacaccuccaucaucaaccacaaguucugcaaccucagcgacgcccacaagaagaaccuguacgaccacgcccugauguccaucaucagcaccuuccaccucuccauccccaacuucaaccaguacgaggccaugagcugcgacuucaacgggggcaagaucuccgugcaguacaaccugagccacuccuacgccggggacgcggccaaccacugcggcacgguggccaacgggguccugcagaccuucaugcggauggccuggggcggcagcuacaucgcgcucgacuccgggugcggcaacugggacugcaucaugaccagcuaccaguaccugaucauccagaacaccacgugggaggaccacugccaguucucccgccccagccccaucggguaccugggccuccugucccagcggacccgcgacaucuacaucagccggcgccggcgcggcaccuucaccuggacgcugagcgacuccgagggggaggacaccccgggcggguacugccucacccgguggaugcugaucgaggccgagcugaagugcuucggcaacaccgccguggccaagugcaacgagaagcacgacgaggaguucugcgacaugcuccgccuguucgacuucaacaagcaggccauccagcggcugaaggcgcccgcccagaugagcauccagcucaucaacaaggccgugaacgcccugaucaacgaccagcugaucaugaagaaccaccuccgcgacaucaugugcauccccuacugcaacuacuccaaguacugguaccugaaccacacgaccaccgggcggaccagccugcccaagugcuggcucgucuccaacggcagcuaccugaacgagacgcacuucuccgacgacaucgagcagcaggccgacaacaugaucaccgagaugcugcagaaggaguacauggagcgccagggcaagaccccgcucgggcugguggaccuguucguguucagcaccuccuucuaccucaucagcaucuuccugcaccuggucaagauccccacgcaccggcacaucgugggcaaguccugccccaagccccaccgccugaaccacauggggaucugcagcugcggccucuacaagcagccgggggugcccgucaaguggaagcggugaggacuagucccuguucccagagcccacuuuuuuuucuuuuuuugaaauaaaauagccugucuuucagaucuaaaaaaaaaaaaaaaaaaaaaaaaaaaaaaaaaaaaaaaaaaaaaaaaaaaaaaaaaaaaaaaaugcaucccccccccccccccccccccccccccccccaaaggcucuuuucagagccaccagaauu

SEQ ID NO: 6199 - RNA, 1752 nt, Artificial Sequence
  mRNA product Design a-1 comprising derived and/or modified sequence from LASV(LM765-SLE-2012;Clade IV)__AIT17814__GPCstabilized (opt1)
gggagagucccgcagucggcguccagcggcucugcuuguucgugugugugucguugcaggccuuauucaagcuuaccaugggccagaucgugaccuucuuccaggaggucccccacgugaucgaggaggugaugaacaucguccugaucgcccucagcauccuggccgugcugaaggggcucuacaacuucgcgaccugcggccugguggggcuggucacguuccuccugcugugcggccgcuccugcaccaccagccucuacaaggggguguacgagcugcagacccuggagcucaacauggagacgcugaacaugaccaugccgcuguccugcaccaagaacaacagccaccacuacaucauggugggcaacgagaccggccucgagcugacgcugaccaacaccuccaucaucgaccacaaguucugcaaccucagcgacgcccaccggaagaaccuguacgaccacgcccugauguccaucaucagcaccuuccaccucuccauccccaacuucaaccaguacgaggccaugagcugcgacuucaacgggggcaagaucuccguccaguacaaccugagccacuccuacgccaaggacgcggccgaccacugcgggacgguggccaacggcgugcugcagaccuucaugcgcauggccuggggcgggagcuacaucgcgcucgacuccggcugcgggcggugggacugcaucaugaccagcuaccaguaccugaucauccagaacaccacgugggaggaccacugccaguucucccgccccagccccaucggcuaccuggggcuccugucccagcggacccgcgacaucuacaucagccggcgccggcgcggcaccuucaccuggacgcugagcgacuccgagggcaaggacacccccgggggcuacugccucacccgguggaugcugaucgaggccgagcugaagugcuucgggaacaccgccgucgccaagugcaacgagaagcacgacgaggaguucugcgacaugcuccgccuguucgacuucaacaagcaggccauccagcggcugaaggcgccggcccagaugagcauccagcucaucaacaaggccgugaacgcccugaucaacgaccagcugaucaugaagaaccaccuccgcgacaucaugugcauccccuacugcaacuacuccaaguacugguaccugaaccacacgaccaccggcaagaccagccugcccaagugcuggcucguguccaacgggagcuaccugaacgagacgcacuucuccgacgacaucgagcagcaggccgacaacaugaucaccgagaugcugcagaaggaguacauggagcggcagggcaagaccccgcucggccuggucgaccuguucguguucagcaccuccuucuaccucaucagcaucuuccugcaccuggugaagauccccacgcaccgccacaucgucgggaagcccugccccaagccgcaccggcugaaccacaugggcaucugcuccugcgggcucuacaagcagcccggcgugcccgugaaguggaagcgcugaggacuagucccuguucccagagcccacuuuuuuuucuuuuuuugaaauaaaauagccugucuuucagaucuaaaaaaaaaaaaaaaaaaaaaaaaaaaaaaaaaaaaaaaaaaaaaaaaaaaaaaaaaaaaaaaaugcaucccccccccccccccccccccccccccccccaaaggcucuuuucagagccaccagaauu

SEQ ID NO: 6200 - RNA, 1752 nt, Artificial Sequence
  mRNA product Design a-1 comprising derived and/or modified sequence from LASV(LM776-SLE-2012;Clade IV)__AIT17824__GPCstabilized (opt1)
gggagagucccgcagucggcguccagcggcucugcuuguucgugugugugucguugcaggccuuauucaagcuuaccaugggccagaucgugaccuucuuccaggaggucccccacgugaucgaggaggugaugaacaucguccugaucgcccucagcauccuggccgugcugaaggggcucuacaacuucgcgaccugcggccugguggggcuggucacguuccuccugcugugcggccgcuccugcaccaccagcguguacaaggggguguacgagcuccagacccuggagcugaacauggagacgcucaacaugaccaugccgcuguccugcaccaagaacaacagccaccacuacaucauggucggcaacgagaccggccuggagcucacgcugaccaacaccuccaucaucaaccacaaguucugcaaccugagcgacgcccacaagaagaaccucuacgaccacgcccugauguccaucaucagcaccuuccaccuguccauccccaacuucaaccaguacgaggccaugagcugcgacuucaacgggggcaagaucuccgugcaguacaaccucagccacuccuacgccggggacgcggccaaccacugcggcacgguggccaacgggguccugcagaccuucaugcggauggccuggggcggcagcuacaucgcgcuggacuccgggugcggcaagugggacugcaucaugaccagcuaccaguaccucaucauccagaacaccacgugggaggaccacugccaguucucccgccccagccccaucggguaccugggccugcucucccagcggacccgcgacaucuacaucagccggcgccggcgcggcaccuucaccuggacgcugagcgacuccgaggggaaggacaccccgggcggguacugccugacccgguggaugcucaucgaggccgagcugaagugcuucggcaacaccgccguggccaagugcaacgagaagcacgacgaggaguucugcgacaugcugcgccucuucgacuucaacaagcaggccauccagcggcugaaggcgcccgcccagaugagcauccagcugaucaacaaggccgugaacgcccucaucaacgaccagcugaucaugaagaaccaccuccgcgacaucaugugcauccccuacugcaacuacuccaaguacugguaccugaaccacacgaccaccgggaagaccagccugcccaagugcuggcuggucuccaacggcagcuaccucaacgagacgcacuucuccgacgacaucgagcagcaggccgacaacaugaucaccgagaugcugcagaaggaguacauggagcggcagggcaagaccccgcuggggcucguggaccuguucguguucagcaccuccuucuaccugaucagcaucuuccuccaccuggucaagauccccacgcaccgccacaucgugggcaaguccugccccaagccccaccggcugaaccacauggggaucugcagcugcggccuguacaagcagccgggggugcccguccgcuggaagcggugaggacuagucccuguucccagagcccacuuuuuuuucuuuuuuugaaauaaaauagccugucuuucagaucuaaaaaaaaaaaaaaaaaaaaaaaaaaaaaaaaaaaaaaaaaaaaaaaaaaaaaaaaaaaaaaaaugcaucccccccccccccccccccccccccccccccaaaggcucuuuucagagccaccagaauu

SEQ ID NO: 6201 - RNA, 1752 nt, Artificial Sequence
  mRNA product Design a-1 comprising derived and/or modified sequence from LASV(Mad39;Clade IV)__ANH09722__GPCstabilized (opt1)
gggagagucccgcagucggcguccagcggcucugcuuguucgugugugugucguugcaggccuuauucaagcuuaccaugggccagaucgugaccuucuuccaggaggucccccacgugaucgaggaggugaugaacaucguccugaucgcccucagcauccuggccgugcugaaggggcucuacaacguggcgaccugcggccugaucgggcuggucacguuccuccugcugugcggccgcuccugcaccaccacccucuacaaggggguguacgagcugcaggcccuggagcucaacauggagacgcugaacaugaccaugccgcugagcugcaccaagaacaacucccaccacuacauccgggugggcaacgagaccggccucgagcugacgcugaccaacaccagccucaucaaccacaaguucugcaaccuguccgacgcccacaagaagaaccuguacgaccacgcccucaugagcaucaucuccaccuuccaccugagcauccccaacuucaaccaguacgaggccauguccugcgacuucaacgacgggaagaucagcguccaguacaaccugucccacacguacgcgggcgacaccgccaaccacugcgggaccguggccaacggcgugcuccagaccuucaugcgcauggccuggggcgggagcuacaucgcgcuggacuccggcugcgggggcugggacugcaucaugacgagcuaccaguaccugaucauccagaacaccaccugggaggaccacugccaguucucccggcccagccccaucggguaccucggccugcugucccagcgcacccgggacaucuacaucagccgccggcgccggggcacguucaccuggacccucuccgacagcgaggggaaggacaccccgggcggguacugccugacgcgcuggaugcugaucgaggccgagcucaagugcuucggcaacaccgccgucgccaagugcaacgagaagcacgacgaggaguucugcgacaugcugcggcuguucgacuucaacaagcaggccauccagcgccucaaggcgcccgcccagaugagcauccagcugaucaacaaggccgugaacgcccugaucaacgaccagcucaucaugaagaaccaccuccgggacaucaugugcauccccuacugcaacuacuccaaguacugguaccugaaccacaccgugaccgggaagacgagccugcccaagugcuggcuggucuccaacggcagcuaccugaacgagacccacuucuccgacgacaucgagcagcaggccgacaacaugaucaccgagaugcuccagaaggaguacauggagcgccagggcaagaccccgcuggggcugguggaccucuucguguucagcacguccuucuaccugaucagcaucuuccugcaccuggucaagauccccacccaccggcacguggugggcaagcccugccccaagccgcaccgccucaaccacauggggaucugcuccugcggcuucuacaagcagcccgggguccccgugcgguggaagcgcugaggacuagucccuguucccagagcccacuuuuuuuucuuuuuuugaaauaaaauagccugucuuucagaucuaaaaaaaaaaaaaaaaaaaaaaaaaaaaaaaaaaaaaaaaaaaaaaaaaaaaaaaaaaaaaaaaugcaucccccccccccccccccccccccccccccccaaaggcucuuuucagagccaccagaauu

SEQ ID NO: 6202 - RNA, 1752 nt, Artificial Sequence
  mRNA product Design a-1 comprising derived and/or modified sequence from LASV(Z0947-SLE-2011;Clade IV)__AIT17840__GPCstabilized (opt1)
gggagagucccgcagucggcguccagcggcucugcuuguucgugugugugucguugcaggccuuauucaagcuuaccaugggccagaucgugaccuucuuccaggaggucccccacgugaucgaggaggugaugaacaucguccugaucgcccucagcauccuggccgugcugaaggggcucuacaacuucgcgaccugcggccugguggggcuggucacguuccuccugcugugcggccgcuccugcaccaucagccucuacaaggggguguacgagcugcagacccuggagcucaacauggagacccugaacaugacgaugccgcuguccugcaccaagaacaacagccaccacuacaucauggugggcaacgagaccggccucgagcugacccugacgaacaccuccaucaucaaccacaaguucugcaaccucagcgacgcccacaagaagaaccuguacgaccacgcccugauguccaucaucagcaccuuccaccucuccauccccaacuucaaccaguacgaggccaugagcugcgacuucaacgggggcaagaucuccguccaguacaaccugagccacuccuacgccggggacgcggccaaccacugcggcaccguggccaacggggugcugcagacguucaugcggauggccuggggcggcagcuacaucgcgcucgacuccgggugcgaccgcugggacugcaucaugaccagcuaccaguaccugaucauccagaacaccaccugggaggaccacugccaguucucccggcccagccccaucggcuaccuggggcuccugucccagcgcacgcgggacaucuacaucagccgccggcgccggggcaccuucaccuggacccugagcgacuccgagggcaaggacacgcccgggggcuacugccucacccgcuggaugcugaucgaggccgagcugaagugcuucgggaacaccgccgucgccaagugcaacgagaagcacgacgaggaguucugcgacaugcuccggcuguucgacuucaacaagcaggccauccagcgccugaaggcgccggcccagaugagcauccagcucaucaacaaggccgugaacgcccugaucaacgaccagcugaucaugaagaaccaccuccgggacaucaugugcauccccuacugcaacuacuccaaguacugguaccugaaccacaccacgaccggcaagaccagccugcccaagugcuggcucguguccaacgggagcuaccugaacgagacccacuucuccgacgacaucgagcagcaggccgacaacaugaucacggagaugcugcagaaggaguacauggagcgccagggcaagaccccgcucggccuggucgaccuguucguguucagcaccuccuucuaccucaucagcaucuuccugcaccuggugaagauccccacccaccggcacaucgucgggaagcccugccccaagccgcaccgccugaaccacaugggcaucugcuccugcgggcucuacaagcagcccggcgugcccgugaaguggaagcggugaggacuagucccuguucccagagcccacuuuuuuuucuuuuuuugaaauaaaauagccugucuuucagaucuaaaaaaaaaaaaaaaaaaaaaaaaaaaaaaaaaaaaaaaaaaaaaaaaaaaaaaaaaaaaaaaaugcaucccccccccccccccccccccccccccccccaaaggcucuuuucagagccaccagaauu

SEQ ID NO: 6203 - RNA, 1752 nt, Artificial Sequence
  mRNA product Design a-1 comprising derived and/or modified sequence from LASV(Josiah;Clade IV)__NP_694870__GPCstabilized (opt2)
gggagagucccgcagucggcguccagcggcucugcuuguucgugugugugucguugcaggccuuauucaagcuuaccaugggccagaucgucaccuucuuccaggaggucccccacgucaucgaggaggucaugaacaucguccucaucgcccucuccguccucgccguccucaagggccucuacaacuucgccaccugcggccucgucggccucgucaccuuccuccuccucugcggccgcuccugcaccaccucccucuacaagggcgucuacgagcuccagacccucgagcucaacauggagacccucaacaugaccaugccccucuccugcaccaagaacaacucccaccacuacaucauggucggcaacgagaccggccucgagcucacccucaccaacaccuccaucaucaaccacaaguucugcaaccucuccgacgcccacaagaagaaccucuacgaccacgcccucauguccaucaucuccaccuuccaccucuccauccccaacuucaaccaguacgaggccauguccugcgacuucaacggcggcaagaucuccguccaguacaaccucucccacuccuacgccggcgacgccgccaaccacugcggcaccgucgccaacggcguccuccagaccuucaugcgcauggccuggggcggcuccuacaucgcccucgacuccggcugcggcaacugggacugcaucaugaccuccuaccaguaccucaucauccagaacaccaccugggaggaccacugccaguucucccgccccucccccaucggcuaccucggccuccucucccagcgcacccgcgacaucuacaucucccgccgccgccggggcaccuucaccuggacccucuccgacuccgagggcaaggacacccccggcggcuacugccucacccgcuggaugcucaucgaggccgagcucaagugcuucggcaacaccgccgucgccaagugcaacgagaagcacgacgaggaguucugcgacaugcuccgccucuucgacuucaacaagcaggccauccagcgccucaaggcccccgcccagauguccauccagcucaucaacaaggccgucaacgcccucaucaacgaccagcucaucaugaagaaccaccuccgcgacaucaugugcauccccuacugcaacuacuccaaguacugguaccucaaccacaccaccaccggccgcaccucccuccccaagugcuggcucgucuccaacggcuccuaccucaacgagacccacuucuccgacgacaucgagcagcaggccgacaacaugaucaccgagaugcuccagaaggaguacauggagcgccagggcaagaccccccucggccucgucgaccucuucgucuucuccaccuccuucuaccucaucuccaucuuccuccaccucgucaagauccccacccaccgccacaucgucggcaaguccugccccaagccccaccgccucaaccacaugggcaucugcuccugcggccucuacaagcagcccggcguccccgucaaguggaagcgcugaggacuagucccuguucccagagcccacuuuuuuuucuuuuuuugaaauaaaauagccugucuuucagaucuaaaaaaaaaaaaaaaaaaaaaaaaaaaaaaaaaaaaaaaaaaaaaaaaaaaaaaaaaaaaaaaaugcaucccccccccccccccccccccccccccccccaaaggcucuuuucagagccaccagaauu

SEQ ID NO: 6204 - RNA, 1749 nt, Artificial Sequence
  mRNA product Design a-1 comprising derived and/or modified sequence from LASV(LP;Clade I)__AAF86701__GPCstabilized (opt2)
gggagagucccgcagucggcguccagcggcucugcuuguucgugugugugucguugcaggccuuauucaagcuuaccaugggccagaucaucaccuucuuccaggaggucccccacgucaucgaggaggucaugaacaucguccucaucgcccucucccuccucgccauccucaagggccucuacaacaucgccaccugcggcaucaucggccucgucgccuuccucuuccucugcggcaaguccugcucccucacccucaagggcggcuacgagcuccagacccucgagcucaacauggagacccucaacaugaccaugccccucuccugcaccaagaacuccucccaccacuacauccgcgucggcaacgagaccggccucgagcucacccucaccaacaccuccaucaucaaccacaaguucugcaaccucuccgacgcccacaagaagaaccucuacgaccacgcccucauguccaucaucuccaccuuccaccucuccauccccaacuucaaccaguacgaggccauguccugcgacuucaacggcggcaagaucuccguccaguacaaccucucccacuccuacgccggcgacgccgccgagcacugcggcaccgucgccaacggcguccuccagaccuucaugcgcauggccuggggcggccgcuacaucgcccucgacuccggcugcggcaacugggacugcaucaugaccuccuaccaguaccucaucauccagaacaccaccugggaggaccacugccaguucucccgccccucccccaucggcuaccucggccuccucucccagcgcacccgcgacaucuacaucucccgccgccgccggggcaccuucaccuggacccucuccgacuccgagggcaacgagacccccggcggcuacugccucacccgcuggaugcucaucgaggccgagcucaagugcuucggcaacaccgccgucgccaagugcaacgagaagcacgacgaggaguucugcgacaugcuccgccucuucgacuucaacaagcaggccauccgccgccucaaggcccccgcccagauguccauccagcucaucaacaaggccgucaacgcccucaucaacgaccagcucaucaugaagaaccaccuccgcgacaucaugugcauccccuacugcaacuacuccaaguacugguaccucaaccacaccuccuccggccgcaccucccuccccaagugcuggcucaucuccaacggcuccuaccucaacgagacccaguucuccgacgacaucgagcagcaggccgacaacaugaucaccgagaugcuccagaaggaguacaucgagcgccagggcaagaccccccucggccucgucgacaucuucaucuucuccaccuccuucuaccucaucuccaucuuccuccaccucaucaagauccccacccaccgccacaucgucggcaagcccugccccaagccccaccgccucaaccacaugggcgucugcuccugcggccucuacaagcaccccggcguccccaccaaguggaagcgcugaggacuagucccuguucccagagcccacuuuuuuuucuuuuuuugaaauaaaauagccugucuuucagaucuaaaaaaaaaaaaaaaaaaaaaaaaaaaaaaaaaaaaaaaaaaaaaaaaaaaaaaaaaaaaaaaaugcaucccccccccccccccccccccccccccccccaaaggcucuuuucagagccaccagaauu

SEQ ID NO: 6205 - RNA, 1749 nt, Artificial Sequence
  mRNA product Design a-1 comprising derived and/or modified sequence from LASV(803213;Clade II)__AAF86703__GPCstabilized (opt2)
gggagagucccgcagucggcguccagcggcucugcuuguucgugugugugucguugcaggccuuauucaagcuuaccaugggccagaucaucaccuucuuccaggaggucccccacgucaucgaggaggucaugaacaucguccucaucgcccucucccuccucgccauccucaagggcaucuacaacgucgccaccugcggccucuucggccucaucuccuuccuccuccucugcggccgcuccugcuccgucaccuacaagggcgucuacgagcuccagacccucgagcucaacauggccaaccucaacaugaccaugccccucuccugcaccaagaacaacucccaccacuacaucauggucggcaacgagaccggccucgagcucacccucaccaacaccuccaucaucaaccacaaguucugcaaccucuccgacgcccacaagaagaaccucuacgaccacgcccucauguccaucaucuccaccuuccaccucuccauccccaacuucaaccaguacgaggccauguccugcgacuucaacggcggcaagaucuccguccaguacaaccucucccacuccuucgccgucgacgccgccaaccacugcggcaccaucgccaacggcguccuccagaccuucaugcgcauggccuggggcggcuccuacaucgcccucgacuccggcugcggcaacugggacugcaucaugaccuccuaccaguaccucaucauccagaacaccaccugggaggaccacugccaguucucccgccccucccccaucggcuaccucggccuccucucccagcgcacccgcgacaucuacaucucccgccgccgccggggcaccuucaccuggacccucuccgacuccgagggcaacgaggcccccggcggcuacugccucacccgcuggaugcucaucgaggccgagcucaagugcuucggcaacaccgccgucgccaagugcaacgagaagcacgacgaggaguucugcgacaugcuccgccucuucgacuucaacaagcaggccaucaagcgccucaagacccccgcccagauguccauccagcucaucaacaaggccgucaacgcccucaucaacgaccagcucaucaugaagaaccaccuccgcgacaucaugugcauccccuacugcaacuacucccgcuacugguaccucaaccacaccgucaccggcaagaccucccucccccgcugcuggcucgucuccaacggcuccuaccucaacgagacccacuucuccgacgacaucgagcagcaggccgacaacaugaucaccgagaugcuccagaaggaguacauggaccgccagggcaagaccccccucggccucgucgaccucuucgucuucuccaccuccuucuaccucaucuccaucuuccuccaccucgucaagauccccacccaccgccacaucgucggcaagcccugccccaagccccaccgccucaaccacaugggcaucugcuccugcggccucuacaagcaccccggcguccccgucaaguggaagcgcugaggacuagucccuguucccagagcccacuuuuuuuucuuuuuuugaaauaaaauagccugucuuucagaucuaaaaaaaaaaaaaaaaaaaaaaaaaaaaaaaaaaaaaaaaaaaaaaaaaaaaaaaaaaaaaaaaugcaucccccccccccccccccccccccccccccccaaaggcucuuuucagagccaccagaauu

SEQ ID NO: 6206 - RNA, 1749 nt, Artificial Sequence
  mRNA product Design a-1 comprising derived and/or modified sequence from LASV(GA391;Clade III)__CAA36645__GPCstabilized (opt2)
gggagagucccgcagucggcguccagcggcucugcuuguucgugugugugucguugcaggccuuauucaagcuuaccaugggccagaucgucaccuucuuccaggaggucccccacgucaucgaggaggucaugaacaucguccucaucgcccucuccauccucgccauccucaagggccucuacaacgucgccaccugcggccucaucggccucgucaccuuccuccuccucuccggccgcuccugcucccucaucuacaagggcaccuacgagcuccagacccucgagcucaacauggagacccucaacaugaccaugccccucuccugcaccaagaacaacucccaccacuacauccgcgucggcaacgagaccggccucgagcucacccucaccaacaccuccauccucaaccacaaguucugcaaccucuccgacgcccacaagcgcaaccucuacgaccacucccucauguccaucaucuccaccuuccaccucuccauccccaacuucaaccaguacgaggccauguccugcgacuucaacggcggcaagaucaccguccaguacaaccucucccacuccuucgccgucgacgccgccggccacugcggcacccucgccaacggcguccuccagaccuucaugcgcauggccuggggcggcuccuacaucgcccucgacuccggcugcggcaacugggacugcaucaugaccuccuaccaguaccucaucauccagaacaccaccugggacgaccacugccaguucucccgccccucccccaucggcuaccucggccuccucucccagcgcacccgcgacaucuacaucucccgccgccgccggggcaccuucaccuggacccucuccgacuccgagggcaacgagacccccggcggcuacugccucacccgcuggaugcucaucgaggccgagcucaagugcuucggcaacaccgccgucgccaagugcaacgagaagcacgacgaggaguucugcgacaugcuccgccucuucgacuucaacaagcaggccauccgccgccucaagacccccgcccagauguccauccagcucaucaacaaggccgucaacgcccucaucaacgaccagcucaucaugaagaaccaccuccgcgacaucaugugcauccccuacugcaacuacucccgcuacugguaccucaaccacaccuccaccggcaagaccucccucccccgcugcuggcucaucuccaacggcuccuaccucaacgagaccaaguucuccgacgacaucgagcagcaggccgacaacaugaucaccgagaugcuccagaaggaguacaucgaccgccagggcaagaccccccucggccucgucgaccucuucgucuucuccaccuccuucuaccucaucuccaucuuccuccaccucgucaagauccccacccaccgccacaucgucggcaagcccugccccaagccccaccgccucaaccacaugggcaucugcuccugcggccucuacaagcagcccggcguccccguccgcuggaagcgcugaggacuagucccuguucccagagcccacuuuuuuuucuuuuuuugaaauaaaauagccugucuuucagaucuaaaaaaaaaaaaaaaaaaaaaaaaaaaaaaaaaaaaaaaaaaaaaaaaaaaaaaaaaaaaaaaaugcaucccccccccccccccccccccccccccccccaaaggcucuuuucagagccaccagaauu

SEQ ID NO: 6207 - RNA, 1752 nt, Artificial Sequence
  mRNA product Design a-1 comprising derived and/or modified sequence from LASV(AV;Clade V)__CCA30314__GPCstabilized (opt2)
gggagagucccgcagucggcguccagcggcucugcuuguucgugugugugucguugcaggccuuauucaagcuuaccaugggccagaucgucaccuucuuccaggaggucccccacgucaucgaggaggucaugaacaucguccucaucgcccucuccauccucgccguccucaagggccucuacaacaucgccaccugcggccucaucggccucaucaccuuccuccuccucugcggccgcuccugcuccuccaaccucuacaagggcgucuacgagcuccagucccucgaccucaacauggagacccucaacaugaccaugccccucuccugcaccaagaacaacucccaccacuacauccgcgucggcaacgacaccggccucgagcucacccucaccaacaccuccauccucaaccacaaguucugcaaccucuccgacgcccacaagaaggaccucuacgaccacgcccucauguccaucaucuccaccuuccaccucuccauccccaacuucaaccaguacgaggccauguccugcgacuucaacggcggcaagaucuccguccaguacaaccucucccacuccuacgccaucgacgccgccaaccacugcggcaccgucgccaacggcauccuccagaccuucaugcgcauggccuggggcggcuccuacaucgcccucgacuccggcugcggcaacugggacugcaucaugaccuccuaccaguaccucaucauccagaacaccaccugggagaaccacugccaguucucccgccccucccccaucggcuaccucggccuccucucccagcgcacccgcgacaucuacaucucccgccgccgccggggcaccuucaccuggacccucuccgacuccgagggcaacgccacccccggcggcuacugccucacccgcuggaugcucaucgaggccgagcucaagugcuucggcaacaccgccgucgccaagugcaacgagaagcacgacgaggaguucugcgacaugcuccgccucuucgacuucaacaagcaggccaucucccgccucaagucccccgcccagauguccauccagcucaucaacaaggccgucaacgcccucaucaacgaccagcucaucaugaagaaccaccuccgcgacaucaugugcauccccuacugcaacuacuccaaguacugguaccucaaccacaccaucaccggcaagaccucccuccccaagugcuggcucgucuccaacggcuccuaccucaacgagacccacuucuccgacgacaucgagcagcaggccgacaacaugaucaccgagaugcuccagaaggaguacauggagcgccagggcaagaccccccucggccucgucgaccucuucgucuucuccaccuccuucuaccucaucuccaucuuccuccgccucgucaagauccccacccaccgccacaucgucggcaagcccugccccaagccccaccgccucaaccacaugggcaucugcuccugcggccucuacaagcagcccggcguccccguccgcuggaagcgcugaggacuagucccuguucccagagcccacuuuuuuuucuuuuuuugaaauaaaauagccugucuuucagaucuaaaaaaaaaaaaaaaaaaaaaaaaaaaaaaaaaaaaaaaaaaaaaaaaaaaaaaaaaaaaaaaaugcaucccccccccccccccccccccccccccccccaaaggcucuuuucagagccaccagaauu

SEQ ID NO: 6208 - RNA, 1749 nt, Artificial Sequence
  mRNA product Design a-1 comprising derived and/or modified sequence from LASV(Togo/2016/7082;Clade VI)__AMR44577__GPCstabilized (opt2)
gggagagucccgcagucggcguccagcggcucugcuuguucgugugugugucguugcaggccuuauucaagcuuaccaugggccagaucaucaccuucuuccaggaggucccccacgucaucgaggaggucaugaacaucguccucaucgcccucucccuccucgccauccucaagggcgucuacaacgucgccaccugcggcaucaucggccucgucaccuuccucuuccucugcggccgcuccugcucccucaucuacaagggcuccuacgagcuccagacccucgagcucaacauggagacccucaacaugaccaugccccucuccugcaccaagaacuccucccaccacuacauccgcgucggcaacgagaccggccucgagcucacccucaccaacaccuccaucaucaaccacaaguucugcaaccucuccgacgcccacaagcgcaaccucuacgaccacgcccucauguccauccucuccaccuuccaccucuccauccccaacuucaaccaguacgaggccauguccugcgacuucaacggcggcaagaucuccguccaguacaaccucucccacgccuacgccgucgacgccgccgagcacugcggcaccgucgccaacggcguccuccagaccuucaugcgcauggccuggggcggcuccuacaucgcccucgacuccggcugcggcaacugggacugcaucaugaccuccuaccaguaccucaucauccagaacaccaccugggaggaccacugccaguucucccgccccucccccaucggcuaccucggccuccucucccagcgcacccgcgacaucuacaucucccgccgccgccggggcaccuucaccuggacccucuccgacuccgagggcaacgagacccccggcggcuacugccucacccgcuggaugcucaucgaggccgagcucaagugcuucggcaacaccgccgucgccaagugcaacgagaagcacgacgaggaguucugcgacaugcuccgccucuucgacuucaacaagcaggccauccagcgccucaagucccccgcccagauguccauccagcucaucaacaaggccgucaacgcccucaucaacgaccagcucaucaugaagaaccaccuccgcgacaugaugugcauccccuacugcaacuacuccaaguacugguaccucaaccacaccuccuccggccgcaccucccuccccaagugcuggcucgucuccaacggcuccuaccucaacgagacccacuucuccgacgacaucgagcagcaggccgacaacaugaucaccgagaugcuccagaaggaguacaucgaccgccagggcaagaccccccucggccucgucgaccucuucgucuucuccaccuccuucuaccucaucuccaucuuccuccaccucaucaagauccccacccaccgccacaucgucggcaagcccugccccaagccccaccgccucaaccacaugggcaucugcuccugcggccucuacaagcagcccggcguccccacccgcuggaagcgcugaggacuagucccuguucccagagcccacuuuuuuuucuuuuuuugaaauaaaauagccugucuuucagaucuaaaaaaaaaaaaaaaaaaaaaaaaaaaaaaaaaaaaaaaaaaaaaaaaaaaaaaaaaaaaaaaaugcaucccccccccccccccccccccccccccccccaaaggcucuuuucagagccaccagaauu

SEQ ID NO: 6209 - RNA, 1749 nt, Artificial Sequence
  mRNA product Design a-1 comprising derived and/or modified sequence from LASV(KAK-428;Clade n.d. (VII))__ANH09740__GPCstabilized (opt2)
gggagagucccgcagucggcguccagcggcucugcuuguucgugugugugucguugcaggccuuauucaagcuuaccaugggccagaucgucaccuucuuccaggaggucccccacgucaucgaggaggucaugaacaucguccucaucgcccucucccuccucgccauccucaagggccucuacaacuucgccaccugcggcgucaucggccucaucaccuuccuccuccucugcggccgcuccugcuccgccaccuacaagggccaguacgagcuccagacccucgagcucaacauggagucccucaacaugaccaugccccucuccugcaccaagaacaacucccaccacuacauccgcgccggcaacaacaccggccucgagcucacccucaccaacaccuccaucaucucccacaaguucugcaaccucuccgacgcccacaagaagaaccucuacgaccacacccucauguccaucaucaccaccuuccaccucuccauccccaacuucaaccaguacgaggccauguccugcgacuucaacggcggcaagaucuccauccaguacaaccucucccacuccuacgccggcgacgccgcccagcacugcggcaccgucgccaacggcguccuccagaccuucaugcgcauggccuggggcggcuccuaccucgcccucgacuccggcugccgcggcugggacugcaucaucuccuccuaccaguaccucaucauccagaacaccaccugggacgaccacugccaguucucccgccccucccccaucggcuaccucggcuucgucucccagaagacccgcgacaucuacaucucccgccgccgccggggcaccuucaccuggacccucuccgacuccgagggccacgacaugcccggcggcuacugccucacccgcuggaugcucaucgaggccgaccucaagugcuucggcaacaccgccgucgccaagugcaacgagaagcacgacgaggaguucugcgacauguggcgccucuucgacuucaacaagcaggccauccagcgccucaaggcccccgcccagaugaacauccagcucaucaacaaggccgucaacgcccucaucaacgaccagcucaugaugaagaaccaccuccgcgacaucaugugcauccccuacugcaacuacuccaaguucugguaccucaacaacaccaccaccggccgcaccucccucccccgcugcuggcucaucuccaacggcuccuaccucaacgagacccacuucuccgacgacaucgagcagcaggccgacaacaugaucaccgagaugcuccagaaggaguacauggaccgccagggcaagaccccccucggccucgucgaccucuucgucuucuccaccuccuucuaccucaucaccaucuuccuccaccucgucaagauccccacccaccgccacaucgucggcaagcccugccccaagccccaccgccucaaccacaugggcaucugcuccugcggccucuacaagcagcccggcguccccguccgcuggaagcgcugaggacuagucccuguucccagagcccacuuuuuuuucuuuuuuugaaauaaaauagccugucuuucagaucuaaaaaaaaaaaaaaaaaaaaaaaaaaaaaaaaaaaaaaaaaaaaaaaaaaaaaaaaaaaaaaaaugcaucccccccccccccccccccccccccccccccaaaggcucuuuucagagccaccagaauu

SEQ ID NO: 6210 - RNA, 1749 nt, Artificial Sequence; identical to SEQ ID NO: 6204
  mRNA product Design a-1 comprising derived and/or modified sequence from LASV(Pinneo-NIG-1969;Clade I)__AIT17836__GPCstabilized (opt2)

SEQ ID NO: 6211 - RNA, 1749 nt, Artificial Sequence
  mRNA product Design a-1 comprising derived and/or modified sequence from LASV(ISTH0009-NIG-2011;Clade II)__AIT17404__GPCstabilized (opt2)
gggagagucccgcagucggcguccagcggcucugcuuguucgugugugugucguugcaggccuuauucaagcuuaccaugggccagaucaucaccuucuuccaggaggucccccacgucaucgaggaggucaugaacaucguccucaucgcccucucccuccucgccauccucaagggcaucuacaacgucgccaccugcggccucuucggccucgucuccuuccuccuccucugcggccgcuccugcuccaccaccuacaagggcgucuacgagcuccagacccucgagcucgacauggccucccucaacaugaccaugccccucuccugcaccaagaacaacucccaccacuacaucauggucggcaacgagaccggccucgagcucacccucaccaacaccuccaucaucaaccacaaguucugcaaccucuccgacgcccacaagaagaaccucuacgaccacgcccucauguccaucaucuccaccuuccaccucuccauccccaacuucaaccaguacgaggccauguccugcgacuucaacggcggcaagaucuccguccaguacaaccucucccacgccuacgccgucgacgccgccaaccacugcggcaccaucgccaacggcguccuccagaccuucaugcgcauggccuggggcggcuccuacaucgcccucgacuccggcugcggcuccugggacugcaucaugaccuccuaccaguaccucaucauccagaacaccaccugggaggaccacugccaguucucccgccccucccccaucggcuaccucggccuccucucccagcgcacccgcgacaucuacaucucccgccgccgccggggcaccuucaccuggacccucuccgacuccgagggcaacgagacccccggcggcuacugccucacccgcuggaugcucaucgaggccgagcucaagugcuucggcaacaccgccgucgccaagugcaacgagaagcacgacgaggaguucugcgacaugcuccgccucuucgacuucaacaagcaggccauccgccgccucaagacccccgcccagauguccauccagcucaucaacaaggccgucaacgcccucaucaacgaccagcucaucaugaagaaccaccuccgcgacaucaugugcauccccuacugcaacuacuccaaguacugguaccucaaccacaccgucaccggcaagaccucccucccccgcugcuggcucgucuccaacggcuccuaccucaacgagacccacuucuccgacgacaucgagcagcaggccgacaacaugaucaccgagcuccuccagaaggaguacauggaccgccagggcaagaccccccucggccucgucgaccucuucgucuucuccaccuccuucuaccucaucuccaucuuccuccaccucaucaagauccccacccaccgccacaucaccggcaagcccugccccaagccccaccgccucaaccacaugggcaucugcuccugcggccucuacaagcaccccggcguccccgucaaguggaagcgcugaggacuagucccuguucccagagcccacuuuuuuuucuuuuuuugaaauaaaauagccugucuuucagaucuaaaaaaaaaaaaaaaaaaaaaaaaaaaaaaaaaaaaaaaaaaaaaaaaaaaaaaaaaaaaaaaaugcaucccccccccccccccccccccccccccccccaaaggcucuuuucagagccaccagaauu

SEQ ID NO: 6212 - RNA, 1749 nt, Artificial Sequence
  mRNA product Design a-1 comprising derived and/or modified sequence from LASV(ISTH2010-NIG-2012;Clade II)__AIT17482__GPCstabilized (opt2)
gggagagucccgcagucggcguccagcggcucugcuuguucgugugugugucguugcaggccuuauucaagcuuaccaugggccagaucaucaccuucuuccaggaggucccccacgucaucgaggaggucaugaacaucguccucaucgcccucucccuccucgccauccucaagggcaucuacaacgucgccaccugcggccucuucggccucgucuccuuccuccuccucugcggccgcuccugcuccaccaccuacaagggcgucuacgagcuccagacccucgagcucgacauggccucccucaacaugaccaugccccucuccugcaccaagaacaacucccaccacuacaucauggucggcaacgagaccggccucgagcucacccucaccaacaccuccaucaucaaccacaaguucugcaaccucuccgacgcccacaagaagaaccucuacgaccacgcccucauguccaucaucuccaccuuccaccucuccauccccaacuucaaccaguacgaggccauguccugcgacuucaacggcggcaagaucuccguccaguacaaccucucccacgccuacgccgucgacgccgccaaccacugcggcaccaucgccaacggcguccuccagaccuucaugcgcauggccuggggcggcuccuacaucgcccucgacuccggcugcggcuccugggacugcaucaugaccuccuaccaguaccucaucauccagaacaucaccugggaggaccacugccaguucucccgccccucccccaucggcuaccucggccuccucucccagcgcacccgcgacaucuacaucucccgccgccgccggggcaccuucaccuggacccucuccgacuccgagggcaacgagacccccggcggcuacugccucacccgcuggaugcucaucgaggccgagcucaagugcuucggcaacaccgccgucgccaagugcaacgagaagcacgacgaggaguucugcgacaugcuccgccucuucgacuucaacaagcaggccauccgccgccucaagacccccgcccagauguccauccagcucaucaacaaggccgucaacgcccucaucaacgaccagcucaucaugaagaaccaccuccgcgacaucaugugcauccccuacugcaacuacuccaaguacugguaccucaaccacaccgucaccggcaagaccucccucccccgcugcuggcucgucuccaacggcuccuaccucaacgagacccacuucuccgacgacaucgagcagcaggccgacaacaugaucaccgagcuccuccagaaggaguacaucgaccgccagggcaagaccccccucggccucgucgaccucuucgucuucuccaccuccuucuaccucaucuccaucuuccuccaccucgucaagauccccacccaccgccacgucgucggcaagcccugccccaagccccaccgccucaaccacaugggcaucugcuccugcggccucuacaagcaccccggcguccccgucaaguggaagcgcugaggacuagucccuguucccagagcccacuuuuuuuucuuuuuuugaaauaaaauagccugucuuucagaucuaaaaaaaaaaaaaaaaaaaaaaaaaaaaaaaaaaaaaaaaaaaaaaaaaaaaaaaaaaaaaaaaugcaucccccccccccccccccccccccccccccccaaaggcucuuuucagagccaccagaauu

SEQ ID NO: 6213 - RNA, 1749 nt, Artificial Sequence
  mRNA product Design a-1 comprising derived and/or modified sequence from LASV(Lassa virus/H.sapiens-wt/NGA/2015/ISTH_0543;Clade II)__AVO03639__GPCstabilized (opt2)
gggagagucccgcagucggcguccagcggcucugcuuguucgugugugugucguugcaggccuuauucaagcuuaccaugggccagaucaucaccuucuuccaggaggucccccacgucaucgaggaggucaugaacaucguccucaucgcccucucccuccucgccauccucaagggcaucuacaacgucgccaccugcggccucuucggccucgucuccuuccuccuccucugcggccgcuccugcuccaccaccuacaagggcgucuacgagcuccagacccucgagcucgacauggccaaccucaacaugaccaugccccucuccugcaccaagaacaacucccaccacuacaucauggucggcaacgagaccggccucgagcucacccucaccaacaccuccaucaucaaccacaaguucugcaaccucuccgacgcccacaagaagaaccucuacgaccacgcccucauguccaucaucuccaccuuccaccucuccauccccaacuucaaccaguacgaggccauguccugcgacuucaacggcggcaagaucuccguccaguacaaccucucccacaccuacgccgucgacgccgccaaccacugcggcaccaucgccaacggcguccuccagaccuucaugcgcauggccuggggcggcuccuacaucgcccucgacuccggcugcggcuccugggacugcaucaugaccuccuaccaguaccucgucauccagaacaccaccugggaggaccacugccaguucucccgccccucccccaucggcuaccucggccuccucucccagcgcacccgcgacaucuacaucucccgccgccgccggggcaccuucaccuggacccucuccgacuccgagggcaacgagacccccggcggcuacugccucacccgcuggaugcucaucgaggccgagcucaagugcuucggcaacaccgccgucgccaagugcaacgagaagcacgacgaggaguucugcgacaugcuccgccucuucgacuucaacaagcaggccauccgccgccucaagacccccgcccagauguccauccagcucaucaacaaggccgucaacgcccucaucaacgaccagcucaucaugaagaaccaccuccgcgacaucaugugcauccccuacugcaacuacuccaaguacugguaccucaaccacaccgucaccggcaagaccucccucccccgcugcuggcucgucuccaacggcuccuaccucaacgagacccacuucuccgacgacaucgagcagcaggccgacaacaugaucaccgagcuccuccagaaggaguacaucgaccgccagggcaagaccccccucggccucgucgaccucuucgucuucuccaccuccuucuaccucaucuccaucuuccuccaccucgucaagauccccacccaccgccacaucaccggcaagcccugccccaagccccaccgccucaaccacaugggcaucugcuccugcggccucuacaagcaccccggcguccccgucaaguggaagcgcugaggacuagucccuguucccagagcccacuuuuuuuucuuuuuuugaaauaaaauagccugucuuucagaucuaaaaaaaaaaaaaaaaaaaaaaaaaaaaaaaaaaaaaaaaaaaaaaaaaaaaaaaaaaaaaaaaugcaucccccccccccccccccccccccccccccccaaaggcucuuuucagagccaccagaauu

SEQ ID NO: 6214 - RNA, 1749 nt, Artificial Sequence
  mRNA product Design a-1 comprising derived and/or modified sequence from LASV(Lassa virus/H.sapiens-wt/NGA/2016/ISTH_0009;Clade II)__AVO03571__GPCstabilized (opt2)
gggagagucccgcagucggcguccagcggcucugcuuguucgugugugugucguugcaggccuuauucaagcuuaccaugggccagaucaucaccuucuuccaggaggucccccacgucaucgaggaggucaugaacaucguccucaucgcccucucccuccucgccauccucaagggcaucuacaacgucgccaccugcggccuccucggccucgucuccuuccuccuccucugcggccgcuccugcuccaccaccuacaagggcgucuacgagcuccagacccucgagcucgacauggccucccucaacaugaccaugccccucuccugcaccaagaacaacucccaccacuacaucauggucggcaacgagaccggccucgagcucacccucaccaacaccuccaucaucaaccacaaguucugcaaccucuccgacgcccacaagaagaaccucuacgaccacgcccucauguccaucaucuccaccuuccaccucuccauccccaacuucaaccaguacgaggccauguccugcgacuucaacggcggccgcaucuccguccaguacaaccucucccacuccuacgccgucgacgccgccaaccacugcggcaccaucgccaacggcguccuccagaccuucaugcgcauggccuggggcggcuccuacaucgcccucgacuccggcugcggcuccugggacugcaucaugaccuccuaccaguaccucaucauccagaacaccaccugggaggaccacugccaguucucccgccccucccccaucggcuaccucggccuccucucccagcgcacccgcgacaucuacaucucccgccgccgccggggcaccuucaccuggacccucuccgacuccgagggcaacgagacccccggcggcuacugccucacccgcuggaugcucaucgaggccgagcucaagugcuucggcaacaccgccgucgccaagugcaacgagaagcacgacgaggaguucugcgacaugcuccgccucuucgacuucaacaagcaggccauccgccgccucaagacccccgcccagauguccauccagcucaucaacaaggccgucaacgcccucaucaacgaccagcucaucaugaagaaccaccuccgcgacaucaugugcauccccuacugcaacuacuccaaguacugguaccucaaccacaccgucaccggcaagaccucccucccccgcugcuggcucgucuccaacggcuccuaccucaacgagacccacuucuccgacgacaucgagcagcaggccgacaacaugaucaccgagcuccuccagaaggaguacaucgaccgccagggcaagaccccccucggccucgucgaccucuucgucuucuccaccuccuucuaccucaucuccaucuuccuccaccucgucaagauccccacccaccgccacaucaccggcaagcccugccccaagccccaccgccucaaccacaugggcaucugcuccugcggccucuacaaccaccccggcguccccgucaaguggaagcgcugaggacuagucccuguucccagagcccacuuuuuuuucuuuuuuugaaauaaaauagccugucuuucagaucuaaaaaaaaaaaaaaaaaaaaaaaaaaaaaaaaaaaaaaaaaaaaaaaaaaaaaaaaaaaaaaaaugcaucccccccccccccccccccccccccccccccaaaggcucuuuucagagccaccagaauu

SEQ ID NO: 6215 - RNA, 1749 nt, Artificial Sequence
  mRNA product Design a-1 comprising derived and/or modified sequence from LASV(Lassa virus/H.sapiens-wt/NGA/2016/ISTH_0017;Clade II)__AVO03567__GPCstabilized (opt2)
gggagagucccgcagucggcguccagcggcucugcuuguucgugugugugucguugcaggccuuauucaagcuuaccaugggccagaucaucaccuucuuccaggaggucccccacgucaucgaggaggucaugaacaucguccucaucgcccucucccuccucgccauccucaagggcaucuacaacgucgccaccugcggccucuucggccucgucuccuuccuccuccucugcggccgcuccugcuccaccaccuacaagggcgucuacgagcuccagacccucgagcucgacauggccucccucaacaugaccaugccccucuccugcaccaagaacaacucccaccacuacaucauggucggcaacgagaccggccucgagcucacccucaccaacaccuccaucaucaaccacaaguucugcaaccucuccgacgcccacaagaagaaccucuacgaccacgcccucauguccaucaucuccaccuuccaccucuccauccccaacuucaaccaguacgaggccauguccugcgacuucaacggcggcaagaucuccguccaguacaaccucucccacaccuacgccaucgacgccgccaaccacugcggcaccaucgccaacggcguccuccagaccuucaugcgcauggccuggggcggcuccuacaucgcccucgacuccggcugcggcuccugggacugcaucaugaccuccuaccaguaccucaucauccagaacaccaccugggaggaccacugccaguucucccgccccucccccaucggcuaccucggccuccucucccagcgcacccgcgacaucuacaucucccgccgccgccggggcaccuucaccuggacccucuccgacuccgagggcaacgagacccccggcggcuacugccucacccgcuggaugcucaucgaggccgagcucaagugcuucggcaacaccgccgucgccaagugcaacgagaagcacgacgaggaguucugcgacaugcuccgccucuucgacuucaacaagcaggccauccgccgccucaagacccccgcccagauguccauccagcucaucaacaaggccgucaacgcccucaucaacgaccagcucaucaugaagaaccaccuccgcgacaucaugugcauccccuacugcaacuacuccaaguacugguaccucaaccacaccgucaccggcaagaccucccucccccgcugcuggcucgucuccaacggcuccuaccucaacgagacccacuucuccgacgacaucgagcagcaggccgacaacaugaucaccgagcuccuccagaaggaguacauggaccgccagggcaagaccccccucggccucgucgaccucuucgucuucuccaccuccuucuaccucaucuccaucuuccuccaccucguccgcauccccacccaccgccacgucaucggcaagcccugccccaagccccaccgccucaaccacaugggcaucugcuccugcggccucuacaagcaccccggcguccccgucaaguggaagcgcugaggacuagucccuguucccagagcccacuuuuuuuucuuuuuuugaaauaaaauagccugucuuucagaucuaaaaaaaaaaaaaaaaaaaaaaaaaaaaaaaaaaaaaaaaaaaaaaaaaaaaaaaaaaaaaaaaugcaucccccccccccccccccccccccccccccccaaaggcucuuuucagagccaccagaauu

SEQ ID NO: 6216 - RNA, 1749 nt, Artificial Sequence
  mRNA product Design a-1 comprising derived and/or modified sequence from LASV(Lassa virus/H.sapiens-wt/NGA/2018/ISTH_0959;Clade II)__AVV65099__GPCstabilized (opt2)
gggagagucccgcagucggcguccagcggcucugcuuguucgugugugugucguugcaggccuuauucaagcuuaccaugggccagaucaucaccuucuuccaggaggucccccacgucaucgaggaggucaugaacaucguccucaucgcccucucccuccucgccauccucaagggcaucuacaacgucgucaccugcggccucuucggccucgucuccuuccuccuccucugcggccgcuccugcuccaccaccuacaagggcgucuacgagcuccagacccucgagcucgacauggccucccucaacaugaccaugccccucuccugcaccaagaacaacucccaccacuacaucauggucggcaacgagaccggccucgagcucacccucaccaacaccuccaucaucaaccacaaguucugcaaccucuccgacgcccacaagaagaaccucuacgaccacgcccucauguccaucaucuccaccuuccaccucuccauccccaacuucaaccaguacgaggccauguccugcgacuucaacggcggcaagaucuccguccaguacaaccucucccacgccuacgccaucgacgccgccaaccacugcggcaccaucgccaacggcguccuccagaccuucaugcgcauggccuggggcggcuccuacaucgcccucgacuccggcugcggcuccugggacugcaucaugaccuccuaccaguaccucaucauccagaacaccaccugggaggaccacugccaguucucccgccccucccccaucggcuaccucggccuccucucccagcgcacccgcgacaucuacaucucccgccgccgccggggcaccuucaccuggacccucuccgacuccgagggcaacgagacccccggcggcuacugccucacccgcuggaugcucaucgaggccgagcucaagugcuucggcaacaccgccgucgccaagugcaacgagaagcacgacgaggaguucugcgacaugcuccgccucuucgacuucaacaagcaggccauccgccgccucaagacccccgcccagauguccauccagcucaucaacaaggccgucaacgcccucaucaacgaccagcucaucaugaagaaccaccuccgcgacaucaugugcauccccuacugcaacuacuccaaguacugguaccucaaccacaccgucaccggcaagaccucccucccccgcugcuggcucgucuccaacggcuccuaccucaacgagacccacuucuccgacgacaucgagcagcaggccgacaacaugaucaccgagcuccuccagaaggaguacaucgaccgccagggcaagaccccccucggccucgucgaccucuucgucuucuccaccuccuucuaccucaucuccaucuuccuccaccucgucaagauccccacccaccgccacgucaucggcaagcccugccccaagccccaccgccucaaccacaugggcaucugcuccugcggccucuacaagcaccccggcguccccgucaaguggaagcgcugaggacuagucccuguucccagagcccacuuuuuuuucuuuuuuugaaauaaaauagccugucuuucagaucuaaaaaaaaaaaaaaaaaaaaaaaaaaaaaaaaaaaaaaaaaaaaaaaaaaaaaaaaaaaaaaaaugcaucccccccccccccccccccccccccccccccaaaggcucuuuucagagccaccagaauu

SEQ ID NO: 6217 - RNA, 1749 nt, Artificial Sequence
  mRNA product Design a-1 comprising derived and/or modified sequence from LASV(LASV003-NIG-2008;Clade II)__AIT17580__GPCstabilized (opt2)
gggagagucccgcagucggcguccagcggcucugcuuguucgugugugugucguugcaggccuuauucaagcuuaccaugggccagaucaucaccuucuuccaggaggucccccacgucaucgaggaggucaugaacaucguccucaucgcccucucccuccucgccauccucaagggcaucuacaacgucgccaccugcggccucuucggccucgucuccuuccuccuccucugcggccgcuccugcuccaccaccuacaagggcgucuacgagcuccagacccucgagcucgacauggccucccucaacaugaccaugccccucuccugcaccaagaacaacucccaccacuacaucauggucggcaacgagaccggccucgagcucacccucaccaacaccuccaucaucaaccacaaguucugcaaccucuccgacgcccacaagaagaaccucuacgaccacgcccucauguccaucaucuccaccuuccaccucuccauccccaacuucaaccaguacgaggccauguccugcgacuucaacggcggcaagaucuccguccaguacaaccucucccacaccuacgccgucgacgccgccaaccacugcggcaccaucgccaacggcguccuccagaccuucaugcgcauggccuggggcggcuccuacaucgcccucgacuccggcugcggcuccugggacugcaucaugaccuccuaccaguaccucaucauccagaacaccaccugggaggaccacugccaguucucccgccccucccccaucggcuaccucggccuccucucccagcgcacccgcgacaucuacaucucccgccgccgccggggcaccuucaccuggacccucuccgacuccgaguccaacgagacccccggcggcuacugccucacccgcuggaugcucaucgaggccgagcucaagugcuucggcaacaccgccgucgccaagugcaacgagaagcacgacgaggaguucugcgacaugcuccgccucuucgacuucaacaagcaggccauccgccgccucaaggcccccgcccagauguccauccagcucaucaacaaggccgucaacgcccucaucaacgaccagcucaucaugaagaaccaccuccgcgacaucaugugcauccccuacugcaacuacuccaaguacugguaccucaaccacaccgucaccggccgcaccucccucccccgcugcuggcucgucuccaacggcuccuaccucaacgagacccacuucuccgacgacaucgagcagcaggccgacaacaugaucaccgagcuccuccagaaggaguacauggaccgccagggcaagaccccccucggccucgucgaccucuucgucuucuccaccuccuucuaccucaucuccaucuuccuccaccucgucaagauccccacccaccgccacgucaucggcaagcccugccccaagccccaccgccucaaccacaugggcaucugcuccugcggccucuacaagcaccccggcguccccgucaaguggaagcgcugaggacuagucccuguucccagagcccacuuuuuuuucuuuuuuugaaauaaaauagccugucuuucagaucuaaaaaaaaaaaaaaaaaaaaaaaaaaaaaaaaaaaaaaaaaaaaaaaaaaaaaaaaaaaaaaaaugcaucccccccccccccccccccccccccccccccaaaggcucuuuucagagccaccagaauu

SEQ ID NO: 6218 - RNA, 1749 nt, Artificial Sequence
  mRNA product Design a-1 comprising derived and/or modified sequence from LASV(LASV035-NIG-2009;Clade II)__AIT17588__GPCstabilized (opt2)
gggagagucccgcagucggcguccagcggcucugcuuguucgugugugugucguugcaggccuuauucaagcuuaccaugggccagaucaucaccuucuuccaggaggucccccacgucaucgaggaggucaugaacaucguccucaucgcccucucccuccucgccauccucaagggcaucuacaacgucgccaccugcggccucuucggccucgucuccuuccuccuccucugcggccgcuccugcuccaccaccuacaagggcgucuacgagcuccagacccucgagcucgacauggccucccucaacaugaccaugccccucuccugcaccaagaacaacucccaccacuacaucauggucggcaacgagaccggccucgagcucacccucaccaacaccuccaucaucaaccacaaguucugcaaccucuccgacgcccacaagaagaaccucuacgaccacgcccucauguccaucaucuccaccuuccaccucuccauccccaacuucaaccaguacgaggccauguccugcgacuucaacggcggcaagaucuccguccaguacaaccucucccacgccuacgccgucgacgccgccaaccacugcggcaccaucgccaacggcguccuccagaccuucaugcgcauggccuggggcggcuccuacaucgcccucgacuccggcugcggcuccugggacugcaucaugaccuccuaccaguaccucaucauccagaacaccaccugggaggaccacugccaguucucccgccccucccccaucggcuaccucggccuccucucccagcgcacccgcgacaucuacaucucccgccgccgccggggcaccuucaccuggacccucuccgacuccgagggcaacgagacccccggcggcuacugccucacccgcuggaugcucaucgaggccgagcucaagugcuucggcaacaccgccgucgccaagugcaacgagaagcacgacgaggaguucugcgacaugcuccgccucuucgacuucaacaagcaggccauccgccgccucaaggcccccgcccagauguccauccagcucaucaacaaggccgucaacgcccucaucaacgaccagcucaucaugaagaaccaccuccgcgacaucaugugcauccccuacugcaacuacuccaaguacugguaccucaaccacaccgucaccggcaagaccucccucccccgcugcuggcucgucuccaacggcuccuaccucaacgagacccacuucuccgacgacaucgagcagcaggccgacaacaugaucaccgagcuccuccagaaggaguacaucgaccgccagggcaagaccccccucggccucgucgaccucuucgucuucuccaccuccuucuaccucaucuccaucuuccuccaccucgucaagauccccacccaccgccacgucaucggcaagcccugccccaagccccaccgccucaaccacaugggcaucugcuccugcggccucuacaagcaccccggcguccccgucaaguggaagcgcugaggacuagucccuguucccagagcccacuuuuuuuucuuuuuuugaaauaaaauagccugucuuucagaucuaaaaaaaaaaaaaaaaaaaaaaaaaaaaaaaaaaaaaaaaaaaaaaaaaaaaaaaaaaaaaaaaugcaucccccccccccccccccccccccccccccccaaaggcucuuuucagagccaccagaauu

SEQ ID NO: 6219 - RNA, 1749 nt, Artificial Sequence
  mRNA product Design a-1 comprising derived and/or modified sequence from LASV(LASV1000-NIG-2009;Clade II)__AIT17782__GPCstabilized (opt2)
gggagagucccgcagucggcguccagcggcucugcuuguucgugugugugucguugcaggccuuauucaagcuuaccaugggccagaucaucaccuucuuccaggaggucccccacgucaucgaggaggucaugaacaucguccucaucgcccucucccuccucgccauccucaagggcaucuacaacgucgccaccugcggccucuucggccucgucuccuuccuccuccucugcggccgcuccugcuccaccaccuacaagggcgucuacgagcuccagacccucgagcucgacauggccucccucaacaugaccaugccccucuccugcaccaagaacaacucccaccacuacaucauggucggcaacgagaccggccucgagcucacccucaccaacaccuccaucaucaaccacaaguucugcaaccucuccgacgcccacaagaagaaccucuacgaccacgcccucauguccaucaucuccaccuuccaccucuccauccccaacuucaaccaguacgaggccauguccugcgacuucaacggcggcaagaucuccguccaguacaaccucucccacaccuacgccgucgacgccgccaaccacugcggcaccaucgccaacggcguccuccagaccuucaugcgcauggccuggggcggcuccuacaucgcccucgacuccggcugcggcuccugggacugcaucaugaccuccuaccaguaccucaucauccagaacaccaccugggaggaccacugccaguucucccgccccucccccaucggcuaccucggccuccucucccagcgcacccgcgacaucuacaucucccgccgccgccggggcaccuucaccuggacccucuccgacuccgagggcaacgagacccccggcggcuacugccucacccgcuggaugcucaucgaggccgagcucaagugcuucggcaacaccgccgucgccaagugcaacgagaagcacgacgaggaguucugcgacaugcuccgccucuucgacuucaacaagcaggccaucaagcgccucaagacccccgcccagauguccauccagcucaucaacaaggccgucaacgcccucaucaacgaccagcucaucaugaagaaccaccuccgcgacaucaugugcauccccuacugcaacuacuccaaguacugguaccucaaccacaccgucaccggcaagaccucccucccccgcugcuggcucgucuccaacggcuccuaccucaacgagacccacuucuccgacgacaucgagcagcaggccgacaacaugaucaccgagcuccuccagaaggaguacaucgaccgccagggcaagaccccccucggccucgucgaccucuucgucuucuccaccuccuucuaccucaucuccaucuuccuccaccucgucaagauccccacccaccgccacgucgucggcaagcccugccccaagccccaccgccucaaccacaugggcaucugcuccugcggccucuacaagcaccccggcguccccgucaaguggaagcgcugaggacuagucccuguucccagagcccacuuuuuuuucuuuuuuugaaauaaaauagccugucuuucagaucuaaaaaaaaaaaaaaaaaaaaaaaaaaaaaaaaaaaaaaaaaaaaaaaaaaaaaaaaaaaaaaaaugcaucccccccccccccccccccccccccccccccaaaggcucuuuucagagccaccagaauu

SEQ ID NO: 6220 - RNA, 1749 nt, Artificial Sequence
  mRNA product Design a-1 comprising derived and/or modified sequence from LASV(LASV221-NIG-2010;Clade II)__AIT17624__GPCstabilized (opt2)
gggagagucccgcagucggcguccagcggcucugcuuguucgugugugugucguugcaggccuuauucaagcuuaccaugggccagaucaucaccuucuuccaggaggucccccacgucaucgaggaggucaugaacaucguccucaucgcccucucccuccucgccauccucaagggcaucuacaacgucgccaccugcggccucuucggccucgucuccuuccuccuccucugcggccgcuccugcuccaccaccuacaagggcgucuacgagcuccagacccucgagcucgacauggccucccucaacaugaccaugccccucuccugcaccaagaacaacucccaccacuacaucauggucggcaacgagaccggccucgagcucacccucaccaacaccuccaucaucaaccacaaguucugcaaccucuccgacgcccacaagaagaaccucuacgaccacgcccucauguccaucaucuccaccuuccaccucuccauccccaacuucaaccaguacgaggccauguccugcgacuucaacggcggcaagaucuccguccaguacaaccucucccacaccuacgccaucgacgccgccaaccacugcggcaccaucgccaacggcguccuccagaccuucaugcgcauggccuggggcggcuccuacaucgcccucgacuccggcugcggcuccugggacugcaucaugaccuccuaccaguaccucaucauccagaacaccaccugggaggaccacugccaguucucccgccccucccccaucggcuaccucggccuccucucccagcgcacccgcgacaucuacaucucccgccgccgccggggcaccuucaccuggacccucuccgacuccgagggcaacgagacccccggcggcuacugccucacccgcuggaugcucaucgaggccgagcucaagugcuucggcaacaccgccgucgccaagugcaacgagaagcacgacgaggaguucugcgacaugcuccgccucuucgacuucaacaagcaggccauccgccgccucaagacccccgcccagauguccauccagcucaucaacaaggccgucaacgcccucaucaacgaccagcucaucaugaagaaccaccuccgcgacaucaugugcauccccuacugcaacuacuccaaguacugguaccucaaccacaccgucaccggcaagaccucccucccccgcugcuggcucgucuccaacggcuccuaccucaacgagacccacuucuccgacgacaucgagcagcaggccgacaacaugaucaccgagaugcuccagaaggaguacauggaccgccagggcaagaccccccucggccucgucgaccucuucgucuucuccaccuccuucuaccucaucuccaucuuccuccaccucgucaagauccccacccaccgccacgucaucggcaagcccugccccaagccccaccgccucaaccacaugggcaucugcuccugcggccucuacaagcaccccggcguccccgucaaguggaagcgcugaggacuagucccuguucccagagcccacuuuuuuuucuuuuuuugaaauaaaauagccugucuuucagaucuaaaaaaaaaaaaaaaaaaaaaaaaaaaaaaaaaaaaaaaaaaaaaaaaaaaaaaaaaaaaaaaaugcaucccccccccccccccccccccccccccccccaaaggcucuuuucagagccaccagaauu

SEQ ID NO: 6221 - RNA, 1749 nt, Artificial Sequence
  mRNA product Design a-1 comprising derived and/or modified sequence from LASV(LASV237-NIG-2010;Clade II)__AIT17638__GPCstabilized (opt2)
gggagagucccgcagucggcguccagcggcucugcuuguucgugugugugucguugcaggccuuauucaagcuuaccaugggccagaucaucaccuucuuccaggaggucccccacgucaucgaggaggucaugaacaucguccucaucgcccucucccuccucgccauccucaagggcaucuacaacgucgccaccugcggccucuucggccucgucuccuuccuccuccucugcggccgcuccugcuccaccaccuacaagggcgucuacgagcuccagacccucgagcucgacauggccucccucaacaugaccaugccccucuccugcaccaagaacaacucccaccacuacaucauggucggcaacgagaccggccucgagcucacccucaccaacaccuccaucaucaaccacaaguucugcaaccucuccgacgcccacaagaaggaccucuacgaccacgcccucauguccaucaucuccaccuuccaccucuccauccccaacuucaaccaguacgaggccauguccugcgacuucaacggcggcaagaucuccguccaguacaaccucucccacaccuacgccgucgacgccgccaaccacugcggcaccaucgccaacggcguccuccagaccuucaugcgcauggccuggggcggcuccuacaucgcccucgacuccggcugcggcuccugggacugcaucaugaccuccuaccaguaccucaucauccagaacaccaccugggaggaccacugccaguucucccgccccucccccaucggcuaccucggccuccucucccagcgcacccgcgacaucuacaucucccgccgccgccggggcaccuucaccuggacccucuccgacuccgagggcaacgagacccccggcggcuacugccucacccgcuggaugcucaucgaggccgagcucaagugcuucggcaacaccgccgucgccaagugcaacgagaagcacgacgaggaguucugcgacaugcuccgccucuucgacuucaacaagcaggccauccgccgccucaagacccccgcccagauguccauccagcucaucaacaaggccgucaacgcccucaucaacgaccagcucaucaugaagaaccaccuccgcgacaucaugugcauccccuacugcaacuacuccaaguacugguaccucaaccacaccgucaccggcaagaccucccucccccgcugcuggcucgucuccaacggcuccuaccucaacgagacccacuucuccgacgacaucgagcagcaggccgacaacaugaucaccgagcuccuccagaaggaguacauggaccgccagggcaagaccccccucggccucgucgaccucuucgucuucuccaccuccuucuaccucaucuccaucuuccuccaccucaucaagauccccacccaccgccacaucaccggcaagcccugccccaagccccaccgccucaaccacaugggcaucugcuccugcggccucuacaagcaccccggcguccccgucaaguggaagcgcugaggacuagucccuguucccagagcccacuuuuuuuucuuuuuuugaaauaaaauagccugucuuucagaucuaaaaaaaaaaaaaaaaaaaaaaaaaaaaaaaaaaaaaaaaaaaaaaaaaaaaaaaaaaaaaaaaugcaucccccccccccccccccccccccccccccccaaaggcucuuuucagagccaccagaauu

SEQ ID NO: 6222 - RNA, 1749 nt, Artificial Sequence
  mRNA product Design a-1 comprising derived and/or modified sequence from LASV(LASV253-NIG-2011;Clade II)__AIT17670__GPCstabilized (opt2)
gggagagucccgcagucggcguccagcggcucugcuuguucgugugugugucguugcaggccuuauucaagcuuaccaugggccagaucaucaccuucuuccaggaggucccccacgucaucgaggaggucaugaacaucguccucaucgcccucucccuccucgccauccucaagggcaucuacaacgucgccaccugcggccucuucggccucgucuccuuccuccuccucugcggccgcuccugcuccaccaccuacaagggcgucuacgagcuccagacccucgagcucgacauggccucccucaacaugaccaugccccucuccugcaccaagaacaacucccaccacuacaucauggucggcaacgagaccggccucgagcucacccucaccaacaccuccaucaucaaccacaaguucugcaaccucuccgacgcccacaagaagaaccucuacgaccacgcccucauguccaucaucuccaccuuccaccucuccauccccaacuucaaccaguacgaggccauguccugcgacuucaacggcggcaagaucuccguccaguacaaccucucccacaccuacgccgucgacgccgccaaccacugcggcaccaucgccaacggcguccuccagaccuucaugcgcauggccuggggcggcuccuacaucgcccucgacuccggcugcggcuccugggacugcaucaugaccuccuaccaguaccucaucauccagaacaccaccugggaggaccacugccaguucucccgccccucccccaucggcuaccucggccuccucucccagcgcacccgcgacaucuacaucucccgccgccgccggggcaccuucaccuggacccucuccgacuccgagggcaacgagacccccggcggcuacugccucacccgcuggaugcucaucgaggccgagcucaagugcuucggcaacaccgccgucgccaagugcaacgagaagcacgacgaggaguucugcgacaugcuccgccucuucgacuucaacaagcaggccauccgccgccucaaggcccccgcccagauguccauccagcucaucaacaaggccgucaacgcccucaucaacgaccagcucaucaugaagaaccaccuccgcgacaucaugugcauccccuacugcaacuacuccaaguacugguaccucaaccacaccgucaccggccgcaccucccucccccgcugcuggcucgucuccaacggcuccuaccucaacgagacccacuucuccgacgacaucgagcagcaggccgacaacaugaucaccgagcuccuccagaaggaguacaucgaccgccagggcaagaccccccucggccucgucgaccucuucgucuucuccaccuccuucuaccucaucuccaucuuccuccaccucgucaagauccccacccaccgccacaucaucggcaagcccugccccaagccccaccgccucaaccacaugggcaucugcuccugcggccucuacaagcaccccggcguccccgucaaguggaagcgcugaggacuagucccuguucccagagcccacuuuuuuuucuuuuuuugaaauaaaauagccugucuuucagaucuaaaaaaaaaaaaaaaaaaaaaaaaaaaaaaaaaaaaaaaaaaaaaaaaaaaaaaaaaaaaaaaaugcaucccccccccccccccccccccccccccccccaaaggcucuuuucagagccaccagaauu

SEQ ID NO: 6223 - RNA, 1749 nt, Artificial Sequence
  mRNA product Design a-1 comprising derived and/or modified sequence from LASV(LASV254-NIG-2011;Clade II)__AIT17674__GPCstabilized (opt2)
gggagagucccgcagucggcguccagcggcucugcuuguucgugugugugucguugcaggccuuauucaagcuuaccaugggccagaucaucaccuucuuccaggaggucccccacgucaucgaggaggucaugaacaucguccucaucgcccucucccuccucgccauccucaagggcaucuacaacgucgccaccugcggccucuucggccucgucuccuuccuccuccucugcggccgcuccugcuccaccaccuacaagggcgucuacgagcuccagacccucgagcucgacaugaccaaccucaacaugaccaugccccucuccugcaccaagaacaacucccaccacuacaucauggucggcaacgagaccggccucgagcucacccucaccaacaccuccaucaucaaccacaaguucugcaaccucuccgacgcccacaagaagaaccucuacaaccacgcccucauguccaucaucuccaccuuccaccucuccauccccaacuucaaccaguacgaggccauguccugcgacuucaacggcggcaagaucuccguccaguacaaccucucccacuccuacgccgucgacgccgccaaccacugcggcaccaucgccaacggcguccuccagaccuucaugcgcauggccuggggcggcuccuacaucgcccucgacuccggcugcggcaacugggacugcaucaugaccuccuaccaguaccucaucauccagaacaccaccugggaggaccacugccaguucucccgccccucccccaucggcuaccucggccuccucucccagcgcacccgcgacaucuacaucucccgccgccgccggggcaccuucaccuggacccucuccgacuccgagggcaacgagacccccggcggcuacugccucacccgcuggaugcucaucgaggccgagcucaagugcuucggcaacaccgccgucgccaagugcaacgagaagcacgacgaggaguucugcgacaugcuccgccucuucgacuucaacaagcaggccauccgccgccucaagacccccgcccaggccaacauccagcucaucaacaaggccgucaacgcccucaucaacgaccagcucaucaugaagaaccaccuccgcgacaucaugugcauccccuacugcaacuacuccaaguacugguaccucaaccacaccgucaccggcaagaccucccucccccgcugcuggcucgucuccaacggcuccuaccucaacgagacccacuucuccgacgacaucgagcagcaggccgacaacaugaucaccgagcuccuccagaaggaguacauggaccgccagggcaagaccccccucggccucgucgaccucuucgucuucuccaccuccuucuaccucaucuccaucuuccuccaccucgucaagauccccacccaccgccacgucaucggcaagcccugccccaagccccaccgccucaaccacaugggcaucugcuccugcggccucuacaagcaccccggcguccccgucaaguggaagcgcugaggacuagucccuguucccagagcccacuuuuuuuucuuuuuuugaaauaaaauagccugucuuucagaucuaaaaaaaaaaaaaaaaaaaaaaaaaaaaaaaaaaaaaaaaaaaaaaaaaaaaaaaaaaaaaaaaugcaucccccccccccccccccccccccccccccccaaaggcucuuuucagagccaccagaauu

SEQ ID NO: 6224 - RNA, 1749 nt, Artificial Sequence
  mRNA product Design a-1 comprising derived and/or modified sequence from LASV(Nig08-A19;Clade III)__ADU56618__GPCstabilized (opt2)
gggagagucccgcagucggcguccagcggcucugcuuguucgugugugugucguugcaggccuuauucaagcuuaccaugggccagaucgucaccuucuuccaggaggucccccacgucaucgaggaggucaugaacaucguccucaucgcccucuccauccucgccauccucaagggccucuacaacaucgccaccugcggccucaucggccucgucaccuuccuccuccucuccggccgcuccugcuccaugaccuacaagggcgucuacgagcuccagacccucgagcucaacaugaacacccucaacaugaccaugccccucuccugcaccaagaacaacucccaccacuacaucauggucggcaacgagaccggccucgagcucacccucaccaacaccucccuccuccaccacaaguucugcaaccucuccgacgcccacaagaagaaccucuacgaccacacccucauguccaucaucuccaccuuccaccucuccauccccaacuucaaccaguacgaggccauguccugcgacuucaacggcggcaagaucaccguccaguacaaccucucccacuccuacgccaucgacgccgccaaccacugcggcaccgucgccaacggcguccuccagaccuucaugcgcauggccuggggcggcuccuacaucgcccucgacuccggcugcggcaagugggacugcaucaugaccuccuaccaguaccucaucauccagaacaccaccugggaggaccacugccaguucucccgccccucccccaucggcuaccucggccuccucucccagcgcacccgcgacaucuacaucucccgccgccgccggggcaccuucaccuggacccucuccgacuccgagggcaacgagacccccggcggcuacugccucacccgcuggaugcucaucgaggccgagcucaagugcuucggcaacaccgccgucgccaagugcaacgagaagcacgacgaggaguucugcgacaugcuccgccucuucgacuucaacaagcaggccauccgccgccucaaggcccccgcccagauguccauccagcucaucaacaaggccgucaacgcccucaucaacgaccagcucaucaugaagaaccaccuccgcgacaucaugugcauccccuacugcaacuacuccaaguacugguaccucaaccacaccuccaccggccgcaccucccucccccgcugcuggcucgucuccaacggcuccuaccucaacgagacccacuucuccgacgacaucgagcagcaggccgacaacaugaucaccgagaugcuccagaaggaguaccucgaccgccagggcaagaccccccucggccucgucgaccucuucgucuucuccaccuccuucuaccucaucuccaucuuccuccaccucgucaagauccccacccaccgccacaucgucggcaagcccugccccaagccccaccgccucaaccacaugggcaucugcuccugcggccucuacaagcagcccggcguccccguccgcuggaagcgcugaggacuagucccuguucccagagcccacuuuuuuuucuuuuuuugaaauaaaauagccugucuuucagaucuaaaaaaaaaaaaaaaaaaaaaaaaaaaaaaaaaaaaaaaaaaaaaaaaaaaaaaaaaaaaaaaaugcaucccccccccccccccccccccccccccccccaaaggcucuuuucagagccaccagaauu

SEQ ID NO: 6225 - RNA, 1752 nt, Artificial Sequence
  mRNA product Design a-1 comprising derived and/or modified sequence from LASV(G1180-SLE-2010;Clade IV)__AIT17168__GPCstabilized (opt2)
gggagagucccgcagucggcguccagcggcucugcuuguucgugugugugucguugcaggccuuauucaagcuuaccaugggccagaucgucaccuucuuccaggaggucccccacgucaucgaggaggucaugaacaucguccucaucgcccucuccauccucgccguccucaagggccucuacaacuucgccaccugcggccucgucggccuccucaccuuccuccuccucugcggccgcuccugcaccgccucccgcuacaagggcgucuacgagcuccagacccucgagcucaacauggagacccucaacaugaccaugccccucuccugcaccaagaacaacucccaccacuacaucauggucggcaacgagaccggccucgagcucacccucaccaacaccuccaucaucaaccacaaguucugcaaccucuccgacgcccacaagaagaaccucuacgaccacgcccucauguccaucaucuccaccuuccaccucuccauccccaacuucaaccaguacgaggccauguccugcgacuucaacggcggcaagaucuccguccaguacaaccucucccacuccuacgccggcgacgccgccaaccacugcggcaccgucgccaacggcguccuccagaccuucaugcgcauggccuggggcggcuccuacaucgcccucgacuccggcugcggcuccugggacugcaucaugaccuccuaccaguaccucaucauccagaacaccaccugggaggaccacugccaguucucccgccccucccccaucggcuaccucggccuccucucccagcgcacccgcgacaucuacaucucccgccgccgccggggcaccuucaccuggacccucuccgacuccgagggcaaggacacccccggcggcuacugccucacccgcuggaugcucaucgaggccgagcucaagugcuucggcaacaccgccgucgccaagugcaacgagaagcacgacgaggaguucugcgacaugcuccgccucuucgacuucaacaagcaggccauccagcgccucaaggcccccgcccagauguccauccagcucaucaacaaggccgucaacgcccucaucaacgaccagcucaucaugaagaaccaccuccgcgacaucaugugcauccccuacugcaacuacuccaaguacugguaccucaaccacaccaccaccggcaagaccucccuccccaagugcuggcucgucuccaacggcuccuaccucaacgagacccacuucuccgacgacaucgagcagcaggccgacaacaugaucaccgagaugcuccagaaggaguacauggagcgccagggcaagaccccccucggccucgucgaccucuucgucuucuccaccuccuucuaccucaucuccaucuuccuccaccucgucaagauccccacccaccgccacaucgucggcaaguccugccccaagccccaccgccucaaccacaugggcaucugcuccugcggccucuacaagcagcccggcguccccgucaaguggaagcgcugaggacuagucccuguucccagagcccacuuuuuuuucuuuuuuugaaauaaaauagccugucuuucagaucuaaaaaaaaaaaaaaaaaaaaaaaaaaaaaaaaaaaaaaaaaaaaaaaaaaaaaaaaaaaaaaaaugcaucccccccccccccccccccccccccccccccaaaggcucuuuucagagccaccagaauu

SEQ ID NO: 6226 - RNA, 1752 nt, Artificial Sequence
  mRNA product Design a-1 comprising derived and/or modified sequence from LASV(G1442-SLE-2011;Clade IV)__AIT17180__GPCstabilized (opt2)
gggagagucccgcagucggcguccagcggcucugcuuguucgugugugugucguugcaggccuuauucaagcuuaccaugggccagaucgucaccuucuuccaggaggucccccacgucaucgaggaggucaugaacaucguccucaucgcccucuccauccucgccguccucaagggccucuacaacgucgccaccugcggccucaucggccucgucaccuuccuccuccucugcggccgcuccugcaccaccacccucuacaagggcgucuacgagcuccagacccucgagcucaacauggagacccucaacaugaccaugccccucuccugcaccaagaacaacucccaccacuacauccgcgucggcaacgagaccggccucgagcucacccucaccaacaccuccaucaucaaccacaaguucugcaaccucuccgacgcccacaagaagaaccucuacgaccacgcccucauguccaucaucuccaccuuccaccucuccauccccaacuucaaccaguacgaggccauguccugcgacuucaacggcggcaagaucuccguccaguacaaccucucccacuccuacgccggcgacgccgccaaccacugcggcaccgucgccaacggcguccuccagaccuucaugcgcauggccuggggcggcuccuacaucgcccucgacuccggcugcggcaacugggacugcaucaugaccuccuaccaguaccucaucauccagaacaccaccugggacgaccacugccaguucucccgccccucccccaucggcuaccucggccuccucucccagcgcacccgcgacgucuacaucucccgccgccgccggggcaccuucaccuggacccucuccgacuccgagggcaaggacacccccggcggcuacugccucacccgcuggaugcucaucgaggccgagcucaagugcuucggcaacaccgccgucgccaagugcaacgagaagcacgacgaggaguucugcgacaugcuccgccucuucgacuucaacaagcaggccauccagcgccucaaggcccccgcccagauguccauccagcucaucaacaaggccgucaacgcccucaucaacgaccagcucaucaugaagaaccaccuccgcgacaucaugugcauccccuacugcaacuacuccaaguacugguaccucaacaacaccgccaccggcaagaccucccuccccaagugcuggcucaucuccaacggcuccuaccucaacgagacccacuucuccgacgacaucgagcaggaggccgacaacaugaucaccgagaugcuccagaaggaguacauggagcgccagggcaagaccccccucggccucgucgaccucuucgucuucuccaccuccuucuaccucaucuccaucuuccuccaccucgucaagauccccacccaccgccacaucgucggcaaguccugccccaagccccaccgccucaaccacaugggcaucugcuccugcggccucuacaagcagcccggcguccccguccgcuggaagcgcugaggacuagucccuguucccagagcccacuuuuuuuucuuuuuuugaaauaaaauagccugucuuucagaucuaaaaaaaaaaaaaaaaaaaaaaaaaaaaaaaaaaaaaaaaaaaaaaaaaaaaaaaaaaaaaaaaugcaucccccccccccccccccccccccccccccccaaaggcucuuuucagagccaccagaauu

SEQ ID NO: 6227 - RNA, 1752 nt, Artificial Sequence
  mRNA product Design a-1 comprising derived and/or modified sequence from LASV(G3010-SLE-2013;Clade IV)__AIT17344__GPCstabilized (opt2)
gggagagucccgcagucggcguccagcggcucugcuuguucgugugugugucguugcaggccuuauucaagcuuaccaugggccagaucgucaccuucuuccaggaggucccccacgucaucgaggaggucaugaacaucguccucaucgcccucuccauccucgccguccucaagggccucuacaacuucgccaccugcggccucgucggccucgucaccuuccuccuccucugcggccgcuccugcaccaccucccucuacaagggcgucuacgagcuccagacccucgagcucaacauggagacccucaacaugaccaugccccucuccugcaccaagaacaacucccaccacuacaucauggucggcaacgagaccggccucgagcucacccucaccaacaccuccaucaucaaccacaaguucugcaaccucuccgacgcccacaagaagaaccucuacaaccacgcccucauguccaucaucuccaccuuccaccucuccauccccaacuucaaccaguacgaggccauguccugcgacuucaacggcggcaagaucuccguccaguacaaccucucccacuccuacgccggcgacgccgccucccacugcggcaccgucgccaacggcguccuccagaccuucaugcgcauggccuggggcggcuccuacaucgcccucgacuccggcugcggcaagugggacugcaucaugaccuccuaccaguaccucaucauccagaacaccaccugggaggaccacugccaguucucccgccccucccccaucggcuaccucggccuccucucccagcgcacccgcgacaucuacaucucccgccgccgccggggcaccuucaccuggacccucuccgacuccgagggcaaggacacccccggcggcuacugccucacccgcuggaugcucaucgaggccgagcucaagugcuucggcaacaccgccgucgccaagugcaacgagaagcacgacgaggaguucugcgacaugcuccgccucuucgacuucaacaagcaggccauccagcgccucaagacccccgcccagauguccauccagcucaucaacaaggccgucaacgcccucaucaacgaccagcucaucaugaagaaccaccuccgcgacaucaugugcauccccuacugcaacuacuccaaguacugguaccucaaccacaccaccaccggcaagaccucccuccccaagugcuggcucgucuccaacggcuccuaccucaacgagacccacuucuccgacgacaucgagcagcaggccgacaacaugaucaccgagaugcuccagaaggaguacauggagcgccagggcaagaccccccucggccucgucgaccucuucgucuucuccaccuccuucuaccucaucuccaucuuccuccaccucgucaagauccccacccaccgccacaucgucggcaaguccugccccaagccccaccgccucaaccacaugggcaucugcuccugcggccucuacaagcagcccggcguccccguccgcuggaagcgcugaggacuagucccuguucccagagcccacuuuuuuuucuuuuuuugaaauaaaauagccugucuuucagaucuaaaaaaaaaaaaaaaaaaaaaaaaaaaaaaaaaaaaaaaaaaaaaaaaaaaaaaaaaaaaaaaaugcaucccccccccccccccccccccccccccccccaaaggcucuuuucagagccaccagaauu

SEQ ID NO: 6228 - RNA, 1752 nt, Artificial Sequence
  mRNA product Design a-1 comprising derived and/or modified sequence from LASV(G502-SLE-2009;Clade IV)__AIT17126__GPCstabilized (opt2)
gggagagucccgcagucggcguccagcggcucugcuuguucgugugugugucguugcaggccuuauucaagcuuaccaugggccagaucgucaccuucuuccaggaggucccccacgucaucgaggaggucaugaacaucguccucaucgcccucuccauccucgccguccucaagggccucuacaacuucgccaccugcggccucgucggccuccucaccuuccuccuccucugcggccgcuccugcaccaccggccucuacaagggcgucuacgagcuccagacccucgagcucaacauggagacccucaacaugaccaugccccucuccugcaccaagaacaacucccaccacuacaucauggucggcaacgagaccggccucgagcucacccucaccaacaccuccaucaucaaccacaaguucugcaaccucuccgacgcccacaagaagaaccucuacgaccacgcccucauguccaucaucuccaccuuccaccucuccauccccaacuucaaccaguacgaggccauguccugcgacuucaacggcggcaagaucuccguccaguacaaccucucccacuccuacgccggcgacgccgccgaccacugcggcaccgucgccaacggcguccuccagaccuucaugcgcauggccuggggcggcuccuacaucgcccucgacuccggcugcggccgcugggacugcaucaugaccuccuaccaguaccucaucauccagaacaccaccugggaggaccacugccaguucucccgccccucccccaucggcuaccucggccuccucucccagcgcacccgcgacaucuacaucucccgccgccgccggggcaccuucaccuggacccucuccgacuccgagggcaaggacacccccggcggcuacugccucacccgcuggaugcucaucgaggccgagcucaagugcuucggcaacaccgccgucgccaagugcaacgagaagcacgacgaggaguucugcgacaugcuccgccucuucgacuucaacaagcaggccauccagcgccucaaggcccccgcccagauguccauccagcucaucaacaaggccgucaacgcccucaucaacgaccagcucgucaugaagaaccaccuccgcgacaucaugugcauccccuacugcaacuacucccgcuacugguaccucaaccacaccaccaccggccgcaccucccuccccaagugcuggcucgucuccaacggcuccuaccucaacgagacccacuucuccgacgacaucgagcagcaggccgacaacaugaucaccgagaugcuccagaaggaguacauggagcgccagggcaagaccccccucggccucgucgaccucuucgucuucuccaccuccuucuaccucaucuccaucuuccuccaccucgucaagauccccacccaccgccacaucgucggcaaguccugccccaagccccaccgccucaaccacaugggcaucugcuccugcggccucuacaagcagcccggcguccccgucaaguggaagcgcugaggacuagucccuguucccagagcccacuuuuuuuucuuuuuuugaaauaaaauagccugucuuucagaucuaaaaaaaaaaaaaaaaaaaaaaaaaaaaaaaaaaaaaaaaaaaaaaaaaaaaaaaaaaaaaaaaugcaucccccccccccccccccccccccccccccccaaaggcucuuuucagagccaccagaauu

SEQ ID NO: 6229 - RNA, 1752 nt, Artificial Sequence
  mRNA product Design a-1 comprising derived and/or modified sequence from LASV(G733-SLE-2010;Clade IV)__AIT17154__GPCstabilized (opt2)
gggagagucccgcagucggcguccagcggcucugcuuguucgugugugugucguugcaggccuuauucaagcuuaccaugggccagaucgucaccuucuuccaggaggucccccacgucaucgaggaggucaugaacaucguccucaucgcccucuccauccucgccguccucaagggccucuacaacuucgccaccugcggcaucgucggccucgucuccuuccuccuccucugcggccgcuccugcaccaccucccucuacaagggcgucuacgagcuccagacccucgagcucaacauggagacccucaacaugaccaugccccucuccugcaccaagaacaacucccaccacuacaucauggucggcaacgagaccggccucgagcucacccucaccaacaccuccaucaucaaccacaaguucugcaaccucuccgacgcccacaagaagaaccucuacgaccacgcccucauguccaucaucuccaccuuccaccucuccauccccaacuucaaccaguacgaggccauguccugcgacuucaacggcggcaagaucuccguccaguacaaccucucccacuccuacgccggcgacgccgccaaccacugcggcaccaucgccaacggcguccuccagaccuucaugcgcauggccuggggcggcuccuacaucgcccucgacuccggcugcgaccgcugggacugcaucaugaccuccuaccaguaccucaucauccagaacaccaccugggaggaccacugccaguucucccgccccucccccaucggcuaccucggccuccucucccagcgcacccgcgacaucuacaucucccgccgccgccggggcaccuucaccuggacccucuccgacuccgagggcaaggacacccccggcggcuacugccucacccgcuggaugcucaucgaggccgagcucaagugcuucggcaacaccgccgucgccaagugcaacgagaagcacgacgaggaguucugcgacaugcuccgccucuucgacuucaacaagcaggccauccagcgccucaaggcccccgcccagauguccauccagcucaucaacaaggccgucaacgcccucaucaacgaccagcucaucaugaagaaccaccuccgcgacaucaugugcauccccuacugcaacuacuccaaguacugguaccucaaccacaccaccaccggcaagaccucccuccccaagugcuggcucgucuccaacggcuccuaccucaacgagacccacuucuccgacgacaucgagcagcaggccgacaacaugaucaccgagaugcuccagaaggaguacauggagcgccagggcaagaccccccucggccucgucgaccucuucgucuucuccaccuccuucuaccucaucuccaucuuccuccaccucgucaagauccccacccaccgccacgucgucggcaaguccugccccaagccccaccgccucaaccacaugggcaucugcuccugcggccucuacggccagcccggcguccccgucaaguggaagcgcugaggacuagucccuguucccagagcccacuuuuuuuucuuuuuuugaaauaaaauagccugucuuucagaucuaaaaaaaaaaaaaaaaaaaaaaaaaaaaaaaaaaaaaaaaaaaaaaaaaaaaaaaaaaaaaaaaugcaucccccccccccccccccccccccccccccccaaaggcucuuuucagagccaccagaauu

SEQ ID NO: 6230 - RNA, 1752 nt, Artificial Sequence
  mRNA product Design a-1 comprising derived and/or modified sequence from MOPV/LASV reassortant(IGS-1;Clade IV)__AFY05576__GPCstabilized (opt2)
gggagagucccgcagucggcguccagcggcucugcuuguucgugugugugucguugcaggccuuauucaagcuuaccaugggccagaucgucaccuucuuccaggaggucccccacgucaucgaggaggucaugaacaucguccucaucgcccucuccguccucgccguccucaagggccucuacaacuucgccaccugcggccucgucggccucgucaccuuccuccuccucugcggccgcuccugcaccaccucccucuacaagggcgucuacgagcuccagacccucgagcucaacauggagacccucaacaugaccaugccccucuccugcaccaagaacaacucccaccacuacaucauggucggcaacgagaccggccucgagcucacccucaccaacaccuccaucaucaaccacaaguucugcaaccucuccgacgcccacaagaagaaccucuacgaccacgcccucauguccaucaucuccaccuuccaccucuccauccccaacuucaaccaguacgaggccauguccugcgacuucaacggcggcaagaucuccguccaguacaaccucucccacuccuacgccggcgacgccgccaaccacugcggcaccgucgccaacggcguccuccagaccuucaugcgcauggccuggggcggcuccuacaucgcccucgacuccggcugcggcaacugggacugcaucaugaccuccuaccaguaccucaucauccagaacaccaccugggaggaccacugccaguucucccgccccucccccaucggcuaccucggccuccucucccagcgcacccgcgacaucuacaucucccgccgccgccggggcaccuucaccuggacccucuccgacuccgagggcgaggacacccccggcggcuacugccucacccgcuggaugcucaucgaggccgagcucaagugcuucggcaacaccgccgucgccaagugcaacgagaagcacgacgaggaguucugcgacaugcuccgccucuucgacuucaacaagcaggccauccagcgccucaaggcccccgcccagauguccauccagcucaucaacaaggccgucaacgcccucaucaacgaccagcucaucaugaagaaccaccuccgcgacaucaugugcauccccuacugcaacuacuccaaguacugguaccucaaccacaccaccaccggccgcaccucccuccccaagugcuggcucgucuccaacggcuccuaccucaacgagacccacuucuccgacgacaucgagcagcaggccgacaacaugaucaccgagaugcuccagaaggaguacauggagcgccagggcaagaccccccucggccucgucgaccucuucgucuucuccaccuccuucuaccucaucuccaucuuccuccaccucgucaagauccccacccaccgccacaucgucggcaaguccugccccaagccccaccgccucaaccacaugggcaucugcuccugcggccucuacaagcagcccggcguccccgucaaguggaagcgcugaggacuagucccuguucccagagcccacuuuuuuuucuuuuuuugaaauaaaauagccugucuuucagaucuaaaaaaaaaaaaaaaaaaaaaaaaaaaaaaaaaaaaaaaaaaaaaaaaaaaaaaaaaaaaaaaaugcaucccccccccccccccccccccccccccccccaaaggcucuuuucagagccaccagaauu

SEQ ID NO: 6231 - RNA, 1752 nt, Artificial Sequence
  mRNA product Design a-1 comprising derived and/or modified sequence from LASV(LM765-SLE-2012;Clade IV)__AIT17814__GPCstabilized (opt2)
gggagagucccgcagucggcguccagcggcucugcuuguucgugugugugucguugcaggccuuauucaagcuuaccaugggccagaucgucaccuucuuccaggaggucccccacgucaucgaggaggucaugaacaucguccucaucgcccucuccauccucgccguccucaagggccucuacaacuucgccaccugcggccucgucggccucgucaccuuccuccuccucugcggccgcuccugcaccaccucccucuacaagggcgucuacgagcuccagacccucgagcucaacauggagacccucaacaugaccaugccccucuccugcaccaagaacaacucccaccacuacaucauggucggcaacgagaccggccucgagcucacccucaccaacaccuccaucaucgaccacaaguucugcaaccucuccgacgcccaccgcaagaaccucuacgaccacgcccucauguccaucaucuccaccuuccaccucuccauccccaacuucaaccaguacgaggccauguccugcgacuucaacggcggcaagaucuccguccaguacaaccucucccacuccuacgccaaggacgccgccgaccacugcggcaccgucgccaacggcguccuccagaccuucaugcgcauggccuggggcggcuccuacaucgcccucgacuccggcugcggccgcugggacugcaucaugaccuccuaccaguaccucaucauccagaacaccaccugggaggaccacugccaguucucccgccccucccccaucggcuaccucggccuccucucccagcgcacccgcgacaucuacaucucccgccgccgccggggcaccuucaccuggacccucuccgacuccgagggcaaggacacccccggcggcuacugccucacccgcuggaugcucaucgaggccgagcucaagugcuucggcaacaccgccgucgccaagugcaacgagaagcacgacgaggaguucugcgacaugcuccgccucuucgacuucaacaagcaggccauccagcgccucaaggcccccgcccagauguccauccagcucaucaacaaggccgucaacgcccucaucaacgaccagcucaucaugaagaaccaccuccgcgacaucaugugcauccccuacugcaacuacuccaaguacugguaccucaaccacaccaccaccggcaagaccucccuccccaagugcuggcucgucuccaacggcuccuaccucaacgagacccacuucuccgacgacaucgagcagcaggccgacaacaugaucaccgagaugcuccagaaggaguacauggagcgccagggcaagaccccccucggccucgucgaccucuucgucuucuccaccuccuucuaccucaucuccaucuuccuccaccucgucaagauccccacccaccgccacaucgucggcaagcccugccccaagccccaccgccucaaccacaugggcaucugcuccugcggccucuacaagcagcccggcguccccgucaaguggaagcgcugaggacuagucccuguucccagagcccacuuuuuuuucuuuuuuugaaauaaaauagccugucuuucagaucuaaaaaaaaaaaaaaaaaaaaaaaaaaaaaaaaaaaaaaaaaaaaaaaaaaaaaaaaaaaaaaaaugcaucccccccccccccccccccccccccccccccaaaggcucuuuucagagccaccagaauu

SEQ ID NO: 6232 - RNA, 1752 nt, Artificial Sequence
  mRNA product Design a-1 comprising derived and/or modified sequence from LASV(LM776-SLE-2012;Clade IV)__AIT17824__GPCstabilized (opt2)
gggagagucccgcagucggcguccagcggcucugcuuguucgugugugugucguugcaggccuuauucaagcuuaccaugggccagaucgucaccuucuuccaggaggucccccacgucaucgaggaggucaugaacaucguccucaucgcccucuccauccucgccguccucaagggccucuacaacuucgccaccugcggccucgucggccucgucaccuuccuccuccucugcggccgcuccugcaccaccuccgucuacaagggcgucuacgagcuccagacccucgagcucaacauggagacccucaacaugaccaugccccucuccugcaccaagaacaacucccaccacuacaucauggucggcaacgagaccggccucgagcucacccucaccaacaccuccaucaucaaccacaaguucugcaaccucuccgacgcccacaagaagaaccucuacgaccacgcccucauguccaucaucuccaccuuccaccucuccauccccaacuucaaccaguacgaggccauguccugcgacuucaacggcggcaagaucuccguccaguacaaccucucccacuccuacgccggcgacgccgccaaccacugcggcaccgucgccaacggcguccuccagaccuucaugcgcauggccuggggcggcuccuacaucgcccucgacuccggcugcggcaagugggacugcaucaugaccuccuaccaguaccucaucauccagaacaccaccugggaggaccacugccaguucucccgccccucccccaucggcuaccucggccuccucucccagcgcacccgcgacaucuacaucucccgccgccgccggggcaccuucaccuggacccucuccgacuccgagggcaaggacacccccggcggcuacugccucacccgcuggaugcucaucgaggccgagcucaagugcuucggcaacaccgccgucgccaagugcaacgagaagcacgacgaggaguucugcgacaugcuccgccucuucgacuucaacaagcaggccauccagcgccucaaggcccccgcccagauguccauccagcucaucaacaaggccgucaacgcccucaucaacgaccagcucaucaugaagaaccaccuccgcgacaucaugugcauccccuacugcaacuacuccaaguacugguaccucaaccacaccaccaccggcaagaccucccuccccaagugcuggcucgucuccaacggcuccuaccucaacgagacccacuucuccgacgacaucgagcagcaggccgacaacaugaucaccgagaugcuccagaaggaguacauggagcgccagggcaagaccccccucggccucgucgaccucuucgucuucuccaccuccuucuaccucaucuccaucuuccuccaccucgucaagauccccacccaccgccacaucgucggcaaguccugccccaagccccaccgccucaaccacaugggcaucugcuccugcggccucuacaagcagcccggcguccccguccgcuggaagcgcugaggacuagucccuguucccagagcccacuuuuuuuucuuuuuuugaaauaaaauagccugucuuucagaucuaaaaaaaaaaaaaaaaaaaaaaaaaaaaaaaaaaaaaaaaaaaaaaaaaaaaaaaaaaaaaaaaugcaucccccccccccccccccccccccccccccccaaaggcucuuuucagagccaccagaauu

SEQ ID NO: 6233 - RNA, 1752 nt, Artificial Sequence
  mRNA product Design a-1 comprising derived and/or modified sequence from LASV(Mad39;Clade IV)__ANH09722__GPCstabilized (opt2)
gggagagucccgcagucggcguccagcggcucugcuuguucgugugugugucguugcaggccuuauucaagcuuaccaugggccagaucgucaccuucuuccaggaggucccccacgucaucgaggaggucaugaacaucguccucaucgcccucuccauccucgccguccucaagggccucuacaacgucgccaccugcggccucaucggccucgucaccuuccuccuccucugcggccgcuccugcaccaccacccucuacaagggcgucuacgagcuccaggcccucgagcucaacauggagacccucaacaugaccaugccccucuccugcaccaagaacaacucccaccacuacauccgcgucggcaacgagaccggccucgagcucacccucaccaacaccucccucaucaaccacaaguucugcaaccucuccgacgcccacaagaagaaccucuacgaccacgcccucauguccaucaucuccaccuuccaccucuccauccccaacuucaaccaguacgaggccauguccugcgacuucaacgacggcaagaucuccguccaguacaaccucucccacaccuacgccggcgacaccgccaaccacugcggcaccgucgccaacggcguccuccagaccuucaugcgcauggccuggggcggcuccuacaucgcccucgacuccggcugcggcggcugggacugcaucaugaccuccuaccaguaccucaucauccagaacaccaccugggaggaccacugccaguucucccgccccucccccaucggcuaccucggccuccucucccagcgcacccgcgacaucuacaucucccgccgccgccggggcaccuucaccuggacccucuccgacuccgagggcaaggacacccccggcggcuacugccucacccgcuggaugcucaucgaggccgagcucaagugcuucggcaacaccgccgucgccaagugcaacgagaagcacgacgaggaguucugcgacaugcuccgccucuucgacuucaacaagcaggccauccagcgccucaaggcccccgcccagauguccauccagcucaucaacaaggccgucaacgcccucaucaacgaccagcucaucaugaagaaccaccuccgcgacaucaugugcauccccuacugcaacuacuccaaguacugguaccucaaccacaccgucaccggcaagaccucccuccccaagugcuggcucgucuccaacggcuccuaccucaacgagacccacuucuccgacgacaucgagcagcaggccgacaacaugaucaccgagaugcuccagaaggaguacauggagcgccagggcaagaccccccucggccucgucgaccucuucgucuucuccaccuccuucuaccucaucuccaucuuccuccaccucgucaagauccccacccaccgccacgucgucggcaagcccugccccaagccccaccgccucaaccacaugggcaucugcuccugcggcuucuacaagcagcccggcguccccguccgcuggaagcgcugaggacuagucccuguucccagagcccacuuuuuuuucuuuuuuugaaauaaaauagccugucuuucagaucuaaaaaaaaaaaaaaaaaaaaaaaaaaaaaaaaaaaaaaaaaaaaaaaaaaaaaaaaaaaaaaaaugcaucccccccccccccccccccccccccccccccaaaggcucuuuucagagccaccagaauu

SEQ ID NO: 6234 - RNA, 1752 nt, Artificial Sequence
  mRNA product Design a-1 comprising derived and/or modified sequence from LASV(Z0947-SLE-2011;Clade IV)__AIT17840__GPCstabilized (opt2)
gggagagucccgcagucggcguccagcggcucugcuuguucgugugugugucguugcaggccuuauucaagcuuaccaugggccagaucgucaccuucuuccaggaggucccccacgucaucgaggaggucaugaacaucguccucaucgcccucuccauccucgccguccucaagggccucuacaacuucgccaccugcggccucgucggccucgucaccuuccuccuccucugcggccgcuccugcaccaucucccucuacaagggcgucuacgagcuccagacccucgagcucaacauggagacccucaacaugaccaugccccucuccugcaccaagaacaacucccaccacuacaucauggucggcaacgagaccggccucgagcucacccucaccaacaccuccaucaucaaccacaaguucugcaaccucuccgacgcccacaagaagaaccucuacgaccacgcccucauguccaucaucuccaccuuccaccucuccauccccaacuucaaccaguacgaggccauguccugcgacuucaacggcggcaagaucuccguccaguacaaccucucccacuccuacgccggcgacgccgccaaccacugcggcaccgucgccaacggcguccuccagaccuucaugcgcauggccuggggcggcuccuacaucgcccucgacuccggcugcgaccgcugggacugcaucaugaccuccuaccaguaccucaucauccagaacaccaccugggaggaccacugccaguucucccgccccucccccaucggcuaccucggccuccucucccagcgcacccgcgacaucuacaucucccgccgccgccggggcaccuucaccuggacccucuccgacuccgagggcaaggacacccccggcggcuacugccucacccgcuggaugcucaucgaggccgagcucaagugcuucggcaacaccgccgucgccaagugcaacgagaagcacgacgaggaguucugcgacaugcuccgccucuucgacuucaacaagcaggccauccagcgccucaaggcccccgcccagauguccauccagcucaucaacaaggccgucaacgcccucaucaacgaccagcucaucaugaagaaccaccuccgcgacaucaugugcauccccuacugcaacuacuccaaguacugguaccucaaccacaccaccaccggcaagaccucccuccccaagugcuggcucgucuccaacggcuccuaccucaacgagacccacuucuccgacgacaucgagcagcaggccgacaacaugaucaccgagaugcuccagaaggaguacauggagcgccagggcaagaccccccucggccucgucgaccucuucgucuucuccaccuccuucuaccucaucuccaucuuccuccaccucgucaagauccccacccaccgccacaucgucggcaagcccugccccaagccccaccgccucaaccacaugggcaucugcuccugcggccucuacaagcagcccggcguccccgucaaguggaagcgcugaggacuagucccuguucccagagcccacuuuuuuuucuuuuuuugaaauaaaauagccugucuuucagaucuaaaaaaaaaaaaaaaaaaaaaaaaaaaaaaaaaaaaaaaaaaaaaaaaaaaaaaaaaaaaaaaaugcaucccccccccccccccccccccccccccccccaaaggcucuuuucagagccaccagaauu

SEQ ID NO: 6235 - RNA, 1752 nt, Artificial Sequence
  mRNA product Design a-1 comprising derived and/or modified sequence from LASV(Josiah;Clade IV)__NP_694870__GPCstabilized (opt3)
gggagagucccgcagucggcguccagcggcucugcuuguucgugugugugucguugcaggccuuauucaagcuuaccaugggccagaucgugaccuucuuucaagaggucccccacguuauugaagaggugaugaacauaguacugaucgcccucagcgugcuugcuguccugaagggguuguacaauuucgcaacaugcggauuagugggucugguuacuuuucuacuccuguguggcagauccugcacgaccucucuuuauaaagggguguacgaacugcagacauuggagcucaacauggaaacucugaauaugaccaugccucugucauguacaaagaacaauagucaucacuauauuauggucggaaacgagaccggccucgaguuaacucugacaaauaccagcaucauuaaccauaaauucugcaaucuuuccgacgcccacaagaaaaacuuguacgaucaugcgcugaugucuaucauaucgacguuucaccuaucaaucccaaauuucaaccaguaugaagcuaugagcugugacuuuaauggugggaagauuagugugcaguacaaccucucccacucuuaugccggagaugcagccaaucauugcggcacuguagcuaacggcguucugcaaaccuucaugaggauggcauggggagggagcuacaucgcccuugacuccgguugcggcaacugggauuguauuaugacaucauaccaguaucugaucauacagaauacuaccugggaggaccacugccaguuuagucgcccgagccccauuggguacuugggacuccugucucaacgaacacgugauaucuauauuuccagaaggcgccggggcaccuucacguggacucucucagacagcgaagguaaggauacaccugggggauacugucuuacccgguggaugcugaucgaggcugaguugaaaugcuuuggcaacacugccguggcgaaguguaaugaaaaacaugacgaggaguucugcgauaugcuacgccuguuugacuucaacaagcaggcaauccagagacucaaagcccccgcucagaugaguauucaacugauaaauaaggccgucaacgcacuuaucaaugaucagcugauuaugaagaaccacuugagggacaucaugugcauaccauauugcaauuacucuaaauauugguaccucaaccacacaaccacggggcggaccucccugcccaaguguugguuagugagcaauggaucguaccugaacgaaacacauuucucugacgauauugagcagcaagcugacaauaugaucacugagaugcuacagaaagaauauauggagcgccaggguaagaccccucucggccugguggaucuuuuugucuucuccacaucauuuuacuugaucaguauuuuccugcaccucguuaaaaucccaacucaucgacacauugugggaaagagcugccccaaaccucauagacugaaccacauggggauauguuccugcggccuuuauaagcagccagguguaccggugaaguggaaaaggugaggacuagucccuguucccagagcccacuuuuuuuucuuuuuuugaaauaaaauagccugucuuucagaucuaaaaaaaaaaaaaaaaaaaaaaaaaaaaaaaaaaaaaaaaaaaaaaaaaaaaaaaaaaaaaaaaugcaucccccccccccccccccccccccccccccccaaaggcucuuuucagagccaccagaauu

SEQ ID NO: 6236 - RNA, 1749 nt, Artificial Sequence
  mRNA product Design a-1 comprising derived and/or modified sequence from LASV(LP;Clade I)__AAF86701__GPCstabilized (opt3)
gggagagucccgcagucggcguccagcggcucugcuuguucgugugugugucguugcaggccuuauucaagcuuaccaugggccagaucauuaccuucuuucaagaggugccccacgucauagaagagguuaugaacaucgugcugauugcccucagccuucuggcuaucuugaagggguuauacaauauugcaacaugcggaaucauaggucugguagccuuccuauuucucuguggcaaauccugcucucugacucuuaaagggggauaugaacugcagacguuggagcucaacauggaaacccugaauaugacaaugccucugucauguacuaagaacaguagccaucacuacaucagagugggcaaugagaccggucucgaguuaacacugaccaacacuuccauuaucaaucauaaguucugcaaccuuucugacgcgcacaaaaagaauuuguaugaucaugcucugaugucgauuaucucaacauuucaccuaagcauaccaaacuucaaucaguacgaagccaugaguugugacuuuaacgggggaaagauuuccguccaguauaaucucucucacagcuacgcaggcgaugccgcugagcauugcggcaccguggcaaacgggguucugcaaacguucaugaggauggccuggggaggucgguauaucgcucuugacuccggcugcgggaauugggauuguauuaugacuucauaccaguaccugaucauccagaacaccacaugggaagaccacugccaguuuagucgcccgagccccauuggauauuugggccuccugucucaacgaacucgugauauauacaucuccagaaggcgccgggguaccuucacauggacccucucagacagcgaggggaacgagacgccuggaggcuauugucuuacucgguggaugcugauugaagccgaguugaagugcuuuggcaauacagcgguggcaaaauguaacgaaaagcaugaugaggaguucugcgacaugcuacgccuguuugauuucaauaaacaggccaucagaaggcucaaggcucccgcccagaugaguauacagcugauuaacaaggcagucaaugcucuuaucaacgaccaacugaucaugaaaaaucacuugcgggauauuaugugcaucccauacugcaacuauucuaaguacugguaucucaaucacaccuccagcggacgcacuucgcugcccaaauguugguuaauuucuaacgguuccuaccugaaugagacacaguucucagacgacauagaacagcaagccgauaacaugaucaccgagaugcuacagaaggaauacauugagcgacagggcaaaacgccucucgggcugguggacaucuuuaucuucaguaccagcuuuuaucuuauuuccauauucuugcaucugaucaagauuccaacacacagacauaucguaggaaaacccugcccuaagccacacaggcucaaucauaugggcguuuguucuugcggucuguacaagcacccgggggugcccacuaaauggaagcggugaggacuagucccuguucccagagcccacuuuuuuuucuuuuuuugaaauaaaauagccugucuuucagaucuaaaaaaaaaaaaaaaaaaaaaaaaaaaaaaaaaaaaaaaaaaaaaaaaaaaaaaaaaaaaaaaaugcaucccccccccccccccccccccccccccccccaaaggcucuuuucagagccaccagaauu

SEQ ID NO: 6237 - RNA, 1749 nt, Artificial Sequence
  mRNA product Design a-1 comprising derived and/or modified sequence from LASV(803213;Clade II)__AAF86703__GPCstabilized (opt3)
gggagagucccgcagucggcguccagcggcucugcuuguucgugugugugucguugcaggccuuauucaagcuuaccaugggccagaucauuaccuucuuucaagaggugccccacgucauagaagagguuaugaacaucgugcugauugcccucagccuucuggcuaucuugaaggggauuuacaauguagcaacaugcggauuauucggucugaucuccuuucuacuccuguguggcagaucuugcucagugacuuauaaaggggucuacgaacuucagacgcuggaguugaacauggccaaucucaacaugaccaugccucugaguuguacaaagaauaacagccaucacuauauaauggugggaaaugaaacuggccuggagcucaccuuaacaaacaccuccaucauuaaucauaaauucugcaaccugucugacgcgcacaagaaaaaucuuuacgaucaugcuuugaugucgaucauuucaacuuuucaccugagcaucccaaacuucaaucaguaugaggccaugaguugugacuuuaacggugggaagauauccguucaguacaaucuaucucacagcuucgcaguggaugccgcuaaccauugcggaacaauugcaaacggcguccuccaaaccuuuaugaggauggccuggggcggguccuauaucgcucuggacucaggaugcgguaauugggauuguauuaugacgaguuaccaguaccuuaucauccagaacacuaccugggaagaccacugccaguucagccggccgucucccauuggcuaucugggguugcucucccaacgcacacgagauauauacaucucacguagacgccggggaacuuuuaccuggacacugagcgacagugagggcaaugaagccccugguggguauugucucaccagguggaugcuuauugaggcggagcugaaaugcuucggaaacacggcaguggccaaguguaaugaaaaacaugaugaggaauuuugcgacauguugcggcuauucgauuucaacaagcaggcuaucaaacgccugaagacucccgcccagaugucuauacagcucauuaauaaggcaguaaacgcucugaucaaugaccaacuuaucaugaaaaaccaccugagagauauuaugugcaucccauacugcaauuauuccagguacugguauuugaaccacacaguuaccggcaagacuagccucccccgguguuggcuggugucgaaugggucuuacuuaaacgaaacacauuuuuccgacgacauugagcagcaggccgauaauaugauaaccgagaugcugcaaaaagaauacauggaccgccagggaaagacgccucuaggucucgucgaucuguucguguuuucaaccaguuucuaucuuaucagcaucuuuuugcaccuggugaaaauuccaacacaucgacacaucgucggcaagcccugcccuaaaccacauagacucaaccacauggggauuuguuccugcggacuguacaagcacccgggcguucccgugaaguggaaaaggugaggacuagucccuguucccagagcccacuuuuuuuucuuuuuuugaaauaaaauagccugucuuucagaucuaaaaaaaaaaaaaaaaaaaaaaaaaaaaaaaaaaaaaaaaaaaaaaaaaaaaaaaaaaaaaaaaugcaucccccccccccccccccccccccccccccccaaaggcucuuuucagagccaccagaauu

SEQ ID NO: 6238 - RNA, 1749 nt, Artificial Sequence
  mRNA product Design a-1 comprising derived and/or modified sequence from LASV(GA391;Clade III)__CAA36645__GPCstabilized (opt3)
gggagagucccgcagucggcguccagcggcucugcuuguucgugugugugucguugcaggccuuauucaagcuuaccaugggccagaucgugaccuucuuucaagaggucccccacguuauugaagaggugaugaacauaguacugaucgcccucagcauucuugcuauccugaagggguuguacaauguggcaacaugcggauuaauuggucuggucacuuuccuacuccuguccggcagaucuuguucacuuaucuauaaagggacguacgaacugcagaccuuggagcucaacauggaaacacugaauaugacuaugccucugaguugcaccaagaacaauagccaucacuauauaagggugggaaacgagacaggccucgaguuaacccugacuaauacauccauccuuaaccauaaauuuuguaauuugucugacgcccacaagcggaaccuguacgaucauucgcuaaugucaauuaucagcaccuuccaccucaguauuccaaauuuuaaccaguaugaagcgauguccugcgacuucaauggugggaaaaucacgguucaguacaaccugucucacagcuuugcuguggaugccgcaggacauuguggcacucuugccaauggcguccugcaaaccuucaugcgcauggcuuggggaggguccuauauagcauuggacucagguugcggcaacugggauugcauuaugacaaguuaccaguaccucaucauucagaacacuaccugggacgaucacugucaguuuagccguccgucucccaucggguaucugggauuacugucccaaagaacaagggacaucuacauuucacggcgccgccggggcaccuucacguggacucugagcgauagugaggguaaugaaacaccugggggauauugcuugaccagauggaugcuaauagaggccgagcugaaguguuuuggcaacacugcuguggccaagugcaaugaaaaacaugacgaggaguucugugauaugcucaggcuguuugacuucaacaagcaggcgauccggcgccuuaaaacacccgcacagaugucuauucagcugaucaauaaggccguaaacgcuuugauaaaugaucaacucauuaugaaaaaccaucugcgagacaucaugugcaucccauacugcaauuauuccagauacugguauuuaaaccacaccagcacggggaagaccucgcugcccaggugcuggcuaauuucuaauggauccuaccucaacgaaacaaaguucucagacgauaucgagcagcaggccgacaauaugauuacugagaugcugcaaaaagaauacauagaucggcaggguaagaccccucuuggcuugguugaccuguuuguguucaguacuagcuuuuaucucaucuccauuuuccugcaccuugucaaaaucccaacacaccgucauaucguggggaagcccuguccuaaaccacaccgccugaaccauaugggaauuugcucuuguggcuuguacaagcagccgggugugcccgucagauggaaaaggugaggacuagucccuguucccagagcccacuuuuuuuucuuuuuuugaaauaaaauagccugucuuucagaucuaaaaaaaaaaaaaaaaaaaaaaaaaaaaaaaaaaaaaaaaaaaaaaaaaaaaaaaaaaaaaaaaugcaucccccccccccccccccccccccccccccccaaaggcucuuuucagagccaccagaauu

SEQ ID NO: 6239 - RNA, 1752 nt, Artificial Sequence
  mRNA product Design a-1 comprising derived and/or modified sequence from LASV(AV;Clade V)__CCA30314__GPCstabilized (opt3)
gggagagucccgcagucggcguccagcggcucugcuuguucgugugugugucguugcaggccuuauucaagcuuaccaugggccagaucgugaccuucuuucaagaggucccccacguuauugaagaggugaugaacauaguacugaucgcccucagcauucuugcugugcugaagggguuguacaauaucgcaacaugcggauuaauuggucugaucacuuuccuacuccuguguggcagauccugcagcucaaaccuuuauaaaggggucuacgaacugcagaguuuggaccucaauauggagacgcugaacaugaccaugccucugagcuguacaaagaauaacucccaucacuauauaagggugggaaaugauacuggccucgaauuaacccugacaaacaccucuauccuuaaucauaaauuuugcaacuugucggacgcccacaagaaagaucuguacgaccaugcgcuaaugucaauuaucagcacuuuccaccucaguauuccaaauuuuaaccaguaugaggcuauguccugugauuucaauggugggaagaucucuguucaguacaaccugagccacuccuaugccauagacgcagccaaucauugcggaacaguggcuaacggcauucuucaaaccuuuaugcggauggcauggggcgggucauacaucgcccuggauaguggaugcgguaacugggacuguauuaugacgagcuaccaguauuugaucauccagaauacuaccugggagaaccacugccaguucucucgaccgucccccauuggcuaccucgggcuguuaucacaacguacaagagauauauauaucagcaggcggcgccggggaacuuuuaccuggacacuuagugacucugaaggcaaugcuaccccugguggguacugucugacgcgcuggauguugauugaggccgaacuaaagugcuucggaaacacugcggucgcaaaauguaaugagaagcaugaugaggaauuuugcgacaugcugagacucuucgauuuuaacaaacaggccaucuccaggcugaagucucccgcucagaugucgauacagcuuauuaauaaagccgugaacgcacugaucaaugaccaauugaucaugaagaaccaccuccgggacauuaugugcaucccauauugcaauuacucuaaguauugguaccugaaccacacaauuaccggcaaaacuuccuuacccaaguguuggcugguaucaaaugggaguuaccuaaacgaaacacauuucagcgaugacauagagcagcaggcugauaauaugaucaccgaaaugcuccaaaaagaguauauggagcgccagggaaagacgccucugggucuuguugacuuguucguguuuuccaccucuuucuaccugauuagcaucuuucuccgacuggucaaaaucccaacacacagacauauugugggcaagcccugcccuaaaccacacaggcuuaaccauauggggauauguucaugcggacuguauaagcagccgggcgugcccguccgguggaagcguugaggacuagucccuguucccagagcccacuuuuuuuucuuuuuuugaaauaaaauagccugucuuucagaucuaaaaaaaaaaaaaaaaaaaaaaaaaaaaaaaaaaaaaaaaaaaaaaaaaaaaaaaaaaaaaaaaugcaucccccccccccccccccccccccccccccccaaaggcucuuuucagagccaccagaauu

SEQ ID NO: 6240 - RNA, 1749 nt, Artificial Sequence
  mRNA product Design a-1 comprising derived and/or modified sequence from LASV(Togo/2016/7082;Clade VI)__AMR44577__GPCstabilized (opt3)
gggagagucccgcagucggcguccagcggcucugcuuguucgugugugugucguugcaggccuuauucaagcuuaccaugggccagaucauuaccuucuuucaagaggugccccacgucauagaagagguuaugaacaucgugcugauugcccucagccuucuggcuaucuugaaggggguauacaauguggcaacaugcggaauuaucgguuuagucacuuuccuguuucuauguggcagauccugcucucucauauauaaagggucauacgaacugcagacgcuugagcugaacauggaaaccuugaauaugacaaugccucucaguuguacuaagaacagcucccaucacuauaucagggugggaaaugagaccggccuggagcugacacucaccaacacuucuauuaucaaucauaaauucugcaacuuaucggacgcccacaagcggaaucuguacgaucaugcgcuuaugucaauuuugagcacauuucaccugaguaucccaaacuucaaucaguaugaagcuauguccugugacuuuaacggugggaaaauaucuguucaguacaaucuaagccacgccuaugcaguggaugccgcugagcauugcggaaccgucgcaaacggcgugcuccaaacguucaugcgcauggccuggggcggguccuacauugcucuggacucaggaugcgguaauugggauuguaucaugaccaguuaccaguaucuuauuauccagaacacuacaugggaagaccacugccaguuuagccguccgucucccaucggcuaccugggguugcucucccaaagaacuagggauauuuauauaucacggcgccgccggggaaccuucacauggacccugagcgacagugagggcaacgagacgccugguggguacugucucacuagauggaugcuuaucgaagccgagcugaagugcuuuggaaauacagcgguagcaaaguguaacgaaaaacaugaugaggaguucugcgacauguugaggcuauuugauuucaauaagcaggccauucagcggcugaaaucucccgcucagauguccauccaacucauaaacaaggccguuaaugcacugauuaacgaccagcuuaucaugaaaaaucaucugcgcgauaugaugugcaucccauauugcaacuacagcaaguauugguacuugaaucacaccucgucuggccgaacuucccuccccaaguguuggcuggugucaaacgggaguuacuuaaaugagacacacuucagcgacgacauugaacagcaagcugauaacaugaucaccgagaugcugcagaaagaauauauugacagacagggaaagacgccucuaggucucgucgaucuguuuguguucuccaccucuuuuuaccuuauaagcaucuucuugcaccugauuaaaaucccaacacauaggcacaucgugggcaagcccugcccuaaaccacaucggcucaaucacauggggauuuguucaugcggacuguauaagcagccgggcguccccacucguuggaaacgcugaggacuagucccuguucccagagcccacuuuuuuuucuuuuuuugaaauaaaauagccugucuuucagaucuaaaaaaaaaaaaaaaaaaaaaaaaaaaaaaaaaaaaaaaaaaaaaaaaaaaaaaaaaaaaaaaaugcaucccccccccccccccccccccccccccccccaaaggcucuuuucagagccaccagaauu

SEQ ID NO: 6241 - RNA, 1749 nt, Artificial Sequence
  mRNA product Design a-1 comprising derived and/or modified sequence from LASV(KAK-428;Clade n.d. (VII))__ANH09740__GPCstabilized (opt3)
gggagagucccgcagucggcguccagcggcucugcuuguucgugugugugucguugcaggccuuauucaagcuuaccaugggccagaucgugaccuucuuucaagaggucccccacguuauugaagaggugaugaacauaguacugaucgcccucagccuucuggcuauuuugaagggguuauacaauuucgcaacaugcggagugaucggucugauuacuuuucuacuccuguguggcagauccugcucugccacguauaaagggcaguacgaacuucagacccuggaguugaacauggaaucacucaauaugacaaugccucugaguuguacuaagaacaauagccaucacuauaucagggcgggaaacaauaccggccuggagcucacauuaaccaacacuuccauaaucucucauaaauucugcaaucugucggacgcucacaagaaaaaccuuuacgaucauacauugaugucaauuaucaccacguuucaccugagcauuccaaauuucaaccaguaugaggccaugaguugugacuuuaauggugggaagaucuccauacaauacaaccuaucucacagcuaugcaggagaugccgcucagcauugcggcacugucgcaaauggcgugcuccagaccuucaugcggauggccuggggaggguccuaccuggcucuugacucagguugccgaggcugggauuguauuaucaguagcuaccaguaucugauuauccaaaacacaacuugggacgaucacugccaguuuucucguccgucccccaucggguacuugggauucguuucacagaagaccagagacauuuauauaagcaggcggcgccggggcacauuuaccuggacguuaagugauucugaaggucaugacaugccugggggauacugucugacucgcuggaugcucaucgaggccgaucuuaaaugcuucggcaacacagcgguggcaaaguguaaugaaaaacacgacgaggaguuuugcgauauguggagacuguucgacuucaacaagcaggccauucaaagguugaaagcucccgcccagaugaauauccagcuaauaaacaaggcagucaaugcucugauuaacgaccaacucaugaugaagaaucaucugcgggauaucaugugcaucccauauugcaacuacuccaaauuuugguaucuuaauaacaccacuacagggcgcaccagccugccccgauguugguugauuucgaauggaucuuaccucaacgagacgcacuucuccgacgauaucgaacagcaggccgacaauaugauuaccgagaugcugcagaaggaauacauggauagacaagguaaaacaccuuuaggccugguggaccuauuuguauucucaaccaguuuuuaucucauaacuaucuuccugcaccuuguuaagauuccaacacauaggcacaucguggggaaacccugcccuaagccacaucgguugaaccacaugggaaucuguagcugcggccuguacaaacagccggguguccccgugcguuggaagcgcugaggacuagucccuguucccagagcccacuuuuuuuucuuuuuuugaaauaaaauagccugucuuucagaucuaaaaaaaaaaaaaaaaaaaaaaaaaaaaaaaaaaaaaaaaaaaaaaaaaaaaaaaaaaaaaaaaugcaucccccccccccccccccccccccccccccccaaaggcucuuuucagagccaccagaauu

SEQ ID NO: 6242 - RNA, 1749 nt, Artificial Sequence; identical to SEQ ID NO: 6236
  mRNA product Design a-1 comprising derived and/or modified sequence from LASV(Pinneo-NIG-1969;Clade I)__AIT17836__GPCstabilized (opt3)

SEQ ID NO: 6243 - RNA, 1749 nt, Artificial Sequence
  mRNA product Design a-1 comprising derived and/or modified sequence from LASV(ISTH0009-NIG-2011;Clade II)__AIT17404__GPCstabilized (opt3)
gggagagucccgcagucggcguccagcggcucugcuuguucgugugugugucguugcaggccuuauucaagcuuaccaugggccagaucauuaccuucuuucaagaggugccccacgucauagaagagguuaugaacaucgugcugauugcccucagccuucuggcuaucuugaaggggauuuacaauguagcaacaugcggauuauucggucugguguccuuucuacuccuguguggcagaucuugcucaacuacguauaaaggggucuacgaacuucagacccuggaguuggacauggccagucucaacaugacaaugccucugagcuguacuaagaauaacucccaucacuauaucauggugggaaaugaaaccggccuggagcucacauuaaccaacacuucuauaaucaaucauaaauucugcaaccugucggaugcgcacaagaaaaaucuuuacgaccaugcuuugaugucaauuaucagcacauuucaccugaguauuccaaacuucaaucaguaugaggccauguccugugauuuuaacggugggaagaucucuguucaguacaaucuaagccacgcauaugccguggacgcugcaaaccauugcggaaccauagccaauggcguccuccaaacguucaugaggauggcuuggggcggguccuacauugcccuggauucaggaugcgguaguugggacuguaucaugacuagcuaccaguaucuuauuauccagaacaccacaugggaagaucacugccaguuuucucggccgucccccaucggcuaccugggguugcucucacaacgcacucgagacauuuauauaagccguagacgccggggaaccuucacauggacccugagugauucugagggcaacgaaacgccugguggguacugucucacuagguggaugcuuaucgaggcggagcugaaaugcuuuggaaauacagcaguggccaaguguaacgaaaaacaugacgaggaguucugcgauauguugcggcuauuugacuucaauaagcaggcuauucgcagacugaaaacccccgcccagauguccauccagcucauaaacaaggcaguaaaugcucugauuaacgaucaacuuaucaugaagaaucaccugagggacaucaugugcauuccauauugcaacuacagcaaauauugguacuugaaucacacuguuacaggcaagaccucgcucccccgguguuggcuggugucuaacggguccuacuuaaaugaaacgcauuucucagacgauaucgagcagcaggccgacaacaugauuaccgagcugcuacaaaaagaauauauggaucgccagggaaagacaccucucggucuggucgaccuuuuuguguucaguacuagcuuuuacuugauauccaucuuccugcaccucauuaaaaucccaacccaucgacacaucacaggcaagcccugcccuaaaccacauagacugaaucacauggggauuuguucuugcggacuuuauaagcacccgggcgugcccgucaaguggaaaaggugaggacuagucccuguucccagagcccacuuuuuuuucuuuuuuugaaauaaaauagccugucuuucagaucuaaaaaaaaaaaaaaaaaaaaaaaaaaaaaaaaaaaaaaaaaaaaaaaaaaaaaaaaaaaaaaaaugcaucccccccccccccccccccccccccccccccaaaggcucuuuucagagccaccagaauu

SEQ ID NO: 6244 - RNA, 1749 nt, Artificial Sequence
  mRNA product Design a-1 comprising derived and/or modified sequence from LASV(ISTH2010-NIG-2012;Clade II)__AIT17482__GPCstabilized (opt3)
gggagagucccgcagucggcguccagcggcucugcuuguucgugugugugucguugcaggccuuauucaagcuuaccaugggccagaucauuaccuucuuucaagaggugccccacgucauagaagagguuaugaacaucgugcugauugcccucagccuucuggcuaucuugaaggggauuuacaauguagcaacaugcggauuauucggucugguguccuuucuacuccuguguggcagaucuugcucaacuacguauaaaggggucuacgaacuucagacccuggaguuggacauggccagucucaacaugacaaugccucugagcuguacuaagaauaacucccaucacuauaucauggugggaaaugaaaccggccuggagcucacauuaaccaacacuucuauaaucaaucauaaauucugcaaccugucggaugcgcacaagaaaaaucuuuacgaccaugcuuugaugucaauuaucagcacauuucaccugaguauuccaaacuucaaucaguaugaggccauguccugugauuuuaacggugggaagaucucuguucaguacaaucuaagccacgcauaugccguggacgcugcaaaccauugcggaaccauagccaauggcguccuccaaacguucaugaggauggcuuggggcggguccuacauugcccuggauucaggaugcgguaguugggacuguaucaugacuagcuaccaguaucuuauuauccagaacaucaccugggaagaucacugccaguuuucucggccgucccccauuggcuaccugggguugcucucacaacgcacacgagacauauauaucagccguagacgccggggaacuuucaccuggacacugagugauucugagggcaacgaaaccccugguggguacugucucacgagguggaugcuuauugaggcggagcugaaaugcuuuggaaauacugcaguggccaaguguaacgaaaaacaugacgaggaguucugcgauauguugcggcuauuugacuucaauaagcaggcuauccgcagacugaaaacacccgcccagauguccauacagcucauuaacaaggcaguaaaugcucugaucaacgaucaacuuaucaugaagaaucaccugagggacauuaugugcaucccauauugcaacuacagcaaauauugguacuugaaucacaccguuacuggcaagacaucgcucccccgguguuggcuggugucuaacggguccuacuuaaaugaaacccauuucucagacgauauugagcagcaggccgacaacaugauaacggagcugcuacaaaaagaauauaucgaucgccagggaaagaccccucucggucuggucgaccuuuuuguguucaguacuagcuuuuacuugauuuccaucuuccugcaccucgugaaaaucccaacacaucgacacgucguuggcaagcccugcccuaaaccacauagacugaaucacauggggauuuguucuugcggacuuuauaagcacccgggcgugcccguaaaguggaaaaggugaggacuagucccuguucccagagcccacuuuuuuuucuuuuuuugaaauaaaauagccugucuuucagaucuaaaaaaaaaaaaaaaaaaaaaaaaaaaaaaaaaaaaaaaaaaaaaaaaaaaaaaaaaaaaaaaaugcaucccccccccccccccccccccccccccccccaaaggcucuuuucagagccaccagaauu

SEQ ID NO: 6245 - RNA, 1749 nt, Artificial Sequence
  mRNA product Design a-1 comprising derived and/or modified sequence from LASV(Lassa virus/H.sapiens-wt/NGA/2015/ISTH_0543;Clade II)__AVO03639__GPCstabilized (opt3)
gggagagucccgcagucggcguccagcggcucugcuuguucgugugugugucguugcaggccuuauucaagcuuaccaugggccagaucauuaccuucuuucaagaggugccccacgucauagaagagguuaugaacaucgugcugauugcccucagccuucuggcuaucuugaaggggauuuacaauguagcaacaugcggauuauucggucugguguccuuucuacuccuguguggcagaucuugcucaacuacguauaaaggggucuacgaacuucagacccuggaguuggacauggccaaccucaauaugacaaugccucugaguuguacuaagaacaauagccaucacuauaucauggugggaaacgaaaccggccuggagcucacauuaaccaauacuuccauaaucaaccauaaauucugcaaucugucugaugcgcacaagaaaaaccuuuacgaccaugcuuugaugucgauuaucucaacauuucaccugagcauuccaaauuucaaccaguaugaggccaugaguugugauuuuaauggugggaagaucuccguucaguacaaccuaucucacaccuaugcaguggacgccgcuaaucauugcggaacgauagcaaacggcguccuccaaacuuucaugaggauggccuggggcgggagcuacauugcucuggauuccggaugcgguucaugggacuguaucaugaccaguuaccaguaucuugugauucagaacacaacuugggaagaucacugccaguuuagccggccgucucccaucggcuaccugggguugcucucccaacgcacccgagacaucuauauuucacguagacgccggggaacauucaccuggacgcugagcgauagugagggcaaugaaacuccugguggguacugucucacaagguggaugcuuauagaggccgagcugaaaugcuuuggaaacaccgcgguagcaaaguguaaugaaaaacaugacgaggaguucugcgauauguugcggcuauuugacuucaacaagcaggccauccgcagacugaaaacucccgcucagaugucuauucagcucaucaauaaggccguuaacgcacugauaaaugaucaacuuauuaugaagaaccaccugagggacaucaugugcaucccauauugcaauuacuccaaauauugguacuugaaccacacagugaccggcaagacgagccucccccgguguuggcuggucucgaaugggucuuacuuaaacgaaacccauuucuccgacgauauugagcagcaggcugacaauaugaucacagagcugcuacaaaaagaauauauugaucgccagggaaagacuccucucggucugguggaccuuuuuguguucucaaccaguuuuuacuugauaagcaucuuccugcaccucgucaaaauuccaacacaucgacacaucacuggcaagcccugcccuaaaccacauagacugaaccacauggggaucuguuccugcggacuuuauaagcacccgggcguucccgugaaguggaaaaggugaggacuagucccuguucccagagcccacuuuuuuuucuuuuuuugaaauaaaauagccugucuuucagaucuaaaaaaaaaaaaaaaaaaaaaaaaaaaaaaaaaaaaaaaaaaaaaaaaaaaaaaaaaaaaaaaaugcaucccccccccccccccccccccccccccccccaaaggcucuuuucagagccaccagaauu

SEQ ID NO: 6246 - RNA, 1749 nt, Artificial Sequence
  mRNA product Design a-1 comprising derived and/or modified sequence from LASV(Lassa virus/H.sapiens-wt/NGA/2016/ISTH_0009;Clade II)__AVO03571__GPCstabilized (opt3)
gggagagucccgcagucggcguccagcggcucugcuuguucgugugugugucguugcaggccuuauucaagcuuaccaugggccagaucauuaccuucuuucaagaggugccccacgucauagaagagguuaugaacaucgugcugauugcccucagccuucuggcuaucuugaaggggauuuacaauguagcaacaugcggauuacugggucuaguguccuuccuccugcuuuguggcagaucuugcucaacuacguauaaaggggucuacgaacugcagaccuuggagcucgacauggccagucugaacaugacaaugccucugagcuguacuaagaauaacucccaucacuauaucauggugggaaaugaaaccggccucgaguuaacacugaccaacacuucuauaaucaaucauaaauuuugcaaccuuucggaugcgcacaagaaaaauuuguacgaccaugcucugaugucaauuaucagcacauuccaccuaaguauuccaaacuuuaaucaguaugaggccauguccugugauuucaacggugggaggaucucuguucaguacaaucucagccacuccuaugcaguggacgccgcuaaccauugcggaaccauagcaaauggcguccugcaaacguuuaugcggauggccuggggcgggucauacauugcucuugauaguggaugcgguagcugggacuguaucaugacuucuuaccaguaucugauuauccagaacaccacaugggaagaucacugccaguucucccgcccgucacccaucggcuacuuggggcuccugagccaacgaacucgugacauuuauauaaguagaaggcgccggggaaccuuuacauggacccucucugauuccgagggcaacgaaacgccugguggguacugucuuacucgguggaugcugaucgaggccgaguugaagugcuucggaaauacagcgguggcaaaauguaacgaaaagcaugacgaggaauuuugcgauaugcuacgccuguucgacuuuaauaaacaggccauuagaaggcucaagacccccgcucagaugagcauccagcugauaaacaaagccguaaaugcacuuauuaacgaucaacugaucaugaagaaucacuugcgggacaucaugugcauuccauauugcaacuacucgaaguauugguaccucaaucacacuguuacaggcaaaaccucucugccccgcuguugguuaguguccaacgggucauaccugaaugaaacgcauuucagugacgauaucgagcagcaggcugacaacaugauuaccgagcuacuccaaaaggaauauauagaucgacagggaaaaacaccucugggucuugucgacuuguucguguuuagcacuuccuucuaccugaucucuauuuuucuccaccuggugaagaucccaacccauagacacaucacaggcaaacccugcccuaagccacauaggcuuaaucacauggggauuuguagcugcggacuguauaaccacccgggcguccccguuaaauggaagcggugaggacuagucccuguucccagagcccacuuuuuuuucuuuuuuugaaauaaaauagccugucuuucagaucuaaaaaaaaaaaaaaaaaaaaaaaaaaaaaaaaaaaaaaaaaaaaaaaaaaaaaaaaaaaaaaaaugcaucccccccccccccccccccccccccccccccaaaggcucuuuucagagccaccagaauu

SEQ ID NO: 6247 - RNA, 1749 nt, Artificial Sequence
  mRNA product Design a-1 comprising derived and/or modified sequence from LASV(Lassa virus/H.sapiens-wt/NGA/2016/ISTH_0017;Clade II)__AVO03567__GPCstabilized (opt3)
gggagagucccgcagucggcguccagcggcucugcuuguucgugugugugucguugcaggccuuauucaagcuuaccaugggccagaucauuaccuucuuucaagaggugccccacgucauagaagagguuaugaacaucgugcugauugcccucagccuucuggcuaucuugaaggggauuuacaauguagcaacaugcggauuauucggucugguguccuuucuacuccuguguggcagaucuugcucaacuacguauaaaggggucuacgaacuucagacccuggaguuggacauggccagucucaacaugacaaugccucugagcuguacuaagaauaacucccaucacuauaucauggugggaaaugaaaccggccuggagcucacauuaaccaacacuucuauaaucaaucauaaauucugcaaccugucggaugcgcacaagaaaaaucuuuacgaccaugcuuugaugucaauuaucagcacauuucaccugaguauuccaaacuucaaucaguaugaggccauguccugugauuuuaacggugggaagaucucuguucaguacaaucuaagccacaccuaugcaauagacgccgcuaaccauugcggaacgauugcaaauggcgugcuccaaacuuucaugaggauggccuggggcggguccuacaucgcucuggauucaggaugcgguaguugggacuguauuaugaccagcuaccaguaucuuaucauccagaacacaacuugggaagaucacugccaguuuucucggccgucccccauuggcuaccugggguugcucucacaacgcacccgagacauauauaucagccguagacgccggggaacauucaccuggacgcugagugauucugagggcaacgaaacuccugguggguacugucucacaagguggaugcuuauugaggccgagcugaaaugcuuuggaaauaccgcggucgcaaaguguaacgaaaaacaugacgaggaguucugcgauauguugcggcuauuugacuucaauaagcaggccauccgcagacugaaaacucccgcucagauguccauacagcucauuaacaaggccgugaaugcacugaucaacgaucaacuuaucaugaagaaucaccugagggacauuaugugcaucccauauugcaacuacagcaaauauugguacuugaaucacacaguaaccggcaagacgucgcucccccgguguuggcugguuucuaacggguccuacuuaaaugaaacccauuucucagacgauauugagcagcaggcugacaacaugauaacagagcugcuacaaaaagaauauauggaucgccagggaaagacuccucucggucugguggaccuuuuugucuucaguaccagcuuuuacuugaucuccauuuuccugcaccucgugcgaaucccaacacauagacacgugaucggcaaacccugcccuaagccacauaggcugaaucacauggggauuuguucuugcggacuuuauaaacacccgggcguccccguuaaguggaagcggugaggacuagucccuguucccagagcccacuuuuuuuucuuuuuuugaaauaaaauagccugucuuucagaucuaaaaaaaaaaaaaaaaaaaaaaaaaaaaaaaaaaaaaaaaaaaaaaaaaaaaaaaaaaaaaaaaugcaucccccccccccccccccccccccccccccccaaaggcucuuuucagagccaccagaauu

SEQ ID NO: 6248 - RNA, 1749 nt, Artificial Sequence
  mRNA product Design a-1 comprising derived and/or modified sequence from LASV(Lassa virus/H.sapiens-wt/NGA/2018/ISTH_0959;Clade II)__AVV65099__GPCstabilized (opt3)
gggagagucccgcagucggcguccagcggcucugcuuguucgugugugugucguugcaggccuuauucaagcuuaccaugggccagaucauuaccuucuuucaagaggugccccacgucauagaagagguuaugaacaucgugcugauugcccucagccuucuggcuaucuugaaggggauuuacaauguagugacaugcggauuauucggucuggucuccuuucuacuccuguguggcagaucuugcucaacuacguauaaagggguguacgaacuucagacccuggaguuggacauggcaagucucaacaugacaaugccucugagcuguacuaagaauaacucccaucacuauaucaugguuggaaaugaaaccggccuggagcucacauuaaccaacacuucuauaaucaaucauaaauucugcaaccugucggaugcccacaagaaaaaucuuuacgaccaugcguugaugucaauuaucagcacauuucaccugaguauuccaaacuucaaucaguaugaggcuauguccugugauuuuaacggugggaagaucucugugcaguacaaucuaagccacgccuaugcaauagacgccgcuaaccauugcggaaccauugcaaauggcguccuccaaacguucaugaggauggccuggggcggguccuacaucgcucuggauucaggaugcgguaguugggacuguauuaugacuagcuaccaguaucuuaucauccagaacaccacaugggaagaucacugccaguuuucucggccgucccccauuggcuaccugggguugcucucacaacgcacucgagacauauauaucagccguagacgccggggaaccuucacauggacccugagugauucugagggcaacgaaacgccugguggguacugucucacuagguggaugcuuauugaggccgagcugaaaugcuuuggaaauacagcgguggcaaaguguaacgaaaaacaugacgaggaguucugcgauauguugcggcuauuugacuucaauaagcaggccauccgcagacugaaaacccccgcucagauguccauacagcucauuaacaaggccguaaaugcacugaucaacgaucaacuuaucaugaagaaucaccugagggacauuaugugcaucccauauugcaacuacagcaaauauugguacuugaaucacacuguuacaggcaagaccucgcucccccgguguuggcuggugucuaacggguccuacuuaaaugaaacgcauuucucagacgauauugagcagcaggcugacaacaugauaaccgagcugcuacaaaaagaauauaucgaucgccagggaaagacaccucucggucuggucgaccuuuuuguguucaguacuagcuuuuacuugauuuccaucuuccugcaccucgugaaaaucccaacccaucgacacgucauuggcaagcccugcccuaaaccacauagacugaaucacauggggauauguucuugcggacuuuauaagcacccgggcguucccgugaaguggaaaaggugaggacuagucccuguucccagagcccacuuuuuuuucuuuuuuugaaauaaaauagccugucuuucagaucuaaaaaaaaaaaaaaaaaaaaaaaaaaaaaaaaaaaaaaaaaaaaaaaaaaaaaaaaaaaaaaaaugcaucccccccccccccccccccccccccccccccaaaggcucuuuucagagccaccagaauu

SEQ ID NO: 6249 - RNA, 1749 nt, Artificial Sequence
  mRNA product Design a-1 comprising derived and/or modified sequence from LASV(LASV003-NIG-2008;Clade II)__AIT17580__GPCstabilized (opt3)
gggagagucccgcagucggcguccagcggcucugcuuguucgugugugugucguugcaggccuuauucaagcuuaccaugggccagaucauuaccuucuuucaagaggugccccacgucauagaagagguuaugaacaucgugcugauugcccucagccuucuggcuaucuugaaggggauuuacaauguagcaacaugcggauuauucggucugguguccuuucuacuccuguguggcagaucuugcucaacuacguauaaaggggucuacgaacuucagacccuggaguuggacauggccagucucaacaugacaaugccucugagcuguacuaagaauaacucccaucacuauaucauggugggaaaugaaaccggccuggagcucacauuaaccaacacuucuauaaucaaucauaaauucugcaaccugucggaugcgcacaagaaaaaucuuuacgaccaugcuuugaugucaauuaucagcacauuucaccugaguauuccaaacuucaaucaguaugaggccauguccugugauuuuaacggugggaagaucucuguucaguacaaucuaagccacaccuaugcaguggacgccgcuaaccauugcggaacgauagcaaauggcguccuccaaacuuucaugaggauggccuggggcggguccuacauugcucuggauucaggaugcgguaguugggacuguaucaugaccagcuaccaguaucuuauuauccagaacacaacuugggaagaucacugccaguuuucucggccgucccccaucggcuaccugggguugcucucacaacgcacccgagacauuuauauaagccguagacgccggggaacauucaccuggacgcugagugauucugaguccaacgaaacuccuggcgguuacugucucacaagguggaugcuuaucgaggccgagcugaaaugcuuugggaauaccgcgguggcaaaguguaacgaaaaacaugacgaggaguucugcgauauguugcggcuauuugacuucaauaagcaggccauucgcagacugaaagcucccgcccagaugagcauccagcucauaaacaaggcaguaaaugcucugauuaacgaucaacuuaucaugaagaaucaccugagggacaucaugugcauuccauauugcaacuacucgaaauauugguacuugaaucacacuguuacaggacggaccucucucccccgcuguuggcugguguccaacggcucauacuuaaaugaaacgcauuucagugacgauaucgagcagcaggccgacaacaugauuaccgagcugcuacaaaaggaauauauggaucgacaggggaaaacaccucucggacuggucgaccuuuuuguguucagcacuuccuuuuacuugauaucuaucuuccugcaccucgugaagauuccaacccauagacacgucaucgguaaacccugcccuaagccacauaggcugaaucacaugggcaucuguagcugcgggcuuuauaaacacccgggaguucccgugaaguggaagcggugaggacuagucccuguucccagagcccacuuuuuuuucuuuuuuugaaauaaaauagccugucuuucagaucuaaaaaaaaaaaaaaaaaaaaaaaaaaaaaaaaaaaaaaaaaaaaaaaaaaaaaaaaaaaaaaaaugcaucccccccccccccccccccccccccccccccaaaggcucuuuucagagccaccagaauu

SEQ ID NO: 6250 - RNA, 1749 nt, Artificial Sequence
  mRNA product Design a-1 comprising derived and/or modified sequence from LASV(LASV035-NIG-2009;Clade II)__AIT17588__GPCstabilized (opt3)
gggagagucccgcagucggcguccagcggcucugcuuguucgugugugugucguugcaggccuuauucaagcuuaccaugggccagaucauuaccuucuuucaagaggugccccacgucauagaagagguuaugaacaucgugcugauugcccucagccuucuggcuaucuugaaggggauuuacaauguagcaacaugcggauuauucggucugguguccuuucuacuccuguguggcagaucuugcucaacuacguauaaaggggucuacgaacuucagacccuggaguuggacauggccagucucaacaugacaaugccucugagcuguacuaagaauaacucccaucacuauaucauggugggaaaugaaaccggccuggagcucacauuaaccaacacuucuauaaucaaucauaaauucugcaaccugucggaugcgcacaagaaaaaucuuuacgaccaugcuuugaugucaauuaucagcacauuucaccugaguauuccaaacuucaaucaguaugaggccauguccugugauuuuaacggugggaagaucucuguucaguacaaucuaagccacgcauaugccguggacgcugcaaaccauugcggaaccauagccaauggcguccuccaaacguucaugaggauggcuuggggcggguccuacauugcccuggauucaggaugcgguaguugggacuguaucaugacuagcuaccaguaucuuauuauccagaacaccacaugggaagaucacugccaguuuucucggccgucccccaucggcuaccugggguugcucucacaacgcacucgagacauuuauauaagccguagacgccggggaaccuucacauggacccugagugauucugagggcaacgaaacgccugguggguacugucucacuagguggaugcuuaucgaggcggagcugaaaugcuuuggaaauacagcaguggccaaguguaacgaaaaacaugacgaggaguucugcgauauguugcggcuauuugacuucaauaagcaggcuauucgcagacugaaagcccccgcacagauguccauccagcucauaaacaaggcuguaaaugcccugauuaacgaucaacuuaucaugaagaaucaccugagggacaucaugugcauuccauauugcaacuacagcaaauauugguacuugaaucacaccguuacuggcaagacaucgcucccccgguguuggcuggugucuaacggguccuacuuaaaugaaacccauuucucagacgauaucgagcagcaggcggacaacaugauuacggagcugcuacaaaaagaauauauagaucgccagggaaagaccccucucggucuggucgaccuuuuuguguucaguacuagcuuuuacuugaucuccauuuuccugcaccucgugaaaaucccaacacaucgacacgucaucggcaagcccugcccuaaaccacauagacugaaucacauggggauuuguucuugcggacuuuauaagcacccgggcguucccgugaaguggaaaaggugaggacuagucccuguucccagagcccacuuuuuuuucuuuuuuugaaauaaaauagccugucuuucagaucuaaaaaaaaaaaaaaaaaaaaaaaaaaaaaaaaaaaaaaaaaaaaaaaaaaaaaaaaaaaaaaaaugcaucccccccccccccccccccccccccccccccaaaggcucuuuucagagccaccagaauu

SEQ ID NO: 6251 - RNA, 1749 nt, Artificial Sequence
  mRNA product Design a-1 comprising derived and/or modified sequence from LASV(LASV1000-NIG-2009;Clade II)__AIT17782__GPCstabilized (opt3)
gggagagucccgcagucggcguccagcggcucugcuuguucgugugugugucguugcaggccuuauucaagcuuaccaugggccagaucauuaccuucuuucaagaggugccccacgucauagaagagguuaugaacaucgugcugauugcccucagccuucuggcuaucuugaaggggauuuacaauguagcaacaugcggauuauucggucugguguccuuucuacuccuguguggcagaucuugcucaacuacguauaaaggggucuacgaacuucagacccuggaguuggacauggccagucucaacaugacaaugccucugagcuguacuaagaauaacucccaucacuauaucauggugggaaaugaaaccggccuggagcucacauuaaccaacacuucuauaaucaaucauaaauucugcaaccugucggaugcgcacaagaaaaaucuuuacgaccaugcuuugaugucaauuaucagcacauuucaccugaguauuccaaacuucaaucaguaugaggccauguccugugauuuuaacggugggaagaucucuguucaguacaaucuaagccacaccuaugcaguggacgccgcuaaccauugcggaacgauagcaaauggcguccuccaaacuuucaugaggauggccuggggcggguccuacauugcucuggauucaggaugcgguaguugggacuguaucaugaccagcuaccaguaucuuauuauccagaacacaacuugggaagaucacugccaguuuucucggccgucccccaucggcuaccugggguugcucucacaacgcacccgagacauuuauauaagccguagacgccggggaacauucaccuggacgcugagugauucugagggcaacgaaacuccugguggguacugucucacaagguggaugcuuaucgaggccgagcugaaaugcuuuggaaauaccgcgguggcaaaguguaacgaaaaacaugacgaggaguucugcgauauguugcggcuauuugacuucaauaagcaggccauuaaacgccugaagacucccgcucagauguccauccagcucauaaacaaggccguaaaugcacugauuaacgaucaacuuaucaugaaaaaucaccugagagacaucaugugcauuccauauugcaacuacagcaaguauugguacuugaaucacacaguuaccggcaaaacgucgcuccccagguguuggcuggugucuaacggguccuacuuaaaugaaacccauuucucagacgauaucgagcagcaggcugacaacaugauuacagagcugcuacaaaaggaauauauagaucggcagggaaaaacuccucucggucuggucgaccuuuuuguguucaguaccagcuuuuacuugaucuccauuuuccugcaccucgugaagaucccaacacaucgccacgucguuggcaaacccugcccuaagccacaucgacugaaucacauggggaucuguucuugcggacuuuauaagcacccgggcgugcccguaaaauggaagagaugaggacuagucccuguucccagagcccacuuuuuuuucuuuuuuugaaauaaaauagccugucuuucagaucuaaaaaaaaaaaaaaaaaaaaaaaaaaaaaaaaaaaaaaaaaaaaaaaaaaaaaaaaaaaaaaaaugcaucccccccccccccccccccccccccccccccaaaggcucuuuucagagccaccagaauu

SEQ ID NO: 6252 - RNA, 1749 nt, Artificial Sequence
  mRNA product Design a-1 comprising derived and/or modified sequence from LASV(LASV221-NIG-2010;Clade II)__AIT17624__GPCstabilized (opt3)
gggagagucccgcagucggcguccagcggcucugcuuguucgugugugugucguugcaggccuuauucaagcuuaccaugggccagaucauuaccuucuuucaagaggugccccacgucauagaagagguuaugaacaucgugcugauugcccucagccuucuggcuaucuugaaggggauuuacaauguagcaacaugcggauuauucggucugguguccuuucuacuccuguguggcagaucuugcucaacuacguauaaaggggucuacgaacuucagacccuggaguuggacauggccagucucaacaugacaaugccucugagcuguacuaagaauaacucccaucacuauaucauggugggaaaugaaaccggccuggagcucacauuaaccaacacuucuauaaucaaucauaaauucugcaaccugucggaugcgcacaagaaaaaucuuuacgaccaugcuuugaugucaauuaucagcacauuucaccugaguauuccaaacuucaaucaguaugaggccauguccugugauuuuaacggugggaagaucucuguucaguacaaucuaagccacaccuaugcaauagacgccgcuaaccauugcggaacgauugcaaauggcgugcuccaaacuuucaugaggauggccuggggcggguccuacaucgcucuggauucaggaugcgguaguugggacuguauuaugaccagcuaccaguaucuuaucauccagaacacaacuugggaagaucacugccaguuuucucggccgucccccauuggcuaccugggguugcucucacaacgcacccgagacauauauaucagccguagacgccggggaacauucaccuggacgcugagugauucugagggcaacgaaacuccugguggguacugucucacaagguggaugcuuauugaggccgagcugaaaugcuuuggaaauaccgcggucgcaaaguguaacgaaaaacaugacgaggaguucugcgauauguugcggcuauuugacuucaauaagcaggccauccgcagacugaaaacucccgcucagauguccauacagcucauuaacaaggccgugaaugcacugaucaacgaucaacuuaucaugaagaaucaccugagggacauuaugugcaucccauauugcaacuacagcaaauauugguacuugaaucacacaguaaccggcaagacgucgcucccccgguguuggcugguuucuaacggguccuacuuaaaugaaacccauuucucagacgauauugagcagcaggcugacaacaugauaacagagaugcugcaaaaagaauauauggaucgccagggaaagacuccucuaggucucguggaccuguuugucuucaguaccagcuuuuaccuuaucuccauuuucuugcaccuggugaaaaucccaacacaucgacacgugaucggcaagcccugcccuaaaccacauagacucaaucacauggggauuuguucuugcggacuguauaagcacccgggcguccccguuaaguggaaaaggugaggacuagucccuguucccagagcccacuuuuuuuucuuuuuuugaaauaaaauagccugucuuucagaucuaaaaaaaaaaaaaaaaaaaaaaaaaaaaaaaaaaaaaaaaaaaaaaaaaaaaaaaaaaaaaaaaugcaucccccccccccccccccccccccccccccccaaaggcucuuuucagagccaccagaauu

SEQ ID NO: 6253 - RNA, 1749 nt, Artificial Sequence
  mRNA product Design a-1 comprising derived and/or modified sequence from LASV(LASV237-NIG-2010;Clade II)__AIT17638__GPCstabilized (opt3)
gggagagucccgcagucggcguccagcggcucugcuuguucgugugugugucguugcaggccuuauucaagcuuaccaugggccagaucauuaccuucuuucaagaggugccccacgucauagaagagguuaugaacaucgugcugauugcccucagccuucuggcuaucuugaaggggauuuacaauguagcaacaugcggauuauucggucugguguccuuucuacuccuguguggcagaucuugcucaacuacguauaaaggggucuacgaacuucagacccuggaguuggacauggccagucucaacaugacaaugccucugagcuguacuaagaauaacucccaucacuauaucauggugggaaaugaaaccggccuggagcucacauuaaccaacacuucuauaaucaaucauaaauucugcaaccugucggaugcgcacaagaaagaccuuuacgaucaugcuuugaugucaauuaucagcacauuucaccugaguauuccaaauuucaaccaguaugaggccauguccugugacuuuaauggugggaagaucucuguucaguacaaccuaagccacaccuaugcaguggaugccgcuaaucauugcggaacgauagcaaacggcguccuccaaacuuucaugaggauggccuggggcggguccuacauugcucuggacucaggaugcgguaguugggauuguaucaugaccagcuaccaguaucuuauuauccagaauacaacuugggaagaccacugccaguuuucucggccgucccccaucggcuaccugggguugcucucacaacgcacccgagauauuuauauaagccguagacgccggggaacauucaccuggacgcugagugacucugagggcaacgaaacuccugguggguacugucucacaagguggaugcuuaucgaggccgagcugaaaugcuuuggaaacaccgcgguggcaaaguguaaugaaaaacaugaugaggaguucugcgacauguugcggcuauuugauuucaacaagcaggccauucgcagacugaaaacucccgcucagauguccauccagcucauaaauaaggccguaaacgcacugauuaaugaccaacuuaucaugaagaaccaccugagggacaucaugugcauuccauauugcaauuacagcaaauauugguacuugaaccacacaguuaccggcaagacgucgcucccccgguguuggcuggugucuaauggguccuacuuaaacgaaacccauuucucagaugacaucgagcagcaggcugauaauaugauuacagagcugcuacaaaaagaauauauggaccgccagggaaagacuccucucggucuggucgaucuuuuuguguucaguaccagcuuuuacuugauauccaucuuccugcaccucauuaaaaucccaacacaucgacacaucacuggcaagcccugcccuaaaccacauagacugaaccacauggggauuuguucuugcggacuuuauaagcacccgggcgugcccgucaaguggaaaaggugaggacuagucccuguucccagagcccacuuuuuuuucuuuuuuugaaauaaaauagccugucuuucagaucuaaaaaaaaaaaaaaaaaaaaaaaaaaaaaaaaaaaaaaaaaaaaaaaaaaaaaaaaaaaaaaaaugcaucccccccccccccccccccccccccccccccaaaggcucuuuucagagccaccagaauu

SEQ ID NO: 6254 - RNA, 1749 nt, Artificial Sequence
  mRNA product Design a-1 comprising derived and/or modified sequence from LASV(LASV253-NIG-2011;Clade II)__AIT17670__GPCstabilized (opt3)
gggagagucccgcagucggcguccagcggcucugcuuguucgugugugugucguugcaggccuuauucaagcuuaccaugggccagaucauuaccuucuuucaagaggugccccacgucauagaagagguuaugaacaucgugcugauugcccucagccuucuggcuaucuugaaggggauuuacaauguagcaacaugcggauuauucggucugguguccuuucuacuccuguguggcagaucuugcucaacuacguauaaaggggucuacgaacuucagacccuggaguuggacauggccagucucaacaugacaaugccucugagcuguacuaagaauaacucccaucacuauaucauggugggaaaugaaaccggccuggagcucacauuaaccaacacuucuauaaucaaucauaaauucugcaaccugucggaugcgcacaagaaaaaucuuuacgaccaugcuuugaugucaauuaucagcacauuucaccugaguauuccaaacuucaaucaguaugaggccauguccugugauuuuaacggugggaagaucucuguucaguacaaucuaagccacaccuaugcaguggacgccgcuaaccauugcggaacgauagcaaauggcguccuccaaacuuucaugaggauggccuggggcggguccuacauugcucuggauucaggaugcgguaguugggacuguaucaugaccagcuaccaguaucuuauuauccagaacacaacuugggaagaucacugccaguuuucucggccgucccccaucggcuaccugggguugcucucacaacgcacccgagacauuuauauaagccguagacgccggggaacauucaccuggacgcugagugauucugagggcaacgaaacuccugguggguacugucucacaagguggaugcuuaucgaggccgagcugaaaugcuuuggaaauaccgcgguggcaaaguguaacgaaaaacaugacgaggaguucugcgauauguugcggcuauuugacuucaauaagcaggccauucgcagacugaaagcucccgcccagauguccauccagcucauaaacaaggcaguaaaugcucugauuaacgaucaacuuaucaugaagaaucaccugagggacaucaugugcauuccauauugcaacuacagcaaauauugguacuugaaucacacuguuacaggccggaccucgcucccccgcuguuggcuggugucuaacggguccuacuuaaaugaaacgcauuucucagacgauaucgagcagcaggccgacaacaugauuaccgagcugcuacaaaaggaauauauagaucgacagggaaaaacaccucucggucuggucgaccuuuuuguguucaguacuagcuuuuacuugaucuccauuuuccugcaccucgugaagaucccaacccauagacacaucauuggcaaacccugcccuaagccacauaggcugaaucacauggggauauguucuugcggacuuuauaaacacccgggcguccccguuaaguggaagcggugaggacuagucccuguucccagagcccacuuuuuuuucuuuuuuugaaauaaaauagccugucuuucagaucuaaaaaaaaaaaaaaaaaaaaaaaaaaaaaaaaaaaaaaaaaaaaaaaaaaaaaaaaaaaaaaaaugcaucccccccccccccccccccccccccccccccaaaggcucuuuucagagccaccagaauu

SEQ ID NO: 6255 - RNA, 1749 nt, Artificial Sequence
  mRNA product Design a-1 comprising derived and/or modified sequence from LASV(LASV254-NIG-2011;Clade II)__AIT17674__GPCstabilized (opt3)
gggagagucccgcagucggcguccagcggcucugcuuguucgugugugugucguugcaggccuuauucaagcuuaccaugggccagaucauuaccuucuuucaagaggugccccacgucauagaagagguuaugaacaucgugcugauugcccucagccuucuggcuaucuugaaggggauuuacaauguagcaacaugcggauuauucggucugguguccuuucuacuccuguguggcagaucuugcucaacuacguauaaaggggucuacgaacuucagacccuggaguuggacaugacaaaccucaauaugacuaugccucugaguuguaccaagaacaauagccaucacuauaucauggugggaaacgaaacaggccuggagcucaccuuaacuaauacauccauaaucaaccauaaauucugcaaucugucugaugcccacaagaaaaaccuuuacaaucaugcguugaugucgauuaucucaaccuuucaccugagcauuccaaacuucaaucaguaugaggcuaugaguugugacuuuaacggugggaagaucuccguucaguacaaucuaucucacagcuaugccguggaugcagccaaccauugcggaacgauagcuaacggcguccuccaaacuuucaugaggauggcauggggcggguccuacauugcccuggacucaggaugcgguaauugggauuguaucaugaccaguuaccaguaucuuauuauccagaacacaacuugggaagaccacugccaguuuagccggccgucucccaucggcuaccugggguugcucucccaacgcacccgagauauuuauauaucacguagacgccggggaacauucaccuggacgcugagcgacagugagggcaaugaaacuccugguggguacugucucacaagguggaugcuuaucgaggcugagcugaaaugcuuuggaaacaccgccguggcgaaguguaaugaaaaacaugaugaggaguucugcgacauguugcggcuauuugauuucaacaagcaggcaauucgcagacugaaaacucccgcccaggcuaauauccagcucauaaacaaggccguaaaugcacugauuaacgaccaacuuaucaugaagaaucaccugagggauaucaugugcauuccauauugcaacuacucuaaauauugguacuugaaucacacaguuaccggcaagacgucccucccccgguguuggcuggugagcaacgggucguacuuaaaugaaacccauuucucugacgacaucgagcagcaggcugauaacaugauuacagagcugcuacaaaaagaauauauggaccgccagggaaagacuccucucggucuggucgaucuuuuuguguucuccaccucauuuuacuugauaaguaucuuccugcaccucgugaaaauuccaacacaucgacacgucaucggcaagcccugcccuaaaccacauagacugaaccacauggggaucuguagcugcggacuuuauaagcacccgggcguucccgugaaguggaaaaggugaggacuagucccuguucccagagcccacuuuuuuuucuuuuuuugaaauaaaauagccugucuuucagaucuaaaaaaaaaaaaaaaaaaaaaaaaaaaaaaaaaaaaaaaaaaaaaaaaaaaaaaaaaaaaaaaaugcaucccccccccccccccccccccccccccccccaaaggcucuuuucagagccaccagaauu

SEQ ID NO: 6256 - RNA, 1749 nt, Artificial Sequence
  mRNA product Design a-1 comprising derived and/or modified sequence from LASV(Nig08-A19;Clade III)__ADU56618__GPCstabilized (opt3)
gggagagucccgcagucggcguccagcggcucugcuuguucgugugugugucguugcaggccuuauucaagcuuaccaugggccagaucgugaccuucuuucaagaggucccccacguuauugaagaggugaugaacauaguacugaucgcccucagcauucuugcuauccugaagggguuguacaauauugcaacaugcggauuaaucggucuggugacuuuccuacuccuguccggcagaucuuguucaaugacguauaaaggggucuacgaacuucagacccuggaguugaacaugaauacacucaacaugacuaugccucugaguugcaccaagaauaacagccaucacuauauaauggugggaaaugaaacaggccuggagcucaccuuaacuaacacaucccugcuucaucacaaauuuuguaauuugucugacgcccauaagaaaaaccuguacgaucacacccuaaugucgaucauuucaacguuccaccucagcaucccaaauuuuaaccaguaugaggcgaugaguugcgacuucaauggugggaagauuacuguucaguacaaccugucccauucuuaugcuaucgaugccgcaaaucacuguggaaccguggccaacggcguccuucaaacauuuaugaggauggcuuggggcgggagcuacauagcacuggacuccggaugcgguaagugggauugcauuaugacuucauaccaguauuugaucauucagaacaccacaugggaagaccauugucaguucagucgcccgagccccaucggcuaccucgggcuguuaucucaacgaacccgugauaucuauauuuccagaaggcgccggggaacguuuacuuggacacuuucagacagcgagggcaaugaaaccccugguggguacugccugacucgguggauguugauagaggccgagcuaaaauguuucggaaacacagcuguggccaagugcaaugaaaaacacgaugaggaauuuugugacaugcugcgccucuucgauuuuaacaagcaggcgaucagaaggcugaaagcacccgcccagaugaguauucagcuuaucaauaaggcuguaaacgcccugauaaaugaccaauugauuaugaagaaccaccuccgggauaucaugugcaucccauauugcaauuacucuaaauauugguaccugaaccauaccuccacgggccgcaccagcuuaccccgaugcuggcugguuucgaaugggucuuaccuaaacgaaacacacuucuccgacgacauugagcagcaggcagauaauaugaucacugagaugcuccaaaaggaauaucuggacagacagggaaaaaccccucuugguuugguggaucuguucgucuuuucaacaaguuucuaccucauuagcauauuucugcaucuugugaagaucccaacucacaggcauauugugggcaaacccuguccuaagccacaccggcugaaccacauggggaucugcuccuguggauuguauaaacagccgggcguccccguucguuggaagcgcugaggacuagucccuguucccagagcccacuuuuuuuucuuuuuuugaaauaaaauagccugucuuucagaucuaaaaaaaaaaaaaaaaaaaaaaaaaaaaaaaaaaaaaaaaaaaaaaaaaaaaaaaaaaaaaaaaugcaucccccccccccccccccccccccccccccccaaaggcucuuuucagagccaccagaauu

SEQ ID NO: 6257 - RNA, 1752 nt, Artificial Sequence
  mRNA product Design a-1 comprising derived and/or modified sequence from LASV(G1180-SLE-2010;Clade IV)__AIT17168__GPCstabilized (opt3)
gggagagucccgcagucggcguccagcggcucugcuuguucgugugugugucguugcaggccuuauucaagcuuaccaugggccagaucgugaccuucuuucaagaggucccccacguuauugaagaggugaugaacauaguacugaucgcccucagcauucuugcugugcugaagggguuguacaauuucgcaacaugcggauuagucggucugcuaacuuuucuccugcuuuguggcagauccugcacggccucuagguauaaagggguguacgaacugcagaccuuggagcucaacauggaaacacugaauaugacuaugccucugucauguaccaagaacaauagucaucacuauaucaugguuggaaacgagacaggccucgaguuaacccugacuaauacaagcauuaucaaccauaaauucugcaaucuuuccgacgcgcacaagaaaaacuuguacgaucaugcucugaugucuauaaucucgaccuuucaccuaucaauuccaaauuucaaccaguaugaagccaugagcugugacuuuaauggugggaagaucagugugcaguacaaccucucccacucuuaugcaggagaugccgcuaaucauugcggcacggucgcaaacggcgugcugcaaacuuucaugcggauggccuggggagggagcuacauugcucuugacuccgguugcggcucaugggauuguaucaugaccaguuaccaguaucugauaauucagaacacaacuugggaggaccauugccaguuuagccgcccgucucccaucggguacuugggacuccugucccaacgaacccgugauauuuauaucucaagaaggcgccggggcacauucaccuggacgcucagcgacagugaagguaaggauacuccugggggauacugucuuacacgguggaugcugaucgaggccgaguugaaaugcuuuggcaauaccgcgguagcaaaguguaacgaaaaacacgacgaggaguucugcgauaugcuacgccuguuugacuucaauaagcaggccauucagagacucaaagcucccgcccagaugucuauacaacugaucaacaaggcaguuaaugcucuuauuaacgaucagcugaucaugaagaaucacuugagggacauaaugugcauuccauauugcaacuacuccaaauauugguaccucaaucauacuacaaccgggaagacgagccugcccaaauguugguuagugucgaacggaucuuaccugaaugaaacccacuucuccgacgauaucgagcagcaagccgacaacaugaucacagagaugcuacagaaggaauauauggagcggcaggguaaaacuccucucggccuggucgaucuuuuuguguucucaaccaguuuuuacuugauuagcaucuuccugcaucucgugaagauuccaacacaccgccauauagucgggaaauccugccccaagccucaccgacugaaucacaugggaaucuguucuugcggccuuuauaagcagccagguguuccggugaaauggaagagaugaggacuagucccuguucccagagcccacuuuuuuuucuuuuuuugaaauaaaauagccugucuuucagaucuaaaaaaaaaaaaaaaaaaaaaaaaaaaaaaaaaaaaaaaaaaaaaaaaaaaaaaaaaaaaaaaaugcaucccccccccccccccccccccccccccccccaaaggcucuuuucagagccaccagaauu

SEQ ID NO: 6258 - RNA, 1752 nt, Artificial Sequence
  mRNA product Design a-1 comprising derived and/or modified sequence from LASV(G1442-SLE-2011;Clade IV)__AIT17180__GPCstabilized (opt3)
gggagagucccgcagucggcguccagcggcucugcuuguucgugugugugucguugcaggccuuauucaagcuuaccaugggccagaucgugaccuucuuucaagaggucccccacguuauugaagaggugaugaacauaguacugaucgcccucagcauucuugcugugcugaagggguuguacaaugucgcaacaugcggauuaaucggucuggugacuuuccuacuccuguguggcagauccugcacgaccacacuuuauaaagggguuuacgaacugcagacuuuggagcucaacauggaaacccugaauaugacaaugccucugucuuguaccaagaacaauucacaucacuauauuagggugggaaacgagacuggccucgaguuaacacugaccaauacgaguaucauaaaccauaaauuuugcaaucuuagcgacgcccacaagaaaaacuuguacgaucaugcgcugauguccaucauuucuacuuuccaccuaucgaucccaaauuuuaaccaguaugaagcuaugucaugugacuucaauggugggaagauuagcguccaguacaaccucagucacuccuaugccggagaugcagccaaucauugcggcaccguggcuaacggcguacugcaaacauuuaugcggauggcauggggagggucuuacaucgcccuugacagcgguugcggcaacugggauuguauaaugacuuccuaccaguaucugauuauccagaauaccacaugggacgaucacugccaguucucacgaccgagucccauuggguacuugggacuccugagccaacguaccagagacguuuauaucucuaggcggcgccggggcacguuuacuuggacacucuccgauucagaggguaaggacaccccugggggauacugucuuacucgcuggaugcugaucgaagcugaguugaaaugcuucggcaacacagccguggcgaaguguaaugagaaacaugaugaagaguuuugcgacaugcuaagacuguucgauuuuaacaagcaggcaauucagaggcucaaagcccccgcucagaugagcauacaacugaucaauaaggccgucaacgcacuuauuaaugaccagcugaucaugaagaaccacuugcgggacauaaugugcauuccauauugcaauuacaguaaauauugguaccucaacaauaccgcuacggggaagaccucucugcccaaauguugguuaaucuccaacggaagcuaccugaaugagacacacuucucggaugacaucgaacaggaggccgauaacaugauuacugagaugcuacaaaaggaauauauggagcgccaggguaaaaccccucucggccugguggaccuuuucguguuuucuacauccuucuacuugaucucaauuuuucugcaucucgucaagauaccaacucaccgacauaucguugggaaaaguugccccaagccucacagacugaaucauaugggaauuuguagcugcggccuuuauaagcagccaggugugccgguaagguggaaacggugaggacuagucccuguucccagagcccacuuuuuuuucuuuuuuugaaauaaaauagccugucuuucagaucuaaaaaaaaaaaaaaaaaaaaaaaaaaaaaaaaaaaaaaaaaaaaaaaaaaaaaaaaaaaaaaaaugcaucccccccccccccccccccccccccccccccaaaggcucuuuucagagccaccagaauu

SEQ ID NO: 6259 - RNA, 1752 nt, Artificial Sequence
  mRNA product Design a-1 comprising derived and/or modified sequence from LASV(G3010-SLE-2013;Clade IV)__AIT17344__GPCstabilized (opt3)
gggagagucccgcagucggcguccagcggcucugcuuguucgugugugugucguugcaggccuuauucaagcuuaccaugggccagaucgugaccuucuuucaagaggucccccacguuauugaagaggugaugaacauaguacugaucgcccucagcauucuugcugugcugaagggguuguacaauuucgcaacaugcggauuagucggucuggugacuuuucuacuccuguguggcagauccugcacgaccucucuuuauaaagggguuuacgaacugcagacauuggagcucaacauggaaacucugaauaugaccaugccucugucauguacaaagaacaauagucaucacuauaucauggugggaaacgagaccggccucgaguuaacucugacaaauaccagcauuaucaaccauaaauucugcaaucuuuccgacgcccacaagaaaaacuuguacaaucaugcgcugaugucuauaaucucgacguuucaccuaucaauuccaaacuucaaucaguaugaagcuaugagcugugauuuuaacggugggaagaucaguguccaguacaaucucucccacucuuaugccggagacgcagccagccauugcggcacuguggcuaacggcguacugcaaaccuucaugaggauggcauggggaggguccuacauugcccuugauucagguugcggcaagugggacuguaucaugacaaguuaucaguaccugauaauucagaacacuaccugggaggaucacugccaguuuagccggccgucucccaucggguauuugggacuccugucccaacgcacacgagacauuuacaucucacguagacgccggggcaccuucacguggacucucagcgauagugaagguaaagacacaccugggggauauugucuuaccagguggaugcugaucgaggcugaguugaagugcuuuggcaauacugccguugcgaaauguaacgaaaagcaugaugaggaguucugcgacaugcuacggcuguuugauuucaauaaacaggcaauucagcgccucaagacacccgcccagaugucuauacaacugaucaacaaggcugugaaugcccuuauuaacgaccagcugaucaugaaaaaucacuugagagauauaaugugcauuccauacugcaacuauuccaaguacugguaccucaaucacaccacgaccgggaaaacaagccugcccaaguguugguuagucucgaacggaucuuaucugaaugaaacucauuucuccgacgacaucgagcagcaagcagauaacaugaucaccgagaugcuacagaaagaauacauggagaggcaggguaagacaccucucggccugguggaccuuuuuguguucucaaccaguuuuuauuugauuagcaucuuccugcaccucgucaaaauuccaacucaucggcacauaguugggaaguccugccccaagccucaucgccugaaucacaugggaaucuguucuugcggccuuuacaaacagccaggugugccgguacgauggaagagaugaggacuagucccuguucccagagcccacuuuuuuuucuuuuuuugaaauaaaauagccugucuuucagaucuaaaaaaaaaaaaaaaaaaaaaaaaaaaaaaaaaaaaaaaaaaaaaaaaaaaaaaaaaaaaaaaaugcaucccccccccccccccccccccccccccccccaaaggcucuuuucagagccaccagaauu

SEQ ID NO: 6260 - RNA, 1752 nt, Artificial Sequence
  mRNA product Design a-1 comprising derived and/or modified sequence from LASV(G502-SLE-2009;Clade IV)__AIT17126__GPCstabilized (opt3)
gggagagucccgcagucggcguccagcggcucugcuuguucgugugugugucguugcaggccuuauucaagcuuaccaugggccagaucgugaccuucuuucaagaggucccccacguuauugaagaggugaugaacauaguacugaucgcccucagcauucuugcugugcugaagggguuguacaauuucgcaacaugcggauuagucggucugcuaacuuuucuccugcuuuguggcagauccugcacgaccgggcuguauaaaggaguguacgaauugcagacacucgagcugaacauggaaacucugaauaugaccaugccucucucuuguacaaagaacaauucacaucacuauaucaugguuggcaacgagaccgguuuagagcugacucuuacaaauaccaguauuaucaaccauaaauucugcaauuugagcgacgcccacaagaaaaaccuguacgaucaugcgcuaauguccauaaucucuacguuucaccucucgauuccaaauuucaaccaguaugaagcuaugucaugugacuuuaaugggggaaagaucagcgugcaguacaaccugagucacuccuaugccggcgaugcagccgaccauugcggcacugucgcuaauggggugcuucaaaccuucaugaggauggcauggggagguucuuacauugcccuggauagcggcugcgggcgcugggacuguaucaugacauccuaccaguauuugauaauucagaacacuaccugggaggaucacugccaguuuucacgaccgagucccaucggauaccucggccuguuaagccaacguacaagagacauuuauaucucuaggcggcgccgggguaccuucacguggacucuuuccgauucagaagggaaggacacaccuggaggcuacugucugacccgcuggauguugaucgaggcugagcuaaaaugcuuuggcaacacugccguagcgaaguguaaugaaaaacaugaugaggaguucugcgacaugcugagacucuuugauuucaacaagcaggcaauucagaggcugaaagcccccgcucagaugagcauacaacuuaucaauaaggccguuaacgcacugauuaaugaccaguuggugaugaagaaccaccuccgggacaucaugugcauaccauauugcaauuacagucgcuauugguaccugaaccacacaaccacgggacgaaccucuuuacccaaauguuggcuggucuccaaugguagcuaccuaaacgaaacacauuucucggaugacauugagcagcaagcugauaauaugaucacugagaugcuccagaaggaauauauggagagacagggcaaaaccccucuggggcuuguggacuuguuuguguucucuacauccuuuuaccugaucucaauuuuccuccaccuggucaagaucccaacucauaggcacauuguuggaaaaaguugccccaagccucaucggcuuaaccacaugggcauauguagcugcggucuguauaaacagccaggggugccgguaaaguggaagcguugaggacuagucccuguucccagagcccacuuuuuuuucuuuuuuugaaauaaaauagccugucuuucagaucuaaaaaaaaaaaaaaaaaaaaaaaaaaaaaaaaaaaaaaaaaaaaaaaaaaaaaaaaaaaaaaaaugcaucccccccccccccccccccccccccccccccaaaggcucuuuucagagccaccagaauu

SEQ ID NO: 6261 - RNA, 1752 nt, Artificial Sequence
  mRNA product Design a-1 comprising derived and/or modified sequence from LASV(G733-SLE-2010;Clade IV)__AIT17154__GPCstabilized (opt3)
gggagagucccgcagucggcguccagcggcucugcuuguucgugugugugucguugcaggccuuauucaagcuuaccaugggccagaucgugaccuucuuucaagaggucccccacguuauugaagaggugaugaacauaguacugaucgcccucagcauucuugcugugcugaagggguuguacaauuucgcaacaugcggaaucgucgguuuaguguccuuucugcuacucuguggcagaucuugcacuacgucacuguauaaagggguuuacgaacuucagacccuggaguugaacauggaaacacucaauaugacuaugccucugaguuguaccaagaacaauagccaucacuauauuauggugggaaacgagacaggccuggagcucaccuuaacuaauacauccaucauaaaccauaaauucugcaaucugucugacgcccacaagaaaaaccuuuacgaucaugcguugaugucgaucauuucaaccuuucaccugagcaucccaaauuucaaccaguaugaagcuaugaguugugacuuuaauggugggaagauuuccguccaguacaaccuaucucacagcuaugccggagaugcagccaaucauugcggcacgaucgcuaacggcgugcuccaaacuuucaugaggauggcauggggaggguccuacauagcccuggacucagguugcgaucgcugggacuguauuaugaccaguuaccaguaucuuaucauucagaacacaacuugggaggaucacugccaguuuagccgaccgucucccaucggcuaccugggguugcucucccaacguaccagagacaucuauauuucaaggcggcgccggggaacauucaccuggacgcugagcgauagugaaggcaaggacacuccugguggguacugucucacacgcuggaugcuuauagaggcugagcugaaaugcuuuggaaauaccgccguagcgaaguguaacgaaaaacaugaugaggaguucugcgacauguugagacuauuugauuucaauaagcaggcaauccagaggcugaaagcccccgcucagaugucuauucaacucaucaacaaggccguuaaugcacugauaaacgaccagcuuauuaugaagaaucaucugcgggacaucaugugcaucccauauugcaacuacuccaaauauugguacuugaaucacacuacaaccggcaagacgagccuccccaaauguuggcuggugucgaacgggucuuacuuaaaugaaacccacuucuccgaugacauugagcagcaagcugauaacaugaucacagagaugcugcagaaggaauauauggagcgccagggaaaaacuccucuaggucucgucgaccuguuuguguucucaaccaguuuuuaccuuauuagcauauucuugcaccuggugaagaucccaacacaucgacacgucguuggcaaauccugccccaagccucauagacucaaucacauggggauuuguucuugcggacuguauggccagccaggugugccgguaaaguggaaaaggugaggacuagucccuguucccagagcccacuuuuuuuucuuuuuuugaaauaaaauagccugucuuucagaucuaaaaaaaaaaaaaaaaaaaaaaaaaaaaaaaaaaaaaaaaaaaaaaaaaaaaaaaaaaaaaaaaugcaucccccccccccccccccccccccccccccccaaaggcucuuuucagagccaccagaauu

SEQ ID NO: 6262 - RNA, 1752 nt, Artificial Sequence
  mRNA product Design a-1 comprising derived and/or modified sequence from MOPV/LASV reassortant(IGS-1;Clade IV)__AFY05576__GPCstabilized (opt3)
gggagagucccgcagucggcguccagcggcucugcuuguucgugugugugucguugcaggccuuauucaagcuuaccaugggccagaucgugaccuucuuucaagaggucccccacguuauugaagaggugaugaacauaguacugaucgcccucagcgugcuugcuguccugaagggguuguacaauuucgcaacaugcggauuagugggucugguuacuuuucuacuccuguguggcagauccugcacgaccucucuuuauaaagggguguacgaacugcagacauuggagcucaacauggaaacucugaauaugaccaugccucugucauguacaaagaacaauagucaucacuauauuauggucggaaacgagaccggccucgaguuaacucugacaaauaccagcaucauuaaccauaaauucugcaaucuuuccgacgcccacaagaaaaacuuguacgaucaugcgcugaugucuaucauaucgacguuucaccuaucaaucccaaauuucaaccaguaugaagcuaugagcugugacuuuaauggugggaagauuagugugcaguacaaccucucccacucuuaugccggagaugcagccaaucauugcggcacuguagcuaacggcguucugcaaaccuucaugaggauggcauggggagggagcuacaucgcccuugacuccgguugcggcaacugggauuguauuaugacaucauaccaguaucugaucauacagaauacuaccugggaggaccacugccaguuuagucgcccgagccccauuggguacuugggacuccugucucaacgaacacgugauaucuauauuuccagaaggcgccggggcaccuucacguggacucucucagacagcgaaggugaggauacaccugggggauacugucuuacccgguggaugcugaucgaggcugaauugaagugcuuuggcaacacugccguggcgaaauguaaugagaagcaugacgaagaguucugcgauaugcuacgccuguuugacuucaacaaacaggcaauccagagacucaaggcccccgcucagaugaguauucaacugauaaauaaagccgucaacgcacuuaucaaugaucagcugauuaugaagaaccacuugagggacaucaugugcauaccauauugcaauuacucuaaguauugguaccucaaccacacaaccacggggcggaccucccugcccaaauguugguuagugagcaauggaucguaccugaacgagacacauuucucugacgauauugagcagcaagcugacaauaugaucacugaaaugcuacagaaggaguauauggaacgccaggguaaaaccccucucggccugguggaucuuuuugucuucuccacaucauuuuacuugaucaguauuuuccugcaccucguuaagaucccaacucaucgacacauuguggggaaaagcugccccaagccucauagacugaaccacaugggaauauguuccugcggccuuuauaaacagccagguguaccggugaaguggaagaggugaggacuagucccuguucccagagcccacuuuuuuuucuuuuuuugaaauaaaauagccugucuuucagaucuaaaaaaaaaaaaaaaaaaaaaaaaaaaaaaaaaaaaaaaaaaaaaaaaaaaaaaaaaaaaaaaaugcaucccccccccccccccccccccccccccccccaaaggcucuuuucagagccaccagaauu

SEQ ID NO: 6263 - RNA, 1752 nt, Artificial Sequence
  mRNA product Design a-1 comprising derived and/or modified sequence from LASV(LM765-SLE-2012;Clade IV)__AIT17814__GPCstabilized (opt3)
gggagagucccgcagucggcguccagcggcucugcuuguucgugugugugucguugcaggccuuauucaagcuuaccaugggccagaucgugaccuucuuucaagaggucccccacguuauugaagaggugaugaacauaguacugaucgcccucagcauucuugcugugcugaagggguuguacaauuucgcaacaugcggauuagucggucuggugacuuuucuacuccuguguggcagauccugcacgaccucucuuuauaaagggguuuacgaacugcagacauuggagcucaacauggaaacucugaauaugaccaugccucugucauguacaaagaacaauagucaucacuauaucauggugggaaacgagaccggccucgaguuaacucugacaaauaccagcauuaucgaccauaaauucugcaaccuuuccgaugcccacaggaagaauuuguacgaccaugcgcugaugucuauaaucucgacguuucaccuaucaauuccaaacuucaaucaguaugaagcuaugagcugugauuuuaacggugggaaaaucaguguccaguacaaucucucccacucuuaugccaaggacgcagccgaucauugcggaacuguggcuaacggcguacugcaaaccuucaugcggauggcauggggcgggagcuacauugcccuugacuccggaugcggucgaugggauuguaucaugacaucauaccaguaucugauaauucagaauacuaccugggaggaccacugccaguuuagucguccgagccccaucggcuacuuggggcuccugucucaaagaacaagggauauuuauaucucccggcgccgccggggaaccuucacguggacucucucagacagcgaaggcaaggauacaccugguggguacugucuuaccagauggaugcugaucgaggcugaguugaaaugcuuuggaaacacugccguugcgaaguguaacgaaaaacaugacgaggaguucugcgauaugcuaaggcuguuugacuucaauaagcaggcaauucagcggcucaaagcccccgcucagaugaguauacaacugaucaacaaggccgugaaugcacuuauuaacgaccagcugaucaugaagaaucacuugcgcgauauaaugugcauuccauauugcaacuacucuaaauauugguaccucaaucacacaaccacgggcaagaccucccugcccaaauguugguuagucagcaacgggucguaccugaaugaaacacauuucucugacgauaucgagcagcaagcugacaacaugaucacugagaugcuacagaaggaauauauggagcgacagggaaaaaccccucucggucugguggaucuuuuuguguucuccacaucauuuuacuugauuaguaucuuccugcaccucgucaagauuccaacucauagacacauaguuggcaaacccugcccuaagccacauaggcugaaucacauggggaucuguagcugcggacuuuauaagcagccgggcgugcccguaaaauggaagcggugaggacuagucccuguucccagagcccacuuuuuuuucuuuuuuugaaauaaaauagccugucuuucagaucuaaaaaaaaaaaaaaaaaaaaaaaaaaaaaaaaaaaaaaaaaaaaaaaaaaaaaaaaaaaaaaaaugcaucccccccccccccccccccccccccccccccaaaggcucuuuucagagccaccagaauu

SEQ ID NO: 6264 - RNA, 1752 nt, Artificial Sequence
  mRNA product Design a-1 comprising derived and/or modified sequence from LASV(LM776-SLE-2012;Clade IV)__AIT17824__GPCstabilized (opt3)
gggagagucccgcagucggcguccagcggcucugcuuguucgugugugugucguugcaggccuuauucaagcuuaccaugggccagaucgugaccuucuuucaagaggucccccacguuauugaagaggugaugaacauaguacugaucgcccucagcauucuugcugugcugaagggguuguacaauuucgcaacaugcggauuagucggucuggugacuuuucuacuccuguguggcagauccugcacgaccucuguuuauaaagggguguacgaacuucagacacuggaguugaacauggaaacucucaauaugaccaugccucugucauguacaaagaacaauagucaucacuauaucauggucggaaacgagaccggccuggagcucacuuuaacaaauaccagcauuaucaaccauaaauucugcaaucuguccgacgcccacaagaaaaaccuuuacgaucaugcguugaugucuauaaucucgacguuucaccugucaauuccaaauuucaaccaguaugaagcuaugagcugugacuuuaauggugggaagaucagugugcaguacaaccuaucccacucuuaugccggagaugcagccaaucauugcggcacuguagcuaacggcguucuccaaaccuucaugaggauggcauggggagggagcuacauugcccuggacuccgguugcggcaagugggauuguaucaugacaucauaccaguaucuuauaauucagaacacuaccugggaggaccauugccaguuuagucggccgagccccaucggguaccugggauugcucucucaacgcacacgagauauuuauaucucccguagacgccggggcaccuucacguggacucugucagacagcgaagguaaagauacaccugggggauacugucucaccagguggaugcuuaucgaggcugagcugaagugcuuuggcaauacugccguggcgaaauguaacgaaaagcacgacgaggaguucugcgauauguugcggcuauuugacuucaauaaacaggcaauucagcgccugaaggcccccgcucagaugaguauacaacucaucaacaaggccgucaaugcacugauuaacgaucagcuuaucaugaaaaaucaccugagagacauaaugugcauuccauauugcaacuacucuaaguauugguacuugaaucauacaaccacggggaaaaccucccuccccaaguguuggcuggugagcaacggaucguacuuaaaugaaacacacuucucugacgauaucgagcagcaagcugacaacaugaucacugagaugcugcagaaagaauauauggagaggcaggguaagaccccucuaggccucguggaucuguuugucuucuccacaucauuuuaccuuauuaguaucuucuugcaucugguuaaaauuccaacucaccggcauauagugggaaagagcugccccaagccucaccgccucaaucacauggggaucuguuccugcggccuguauaaacagccagguguaccggugcgauggaagagaugaggacuagucccuguucccagagcccacuuuuuuuucuuuuuuugaaauaaaauagccugucuuucagaucuaaaaaaaaaaaaaaaaaaaaaaaaaaaaaaaaaaaaaaaaaaaaaaaaaaaaaaaaaaaaaaaaugcaucccccccccccccccccccccccccccccccaaaggcucuuuucagagccaccagaauu

SEQ ID NO: 6265 - RNA, 1752 nt, Artificial Sequence
  mRNA product Design a-1 comprising derived and/or modified sequence from LASV(Mad39;Clade IV)__ANH09722__GPCstabilized (opt3)
gggagagucccgcagucggcguccagcggcucugcuuguucgugugugugucguugcaggccuuauucaagcuuaccaugggccagaucgugaccuucuuucaagaggucccccacguuauugaagaggugaugaacauaguacugaucgcccucagcauucuugcugugcugaagggguuguacaaugucgcaacaugcggauuaaucggucuggugacuuuccuacuccuguguggcagauccugcacgaccacacuuuauaaagggguuuacgaacugcaggccuuggagcucaacauggaaacucugaauaugaccaugccucugucuuguacaaagaacaauucacaucacuauauuagggugggaaacgagaccggccucgaguuaacucugacaaauaccagucuuaucaaccauaaauuuugcaauuugagcgacgcgcacaagaaaaaccuguacgaucaugcucuaauguccauaaucucuacguuccaccucucgauuccaaauuuuaaccaguaugaagccaugucaugugacuucaaugaugguaagaucagcguccaguacaaccugagucacacuuaugcaggggacaccgccaaucauugcggaacaguggcuaacggcguacuucaaacuuuuaugcggauggcauggggcggguccuacauugcccuggauucuggaugcgguggcugggacuguaucaugaccagcuaccaguauuugauaauucagaacacaaccugggaggaucacugccaguucucccgaccgucacccaucggguaccucggacuguuaagucaacguacgagagacauuuauaucagcaggcggcgccggggcacuuuuacauggacccuuucugauuccgaagguaaggacacuccugggggauacugucugacacgcuggauguugaucgaggcugagcuaaaaugcuucggcaauaccgccguugcgaaguguaacgaaaaacaugaugaggaauuuugcgacaugcugagacucuucgauuuuaauaagcaggcaauucagaggcugaaagcccccgcucagaugucaauacaacuuaucaacaaggccgugaaugcacugauuaacgaccaguugaucaugaagaaucaccuccgggacauaaugugcauuccauauugcaacuacagcaaauauugguaccugaaucacacggucaccgggaagacaaguuuacccaaauguuggcuggugucuaacggauccuaccuaaaugaaacucauuucagcgaugacaucgagcagcaagcugauaacaugaucaccgagaugcuccagaaggaauauauggagcgccaggguaaaacaccucugggccuuguggacuuguucgucuuuucgacuucuuucuaccugauuuccaucuuucuccaccugguuaagauuccaacccaucgacacgugguagggaaacccugcccuaagccacauagacuuaaucacaugggaauauguucaugcggcuucuauaagcagccgggugugcccgucagguggaaacggugaggacuagucccuguucccagagcccacuuuuuuuucuuuuuuugaaauaaaauagccugucuuucagaucuaaaaaaaaaaaaaaaaaaaaaaaaaaaaaaaaaaaaaaaaaaaaaaaaaaaaaaaaaaaaaaaaugcaucccccccccccccccccccccccccccccccaaaggcucuuuucagagccaccagaauu

SEQ ID NO: 6266 - RNA, 1752 nt, Artificial Sequence
  mRNA product Design a-1 comprising derived and/or modified sequence from LASV(Z0947-SLE-2011;Clade IV)__AIT17840__GPCstabilized (opt3)
gggagagucccgcagucggcguccagcggcucugcuuguucgugugugugucguugcaggccuuauucaagcuuaccaugggccagaucgugaccuucuuucaagaggucccccacguuauugaagaggugaugaacauaguacugaucgcccucagcauucuugcugugcugaagggguuguacaauuucgcaacaugcggauuagucggucuggugacuuuucuacuccuguguggcagauccugcacgaucucucuuuauaaagggguuuacgaacugcagaccuuggagcucaacauggaaacacugaauaugacuaugccucugucauguaccaagaacaauagucaucacuauauuauggugggaaacgagacaggccucgaguuaacccugacuaauacaagcaucauaaaccauaaauucugcaaucuuuccgacgcccacaagaaaaacuuguacgaucaugcgcugaugucuaucauuucgaccuuucaccuaucaaucccaaauuucaaccaguaugaagcuaugagcugugacuuuaauggugggaagauuaguguccaguacaaccucucccacucuuaugccggagaugcagccaaucauugcggcacgguggcuaacggcguacugcaaacuuucaugaggauggcauggggagggagcuacaucgcccuugacuccgguugcgaucgcugggacuguauaaugaccucauaccaguaucugauuauccagaacacaacuugggaggaucacugccaguuuagucgaccgagccccauuggcuacuuggggcuccugucucaacguaccagagacaucuauaucuccaggcggcgccggggaacauucaccuggacgcucucagauagcgaaggcaaggacacuccugguggguacugucuuacacgcuggaugcugauugaggcugaguugaaaugcuuuggaaauaccgccguugcgaaguguaacgaaaaacaugaugaggaguucugcgacaugcuaagacuguuugauuucaauaagcaggcaauacagaggcucaaagcccccgcucagaugaguauccaacugauuaacaaggccgugaaugcacuuaucaacgaccagcugauaaugaagaaucacuugcgggacauuaugugcaucccauauugcaacuacucuaaauauugguaccucaaucacacuacaaccggcaagacgucccugcccaaauguugguuagucagcaacgggucguaccugaaugaaacccauuucucugaugacaucgagcagcaagcugauaacaugauuacagagaugcuacagaaggaauauauggagcgccagggaaaaacuccucucggucugguggaccuuuuuguguucuccaccucauuuuacuugaucaguauuuuccugcaccucgucaagauaccaacacaucgacacaucguuggcaaacccugcccuaagccacauagacugaaucacauggggauuuguagcugcggacuuuauaagcagccgggcgugcccguaaaauggaagaggugaggacuagucccuguucccagagcccacuuuuuuuucuuuuuuugaaauaaaauagccugucuuucagaucuaaaaaaaaaaaaaaaaaaaaaaaaaaaaaaaaaaaaaaaaaaaaaaaaaaaaaaaaaaaaaaaaugcaucccccccccccccccccccccccccccccccaaaggcucuuuucagagccaccagaauu

SEQ ID NO: 6267 - RNA, 1752 nt, Artificial Sequence
  mRNA product Design a-1 comprising derived and/or modified sequence from LASV(Josiah;Clade IV)__NP_694870__GPCstabilized (opt4)
gggagagucccgcagucggcguccagcggcucugcuuguucgugugugugucguugcaggccuuauucaagcuuaccaugggccagaucgugaccuucuuccaggaggugccccacgugaucgaggaggugaugaacaucgugcugaucgcccugagcgugcuggccgugcugaagggccuguacaacuucgccaccugcggccuggugggccuggugaccuuccugcugcugugcggcagaagcugcaccaccagccuguacaagggcguguacgagcugcagacccuggagcugaacauggagacccugaacaugaccaugccccugagcugcaccaagaacaacagccaccacuacaucauggugggcaacgagaccggccuggagcugacccugaccaacaccagcaucaucaaccacaaguucugcaaccugagcgacgcccacaagaagaaccuguacgaccacgcccugaugagcaucaucagcaccuuccaccugagcauccccaacuucaaccaguacgaggccaugagcugcgacuucaacggcggcaagaucagcgugcaguacaaccugagccacagcuacgccggcgacgccgccaaccacugcggcaccguggccaacggcgugcugcagaccuucaugagaauggccuggggcggcagcuacaucgcccuggacagcggcugcggcaacugggacugcaucaugaccagcuaccaguaccugaucauccagaacaccaccugggaggaccacugccaguucagcagacccagccccaucggcuaccugggccugcugagccagagaaccagagacaucuacaucagcagaagacgccggggcaccuucaccuggacccugagcgacagcgagggcaaggacacccccggcggcuacugccugaccagauggaugcugaucgaggccgagcugaagugcuucggcaacaccgccguggccaagugcaacgagaagcacgacgaggaguucugcgacaugcugagacuguucgacuucaacaagcaggccauccagagacugaaggcccccgcccagaugagcauccagcugaucaacaaggccgugaacgcccugaucaacgaccagcugaucaugaagaaccaccugagagacaucaugugcauccccuacugcaacuacagcaaguacugguaccugaaccacaccaccaccggcagaaccagccugcccaagugcuggcuggugagcaacggcagcuaccugaacgagacccacuucagcgacgacaucgagcagcaggccgacaacaugaucaccgagaugcugcagaaggaguacauggagagacagggcaagaccccccugggccugguggaccuguucguguucagcaccagcuucuaccugaucagcaucuuccugcaccuggugaagauccccacccacagacacaucgugggcaagagcugccccaagccccacagacugaaccacaugggcaucugcagcugcggccuguacaagcagcccggcgugcccgugaaguggaagagaugaggacuagucccuguucccagagcccacuuuuuuuucuuuuuuugaaauaaaauagccugucuuucagaucuaaaaaaaaaaaaaaaaaaaaaaaaaaaaaaaaaaaaaaaaaaaaaaaaaaaaaaaaaaaaaaaaugcaucccccccccccccccccccccccccccccccaaaggcucuuuucagagccaccagaauu

SEQ ID NO: 6268 - RNA, 1749 nt, Artificial Sequence
  mRNA product Design a-1 comprising derived and/or modified sequence from LASV(LP;Clade I)__AAF86701__GPCstabilized (opt4)
gggagagucccgcagucggcguccagcggcucugcuuguucgugugugugucguugcaggccuuauucaagcuuaccaugggccagaucaucaccuucuuccaggaggugccccacgugaucgaggaggugaugaacaucgugcugaucgcccugagccugcuggccauccugaagggccuguacaacaucgccaccugcggcaucaucggccugguggccuuccuguuccugugcggcaagagcugcagccugacccugaagggcggcuacgagcugcagacccuggagcugaacauggagacccugaacaugaccaugccccugagcugcaccaagaacagcagccaccacuacaucagagugggcaacgagaccggccuggagcugacccugaccaacaccagcaucaucaaccacaaguucugcaaccugagcgacgcccacaagaagaaccuguacgaccacgcccugaugagcaucaucagcaccuuccaccugagcauccccaacuucaaccaguacgaggccaugagcugcgacuucaacggcggcaagaucagcgugcaguacaaccugagccacagcuacgccggcgacgccgccgagcacugcggcaccguggccaacggcgugcugcagaccuucaugagaauggccuggggcggcagauacaucgcccuggacagcggcugcggcaacugggacugcaucaugaccagcuaccaguaccugaucauccagaacaccaccugggaggaccacugccaguucagcagacccagccccaucggcuaccugggccugcugagccagagaaccagagacaucuacaucagcagaagacgccggggcaccuucaccuggacccugagcgacagcgagggcaacgagacccccggcggcuacugccugaccagauggaugcugaucgaggccgagcugaagugcuucggcaacaccgccguggccaagugcaacgagaagcacgacgaggaguucugcgacaugcugagacuguucgacuucaacaagcaggccaucagaagacugaaggcccccgcccagaugagcauccagcugaucaacaaggccgugaacgcccugaucaacgaccagcugaucaugaagaaccaccugagagacaucaugugcauccccuacugcaacuacagcaaguacugguaccugaaccacaccagcagcggcagaaccagccugcccaagugcuggcugaucagcaacggcagcuaccugaacgagacccaguucagcgacgacaucgagcagcaggccgacaacaugaucaccgagaugcugcagaaggaguacaucgagagacagggcaagaccccccugggccugguggacaucuucaucuucagcaccagcuucuaccugaucagcaucuuccugcaccugaucaagauccccacccacagacacaucgugggcaagcccugccccaagccccacagacugaaccacaugggcgugugcagcugcggccuguacaagcaccccggcgugcccaccaaguggaagagaugaggacuagucccuguucccagagcccacuuuuuuuucuuuuuuugaaauaaaauagccugucuuucagaucuaaaaaaaaaaaaaaaaaaaaaaaaaaaaaaaaaaaaaaaaaaaaaaaaaaaaaaaaaaaaaaaaugcaucccccccccccccccccccccccccccccccaaaggcucuuuucagagccaccagaauu

SEQ ID NO: 6269 - RNA, 1749 nt, Artificial Sequence
  mRNA product Design a-1 comprising derived and/or modified sequence from LASV(803213;Clade II)__AAF86703__GPCstabilized (opt4)
gggagagucccgcagucggcguccagcggcucugcuuguucgugugugugucguugcaggccuuauucaagcuuaccaugggccagaucaucaccuucuuccaggaggugccccacgugaucgaggaggugaugaacaucgugcugaucgcccugagccugcuggccauccugaagggcaucuacaacguggccaccugcggccuguucggccugaucagcuuccugcugcugugcggcagaagcugcagcgugaccuacaagggcguguacgagcugcagacccuggagcugaacauggccaaccugaacaugaccaugccccugagcugcaccaagaacaacagccaccacuacaucauggugggcaacgagaccggccuggagcugacccugaccaacaccagcaucaucaaccacaaguucugcaaccugagcgacgcccacaagaagaaccuguacgaccacgcccugaugagcaucaucagcaccuuccaccugagcauccccaacuucaaccaguacgaggccaugagcugcgacuucaacggcggcaagaucagcgugcaguacaaccugagccacagcuucgccguggacgccgccaaccacugcggcaccaucgccaacggcgugcugcagaccuucaugagaauggccuggggcggcagcuacaucgcccuggacagcggcugcggcaacugggacugcaucaugaccagcuaccaguaccugaucauccagaacaccaccugggaggaccacugccaguucagcagacccagccccaucggcuaccugggccugcugagccagagaaccagagacaucuacaucagcagaagacgccggggcaccuucaccuggacccugagcgacagcgagggcaacgaggcccccggcggcuacugccugaccagauggaugcugaucgaggccgagcugaagugcuucggcaacaccgccguggccaagugcaacgagaagcacgacgaggaguucugcgacaugcugagacuguucgacuucaacaagcaggccaucaagagacugaagacccccgcccagaugagcauccagcugaucaacaaggccgugaacgcccugaucaacgaccagcugaucaugaagaaccaccugagagacaucaugugcauccccuacugcaacuacagcagauacugguaccugaaccacaccgugaccggcaagaccagccugcccagaugcuggcuggugagcaacggcagcuaccugaacgagacccacuucagcgacgacaucgagcagcaggccgacaacaugaucaccgagaugcugcagaaggaguacauggacagacagggcaagaccccccugggccugguggaccuguucguguucagcaccagcuucuaccugaucagcaucuuccugcaccuggugaagauccccacccacagacacaucgugggcaagcccugccccaagccccacagacugaaccacaugggcaucugcagcugcggccuguacaagcaccccggcgugcccgugaaguggaagagaugaggacuagucccuguucccagagcccacuuuuuuuucuuuuuuugaaauaaaauagccugucuuucagaucuaaaaaaaaaaaaaaaaaaaaaaaaaaaaaaaaaaaaaaaaaaaaaaaaaaaaaaaaaaaaaaaaugcaucccccccccccccccccccccccccccccccaaaggcucuuuucagagccaccagaauu

SEQ ID NO: 6270 - RNA, 1749 nt, Artificial Sequence
  mRNA product Design a-1 comprising derived and/or modified sequence from LASV(GA391;Clade III)__CAA36645__GPCstabilized (opt4)
gggagagucccgcagucggcguccagcggcucugcuuguucgugugugugucguugcaggccuuauucaagcuuaccaugggccagaucgugaccuucuuccaggaggugccccacgugaucgaggaggugaugaacaucgugcugaucgcccugagcauccuggccauccugaagggccuguacaacguggccaccugcggccugaucggccuggugaccuuccugcugcugagcggcagaagcugcagccugaucuacaagggcaccuacgagcugcagacccuggagcugaacauggagacccugaacaugaccaugccccugagcugcaccaagaacaacagccaccacuacaucagagugggcaacgagaccggccuggagcugacccugaccaacaccagcauccugaaccacaaguucugcaaccugagcgacgcccacaagagaaaccuguacgaccacagccugaugagcaucaucagcaccuuccaccugagcauccccaacuucaaccaguacgaggccaugagcugcgacuucaacggcggcaagaucaccgugcaguacaaccugagccacagcuucgccguggacgccgccggccacugcggcacccuggccaacggcgugcugcagaccuucaugagaauggccuggggcggcagcuacaucgcccuggacagcggcugcggcaacugggacugcaucaugaccagcuaccaguaccugaucauccagaacaccaccugggacgaccacugccaguucagcagacccagccccaucggcuaccugggccugcugagccagagaaccagagacaucuacaucagcagaagacgccggggcaccuucaccuggacccugagcgacagcgagggcaacgagacccccggcggcuacugccugaccagauggaugcugaucgaggccgagcugaagugcuucggcaacaccgccguggccaagugcaacgagaagcacgacgaggaguucugcgacaugcugagacuguucgacuucaacaagcaggccaucagaagacugaagacccccgcccagaugagcauccagcugaucaacaaggccgugaacgcccugaucaacgaccagcugaucaugaagaaccaccugagagacaucaugugcauccccuacugcaacuacagcagauacugguaccugaaccacaccagcaccggcaagaccagccugcccagaugcuggcugaucagcaacggcagcuaccugaacgagaccaaguucagcgacgacaucgagcagcaggccgacaacaugaucaccgagaugcugcagaaggaguacaucgacagacagggcaagaccccccugggccugguggaccuguucguguucagcaccagcuucuaccugaucagcaucuuccugcaccuggugaagauccccacccacagacacaucgugggcaagcccugccccaagccccacagacugaaccacaugggcaucugcagcugcggccuguacaagcagcccggcgugcccgugagauggaagagaugaggacuagucccuguucccagagcccacuuuuuuuucuuuuuuugaaauaaaauagccugucuuucagaucuaaaaaaaaaaaaaaaaaaaaaaaaaaaaaaaaaaaaaaaaaaaaaaaaaaaaaaaaaaaaaaaaugcaucccccccccccccccccccccccccccccccaaaggcucuuuucagagccaccagaauu

SEQ ID NO: 6271 - RNA, 1752 nt, Artificial Sequence
  mRNA product Design a-1 comprising derived and/or modified sequence from LASV(AV;Clade V)__CCA30314__GPCstabilized (opt4)
gggagagucccgcagucggcguccagcggcucugcuuguucgugugugugucguugcaggccuuauucaagcuuaccaugggccagaucgugaccuucuuccaggaggugccccacgugaucgaggaggugaugaacaucgugcugaucgcccugagcauccuggccgugcugaagggccuguacaacaucgccaccugcggccugaucggccugaucaccuuccugcugcugugcggcagaagcugcagcagcaaccuguacaagggcguguacgagcugcagagccuggaccugaacauggagacccugaacaugaccaugccccugagcugcaccaagaacaacagccaccacuacaucagagugggcaacgacaccggccuggagcugacccugaccaacaccagcauccugaaccacaaguucugcaaccugagcgacgcccacaagaaggaccuguacgaccacgcccugaugagcaucaucagcaccuuccaccugagcauccccaacuucaaccaguacgaggccaugagcugcgacuucaacggcggcaagaucagcgugcaguacaaccugagccacagcuacgccaucgacgccgccaaccacugcggcaccguggccaacggcauccugcagaccuucaugagaauggccuggggcggcagcuacaucgcccuggacagcggcugcggcaacugggacugcaucaugaccagcuaccaguaccugaucauccagaacaccaccugggagaaccacugccaguucagcagacccagccccaucggcuaccugggccugcugagccagagaaccagagacaucuacaucagcagaagacgccggggcaccuucaccuggacccugagcgacagcgagggcaacgccacccccggcggcuacugccugaccagauggaugcugaucgaggccgagcugaagugcuucggcaacaccgccguggccaagugcaacgagaagcacgacgaggaguucugcgacaugcugagacuguucgacuucaacaagcaggccaucagcagacugaagagccccgcccagaugagcauccagcugaucaacaaggccgugaacgcccugaucaacgaccagcugaucaugaagaaccaccugagagacaucaugugcauccccuacugcaacuacagcaaguacugguaccugaaccacaccaucaccggcaagaccagccugcccaagugcuggcuggugagcaacggcagcuaccugaacgagacccacuucagcgacgacaucgagcagcaggccgacaacaugaucaccgagaugcugcagaaggaguacauggagagacagggcaagaccccccugggccugguggaccuguucguguucagcaccagcuucuaccugaucagcaucuuccugagacuggugaagauccccacccacagacacaucgugggcaagcccugccccaagccccacagacugaaccacaugggcaucugcagcugcggccuguacaagcagcccggcgugcccgugagauggaagagaugaggacuagucccuguucccagagcccacuuuuuuuucuuuuuuugaaauaaaauagccugucuuucagaucuaaaaaaaaaaaaaaaaaaaaaaaaaaaaaaaaaaaaaaaaaaaaaaaaaaaaaaaaaaaaaaaaugcaucccccccccccccccccccccccccccccccaaaggcucuuuucagagccaccagaauu

SEQ ID NO: 6272 - RNA, 1749 nt, Artificial Sequence
  mRNA product Design a-1 comprising derived and/or modified sequence from LASV(Togo/2016/7082;Clade VI)__AMR44577__GPCstabilized (opt4)
gggagagucccgcagucggcguccagcggcucugcuuguucgugugugugucguugcaggccuuauucaagcuuaccaugggccagaucaucaccuucuuccaggaggugccccacgugaucgaggaggugaugaacaucgugcugaucgcccugagccugcuggccauccugaagggcguguacaacguggccaccugcggcaucaucggccuggugaccuuccuguuccugugcggcagaagcugcagccugaucuacaagggcagcuacgagcugcagacccuggagcugaacauggagacccugaacaugaccaugccccugagcugcaccaagaacagcagccaccacuacaucagagugggcaacgagaccggccuggagcugacccugaccaacaccagcaucaucaaccacaaguucugcaaccugagcgacgcccacaagagaaaccuguacgaccacgcccugaugagcauccugagcaccuuccaccugagcauccccaacuucaaccaguacgaggccaugagcugcgacuucaacggcggcaagaucagcgugcaguacaaccugagccacgccuacgccguggacgccgccgagcacugcggcaccguggccaacggcgugcugcagaccuucaugagaauggccuggggcggcagcuacaucgcccuggacagcggcugcggcaacugggacugcaucaugaccagcuaccaguaccugaucauccagaacaccaccugggaggaccacugccaguucagcagacccagccccaucggcuaccugggccugcugagccagagaaccagagacaucuacaucagcagaagacgccggggcaccuucaccuggacccugagcgacagcgagggcaacgagacccccggcggcuacugccugaccagauggaugcugaucgaggccgagcugaagugcuucggcaacaccgccguggccaagugcaacgagaagcacgacgaggaguucugcgacaugcugagacuguucgacuucaacaagcaggccauccagagacugaagagccccgcccagaugagcauccagcugaucaacaaggccgugaacgcccugaucaacgaccagcugaucaugaagaaccaccugagagacaugaugugcauccccuacugcaacuacagcaaguacugguaccugaaccacaccagcagcggcagaaccagccugcccaagugcuggcuggugagcaacggcagcuaccugaacgagacccacuucagcgacgacaucgagcagcaggccgacaacaugaucaccgagaugcugcagaaggaguacaucgacagacagggcaagaccccccugggccugguggaccuguucguguucagcaccagcuucuaccugaucagcaucuuccugcaccugaucaagauccccacccacagacacaucgugggcaagcccugccccaagccccacagacugaaccacaugggcaucugcagcugcggccuguacaagcagcccggcgugcccaccagauggaagagaugaggacuagucccuguucccagagcccacuuuuuuuucuuuuuuugaaauaaaauagccugucuuucagaucuaaaaaaaaaaaaaaaaaaaaaaaaaaaaaaaaaaaaaaaaaaaaaaaaaaaaaaaaaaaaaaaaugcaucccccccccccccccccccccccccccccccaaaggcucuuuucagagccaccagaauu

SEQ ID NO: 6273 - RNA, 1749 nt, Artificial Sequence
  mRNA product Design a-1 comprising derived and/or modified sequence from LASV(KAK-428;Clade n.d. (VII))__ANH09740__GPCstabilized (opt4)
gggagagucccgcagucggcguccagcggcucugcuuguucgugugugugucguugcaggccuuauucaagcuuaccaugggccagaucgugaccuucuuccaggaggugccccacgugaucgaggaggugaugaacaucgugcugaucgcccugagccugcuggccauccugaagggccuguacaacuucgccaccugcggcgugaucggccugaucaccuuccugcugcugugcggcagaagcugcagcgccaccuacaagggccaguacgagcugcagacccuggagcugaacauggagagccugaacaugaccaugccccugagcugcaccaagaacaacagccaccacuacaucagagccggcaacaacaccggccuggagcugacccugaccaacaccagcaucaucagccacaaguucugcaaccugagcgacgcccacaagaagaaccuguacgaccacacccugaugagcaucaucaccaccuuccaccugagcauccccaacuucaaccaguacgaggccaugagcugcgacuucaacggcggcaagaucagcauccaguacaaccugagccacagcuacgccggcgacgccgcccagcacugcggcaccguggccaacggcgugcugcagaccuucaugagaauggccuggggcggcagcuaccuggcccuggacagcggcugcagaggcugggacugcaucaucagcagcuaccaguaccugaucauccagaacaccaccugggacgaccacugccaguucagcagacccagccccaucggcuaccugggcuucgugagccagaagaccagagacaucuacaucagcagaagacgccggggcaccuucaccuggacccugagcgacagcgagggccacgacaugcccggcggcuacugccugaccagauggaugcugaucgaggccgaccugaagugcuucggcaacaccgccguggccaagugcaacgagaagcacgacgaggaguucugcgacauguggagacuguucgacuucaacaagcaggccauccagagacugaaggcccccgcccagaugaacauccagcugaucaacaaggccgugaacgcccugaucaacgaccagcugaugaugaagaaccaccugagagacaucaugugcauccccuacugcaacuacagcaaguucugguaccugaacaacaccaccaccggcagaaccagccugcccagaugcuggcugaucagcaacggcagcuaccugaacgagacccacuucagcgacgacaucgagcagcaggccgacaacaugaucaccgagaugcugcagaaggaguacauggacagacagggcaagaccccccugggccugguggaccuguucguguucagcaccagcuucuaccugaucaccaucuuccugcaccuggugaagauccccacccacagacacaucgugggcaagcccugccccaagccccacagacugaaccacaugggcaucugcagcugcggccuguacaagcagcccggcgugcccgugagauggaagagaugaggacuagucccuguucccagagcccacuuuuuuuucuuuuuuugaaauaaaauagccugucuuucagaucuaaaaaaaaaaaaaaaaaaaaaaaaaaaaaaaaaaaaaaaaaaaaaaaaaaaaaaaaaaaaaaaaugcaucccccccccccccccccccccccccccccccaaaggcucuuuucagagccaccagaauu

SEQ ID NO: 6274 - RNA, 1749 nt, Artificial Sequence; identical to SEQ ID NO: 6268
  mRNA product Design a-1 comprising derived and/or modified sequence from LASV(Pinneo-NIG-1969;Clade I)__AIT17836__GPCstabilized (opt4)

SEQ ID NO: 6275 - RNA, 1749 nt, Artificial Sequence
  mRNA product Design a-1 comprising derived and/or modified sequence from LASV(ISTH0009-NIG-2011;Clade II)__AIT17404__GPCstabilized (opt4)
gggagagucccgcagucggcguccagcggcucugcuuguucgugugugugucguugcaggccuuauucaagcuuaccaugggccagaucaucaccuucuuccaggaggugccccacgugaucgaggaggugaugaacaucgugcugaucgcccugagccugcuggccauccugaagggcaucuacaacguggccaccugcggccuguucggccuggugagcuuccugcugcugugcggcagaagcugcagcaccaccuacaagggcguguacgagcugcagacccuggagcuggacauggccagccugaacaugaccaugccccugagcugcaccaagaacaacagccaccacuacaucauggugggcaacgagaccggccuggagcugacccugaccaacaccagcaucaucaaccacaaguucugcaaccugagcgacgcccacaagaagaaccuguacgaccacgcccugaugagcaucaucagcaccuuccaccugagcauccccaacuucaaccaguacgaggccaugagcugcgacuucaacggcggcaagaucagcgugcaguacaaccugagccacgccuacgccguggacgccgccaaccacugcggcaccaucgccaacggcgugcugcagaccuucaugagaauggccuggggcggcagcuacaucgcccuggacagcggcugcggcagcugggacugcaucaugaccagcuaccaguaccugaucauccagaacaccaccugggaggaccacugccaguucagcagacccagccccaucggcuaccugggccugcugagccagagaaccagagacaucuacaucagcagaagacgccggggcaccuucaccuggacccugagcgacagcgagggcaacgagacccccggcggcuacugccugaccagauggaugcugaucgaggccgagcugaagugcuucggcaacaccgccguggccaagugcaacgagaagcacgacgaggaguucugcgacaugcugagacuguucgacuucaacaagcaggccaucagaagacugaagacccccgcccagaugagcauccagcugaucaacaaggccgugaacgcccugaucaacgaccagcugaucaugaagaaccaccugagagacaucaugugcauccccuacugcaacuacagcaaguacugguaccugaaccacaccgugaccggcaagaccagccugcccagaugcuggcuggugagcaacggcagcuaccugaacgagacccacuucagcgacgacaucgagcagcaggccgacaacaugaucaccgagcugcugcagaaggaguacauggacagacagggcaagaccccccugggccugguggaccuguucguguucagcaccagcuucuaccugaucagcaucuuccugcaccugaucaagauccccacccacagacacaucaccggcaagcccugccccaagccccacagacugaaccacaugggcaucugcagcugcggccuguacaagcaccccggcgugcccgugaaguggaagagaugaggacuagucccuguucccagagcccacuuuuuuuucuuuuuuugaaauaaaauagccugucuuucagaucuaaaaaaaaaaaaaaaaaaaaaaaaaaaaaaaaaaaaaaaaaaaaaaaaaaaaaaaaaaaaaaaaugcaucccccccccccccccccccccccccccccccaaaggcucuuuucagagccaccagaauu

SEQ ID NO: 6276 - RNA, 1749 nt, Artificial Sequence
  mRNA product Design a-1 comprising derived and/or modified sequence from LASV(ISTH2010-NIG-2012;Clade II)__AIT17482__GPCstabilized (opt4)
gggagagucccgcagucggcguccagcggcucugcuuguucgugugugugucguugcaggccuuauucaagcuuaccaugggccagaucaucaccuucuuccaggaggugccccacgugaucgaggaggugaugaacaucgugcugaucgcccugagccugcuggccauccugaagggcaucuacaacguggccaccugcggccuguucggccuggugagcuuccugcugcugugcggcagaagcugcagcaccaccuacaagggcguguacgagcugcagacccuggagcuggacauggccagccugaacaugaccaugccccugagcugcaccaagaacaacagccaccacuacaucauggugggcaacgagaccggccuggagcugacccugaccaacaccagcaucaucaaccacaaguucugcaaccugagcgacgcccacaagaagaaccuguacgaccacgcccugaugagcaucaucagcaccuuccaccugagcauccccaacuucaaccaguacgaggccaugagcugcgacuucaacggcggcaagaucagcgugcaguacaaccugagccacgccuacgccguggacgccgccaaccacugcggcaccaucgccaacggcgugcugcagaccuucaugagaauggccuggggcggcagcuacaucgcccuggacagcggcugcggcagcugggacugcaucaugaccagcuaccaguaccugaucauccagaacaucaccugggaggaccacugccaguucagcagacccagccccaucggcuaccugggccugcugagccagagaaccagagacaucuacaucagcagaagacgccggggcaccuucaccuggacccugagcgacagcgagggcaacgagacccccggcggcuacugccugaccagauggaugcugaucgaggccgagcugaagugcuucggcaacaccgccguggccaagugcaacgagaagcacgacgaggaguucugcgacaugcugagacuguucgacuucaacaagcaggccaucagaagacugaagacccccgcccagaugagcauccagcugaucaacaaggccgugaacgcccugaucaacgaccagcugaucaugaagaaccaccugagagacaucaugugcauccccuacugcaacuacagcaaguacugguaccugaaccacaccgugaccggcaagaccagccugcccagaugcuggcuggugagcaacggcagcuaccugaacgagacccacuucagcgacgacaucgagcagcaggccgacaacaugaucaccgagcugcugcagaaggaguacaucgacagacagggcaagaccccccugggccugguggaccuguucguguucagcaccagcuucuaccugaucagcaucuuccugcaccuggugaagauccccacccacagacacguggugggcaagcccugccccaagccccacagacugaaccacaugggcaucugcagcugcggccuguacaagcaccccggcgugcccgugaaguggaagagaugaggacuagucccuguucccagagcccacuuuuuuuucuuuuuuugaaauaaaauagccugucuuucagaucuaaaaaaaaaaaaaaaaaaaaaaaaaaaaaaaaaaaaaaaaaaaaaaaaaaaaaaaaaaaaaaaaugcaucccccccccccccccccccccccccccccccaaaggcucuuuucagagccaccagaauu

SEQ ID NO: 6277 - RNA, 1749 nt, Artificial Sequence
  mRNA product Design a-1 comprising derived and/or modified sequence from LASV(Lassa virus/H.sapiens-wt/NGA/2015/ISTH_0543;Clade II)__AVO03639__GPCstabilized (opt4)
gggagagucccgcagucggcguccagcggcucugcuuguucgugugugugucguugcaggccuuauucaagcuuaccaugggccagaucaucaccuucuuccaggaggugccccacgugaucgaggaggugaugaacaucgugcugaucgcccugagccugcuggccauccugaagggcaucuacaacguggccaccugcggccuguucggccuggugagcuuccugcugcugugcggcagaagcugcagcaccaccuacaagggcguguacgagcugcagacccuggagcuggacauggccaaccugaacaugaccaugccccugagcugcaccaagaacaacagccaccacuacaucauggugggcaacgagaccggccuggagcugacccugaccaacaccagcaucaucaaccacaaguucugcaaccugagcgacgcccacaagaagaaccuguacgaccacgcccugaugagcaucaucagcaccuuccaccugagcauccccaacuucaaccaguacgaggccaugagcugcgacuucaacggcggcaagaucagcgugcaguacaaccugagccacaccuacgccguggacgccgccaaccacugcggcaccaucgccaacggcgugcugcagaccuucaugagaauggccuggggcggcagcuacaucgcccuggacagcggcugcggcagcugggacugcaucaugaccagcuaccaguaccuggugauccagaacaccaccugggaggaccacugccaguucagcagacccagccccaucggcuaccugggccugcugagccagagaaccagagacaucuacaucagcagaagacgccggggcaccuucaccuggacccugagcgacagcgagggcaacgagacccccggcggcuacugccugaccagauggaugcugaucgaggccgagcugaagugcuucggcaacaccgccguggccaagugcaacgagaagcacgacgaggaguucugcgacaugcugagacuguucgacuucaacaagcaggccaucagaagacugaagacccccgcccagaugagcauccagcugaucaacaaggccgugaacgcccugaucaacgaccagcugaucaugaagaaccaccugagagacaucaugugcauccccuacugcaacuacagcaaguacugguaccugaaccacaccgugaccggcaagaccagccugcccagaugcuggcuggugagcaacggcagcuaccugaacgagacccacuucagcgacgacaucgagcagcaggccgacaacaugaucaccgagcugcugcagaaggaguacaucgacagacagggcaagaccccccugggccugguggaccuguucguguucagcaccagcuucuaccugaucagcaucuuccugcaccuggugaagauccccacccacagacacaucaccggcaagcccugccccaagccccacagacugaaccacaugggcaucugcagcugcggccuguacaagcaccccggcgugcccgugaaguggaagagaugaggacuagucccuguucccagagcccacuuuuuuuucuuuuuuugaaauaaaauagccugucuuucagaucuaaaaaaaaaaaaaaaaaaaaaaaaaaaaaaaaaaaaaaaaaaaaaaaaaaaaaaaaaaaaaaaaugcaucccccccccccccccccccccccccccccccaaaggcucuuuucagagccaccagaauu

SEQ ID NO: 6278 - RNA, 1749 nt, Artificial Sequence
  mRNA product Design a-1 comprising derived and/or modified sequence from LASV(Lassa virus/H.sapiens-wt/NGA/2016/ISTH_0009;Clade II)__AVO03571__GPCstabilized (opt4)
gggagagucccgcagucggcguccagcggcucugcuuguucgugugugugucguugcaggccuuauucaagcuuaccaugggccagaucaucaccuucuuccaggaggugccccacgugaucgaggaggugaugaacaucgugcugaucgcccugagccugcuggccauccugaagggcaucuacaacguggccaccugcggccugcugggccuggugagcuuccugcugcugugcggcagaagcugcagcaccaccuacaagggcguguacgagcugcagacccuggagcuggacauggccagccugaacaugaccaugccccugagcugcaccaagaacaacagccaccacuacaucauggugggcaacgagaccggccuggagcugacccugaccaacaccagcaucaucaaccacaaguucugcaaccugagcgacgcccacaagaagaaccuguacgaccacgcccugaugagcaucaucagcaccuuccaccugagcauccccaacuucaaccaguacgaggccaugagcugcgacuucaacggcggcagaaucagcgugcaguacaaccugagccacagcuacgccguggacgccgccaaccacugcggcaccaucgccaacggcgugcugcagaccuucaugagaauggccuggggcggcagcuacaucgcccuggacagcggcugcggcagcugggacugcaucaugaccagcuaccaguaccugaucauccagaacaccaccugggaggaccacugccaguucagcagacccagccccaucggcuaccugggccugcugagccagagaaccagagacaucuacaucagcagaagacgccggggcaccuucaccuggacccugagcgacagcgagggcaacgagacccccggcggcuacugccugaccagauggaugcugaucgaggccgagcugaagugcuucggcaacaccgccguggccaagugcaacgagaagcacgacgaggaguucugcgacaugcugagacuguucgacuucaacaagcaggccaucagaagacugaagacccccgcccagaugagcauccagcugaucaacaaggccgugaacgcccugaucaacgaccagcugaucaugaagaaccaccugagagacaucaugugcauccccuacugcaacuacagcaaguacugguaccugaaccacaccgugaccggcaagaccagccugcccagaugcuggcuggugagcaacggcagcuaccugaacgagacccacuucagcgacgacaucgagcagcaggccgacaacaugaucaccgagcugcugcagaaggaguacaucgacagacagggcaagaccccccugggccugguggaccuguucguguucagcaccagcuucuaccugaucagcaucuuccugcaccuggugaagauccccacccacagacacaucaccggcaagcccugccccaagccccacagacugaaccacaugggcaucugcagcugcggccuguacaaccaccccggcgugcccgugaaguggaagagaugaggacuagucccuguucccagagcccacuuuuuuuucuuuuuuugaaauaaaauagccugucuuucagaucuaaaaaaaaaaaaaaaaaaaaaaaaaaaaaaaaaaaaaaaaaaaaaaaaaaaaaaaaaaaaaaaaugcaucccccccccccccccccccccccccccccccaaaggcucuuuucagagccaccagaauu

SEQ ID NO: 6279 - RNA, 1749 nt, Artificial Sequence
  mRNA product Design a-1 comprising derived and/or modified sequence from LASV(Lassa virus/H.sapiens-wt/NGA/2016/ISTH_0017;Clade II)__AVO03567__GPCstabilized (opt4)
gggagagucccgcagucggcguccagcggcucugcuuguucgugugugugucguugcaggccuuauucaagcuuaccaugggccagaucaucaccuucuuccaggaggugccccacgugaucgaggaggugaugaacaucgugcugaucgcccugagccugcuggccauccugaagggcaucuacaacguggccaccugcggccuguucggccuggugagcuuccugcugcugugcggcagaagcugcagcaccaccuacaagggcguguacgagcugcagacccuggagcuggacauggccagccugaacaugaccaugccccugagcugcaccaagaacaacagccaccacuacaucauggugggcaacgagaccggccuggagcugacccugaccaacaccagcaucaucaaccacaaguucugcaaccugagcgacgcccacaagaagaaccuguacgaccacgcccugaugagcaucaucagcaccuuccaccugagcauccccaacuucaaccaguacgaggccaugagcugcgacuucaacggcggcaagaucagcgugcaguacaaccugagccacaccuacgccaucgacgccgccaaccacugcggcaccaucgccaacggcgugcugcagaccuucaugagaauggccuggggcggcagcuacaucgcccuggacagcggcugcggcagcugggacugcaucaugaccagcuaccaguaccugaucauccagaacaccaccugggaggaccacugccaguucagcagacccagccccaucggcuaccugggccugcugagccagagaaccagagacaucuacaucagcagaagacgccggggcaccuucaccuggacccugagcgacagcgagggcaacgagacccccggcggcuacugccugaccagauggaugcugaucgaggccgagcugaagugcuucggcaacaccgccguggccaagugcaacgagaagcacgacgaggaguucugcgacaugcugagacuguucgacuucaacaagcaggccaucagaagacugaagacccccgcccagaugagcauccagcugaucaacaaggccgugaacgcccugaucaacgaccagcugaucaugaagaaccaccugagagacaucaugugcauccccuacugcaacuacagcaaguacugguaccugaaccacaccgugaccggcaagaccagccugcccagaugcuggcuggugagcaacggcagcuaccugaacgagacccacuucagcgacgacaucgagcagcaggccgacaacaugaucaccgagcugcugcagaaggaguacauggacagacagggcaagaccccccugggccugguggaccuguucguguucagcaccagcuucuaccugaucagcaucuuccugcaccuggugagaauccccacccacagacacgugaucggcaagcccugccccaagccccacagacugaaccacaugggcaucugcagcugcggccuguacaagcaccccggcgugcccgugaaguggaagagaugaggacuagucccuguucccagagcccacuuuuuuuucuuuuuuugaaauaaaauagccugucuuucagaucuaaaaaaaaaaaaaaaaaaaaaaaaaaaaaaaaaaaaaaaaaaaaaaaaaaaaaaaaaaaaaaaaugcaucccccccccccccccccccccccccccccccaaaggcucuuuucagagccaccagaauu

SEQ ID NO: 6280 - RNA, 1749 nt, Artificial Sequence
  mRNA product Design a-1 comprising derived and/or modified sequence from LASV(Lassa virus/H.sapiens-wt/NGA/2018/ISTH_0959;Clade II)__AVV65099__GPCstabilized (opt4)
gggagagucccgcagucggcguccagcggcucugcuuguucgugugugugucguugcaggccuuauucaagcuuaccaugggccagaucaucaccuucuuccaggaggugccccacgugaucgaggaggugaugaacaucgugcugaucgcccugagccugcuggccauccugaagggcaucuacaacguggugaccugcggccuguucggccuggugagcuuccugcugcugugcggcagaagcugcagcaccaccuacaagggcguguacgagcugcagacccuggagcuggacauggccagccugaacaugaccaugccccugagcugcaccaagaacaacagccaccacuacaucauggugggcaacgagaccggccuggagcugacccugaccaacaccagcaucaucaaccacaaguucugcaaccugagcgacgcccacaagaagaaccuguacgaccacgcccugaugagcaucaucagcaccuuccaccugagcauccccaacuucaaccaguacgaggccaugagcugcgacuucaacggcggcaagaucagcgugcaguacaaccugagccacgccuacgccaucgacgccgccaaccacugcggcaccaucgccaacggcgugcugcagaccuucaugagaauggccuggggcggcagcuacaucgcccuggacagcggcugcggcagcugggacugcaucaugaccagcuaccaguaccugaucauccagaacaccaccugggaggaccacugccaguucagcagacccagccccaucggcuaccugggccugcugagccagagaaccagagacaucuacaucagcagaagacgccggggcaccuucaccuggacccugagcgacagcgagggcaacgagacccccggcggcuacugccugaccagauggaugcugaucgaggccgagcugaagugcuucggcaacaccgccguggccaagugcaacgagaagcacgacgaggaguucugcgacaugcugagacuguucgacuucaacaagcaggccaucagaagacugaagacccccgcccagaugagcauccagcugaucaacaaggccgugaacgcccugaucaacgaccagcugaucaugaagaaccaccugagagacaucaugugcauccccuacugcaacuacagcaaguacugguaccugaaccacaccgugaccggcaagaccagccugcccagaugcuggcuggugagcaacggcagcuaccugaacgagacccacuucagcgacgacaucgagcagcaggccgacaacaugaucaccgagcugcugcagaaggaguacaucgacagacagggcaagaccccccugggccugguggaccuguucguguucagcaccagcuucuaccugaucagcaucuuccugcaccuggugaagauccccacccacagacacgugaucggcaagcccugccccaagccccacagacugaaccacaugggcaucugcagcugcggccuguacaagcaccccggcgugcccgugaaguggaagagaugaggacuagucccuguucccagagcccacuuuuuuuucuuuuuuugaaauaaaauagccugucuuucagaucuaaaaaaaaaaaaaaaaaaaaaaaaaaaaaaaaaaaaaaaaaaaaaaaaaaaaaaaaaaaaaaaaugcaucccccccccccccccccccccccccccccccaaaggcucuuuucagagccaccagaauu

SEQ ID NO: 6281 - RNA, 1749 nt, Artificial Sequence
  mRNA product Design a-1 comprising derived and/or modified sequence from LASV(LASV003-NIG-2008;Clade II)__AIT17580__GPCstabilized (opt4)
gggagagucccgcagucggcguccagcggcucugcuuguucgugugugugucguugcaggccuuauucaagcuuaccaugggccagaucaucaccuucuuccaggaggugccccacgugaucgaggaggugaugaacaucgugcugaucgcccugagccugcuggccauccugaagggcaucuacaacguggccaccugcggccuguucggccuggugagcuuccugcugcugugcggcagaagcugcagcaccaccuacaagggcguguacgagcugcagacccuggagcuggacauggccagccugaacaugaccaugccccugagcugcaccaagaacaacagccaccacuacaucauggugggcaacgagaccggccuggagcugacccugaccaacaccagcaucaucaaccacaaguucugcaaccugagcgacgcccacaagaagaaccuguacgaccacgcccugaugagcaucaucagcaccuuccaccugagcauccccaacuucaaccaguacgaggccaugagcugcgacuucaacggcggcaagaucagcgugcaguacaaccugagccacaccuacgccguggacgccgccaaccacugcggcaccaucgccaacggcgugcugcagaccuucaugagaauggccuggggcggcagcuacaucgcccuggacagcggcugcggcagcugggacugcaucaugaccagcuaccaguaccugaucauccagaacaccaccugggaggaccacugccaguucagcagacccagccccaucggcuaccugggccugcugagccagagaaccagagacaucuacaucagcagaagacgccggggcaccuucaccuggacccugagcgacagcgagagcaacgagacccccggcggcuacugccugaccagauggaugcugaucgaggccgagcugaagugcuucggcaacaccgccguggccaagugcaacgagaagcacgacgaggaguucugcgacaugcugagacuguucgacuucaacaagcaggccaucagaagacugaaggcccccgcccagaugagcauccagcugaucaacaaggccgugaacgcccugaucaacgaccagcugaucaugaagaaccaccugagagacaucaugugcauccccuacugcaacuacagcaaguacugguaccugaaccacaccgugaccggcagaaccagccugcccagaugcuggcuggugagcaacggcagcuaccugaacgagacccacuucagcgacgacaucgagcagcaggccgacaacaugaucaccgagcugcugcagaaggaguacauggacagacagggcaagaccccccugggccugguggaccuguucguguucagcaccagcuucuaccugaucagcaucuuccugcaccuggugaagauccccacccacagacacgugaucggcaagcccugccccaagccccacagacugaaccacaugggcaucugcagcugcggccuguacaagcaccccggcgugcccgugaaguggaagagaugaggacuagucccuguucccagagcccacuuuuuuuucuuuuuuugaaauaaaauagccugucuuucagaucuaaaaaaaaaaaaaaaaaaaaaaaaaaaaaaaaaaaaaaaaaaaaaaaaaaaaaaaaaaaaaaaaugcaucccccccccccccccccccccccccccccccaaaggcucuuuucagagccaccagaauu

SEQ ID NO: 6282 - RNA, 1749 nt, Artificial Sequence
  mRNA product Design a-1 comprising derived and/or modified sequence from LASV(LASV035-NIG-2009;Clade II)__AIT17588__GPCstabilized (opt4)
gggagagucccgcagucggcguccagcggcucugcuuguucgugugugugucguugcaggccuuauucaagcuuaccaugggccagaucaucaccuucuuccaggaggugccccacgugaucgaggaggugaugaacaucgugcugaucgcccugagccugcuggccauccugaagggcaucuacaacguggccaccugcggccuguucggccuggugagcuuccugcugcugugcggcagaagcugcagcaccaccuacaagggcguguacgagcugcagacccuggagcuggacauggccagccugaacaugaccaugccccugagcugcaccaagaacaacagccaccacuacaucauggugggcaacgagaccggccuggagcugacccugaccaacaccagcaucaucaaccacaaguucugcaaccugagcgacgcccacaagaagaaccuguacgaccacgcccugaugagcaucaucagcaccuuccaccugagcauccccaacuucaaccaguacgaggccaugagcugcgacuucaacggcggcaagaucagcgugcaguacaaccugagccacgccuacgccguggacgccgccaaccacugcggcaccaucgccaacggcgugcugcagaccuucaugagaauggccuggggcggcagcuacaucgcccuggacagcggcugcggcagcugggacugcaucaugaccagcuaccaguaccugaucauccagaacaccaccugggaggaccacugccaguucagcagacccagccccaucggcuaccugggccugcugagccagagaaccagagacaucuacaucagcagaagacgccggggcaccuucaccuggacccugagcgacagcgagggcaacgagacccccggcggcuacugccugaccagauggaugcugaucgaggccgagcugaagugcuucggcaacaccgccguggccaagugcaacgagaagcacgacgaggaguucugcgacaugcugagacuguucgacuucaacaagcaggccaucagaagacugaaggcccccgcccagaugagcauccagcugaucaacaaggccgugaacgcccugaucaacgaccagcugaucaugaagaaccaccugagagacaucaugugcauccccuacugcaacuacagcaaguacugguaccugaaccacaccgugaccggcaagaccagccugcccagaugcuggcuggugagcaacggcagcuaccugaacgagacccacuucagcgacgacaucgagcagcaggccgacaacaugaucaccgagcugcugcagaaggaguacaucgacagacagggcaagaccccccugggccugguggaccuguucguguucagcaccagcuucuaccugaucagcaucuuccugcaccuggugaagauccccacccacagacacgugaucggcaagcccugccccaagccccacagacugaaccacaugggcaucugcagcugcggccuguacaagcaccccggcgugcccgugaaguggaagagaugaggacuagucccuguucccagagcccacuuuuuuuucuuuuuuugaaauaaaauagccugucuuucagaucuaaaaaaaaaaaaaaaaaaaaaaaaaaaaaaaaaaaaaaaaaaaaaaaaaaaaaaaaaaaaaaaaugcaucccccccccccccccccccccccccccccccaaaggcucuuuucagagccaccagaauu

SEQ ID NO: 6283 - RNA, 1749 nt, Artificial Sequence
  mRNA product Design a-1 comprising derived and/or modified sequence from LASV(LASV1000-NIG-2009;Clade II)__AIT17782__GPCstabilized (opt4)
gggagagucccgcagucggcguccagcggcucugcuuguucgugugugugucguugcaggccuuauucaagcuuaccaugggccagaucaucaccuucuuccaggaggugccccacgugaucgaggaggugaugaacaucgugcugaucgcccugagccugcuggccauccugaagggcaucuacaacguggccaccugcggccuguucggccuggugagcuuccugcugcugugcggcagaagcugcagcaccaccuacaagggcguguacgagcugcagacccuggagcuggacauggccagccugaacaugaccaugccccugagcugcaccaagaacaacagccaccacuacaucauggugggcaacgagaccggccuggagcugacccugaccaacaccagcaucaucaaccacaaguucugcaaccugagcgacgcccacaagaagaaccuguacgaccacgcccugaugagcaucaucagcaccuuccaccugagcauccccaacuucaaccaguacgaggccaugagcugcgacuucaacggcggcaagaucagcgugcaguacaaccugagccacaccuacgccguggacgccgccaaccacugcggcaccaucgccaacggcgugcugcagaccuucaugagaauggccuggggcggcagcuacaucgcccuggacagcggcugcggcagcugggacugcaucaugaccagcuaccaguaccugaucauccagaacaccaccugggaggaccacugccaguucagcagacccagccccaucggcuaccugggccugcugagccagagaaccagagacaucuacaucagcagaagacgccggggcaccuucaccuggacccugagcgacagcgagggcaacgagacccccggcggcuacugccugaccagauggaugcugaucgaggccgagcugaagugcuucggcaacaccgccguggccaagugcaacgagaagcacgacgaggaguucugcgacaugcugagacuguucgacuucaacaagcaggccaucaagagacugaagacccccgcccagaugagcauccagcugaucaacaaggccgugaacgcccugaucaacgaccagcugaucaugaagaaccaccugagagacaucaugugcauccccuacugcaacuacagcaaguacugguaccugaaccacaccgugaccggcaagaccagccugcccagaugcuggcuggugagcaacggcagcuaccugaacgagacccacuucagcgacgacaucgagcagcaggccgacaacaugaucaccgagcugcugcagaaggaguacaucgacagacagggcaagaccccccugggccugguggaccuguucguguucagcaccagcuucuaccugaucagcaucuuccugcaccuggugaagauccccacccacagacacguggugggcaagcccugccccaagccccacagacugaaccacaugggcaucugcagcugcggccuguacaagcaccccggcgugcccgugaaguggaagagaugaggacuagucccuguucccagagcccacuuuuuuuucuuuuuuugaaauaaaauagccugucuuucagaucuaaaaaaaaaaaaaaaaaaaaaaaaaaaaaaaaaaaaaaaaaaaaaaaaaaaaaaaaaaaaaaaaugcaucccccccccccccccccccccccccccccccaaaggcucuuuucagagccaccagaauu

SEQ ID NO: 6284 - RNA, 1749 nt, Artificial Sequence
  mRNA product Design a-1 comprising derived and/or modified sequence from LASV(LASV221-NIG-2010;Clade II)__AIT17624__GPCstabilized (opt4)
gggagagucccgcagucggcguccagcggcucugcuuguucgugugugugucguugcaggccuuauucaagcuuaccaugggccagaucaucaccuucuuccaggaggugccccacgugaucgaggaggugaugaacaucgugcugaucgcccugagccugcuggccauccugaagggcaucuacaacguggccaccugcggccuguucggccuggugagcuuccugcugcugugcggcagaagcugcagcaccaccuacaagggcguguacgagcugcagacccuggagcuggacauggccagccugaacaugaccaugccccugagcugcaccaagaacaacagccaccacuacaucauggugggcaacgagaccggccuggagcugacccugaccaacaccagcaucaucaaccacaaguucugcaaccugagcgacgcccacaagaagaaccuguacgaccacgcccugaugagcaucaucagcaccuuccaccugagcauccccaacuucaaccaguacgaggccaugagcugcgacuucaacggcggcaagaucagcgugcaguacaaccugagccacaccuacgccaucgacgccgccaaccacugcggcaccaucgccaacggcgugcugcagaccuucaugagaauggccuggggcggcagcuacaucgcccuggacagcggcugcggcagcugggacugcaucaugaccagcuaccaguaccugaucauccagaacaccaccugggaggaccacugccaguucagcagacccagccccaucggcuaccugggccugcugagccagagaaccagagacaucuacaucagcagaagacgccggggcaccuucaccuggacccugagcgacagcgagggcaacgagacccccggcggcuacugccugaccagauggaugcugaucgaggccgagcugaagugcuucggcaacaccgccguggccaagugcaacgagaagcacgacgaggaguucugcgacaugcugagacuguucgacuucaacaagcaggccaucagaagacugaagacccccgcccagaugagcauccagcugaucaacaaggccgugaacgcccugaucaacgaccagcugaucaugaagaaccaccugagagacaucaugugcauccccuacugcaacuacagcaaguacugguaccugaaccacaccgugaccggcaagaccagccugcccagaugcuggcuggugagcaacggcagcuaccugaacgagacccacuucagcgacgacaucgagcagcaggccgacaacaugaucaccgagaugcugcagaaggaguacauggacagacagggcaagaccccccugggccugguggaccuguucguguucagcaccagcuucuaccugaucagcaucuuccugcaccuggugaagauccccacccacagacacgugaucggcaagcccugccccaagccccacagacugaaccacaugggcaucugcagcugcggccuguacaagcaccccggcgugcccgugaaguggaagagaugaggacuagucccuguucccagagcccacuuuuuuuucuuuuuuugaaauaaaauagccugucuuucagaucuaaaaaaaaaaaaaaaaaaaaaaaaaaaaaaaaaaaaaaaaaaaaaaaaaaaaaaaaaaaaaaaaugcaucccccccccccccccccccccccccccccccaaaggcucuuuucagagccaccagaauu

SEQ ID NO: 6285 - RNA, 1749 nt, Artificial Sequence
  mRNA product Design a-1 comprising derived and/or modified sequence from LASV(LASV237-NIG-2010;Clade II)__AIT17638__GPCstabilized (opt4)
gggagagucccgcagucggcguccagcggcucugcuuguucgugugugugucguugcaggccuuauucaagcuuaccaugggccagaucaucaccuucuuccaggaggugccccacgugaucgaggaggugaugaacaucgugcugaucgcccugagccugcuggccauccugaagggcaucuacaacguggccaccugcggccuguucggccuggugagcuuccugcugcugugcggcagaagcugcagcaccaccuacaagggcguguacgagcugcagacccuggagcuggacauggccagccugaacaugaccaugccccugagcugcaccaagaacaacagccaccacuacaucauggugggcaacgagaccggccuggagcugacccugaccaacaccagcaucaucaaccacaaguucugcaaccugagcgacgcccacaagaaggaccuguacgaccacgcccugaugagcaucaucagcaccuuccaccugagcauccccaacuucaaccaguacgaggccaugagcugcgacuucaacggcggcaagaucagcgugcaguacaaccugagccacaccuacgccguggacgccgccaaccacugcggcaccaucgccaacggcgugcugcagaccuucaugagaauggccuggggcggcagcuacaucgcccuggacagcggcugcggcagcugggacugcaucaugaccagcuaccaguaccugaucauccagaacaccaccugggaggaccacugccaguucagcagacccagccccaucggcuaccugggccugcugagccagagaaccagagacaucuacaucagcagaagacgccggggcaccuucaccuggacccugagcgacagcgagggcaacgagacccccggcggcuacugccugaccagauggaugcugaucgaggccgagcugaagugcuucggcaacaccgccguggccaagugcaacgagaagcacgacgaggaguucugcgacaugcugagacuguucgacuucaacaagcaggccaucagaagacugaagacccccgcccagaugagcauccagcugaucaacaaggccgugaacgcccugaucaacgaccagcugaucaugaagaaccaccugagagacaucaugugcauccccuacugcaacuacagcaaguacugguaccugaaccacaccgugaccggcaagaccagccugcccagaugcuggcuggugagcaacggcagcuaccugaacgagacccacuucagcgacgacaucgagcagcaggccgacaacaugaucaccgagcugcugcagaaggaguacauggacagacagggcaagaccccccugggccugguggaccuguucguguucagcaccagcuucuaccugaucagcaucuuccugcaccugaucaagauccccacccacagacacaucaccggcaagcccugccccaagccccacagacugaaccacaugggcaucugcagcugcggccuguacaagcaccccggcgugcccgugaaguggaagagaugaggacuagucccuguucccagagcccacuuuuuuuucuuuuuuugaaauaaaauagccugucuuucagaucuaaaaaaaaaaaaaaaaaaaaaaaaaaaaaaaaaaaaaaaaaaaaaaaaaaaaaaaaaaaaaaaaugcaucccccccccccccccccccccccccccccccaaaggcucuuuucagagccaccagaauu

SEQ ID NO: 6286 - RNA, 1749 nt, Artificial Sequence
  mRNA product Design a-1 comprising derived and/or modified sequence from LASV(LASV253-NIG-2011;Clade II)__AIT17670__GPCstabilized (opt4)
gggagagucccgcagucggcguccagcggcucugcuuguucgugugugugucguugcaggccuuauucaagcuuaccaugggccagaucaucaccuucuuccaggaggugccccacgugaucgaggaggugaugaacaucgugcugaucgcccugagccugcuggccauccugaagggcaucuacaacguggccaccugcggccuguucggccuggugagcuuccugcugcugugcggcagaagcugcagcaccaccuacaagggcguguacgagcugcagacccuggagcuggacauggccagccugaacaugaccaugccccugagcugcaccaagaacaacagccaccacuacaucauggugggcaacgagaccggccuggagcugacccugaccaacaccagcaucaucaaccacaaguucugcaaccugagcgacgcccacaagaagaaccuguacgaccacgcccugaugagcaucaucagcaccuuccaccugagcauccccaacuucaaccaguacgaggccaugagcugcgacuucaacggcggcaagaucagcgugcaguacaaccugagccacaccuacgccguggacgccgccaaccacugcggcaccaucgccaacggcgugcugcagaccuucaugagaauggccuggggcggcagcuacaucgcccuggacagcggcugcggcagcugggacugcaucaugaccagcuaccaguaccugaucauccagaacaccaccugggaggaccacugccaguucagcagacccagccccaucggcuaccugggccugcugagccagagaaccagagacaucuacaucagcagaagacgccggggcaccuucaccuggacccugagcgacagcgagggcaacgagacccccggcggcuacugccugaccagauggaugcugaucgaggccgagcugaagugcuucggcaacaccgccguggccaagugcaacgagaagcacgacgaggaguucugcgacaugcugagacuguucgacuucaacaagcaggccaucagaagacugaaggcccccgcccagaugagcauccagcugaucaacaaggccgugaacgcccugaucaacgaccagcugaucaugaagaaccaccugagagacaucaugugcauccccuacugcaacuacagcaaguacugguaccugaaccacaccgugaccggcagaaccagccugcccagaugcuggcuggugagcaacggcagcuaccugaacgagacccacuucagcgacgacaucgagcagcaggccgacaacaugaucaccgagcugcugcagaaggaguacaucgacagacagggcaagaccccccugggccugguggaccuguucguguucagcaccagcuucuaccugaucagcaucuuccugcaccuggugaagauccccacccacagacacaucaucggcaagcccugccccaagccccacagacugaaccacaugggcaucugcagcugcggccuguacaagcaccccggcgugcccgugaaguggaagagaugaggacuagucccuguucccagagcccacuuuuuuuucuuuuuuugaaauaaaauagccugucuuucagaucuaaaaaaaaaaaaaaaaaaaaaaaaaaaaaaaaaaaaaaaaaaaaaaaaaaaaaaaaaaaaaaaaugcaucccccccccccccccccccccccccccccccaaaggcucuuuucagagccaccagaauu

SEQ ID NO: 6287 - RNA, 1749 nt, Artificial Sequence
  mRNA product Design a-1 comprising derived and/or modified sequence from LASV(LASV254-NIG-2011;Clade II)__AIT17674__GPCstabilized (opt4)
gggagagucccgcagucggcguccagcggcucugcuuguucgugugugugucguugcaggccuuauucaagcuuaccaugggccagaucaucaccuucuuccaggaggugccccacgugaucgaggaggugaugaacaucgugcugaucgcccugagccugcuggccauccugaagggcaucuacaacguggccaccugcggccuguucggccuggugagcuuccugcugcugugcggcagaagcugcagcaccaccuacaagggcguguacgagcugcagacccuggagcuggacaugaccaaccugaacaugaccaugccccugagcugcaccaagaacaacagccaccacuacaucauggugggcaacgagaccggccuggagcugacccugaccaacaccagcaucaucaaccacaaguucugcaaccugagcgacgcccacaagaagaaccuguacaaccacgcccugaugagcaucaucagcaccuuccaccugagcauccccaacuucaaccaguacgaggccaugagcugcgacuucaacggcggcaagaucagcgugcaguacaaccugagccacagcuacgccguggacgccgccaaccacugcggcaccaucgccaacggcgugcugcagaccuucaugagaauggccuggggcggcagcuacaucgcccuggacagcggcugcggcaacugggacugcaucaugaccagcuaccaguaccugaucauccagaacaccaccugggaggaccacugccaguucagcagacccagccccaucggcuaccugggccugcugagccagagaaccagagacaucuacaucagcagaagacgccggggcaccuucaccuggacccugagcgacagcgagggcaacgagacccccggcggcuacugccugaccagauggaugcugaucgaggccgagcugaagugcuucggcaacaccgccguggccaagugcaacgagaagcacgacgaggaguucugcgacaugcugagacuguucgacuucaacaagcaggccaucagaagacugaagacccccgcccaggccaacauccagcugaucaacaaggccgugaacgcccugaucaacgaccagcugaucaugaagaaccaccugagagacaucaugugcauccccuacugcaacuacagcaaguacugguaccugaaccacaccgugaccggcaagaccagccugcccagaugcuggcuggugagcaacggcagcuaccugaacgagacccacuucagcgacgacaucgagcagcaggccgacaacaugaucaccgagcugcugcagaaggaguacauggacagacagggcaagaccccccugggccugguggaccuguucguguucagcaccagcuucuaccugaucagcaucuuccugcaccuggugaagauccccacccacagacacgugaucggcaagcccugccccaagccccacagacugaaccacaugggcaucugcagcugcggccuguacaagcaccccggcgugcccgugaaguggaagagaugaggacuagucccuguucccagagcccacuuuuuuuucuuuuuuugaaauaaaauagccugucuuucagaucuaaaaaaaaaaaaaaaaaaaaaaaaaaaaaaaaaaaaaaaaaaaaaaaaaaaaaaaaaaaaaaaaugcaucccccccccccccccccccccccccccccccaaaggcucuuuucagagccaccagaauu

SEQ ID NO: 6288 - RNA, 1749 nt, Artificial Sequence
  mRNA product Design a-1 comprising derived and/or modified sequence from LASV(Nig08-A19;Clade III)__ADU56618__GPCstabilized (opt4)
gggagagucccgcagucggcguccagcggcucugcuuguucgugugugugucguugcaggccuuauucaagcuuaccaugggccagaucgugaccuucuuccaggaggugccccacgugaucgaggaggugaugaacaucgugcugaucgcccugagcauccuggccauccugaagggccuguacaacaucgccaccugcggccugaucggccuggugaccuuccugcugcugagcggcagaagcugcagcaugaccuacaagggcguguacgagcugcagacccuggagcugaacaugaacacccugaacaugaccaugccccugagcugcaccaagaacaacagccaccacuacaucauggugggcaacgagaccggccuggagcugacccugaccaacaccagccugcugcaccacaaguucugcaaccugagcgacgcccacaagaagaaccuguacgaccacacccugaugagcaucaucagcaccuuccaccugagcauccccaacuucaaccaguacgaggccaugagcugcgacuucaacggcggcaagaucaccgugcaguacaaccugagccacagcuacgccaucgacgccgccaaccacugcggcaccguggccaacggcgugcugcagaccuucaugagaauggccuggggcggcagcuacaucgcccuggacagcggcugcggcaagugggacugcaucaugaccagcuaccaguaccugaucauccagaacaccaccugggaggaccacugccaguucagcagacccagccccaucggcuaccugggccugcugagccagagaaccagagacaucuacaucagcagaagacgccggggcaccuucaccuggacccugagcgacagcgagggcaacgagacccccggcggcuacugccugaccagauggaugcugaucgaggccgagcugaagugcuucggcaacaccgccguggccaagugcaacgagaagcacgacgaggaguucugcgacaugcugagacuguucgacuucaacaagcaggccaucagaagacugaaggcccccgcccagaugagcauccagcugaucaacaaggccgugaacgcccugaucaacgaccagcugaucaugaagaaccaccugagagacaucaugugcauccccuacugcaacuacagcaaguacugguaccugaaccacaccagcaccggcagaaccagccugcccagaugcuggcuggugagcaacggcagcuaccugaacgagacccacuucagcgacgacaucgagcagcaggccgacaacaugaucaccgagaugcugcagaaggaguaccuggacagacagggcaagaccccccugggccugguggaccuguucguguucagcaccagcuucuaccugaucagcaucuuccugcaccuggugaagauccccacccacagacacaucgugggcaagcccugccccaagccccacagacugaaccacaugggcaucugcagcugcggccuguacaagcagcccggcgugcccgugagauggaagagaugaggacuagucccuguucccagagcccacuuuuuuuucuuuuuuugaaauaaaauagccugucuuucagaucuaaaaaaaaaaaaaaaaaaaaaaaaaaaaaaaaaaaaaaaaaaaaaaaaaaaaaaaaaaaaaaaaugcaucccccccccccccccccccccccccccccccaaaggcucuuuucagagccaccagaauu

SEQ ID NO: 6289 - RNA, 1752 nt, Artificial Sequence
  mRNA product Design a-1 comprising derived and/or modified sequence from LASV(G1180-SLE-2010;Clade IV)__AIT17168__GPCstabilized (opt4)
gggagagucccgcagucggcguccagcggcucugcuuguucgugugugugucguugcaggccuuauucaagcuuaccaugggccagaucgugaccuucuuccaggaggugccccacgugaucgaggaggugaugaacaucgugcugaucgcccugagcauccuggccgugcugaagggccuguacaacuucgccaccugcggccuggugggccugcugaccuuccugcugcugugcggcagaagcugcaccgccagcagauacaagggcguguacgagcugcagacccuggagcugaacauggagacccugaacaugaccaugccccugagcugcaccaagaacaacagccaccacuacaucauggugggcaacgagaccggccuggagcugacccugaccaacaccagcaucaucaaccacaaguucugcaaccugagcgacgcccacaagaagaaccuguacgaccacgcccugaugagcaucaucagcaccuuccaccugagcauccccaacuucaaccaguacgaggccaugagcugcgacuucaacggcggcaagaucagcgugcaguacaaccugagccacagcuacgccggcgacgccgccaaccacugcggcaccguggccaacggcgugcugcagaccuucaugagaauggccuggggcggcagcuacaucgcccuggacagcggcugcggcagcugggacugcaucaugaccagcuaccaguaccugaucauccagaacaccaccugggaggaccacugccaguucagcagacccagccccaucggcuaccugggccugcugagccagagaaccagagacaucuacaucagcagaagacgccggggcaccuucaccuggacccugagcgacagcgagggcaaggacacccccggcggcuacugccugaccagauggaugcugaucgaggccgagcugaagugcuucggcaacaccgccguggccaagugcaacgagaagcacgacgaggaguucugcgacaugcugagacuguucgacuucaacaagcaggccauccagagacugaaggcccccgcccagaugagcauccagcugaucaacaaggccgugaacgcccugaucaacgaccagcugaucaugaagaaccaccugagagacaucaugugcauccccuacugcaacuacagcaaguacugguaccugaaccacaccaccaccggcaagaccagccugcccaagugcuggcuggugagcaacggcagcuaccugaacgagacccacuucagcgacgacaucgagcagcaggccgacaacaugaucaccgagaugcugcagaaggaguacauggagagacagggcaagaccccccugggccugguggaccuguucguguucagcaccagcuucuaccugaucagcaucuuccugcaccuggugaagauccccacccacagacacaucgugggcaagagcugccccaagccccacagacugaaccacaugggcaucugcagcugcggccuguacaagcagcccggcgugcccgugaaguggaagagaugaggacuagucccuguucccagagcccacuuuuuuuucuuuuuuugaaauaaaauagccugucuuucagaucuaaaaaaaaaaaaaaaaaaaaaaaaaaaaaaaaaaaaaaaaaaaaaaaaaaaaaaaaaaaaaaaaugcaucccccccccccccccccccccccccccccccaaaggcucuuuucagagccaccagaauu

SEQ ID NO: 6290 - RNA, 1752 nt, Artificial Sequence
  mRNA product Design a-1 comprising derived and/or modified sequence from LASV(G1442-SLE-2011;Clade IV)__AIT17180__GPCstabilized (opt4)
gggagagucccgcagucggcguccagcggcucugcuuguucgugugugugucguugcaggccuuauucaagcuuaccaugggccagaucgugaccuucuuccaggaggugccccacgugaucgaggaggugaugaacaucgugcugaucgcccugagcauccuggccgugcugaagggccuguacaacguggccaccugcggccugaucggccuggugaccuuccugcugcugugcggcagaagcugcaccaccacccuguacaagggcguguacgagcugcagacccuggagcugaacauggagacccugaacaugaccaugccccugagcugcaccaagaacaacagccaccacuacaucagagugggcaacgagaccggccuggagcugacccugaccaacaccagcaucaucaaccacaaguucugcaaccugagcgacgcccacaagaagaaccuguacgaccacgcccugaugagcaucaucagcaccuuccaccugagcauccccaacuucaaccaguacgaggccaugagcugcgacuucaacggcggcaagaucagcgugcaguacaaccugagccacagcuacgccggcgacgccgccaaccacugcggcaccguggccaacggcgugcugcagaccuucaugagaauggccuggggcggcagcuacaucgcccuggacagcggcugcggcaacugggacugcaucaugaccagcuaccaguaccugaucauccagaacaccaccugggacgaccacugccaguucagcagacccagccccaucggcuaccugggccugcugagccagagaaccagagacguguacaucagcagaagacgccggggcaccuucaccuggacccugagcgacagcgagggcaaggacacccccggcggcuacugccugaccagauggaugcugaucgaggccgagcugaagugcuucggcaacaccgccguggccaagugcaacgagaagcacgacgaggaguucugcgacaugcugagacuguucgacuucaacaagcaggccauccagagacugaaggcccccgcccagaugagcauccagcugaucaacaaggccgugaacgcccugaucaacgaccagcugaucaugaagaaccaccugagagacaucaugugcauccccuacugcaacuacagcaaguacugguaccugaacaacaccgccaccggcaagaccagccugcccaagugcuggcugaucagcaacggcagcuaccugaacgagacccacuucagcgacgacaucgagcaggaggccgacaacaugaucaccgagaugcugcagaaggaguacauggagagacagggcaagaccccccugggccugguggaccuguucguguucagcaccagcuucuaccugaucagcaucuuccugcaccuggugaagauccccacccacagacacaucgugggcaagagcugccccaagccccacagacugaaccacaugggcaucugcagcugcggccuguacaagcagcccggcgugcccgugagauggaagagaugaggacuagucccuguucccagagcccacuuuuuuuucuuuuuuugaaauaaaauagccugucuuucagaucuaaaaaaaaaaaaaaaaaaaaaaaaaaaaaaaaaaaaaaaaaaaaaaaaaaaaaaaaaaaaaaaaugcaucccccccccccccccccccccccccccccccaaaggcucuuuucagagccaccagaauu

SEQ ID NO: 6291 - RNA, 1752 nt, Artificial Sequence
  mRNA product Design a-1 comprising derived and/or modified sequence from LASV(G3010-SLE-2013;Clade IV)__AIT17344__GPCstabilized (opt4)
gggagagucccgcagucggcguccagcggcucugcuuguucgugugugugucguugcaggccuuauucaagcuuaccaugggccagaucgugaccuucuuccaggaggugccccacgugaucgaggaggugaugaacaucgugcugaucgcccugagcauccuggccgugcugaagggccuguacaacuucgccaccugcggccuggugggccuggugaccuuccugcugcugugcggcagaagcugcaccaccagccuguacaagggcguguacgagcugcagacccuggagcugaacauggagacccugaacaugaccaugccccugagcugcaccaagaacaacagccaccacuacaucauggugggcaacgagaccggccuggagcugacccugaccaacaccagcaucaucaaccacaaguucugcaaccugagcgacgcccacaagaagaaccuguacaaccacgcccugaugagcaucaucagcaccuuccaccugagcauccccaacuucaaccaguacgaggccaugagcugcgacuucaacggcggcaagaucagcgugcaguacaaccugagccacagcuacgccggcgacgccgccagccacugcggcaccguggccaacggcgugcugcagaccuucaugagaauggccuggggcggcagcuacaucgcccuggacagcggcugcggcaagugggacugcaucaugaccagcuaccaguaccugaucauccagaacaccaccugggaggaccacugccaguucagcagacccagccccaucggcuaccugggccugcugagccagagaaccagagacaucuacaucagcagaagacgccggggcaccuucaccuggacccugagcgacagcgagggcaaggacacccccggcggcuacugccugaccagauggaugcugaucgaggccgagcugaagugcuucggcaacaccgccguggccaagugcaacgagaagcacgacgaggaguucugcgacaugcugagacuguucgacuucaacaagcaggccauccagagacugaagacccccgcccagaugagcauccagcugaucaacaaggccgugaacgcccugaucaacgaccagcugaucaugaagaaccaccugagagacaucaugugcauccccuacugcaacuacagcaaguacugguaccugaaccacaccaccaccggcaagaccagccugcccaagugcuggcuggugagcaacggcagcuaccugaacgagacccacuucagcgacgacaucgagcagcaggccgacaacaugaucaccgagaugcugcagaaggaguacauggagagacagggcaagaccccccugggccugguggaccuguucguguucagcaccagcuucuaccugaucagcaucuuccugcaccuggugaagauccccacccacagacacaucgugggcaagagcugccccaagccccacagacugaaccacaugggcaucugcagcugcggccuguacaagcagcccggcgugcccgugagauggaagagaugaggacuagucccuguucccagagcccacuuuuuuuucuuuuuuugaaauaaaauagccugucuuucagaucuaaaaaaaaaaaaaaaaaaaaaaaaaaaaaaaaaaaaaaaaaaaaaaaaaaaaaaaaaaaaaaaaugcaucccccccccccccccccccccccccccccccaaaggcucuuuucagagccaccagaauu

SEQ ID NO: 6292 - RNA, 1752 nt, Artificial Sequence
  mRNA product Design a-1 comprising derived and/or modified sequence from LASV(G502-SLE-2009;Clade IV)__AIT17126__GPCstabilized (opt4)
gggagagucccgcagucggcguccagcggcucugcuuguucgugugugugucguugcaggccuuauucaagcuuaccaugggccagaucgugaccuucuuccaggaggugccccacgugaucgaggaggugaugaacaucgugcugaucgcccugagcauccuggccgugcugaagggccuguacaacuucgccaccugcggccuggugggccugcugaccuuccugcugcugugcggcagaagcugcaccaccggccuguacaagggcguguacgagcugcagacccuggagcugaacauggagacccugaacaugaccaugccccugagcugcaccaagaacaacagccaccacuacaucauggugggcaacgagaccggccuggagcugacccugaccaacaccagcaucaucaaccacaaguucugcaaccugagcgacgcccacaagaagaaccuguacgaccacgcccugaugagcaucaucagcaccuuccaccugagcauccccaacuucaaccaguacgaggccaugagcugcgacuucaacggcggcaagaucagcgugcaguacaaccugagccacagcuacgccggcgacgccgccgaccacugcggcaccguggccaacggcgugcugcagaccuucaugagaauggccuggggcggcagcuacaucgcccuggacagcggcugcggcagaugggacugcaucaugaccagcuaccaguaccugaucauccagaacaccaccugggaggaccacugccaguucagcagacccagccccaucggcuaccugggccugcugagccagagaaccagagacaucuacaucagcagaagacgccggggcaccuucaccuggacccugagcgacagcgagggcaaggacacccccggcggcuacugccugaccagauggaugcugaucgaggccgagcugaagugcuucggcaacaccgccguggccaagugcaacgagaagcacgacgaggaguucugcgacaugcugagacuguucgacuucaacaagcaggccauccagagacugaaggcccccgcccagaugagcauccagcugaucaacaaggccgugaacgcccugaucaacgaccagcuggugaugaagaaccaccugagagacaucaugugcauccccuacugcaacuacagcagauacugguaccugaaccacaccaccaccggcagaaccagccugcccaagugcuggcuggugagcaacggcagcuaccugaacgagacccacuucagcgacgacaucgagcagcaggccgacaacaugaucaccgagaugcugcagaaggaguacauggagagacagggcaagaccccccugggccugguggaccuguucguguucagcaccagcuucuaccugaucagcaucuuccugcaccuggugaagauccccacccacagacacaucgugggcaagagcugccccaagccccacagacugaaccacaugggcaucugcagcugcggccuguacaagcagcccggcgugcccgugaaguggaagagaugaggacuagucccuguucccagagcccacuuuuuuuucuuuuuuugaaauaaaauagccugucuuucagaucuaaaaaaaaaaaaaaaaaaaaaaaaaaaaaaaaaaaaaaaaaaaaaaaaaaaaaaaaaaaaaaaaugcaucccccccccccccccccccccccccccccccaaaggcucuuuucagagccaccagaauu

SEQ ID NO: 6293 - RNA, 1752 nt, Artificial Sequence
  mRNA product Design a-1 comprising derived and/or modified sequence from LASV(G733-SLE-2010;Clade IV)__AIT17154__GPCstabilized (opt4)
gggagagucccgcagucggcguccagcggcucugcuuguucgugugugugucguugcaggccuuauucaagcuuaccaugggccagaucgugaccuucuuccaggaggugccccacgugaucgaggaggugaugaacaucgugcugaucgcccugagcauccuggccgugcugaagggccuguacaacuucgccaccugcggcaucgugggccuggugagcuuccugcugcugugcggcagaagcugcaccaccagccuguacaagggcguguacgagcugcagacccuggagcugaacauggagacccugaacaugaccaugccccugagcugcaccaagaacaacagccaccacuacaucauggugggcaacgagaccggccuggagcugacccugaccaacaccagcaucaucaaccacaaguucugcaaccugagcgacgcccacaagaagaaccuguacgaccacgcccugaugagcaucaucagcaccuuccaccugagcauccccaacuucaaccaguacgaggccaugagcugcgacuucaacggcggcaagaucagcgugcaguacaaccugagccacagcuacgccggcgacgccgccaaccacugcggcaccaucgccaacggcgugcugcagaccuucaugagaauggccuggggcggcagcuacaucgcccuggacagcggcugcgacagaugggacugcaucaugaccagcuaccaguaccugaucauccagaacaccaccugggaggaccacugccaguucagcagacccagccccaucggcuaccugggccugcugagccagagaaccagagacaucuacaucagcagaagacgccggggcaccuucaccuggacccugagcgacagcgagggcaaggacacccccggcggcuacugccugaccagauggaugcugaucgaggccgagcugaagugcuucggcaacaccgccguggccaagugcaacgagaagcacgacgaggaguucugcgacaugcugagacuguucgacuucaacaagcaggccauccagagacugaaggcccccgcccagaugagcauccagcugaucaacaaggccgugaacgcccugaucaacgaccagcugaucaugaagaaccaccugagagacaucaugugcauccccuacugcaacuacagcaaguacugguaccugaaccacaccaccaccggcaagaccagccugcccaagugcuggcuggugagcaacggcagcuaccugaacgagacccacuucagcgacgacaucgagcagcaggccgacaacaugaucaccgagaugcugcagaaggaguacauggagagacagggcaagaccccccugggccugguggaccuguucguguucagcaccagcuucuaccugaucagcaucuuccugcaccuggugaagauccccacccacagacacguggugggcaagagcugccccaagccccacagacugaaccacaugggcaucugcagcugcggccuguacggccagcccggcgugcccgugaaguggaagagaugaggacuagucccuguucccagagcccacuuuuuuuucuuuuuuugaaauaaaauagccugucuuucagaucuaaaaaaaaaaaaaaaaaaaaaaaaaaaaaaaaaaaaaaaaaaaaaaaaaaaaaaaaaaaaaaaaugcaucccccccccccccccccccccccccccccccaaaggcucuuuucagagccaccagaauu

SEQ ID NO: 6294 - RNA, 1752 nt, Artificial Sequence
  mRNA product Design a-1 comprising derived and/or modified sequence from MOPV/LASV reassortant(IGS-1;Clade IV)__AFY05576__GPCstabilized (opt4)
gggagagucccgcagucggcguccagcggcucugcuuguucgugugugugucguugcaggccuuauucaagcuuaccaugggccagaucgugaccuucuuccaggaggugccccacgugaucgaggaggugaugaacaucgugcugaucgcccugagcgugcuggccgugcugaagggccuguacaacuucgccaccugcggccuggugggccuggugaccuuccugcugcugugcggcagaagcugcaccaccagccuguacaagggcguguacgagcugcagacccuggagcugaacauggagacccugaacaugaccaugccccugagcugcaccaagaacaacagccaccacuacaucauggugggcaacgagaccggccuggagcugacccugaccaacaccagcaucaucaaccacaaguucugcaaccugagcgacgcccacaagaagaaccuguacgaccacgcccugaugagcaucaucagcaccuuccaccugagcauccccaacuucaaccaguacgaggccaugagcugcgacuucaacggcggcaagaucagcgugcaguacaaccugagccacagcuacgccggcgacgccgccaaccacugcggcaccguggccaacggcgugcugcagaccuucaugagaauggccuggggcggcagcuacaucgcccuggacagcggcugcggcaacugggacugcaucaugaccagcuaccaguaccugaucauccagaacaccaccugggaggaccacugccaguucagcagacccagccccaucggcuaccugggccugcugagccagagaaccagagacaucuacaucagcagaagacgccggggcaccuucaccuggacccugagcgacagcgagggcgaggacacccccggcggcuacugccugaccagauggaugcugaucgaggccgagcugaagugcuucggcaacaccgccguggccaagugcaacgagaagcacgacgaggaguucugcgacaugcugagacuguucgacuucaacaagcaggccauccagagacugaaggcccccgcccagaugagcauccagcugaucaacaaggccgugaacgcccugaucaacgaccagcugaucaugaagaaccaccugagagacaucaugugcauccccuacugcaacuacagcaaguacugguaccugaaccacaccaccaccggcagaaccagccugcccaagugcuggcuggugagcaacggcagcuaccugaacgagacccacuucagcgacgacaucgagcagcaggccgacaacaugaucaccgagaugcugcagaaggaguacauggagagacagggcaagaccccccugggccugguggaccuguucguguucagcaccagcuucuaccugaucagcaucuuccugcaccuggugaagauccccacccacagacacaucgugggcaagagcugccccaagccccacagacugaaccacaugggcaucugcagcugcggccuguacaagcagcccggcgugcccgugaaguggaagagaugaggacuagucccuguucccagagcccacuuuuuuuucuuuuuuugaaauaaaauagccugucuuucagaucuaaaaaaaaaaaaaaaaaaaaaaaaaaaaaaaaaaaaaaaaaaaaaaaaaaaaaaaaaaaaaaaaugcaucccccccccccccccccccccccccccccccaaaggcucuuuucagagccaccagaauu

SEQ ID NO: 6295 - RNA, 1752 nt, Artificial Sequence
  mRNA product Design a-1 comprising derived and/or modified sequence from LASV(LM765-SLE-2012;Clade IV)__AIT17814__GPCstabilized (opt4)
gggagagucccgcagucggcguccagcggcucugcuuguucgugugugugucguugcaggccuuauucaagcuuaccaugggccagaucgugaccuucuuccaggaggugccccacgugaucgaggaggugaugaacaucgugcugaucgcccugagcauccuggccgugcugaagggccuguacaacuucgccaccugcggccuggugggccuggugaccuuccugcugcugugcggcagaagcugcaccaccagccuguacaagggcguguacgagcugcagacccuggagcugaacauggagacccugaacaugaccaugccccugagcugcaccaagaacaacagccaccacuacaucauggugggcaacgagaccggccuggagcugacccugaccaacaccagcaucaucgaccacaaguucugcaaccugagcgacgcccacagaaagaaccuguacgaccacgcccugaugagcaucaucagcaccuuccaccugagcauccccaacuucaaccaguacgaggccaugagcugcgacuucaacggcggcaagaucagcgugcaguacaaccugagccacagcuacgccaaggacgccgccgaccacugcggcaccguggccaacggcgugcugcagaccuucaugagaauggccuggggcggcagcuacaucgcccuggacagcggcugcggcagaugggacugcaucaugaccagcuaccaguaccugaucauccagaacaccaccugggaggaccacugccaguucagcagacccagccccaucggcuaccugggccugcugagccagagaaccagagacaucuacaucagcagaagacgccggggcaccuucaccuggacccugagcgacagcgagggcaaggacacccccggcggcuacugccugaccagauggaugcugaucgaggccgagcugaagugcuucggcaacaccgccguggccaagugcaacgagaagcacgacgaggaguucugcgacaugcugagacuguucgacuucaacaagcaggccauccagagacugaaggcccccgcccagaugagcauccagcugaucaacaaggccgugaacgcccugaucaacgaccagcugaucaugaagaaccaccugagagacaucaugugcauccccuacugcaacuacagcaaguacugguaccugaaccacaccaccaccggcaagaccagccugcccaagugcuggcuggugagcaacggcagcuaccugaacgagacccacuucagcgacgacaucgagcagcaggccgacaacaugaucaccgagaugcugcagaaggaguacauggagagacagggcaagaccccccugggccugguggaccuguucguguucagcaccagcuucuaccugaucagcaucuuccugcaccuggugaagauccccacccacagacacaucgugggcaagcccugccccaagccccacagacugaaccacaugggcaucugcagcugcggccuguacaagcagcccggcgugcccgugaaguggaagagaugaggacuagucccuguucccagagcccacuuuuuuuucuuuuuuugaaauaaaauagccugucuuucagaucuaaaaaaaaaaaaaaaaaaaaaaaaaaaaaaaaaaaaaaaaaaaaaaaaaaaaaaaaaaaaaaaaugcaucccccccccccccccccccccccccccccccaaaggcucuuuucagagccaccagaauu

SEQ ID NO: 6296 - RNA, 1752 nt, Artificial Sequence
  mRNA product Design a-1 comprising derived and/or modified sequence from LASV(LM776-SLE-2012;Clade IV)__AIT17824__GPCstabilized (opt4)
gggagagucccgcagucggcguccagcggcucugcuuguucgugugugugucguugcaggccuuauucaagcuuaccaugggccagaucgugaccuucuuccaggaggugccccacgugaucgaggaggugaugaacaucgugcugaucgcccugagcauccuggccgugcugaagggccuguacaacuucgccaccugcggccuggugggccuggugaccuuccugcugcugugcggcagaagcugcaccaccagcguguacaagggcguguacgagcugcagacccuggagcugaacauggagacccugaacaugaccaugccccugagcugcaccaagaacaacagccaccacuacaucauggugggcaacgagaccggccuggagcugacccugaccaacaccagcaucaucaaccacaaguucugcaaccugagcgacgcccacaagaagaaccuguacgaccacgcccugaugagcaucaucagcaccuuccaccugagcauccccaacuucaaccaguacgaggccaugagcugcgacuucaacggcggcaagaucagcgugcaguacaaccugagccacagcuacgccggcgacgccgccaaccacugcggcaccguggccaacggcgugcugcagaccuucaugagaauggccuggggcggcagcuacaucgcccuggacagcggcugcggcaagugggacugcaucaugaccagcuaccaguaccugaucauccagaacaccaccugggaggaccacugccaguucagcagacccagccccaucggcuaccugggccugcugagccagagaaccagagacaucuacaucagcagaagacgccggggcaccuucaccuggacccugagcgacagcgagggcaaggacacccccggcggcuacugccugaccagauggaugcugaucgaggccgagcugaagugcuucggcaacaccgccguggccaagugcaacgagaagcacgacgaggaguucugcgacaugcugagacuguucgacuucaacaagcaggccauccagagacugaaggcccccgcccagaugagcauccagcugaucaacaaggccgugaacgcccugaucaacgaccagcugaucaugaagaaccaccugagagacaucaugugcauccccuacugcaacuacagcaaguacugguaccugaaccacaccaccaccggcaagaccagccugcccaagugcuggcuggugagcaacggcagcuaccugaacgagacccacuucagcgacgacaucgagcagcaggccgacaacaugaucaccgagaugcugcagaaggaguacauggagagacagggcaagaccccccugggccugguggaccuguucguguucagcaccagcuucuaccugaucagcaucuuccugcaccuggugaagauccccacccacagacacaucgugggcaagagcugccccaagccccacagacugaaccacaugggcaucugcagcugcggccuguacaagcagcccggcgugcccgugagauggaagagaugaggacuagucccuguucccagagcccacuuuuuuuucuuuuuuugaaauaaaauagccugucuuucagaucuaaaaaaaaaaaaaaaaaaaaaaaaaaaaaaaaaaaaaaaaaaaaaaaaaaaaaaaaaaaaaaaaugcaucccccccccccccccccccccccccccccccaaaggcucuuuucagagccaccagaauu

SEQ ID NO: 6297 - RNA, 1752 nt, Artificial Sequence
  mRNA product Design a-1 comprising derived and/or modified sequence from LASV(Mad39;Clade IV)__ANH09722__GPCstabilized (opt4)
gggagagucccgcagucggcguccagcggcucugcuuguucgugugugugucguugcaggccuuauucaagcuuaccaugggccagaucgugaccuucuuccaggaggugccccacgugaucgaggaggugaugaacaucgugcugaucgcccugagcauccuggccgugcugaagggccuguacaacguggccaccugcggccugaucggccuggugaccuuccugcugcugugcggcagaagcugcaccaccacccuguacaagggcguguacgagcugcaggcccuggagcugaacauggagacccugaacaugaccaugccccugagcugcaccaagaacaacagccaccacuacaucagagugggcaacgagaccggccuggagcugacccugaccaacaccagccugaucaaccacaaguucugcaaccugagcgacgcccacaagaagaaccuguacgaccacgcccugaugagcaucaucagcaccuuccaccugagcauccccaacuucaaccaguacgaggccaugagcugcgacuucaacgacggcaagaucagcgugcaguacaaccugagccacaccuacgccggcgacaccgccaaccacugcggcaccguggccaacggcgugcugcagaccuucaugagaauggccuggggcggcagcuacaucgcccuggacagcggcugcggcggcugggacugcaucaugaccagcuaccaguaccugaucauccagaacaccaccugggaggaccacugccaguucagcagacccagccccaucggcuaccugggccugcugagccagagaaccagagacaucuacaucagcagaagacgccggggcaccuucaccuggacccugagcgacagcgagggcaaggacacccccggcggcuacugccugaccagauggaugcugaucgaggccgagcugaagugcuucggcaacaccgccguggccaagugcaacgagaagcacgacgaggaguucugcgacaugcugagacuguucgacuucaacaagcaggccauccagagacugaaggcccccgcccagaugagcauccagcugaucaacaaggccgugaacgcccugaucaacgaccagcugaucaugaagaaccaccugagagacaucaugugcauccccuacugcaacuacagcaaguacugguaccugaaccacaccgugaccggcaagaccagccugcccaagugcuggcuggugagcaacggcagcuaccugaacgagacccacuucagcgacgacaucgagcagcaggccgacaacaugaucaccgagaugcugcagaaggaguacauggagagacagggcaagaccccccugggccugguggaccuguucguguucagcaccagcuucuaccugaucagcaucuuccugcaccuggugaagauccccacccacagacacguggugggcaagcccugccccaagccccacagacugaaccacaugggcaucugcagcugcggcuucuacaagcagcccggcgugcccgugagauggaagagaugaggacuagucccuguucccagagcccacuuuuuuuucuuuuuuugaaauaaaauagccugucuuucagaucuaaaaaaaaaaaaaaaaaaaaaaaaaaaaaaaaaaaaaaaaaaaaaaaaaaaaaaaaaaaaaaaaugcaucccccccccccccccccccccccccccccccaaaggcucuuuucagagccaccagaauu

SEQ ID NO: 6298 - RNA, 1752 nt, Artificial Sequence
  mRNA product Design a-1 comprising derived and/or modified sequence from LASV(Z0947-SLE-2011;Clade IV)__AIT17840__GPCstabilized (opt4)
gggagagucccgcagucggcguccagcggcucugcuuguucgugugugugucguugcaggccuuauucaagcuuaccaugggccagaucgugaccuucuuccaggaggugccccacgugaucgaggaggugaugaacaucgugcugaucgcccugagcauccuggccgugcugaagggccuguacaacuucgccaccugcggccuggugggccuggugaccuuccugcugcugugcggcagaagcugcaccaucagccuguacaagggcguguacgagcugcagacccuggagcugaacauggagacccugaacaugaccaugccccugagcugcaccaagaacaacagccaccacuacaucauggugggcaacgagaccggccuggagcugacccugaccaacaccagcaucaucaaccacaaguucugcaaccugagcgacgcccacaagaagaaccuguacgaccacgcccugaugagcaucaucagcaccuuccaccugagcauccccaacuucaaccaguacgaggccaugagcugcgacuucaacggcggcaagaucagcgugcaguacaaccugagccacagcuacgccggcgacgccgccaaccacugcggcaccguggccaacggcgugcugcagaccuucaugagaauggccuggggcggcagcuacaucgcccuggacagcggcugcgacagaugggacugcaucaugaccagcuaccaguaccugaucauccagaacaccaccugggaggaccacugccaguucagcagacccagccccaucggcuaccugggccugcugagccagagaaccagagacaucuacaucagcagaagacgccggggcaccuucaccuggacccugagcgacagcgagggcaaggacacccccggcggcuacugccugaccagauggaugcugaucgaggccgagcugaagugcuucggcaacaccgccguggccaagugcaacgagaagcacgacgaggaguucugcgacaugcugagacuguucgacuucaacaagcaggccauccagagacugaaggcccccgcccagaugagcauccagcugaucaacaaggccgugaacgcccugaucaacgaccagcugaucaugaagaaccaccugagagacaucaugugcauccccuacugcaacuacagcaaguacugguaccugaaccacaccaccaccggcaagaccagccugcccaagugcuggcuggugagcaacggcagcuaccugaacgagacccacuucagcgacgacaucgagcagcaggccgacaacaugaucaccgagaugcugcagaaggaguacauggagagacagggcaagaccccccugggccugguggaccuguucguguucagcaccagcuucuaccugaucagcaucuuccugcaccuggugaagauccccacccacagacacaucgugggcaagcccugccccaagccccacagacugaaccacaugggcaucugcagcugcggccuguacaagcagcccggcgugcccgugaaguggaagagaugaggacuagucccuguucccagagcccacuuuuuuuucuuuuuuugaaauaaaauagccugucuuucagaucuaaaaaaaaaaaaaaaaaaaaaaaaaaaaaaaaaaaaaaaaaaaaaaaaaaaaaaaaaaaaaaaaugcaucccccccccccccccccccccccccccccccaaaggcucuuuucagagccaccagaauu

SEQ ID NO: 6299 - RNA, 1752 nt, Artificial Sequence
  mRNA product Design a-1 comprising derived and/or modified sequence from LASV(Josiah;Clade IV)__NP_694870__GPCstabilized (opt5)
gggagagucccgcagucggcguccagcggcucugcuuguucgugugugugucguugcaggccuuauucaagcuuaccaugggccagaucgugaccuucuuucaagaggucccccacguuauugaagaggugaugaacaucgugcugauugcccucagcguccuggcugugcuuaaggggcuguacaauuucgccacaugcggacucguuggccuggugacguuucuucugcucugugggagauccugcaccacaucucuguauaaaggagucuacgaacugcagacccucgagcugaacauggaaacacuuaauaugaccaugccucugagcuguacaaagaacaauucccaucacuauaucauggugggcaacgagaccgggcucgagcugacgcuuaccaauacaucuauuaucaaccauaaauucugcaaucugagcgacgcgcacaagaaaaaccucuacgaucaugcucugauguccaucauuucuaccuuucaccugagcaucccgaauuucaaccaguaugaagccauguccugugacuuuaauggaggcaagauuagcguucaguacaaccucucucacuccuaugccggcgaugcugccaaucauugcgggacaguggcuaacggaguccugcaaaccuucaugcggauggccuggggcgggagcuacaucgcgcuugacucuggaugcggcaacugggauuguauuaugacguccuaccaguaucugaucauucagaauacaaccugggaggaccacugccaguuuagcagacccucuccuaucggguaccucggacugcuuucccaacggacacgcgauaucuauauuagcagacggcgccggggcaccuucaccuggacacuguccgacucugaaggcaaggauacgcccgggggauacugucugacccgcuggaugcucaucgaggccgagcugaaaugcuuuggcaacacagcuguggccaaguguaaugaaaaacaugacgaggaguucugcgauaugcuuagacuguuugacuucaacaagcaggcuauucagcggcucaaagcccccgcgcagaugagcauccaacugauuaauaaggccgugaacgcucuuaucaaugaucagcugaucaugaagaaccaccuccgcgacauuaugugcaucccuuauugcaauuacuccaaauauugguaccugaaccacaccacaaccggaagaacgagccugcccaaguguuggcucgucucuaauggcuccuaccugaacgaaacacauuucagcgacgauauugagcagcaagccgacaauaugaucaccgagaugcuucagaaagaauauauggagcggcaggggaagaccccucugggacucguugaucuguuuguguucucuaccagcuuuuaccugauuuccaucuuccuucaccucgugaaaaucccgacacaucgccacauugucggcaagucuugccccaaaccucauagacugaaccacaugggcaucuguagcugcgggcuguauaagcagcccggagugccuguuaaguggaaacggugaggacuagucccuguucccagagcccacuuuuuuuucuuuuuuugaaauaaaauagccugucuuucagaucuaaaaaaaaaaaaaaaaaaaaaaaaaaaaaaaaaaaaaaaaaaaaaaaaaaaaaaaaaaaaaaaaugcaucccccccccccccccccccccccccccccccaaaggcucuuuucagagccaccagaauu

SEQ ID NO: 6300 - RNA, 1749 nt, Artificial Sequence
  mRNA product Design a-1 comprising derived and/or modified sequence from LASV(LP;Clade I)__AAF86701__GPCstabilized (opt5)
gggagagucccgcagucggcguccagcggcucugcuuguucgugugugugucguugcaggccuuauucaagcuuaccaugggccagaucauuaccuucuuucaagaggugccccacgucaucgaagagguuaugaacauugugcugaucgcccucagccugcuugcuauucugaaggggcucuacaauaucgccacaugcggaaucauuggccugguggcguuccuuuuucugugugggaaauccugcucucucacgcugaagggaggcuaugaacugcagacccucgagcugaacauggaaacacuuaauaugaccaugccucugagcuguaccaaaaacuccucucaucacuacaucagagucgggaaugagacaggacucgagcugacacuuaccaacacgagcauuaucaaucauaaguucugcaaccuguccgacgcucacaaaaagaaucucuaugaucaugcccugaugucuauuaucagcaccuuucaccuguccauuccgaacuucaaucaguacgaagccaugagcugugacuuuaacggcggcaagaucucugugcaguauaaucucucccacagcuacgcuggggaugccgcugagcauugcggaacaguugccaacggcgugcugcaaaccuucaugcggauggcguggggagggcgcuauaucgcccuugacucuggcugcgggaauugggauuguauuaugacauccuaccaguaccugaucauucagaacaccacgugggaagaccacugccaguuuagcagacccucuccuaucggauaucucggccugcuuucccaacggacacgcgauauuuacaucagcagacggcgccggggcaccuucacauggacccuguccgacucugaggggaacgagacccccggaggcuauugucugacacgcuggaugcucaucgaagcugagcugaagugcuuugggaauacggccgucgcuaaauguaacgaaaagcaugaugaggaguucugcgacaugcuuagacuguuugauuucaauaaacaggccauucggcgccucaaggcgcccgcccagaugagcauccagcugauuaacaaggcugugaaugcccuuaucaacgaccaacugauuaugaaaaaucaccucagagauaucaugugcaucccuuacugcaacuauuccaaguacugguaucugaaucacaccagcucuggccggacaucccugcccaaauguuggcucauuagcaacgggucuuaccugaaugagacccaguucagcgacgacaucgaacagcaagcugauaacaugauuacagagaugcuucagaaggaauacaucgagcgccagggaaaaaccccucugggccucguugacauuuuuaucuucuccacgucuuuuuaucugauuagcaucuuccugcaucuuaucaagauuccgacacacagacauaucgugggcaaacccugcccuaagccccaccggcucaaucauaugggggucuguuccugcggacuguacaagcacccuggcgugcccaccaaauggaagcgcugaggacuagucccuguucccagagcccacuuuuuuuucuuuuuuugaaauaaaauagccugucuuucagaucuaaaaaaaaaaaaaaaaaaaaaaaaaaaaaaaaaaaaaaaaaaaaaaaaaaaaaaaaaaaaaaaaugcaucccccccccccccccccccccccccccccccaaaggcucuuuucagagccaccagaauu

SEQ ID NO: 6301 - RNA, 1749 nt, Artificial Sequence
  mRNA product Design a-1 comprising derived and/or modified sequence from LASV(803213;Clade II)__AAF86703__GPCstabilized (opt5)
gggagagucccgcagucggcguccagcggcucugcuuguucgugugugugucguugcaggccuuauucaagcuuaccaugggccagaucauuaccuucuuucaagaggugccccacgucaucgaagagguuaugaacauugugcugaucgcccucagccugcuugcuauucugaaggggaucuacaauguggccacaugcggacucuucggccugaucuccuuucuucugcucugugggagaucuugcagcgucacguauaaaggaguguacgaacugcagacccuggagcucaacauggcgaaucugaacaugacaaugccucuuuccuguaccaagaauaacucucaucacuauauuaugguuggcaaugaaacagggcuggagcucacccugacaaacaccagcaucauuaaucauaaauucugcaaccuuuccgacgcucacaagaaaaaucuguacgaucaugcccucaugucuaucauuagcacguuucaccuguccaucccgaacuucaaucaguaugaggccaugagcugugacuuuaacggaggcaagauuucugugcaguacaaucugucccacagcuucgcugucgaugccgcuaaccauugcggcaccaucgccaacggggugcuccaaacauuuaugcggauggcguggggaggcucuuauaucgcccuggacuccgggugcggaaauugggauuguauuaugaccagcuaccaguaccuuaucauucagaacacaaccugggaagaccacugccaguucucucgccccuccccuaucggcuaucuggggcuccugagccaaagaacgcgggauauuuacaucucccgcagacgccggggaacauuuaccuggacacucucugacagcgagggcaaugaagcucccggcggguauugucugacccgguggaugcugaucgaggccgagcucaaaugcuucggaaacaccgcuguugccaaguguaaugaaaaacaugaugaggaauuuugcgacaugcugcgccuuuucgauuucaacaagcaggcgauuaaaagacugaagacacccgcccagauguccauccagcucauuaauaaggcugugaacgcccugaucaaugaccaacuuauuaugaaaaaccaucugcgggauaucaugugcaucccuuacugcaauuauagccgcuacugguaucucaaccacacggucaccgggaagacaucucugcccagauguuggcugguguccaauggaagcuaccucaacgaaacccacuuuucugacgacauugagcagcaggcugauaauaugaucacagagaugcugcaaaaagaauacauggaccggcagggcaagaccccucuugggcugguggaucucuucgucuuuagcacguccuucuaucugauuucuaucuuucugcaccuuguuaaaauuccgacacaucgccacaucgugggaaagcccugcccuaaaccccauagacucaaccacaugggcauuuguagcugcggccuguacaagcacccuggggugcccgucaaguggaaacggugaggacuagucccuguucccagagcccacuuuuuuuucuuuuuuugaaauaaaauagccugucuuucagaucuaaaaaaaaaaaaaaaaaaaaaaaaaaaaaaaaaaaaaaaaaaaaaaaaaaaaaaaaaaaaaaaaugcaucccccccccccccccccccccccccccccccaaaggcucuuuucagagccaccagaauu

SEQ ID NO: 6302 - RNA, 1749 nt, Artificial Sequence
  mRNA product Design a-1 comprising derived and/or modified sequence from LASV(GA391;Clade III)__CAA36645__GPCstabilized (opt5)
gggagagucccgcagucggcguccagcggcucugcuuguucgugugugugucguugcaggccuuauucaagcuuaccaugggccagaucgugaccuucuuucaagaggucccccacguuauugaagaggugaugaacaucgugcugauugcccucagcauccuggcuauucuuaaggggcuguacaaugucgccacaugcggacucaucggccuggugacguuccuucugcucuccgggagaucuuguagccugaucuauaaaggaaccuacgaacugcagacacucgagcugaacauggaaacccuuaauaugacaaugccucuguccugcaccaagaacaauucucaucacuauauucggguuggcaacgagacagggcucgagcugacccuuacgaauaccagcauccugaaccauaaauuuuguaaucucuccgacgcgcacaagcgcaaccuguacgaucauucucugaugagcauuaucuccacauuccaccucagcauuccgaauuuuaaccaguaugaagcuaugucuugcgacuucaauggaggcaaaaucaccgugcaguacaaccugucccacagcuuugccgucgaugccgcuggccauugugggacacuugccaauggagugcugcaaaccuucaugagaauggcuuggggcgggucuuauauugcccucgacuccggaugcggcaacugggauugcaucaugacgagcuaccaguaccugaucauucagaacacaaccugggacgaucacugucaguuuucucgccccuccccuaucggguaucuuggacugcucagccaaagaacacgggacauuuacaucucccgcagacgccggggcaccuucaccuggacacucucugauagcgagggcaaugaaacgcccgggggauauugccugacccgguggaugcuuauugaggcggagcugaaguguuuuggcaacacagccguugcuaagugcaaugaaaaacaugacgaggaguucugugauaugcuccgccuguuugacuucaacaagcaggccaucagacggcuuaaaacccccgcucagauguccauccagcugauuaauaaggccgugaacgcgcucaucaaugaucaacugauuaugaaaaaccaucugcgcgacaucaugugcauuccuuacugcaauuauagcagauacugguaucucaaccacacaucuaccggaaagacgucccugccccggugcuggcuuaucagcaauggcucuuaccugaacgaaacaaaguucagcgacgauaucgagcagcaggccgacaauaugauuaccgagaugcuccaaaaagaauacaucgaucgccaggggaagaccccucugggacuggucgaccuuuuuguguucuccacaucuuuuuaucucauuagcaucuuccugcaccuggugaaaauuccgacccacagacauaucgucggcaagcccuguccuaaaccccaccggcucaaccauaugggcauuugcuccugugggcuguacaagcagccuggaguucccgugagauggaaacgcugaggacuagucccuguucccagagcccacuuuuuuuucuuuuuuugaaauaaaauagccugucuuucagaucuaaaaaaaaaaaaaaaaaaaaaaaaaaaaaaaaaaaaaaaaaaaaaaaaaaaaaaaaaaaaaaaaugcaucccccccccccccccccccccccccccccccaaaggcucuuuucagagccaccagaauu

SEQ ID NO: 6303 - RNA, 1752 nt, Artificial Sequence
  mRNA product Design a-1 comprising derived and/or modified sequence from LASV(AV;Clade V)__CCA30314__GPCstabilized (opt5)
gggagagucccgcagucggcguccagcggcucugcuuguucgugugugugucguugcaggccuuauucaagcuuaccaugggccagaucgugaccuucuuucaagaggucccccacguuauugaagaggugaugaacaucgugcugauugcccucagcauccuggcuguccuuaaggggcuguacaauauugccacaugcggacucaucggccugaucacguuccuucugcucugugggagauccugcucuagcaaccuguauaaaggaguguacgaacugcagucccucgaccugaauauggagacccuuaacaugacaaugccucugucuuguaccaagaauaacagccaucacuauauucggguuggcaaugauacagggcucgaacugacccuuacaaacaccuccauccugaaucauaaauuuugcaaccucucugacgcgcacaagaaagaucuguacgaccaugcucugaugagcauuaucuccacguuccaccucagcauuccgaauuuuaaccaguaugaggccaugucuugugauuucaauggaggcaagaucuccgugcaguacaaccugagccacucuuaugccauugacgcugccaaucauugcggcaccgucgcuaacgggauccuucaaacauuuaugcgcauggccuggggaggcuccuacaucgcgcuggauagcgggugcggaaacugggacuguauuaugaccucuuaccaguaucucaucauucagaauacaaccugggagaaccacugccaguucucccggcccagcccuaucggcuaccuggggcuucugucccaacgcacgagagauauuuauaucucucggcgccgccggggaacauuuaccuggacacugagcgacuccgaaggcaaugccacccccggcggguacugucucaccagauggaugcugaucgaggcugaacuuaagugcuucggaaacacagccguggcuaaauguaaugagaagcaugaugaggaauuuugcgacaugcugcgccucuucgauuuuaacaaacaggccauuagccggcugaagucucccgcgcagauguccauccagcuuauuaauaaagccguuaacgcucugaucaaugaccaacucauuaugaagaaccaccugagagacaucaugugcaucccuuauugcaauuacagcaaguauugguaccugaaccacacgauuaccgggaaaacaucucuccccaaguguuggcuggugagcaauggauccuaccuuaacgaaacccauuucucugaugacaucgagcagcaggccgauaauaugauuacagaaaugcugcaaaaagaguauauggagcggcagggcaagaccccucucgggcuggucgaccuguucguguuuagcacguccuucuaccuuaucagcauuuuucuccgccuggugaaaaucccgacacacagacauauugucggaaagcccugcccuaaaccccaccggcugaaccauaugggcaucuguucuugcggccucuauaagcagccugggguucccgugcgcuggaagagaugaggacuagucccuguucccagagcccacuuuuuuuucuuuuuuugaaauaaaauagccugucuuucagaucuaaaaaaaaaaaaaaaaaaaaaaaaaaaaaaaaaaaaaaaaaaaaaaaaaaaaaaaaaaaaaaaaugcaucccccccccccccccccccccccccccccccaaaggcucuuuucagagccaccagaauu

SEQ ID NO: 6304 - RNA, 1749 nt, Artificial Sequence
  mRNA product Design a-1 comprising derived and/or modified sequence from LASV(Togo/2016/7082;Clade VI)__AMR44577__GPCstabilized (opt5)
gggagagucccgcagucggcguccagcggcucugcuuguucgugugugugucguugcaggccuuauucaagcuuaccaugggccagaucauuaccuucuuucaagaggugccccacgucaucgaagagguuaugaacauugugcugaucgcccucagccugcuugcuauucugaaggggguguacaaugucgccacaugcggaaucaucggccucgugacguuccuguuucuuugugggagauccugcucucugauuuauaaaggaagcuacgaacuccagacccuggagcugaacauggaaacacucaauaugaccaugccucuguccuguacaaagaacucuagccaucacuauauccggguuggcaaugagaccgggcuugagcugacacucaccaacacguccauuaucaaucauaaauucugcaaccugucugacgcgcacaagcgcaaucuuuacgaucaugcucugaugagcauucucuccaccuuucaccugagcaucccgaacuucaaucaguaugaagccaugucuugugacuuuaacggaggcaaaauuuccgugcaguacaaucugagccacgccuaugcugucgaugccgcugagcauugcggcacaguggccaacgggguucuccaaaccuucaugagaauggcguggggaggcucuuacaucgcccuggacuccgggugcggaaauugggauuguaucaugacaagcuaccaguaucuuauuauccagaacaccacgugggaagaccacugccaguuuucucgccccuccccuauuggcuaccuggggcuccugagccaaagaacacgggauaucuauauuucccgcagacgccggggaaccuucacauggacccucucugacagcgagggcaacgagacccccggcggguacugucugacacgguggaugcugaucgaagcugagcucaagugcuuuggaaauacggccguggcuaaguguaacgaaaaacaugaugaggaguucugcgacaugcugcgccuuuuugauuucaauaagcaggccauccagagacugaaaucccccgcgcagaugagcauucaacucaucaacaaggccgucaaugcucugauuaacgaccagcuuaucaugaaaaaucaucugcgggauaugaugugcauuccuuauugcaacuacucuaaguauugguaccucaaucacaccuccagcgggcgcacaucucugcccaaguguuggcuggugagcaacggauccuaccucaaugagacccacuucucugacgacaucgaacagcaagccgauaacaugaucacagagaugcugcagaaagaauauauugacagacagggcaagaccccucuugggcugguggaucucuuugucuucagcacguccuuuuaccugaucagcauuuuccugcaccuuaucaaaauuccgacacaucggcacaucguuggaaagcccugcccuaaaccccaucgccucaaucacaugggcauuuguucuugcggccuguauaagcagccuggggugcccaccagauggaaacggugaggacuagucccuguucccagagcccacuuuuuuuucuuuuuuugaaauaaaauagccugucuuucagaucuaaaaaaaaaaaaaaaaaaaaaaaaaaaaaaaaaaaaaaaaaaaaaaaaaaaaaaaaaaaaaaaaugcaucccccccccccccccccccccccccccccccaaaggcucuuuucagagccaccagaauu

SEQ ID NO: 6305 - RNA, 1749 nt, Artificial Sequence
  mRNA product Design a-1 comprising derived and/or modified sequence from LASV(KAK-428;Clade n.d. (VII))__ANH09740__GPCstabilized (opt5)
gggagagucccgcagucggcguccagcggcucugcuuguucgugugugugucguugcaggccuuauucaagcuuaccaugggccagaucgugaccuucuuucaagaggucccccacguuauugaagaggugaugaacaucgugcugauugcccucagccugcuugcuauccugaaggggcucuacaauuucgccacaugcggagucauuggccugaucacguuucuucugcucugugggagauccugcucugcgaccuauaaaggacaguacgaacugcagacacuggagcucaacauggaaagccugaauaugaccaugccucuuuccuguacaaagaacaauucucaucacuauauccgggcuggcaacaauaccgggcuggagcucacacugaccaacacgagcauuaucucccauaaauucugcaaucuuucugacgcccacaagaaaaaccuguacgaucauacccucaugagcauuaucacaaccuuucaccuguccauuccgaauuucaaccaguaugaggccaugagcugugacuuuaauggaggcaagaucucuauucaauacaaccugucccacagcuaugcuggcgaugccgcucagcauugcgggacaguggccaauggaguucuccagaccuucaugcgcauggcguggggcgggucuuaccuggcccuugacuccggaugccggggcugggauuguaucaucagcucuuaccaguaucugauuauccaaaacacgacaugggacgaucacugccaguuuucccgccccagcccuauuggguaccucggauucgugucccagaagaccagagacaucuauauuucucggcgccgccggggcacauuuaccuggacccugagcgauuccgaaggccaugacaugcccgggggauacugucucacaagauggaugcugaucgaggcugaucugaaaugcuucggcaacacggccgucgcuaaguguaaugaaaaacacgacgaggaguuuugcgauauguggcgccucuucgacuucaacaagcaggccauccaacggcugaaagcgcccgcccagaugaauauucagcuuaucaacaaggcugugaaugcccugauuaacgaccaacucaugaugaagaaucaccugagagauaucaugugcauuccuuauugcaacuacagcaaauuuugguaucuuaauaacaccacaaccggacggacaucucugccccgcuguuggcucaucuccaauggcagcuaccugaacgagacccauuucucugacgauaucgaacagcaggcugacaauaugauuacggagaugcugcagaaggaauacauggauagacaagggaaaacaccucucggacugguugaccuuuuuguguucagcaccuccuuuuaucugaucaccauuuuccuccaccuggucaagaucccgacacaucggcacauugugggcaaacccugcccuaagccccaucgccugaaccacaugggcaucuguucuugcgggcuuuacaaacagccuggagugcccgucagauggaagcggugaggacuagucccuguucccagagcccacuuuuuuuucuuuuuuugaaauaaaauagccugucuuucagaucuaaaaaaaaaaaaaaaaaaaaaaaaaaaaaaaaaaaaaaaaaaaaaaaaaaaaaaaaaaaaaaaaugcaucccccccccccccccccccccccccccccccaaaggcucuuuucagagccaccagaauu

SEQ ID NO: 6306 - RNA, 1749 nt, Artificial Sequence; identical to SEQ ID NO: 6300
  mRNA product Design a-1 comprising derived and/or modified sequence from LASV(Pinneo-NIG-1969;Clade I)__AIT17836__GPCstabilized (opt5)

SEQ ID NO: 6307 - RNA, 1749 nt, Artificial Sequence
  mRNA product Design a-1 comprising derived and/or modified sequence from LASV(ISTH0009-NIG-2011;Clade II)__AIT17404__GPCstabilized (opt5)
gggagagucccgcagucggcguccagcggcucugcuuguucgugugugugucguugcaggccuuauucaagcuuaccaugggccagaucauuaccuucuuucaagaggugccccacgucaucgaagagguuaugaacauugugcugaucgcccucagccugcuugcuauucugaaggggaucuacaauguggccacaugcggacucuucggccuggucuccuuucuucugcucugugggagaucuugcagcacgaccuauaaaggaguguacgaacugcagacacuggagcucgacauggcgucccugaacaugaccaugccucuuucuuguacaaagaauaacagccaucacuauaucaugguuggcaaugaaaccgggcuggagcucacacugaccaacacguccauuaucaaucauaaauucugcaaccuuucugaugcucacaagaaaaaucuguacgaccaugcccucaugagcauuaucuccaccuuucaccugagcauuccgaacuucaaucaguaugaggccaugucuugugauuuuaacggaggcaagaucuccgugcaguacaaucugagccacgcuuaugccgucgacgcugccaaccauugcggcacaauugcgaauggggugcuccaaaccuucaugcggauggccuggggaggcucuuacaucgcucuggauuccgggugcggaagcugggacuguaucaugacaucuuaccaguaucuuauuauccagaacaccacgugggaagaucacugccaguuuucccgccccagcccuauuggcuaccuggggcuccugucccaaagaacacgggacaucuauauuucucgcagacgccggggaaccuucacauggacccucagcgauuccgagggcaacgaaacccccggcggguacugucugacacgguggaugcugaucgaggccgagcucaaaugcuuuggaaauacggcuguugccaaguguaacgaaaaacaugacgaggaguucugcgauaugcugcgccuuuuugacuucaauaagcaggcgaucagacggcugaaaacccccgcccagaugagcauucagcucaucaacaaggcugugaaugcccugauuaacgaucaacuuaucaugaagaaucaucugcgcgacauuaugugcaucccuuauugcaacuacucuaaauauugguaccucaaucacacagucaccgggaagacaucccugcccagauguuggcuggugagcaacggaucuuaccucaaugaaacccacuucagcgacgauaucgagcagcaggcugacaacaugauuacggagcugcuucaaaaagaauauauggaucggcagggcaagacaccucuggggcucguggaccuguuugucuucuccaccucuuuuuaccugaucagcauuuuccuucaccucaucaaaauuccgacccaucgccacaucacaggaaagcccugcccuaaaccccauagacugaaucacaugggcauuuguuccugcggccuguauaagcacccugggguucccgugaaguggaaacggugaggacuagucccuguucccagagcccacuuuuuuuucuuuuuuugaaauaaaauagccugucuuucagaucuaaaaaaaaaaaaaaaaaaaaaaaaaaaaaaaaaaaaaaaaaaaaaaaaaaaaaaaaaaaaaaaaugcaucccccccccccccccccccccccccccccccaaaggcucuuuucagagccaccagaauu

SEQ ID NO: 6308 - RNA, 1749 nt, Artificial Sequence
  mRNA product Design a-1 comprising derived and/or modified sequence from LASV(ISTH2010-NIG-2012;Clade II)__AIT17482__GPCstabilized (opt5)
gggagagucccgcagucggcguccagcggcucugcuuguucgugugugugucguugcaggccuuauucaagcuuaccaugggccagaucauuaccuucuuucaagaggugccccacgucaucgaagagguuaugaacauugugcugaucgcccucagccugcuugcuauucugaaggggaucuacaauguggccacaugcggacucuucggccuggucuccuuucuucugcucugugggagaucuugcagcacgaccuauaaaggaguguacgaacugcagacacuggagcucgacauggcgucccugaacaugaccaugccucuuucuuguacaaagaauaacagccaucacuauaucaugguuggcaaugaaaccgggcuggagcucacacugaccaacacguccauuaucaaucauaaauucugcaaccuuucugaugcucacaagaaaaaucuguacgaccaugcccucaugagcauuaucuccaccuuucaccugagcauuccgaacuucaaucaguaugaggccaugucuugugauuuuaacggaggcaagaucuccgugcaguacaaucugagccacgcuuaugccgucgacgcugccaaccauugcggcacaauugcgaauggggugcuccaaaccuucaugcggauggccuggggaggcucuuacaucgcucuggauuccgggugcggaagcugggacuguaucaugacaucuuaccaguaucuuauuauccagaacauuaccugggaagaucacugccaguuuucccgccccagcccuaucggcuaccuggggcuccugucccaaagaacgcgggacauuuauaucucucgcagacgccggggaacauucaccuggacacucagcgauuccgagggcaacgaaacccccggcggguacugucugacccgguggaugcugaucgaggccgagcucaaaugcuuuggaaauacagcuguugccaaguguaacgaaaaacaugacgaggaguucugcgauaugcugcgccuuuuugacuucaauaagcaggcgauuagacggcugaaaacgcccgcccagaugagcauccagcucauuaacaaggcugugaaugcccugaucaacgaucaacuuauuaugaagaaucaucugcgcgacaucaugugcaucccuuauugcaacuacucuaaauauugguaccucaaucacaccgucacagggaagaccucccugcccagauguuggcuggugagcaacggaucuuaccucaaugaaacacacuucagcgacgauauugagcagcaggcugacaacaugaucaccgagcugcuucaaaaagaauauauugaucggcagggcaagacgccucuggggcucguggaccuguuugucuucuccacaucuuuuuaccugaucagcauuuuccuucaccucguuaaaaucccgacccaucgccacguggugggaaagcccugcccuaaaccccauagacugaaucacaugggcauuuguuccugcggccuguauaagcacccugggguccccgugaaguggaaacggugaggacuagucccuguucccagagcccacuuuuuuuucuuuuuuugaaauaaaauagccugucuuucagaucuaaaaaaaaaaaaaaaaaaaaaaaaaaaaaaaaaaaaaaaaaaaaaaaaaaaaaaaaaaaaaaaaugcaucccccccccccccccccccccccccccccccaaaggcucuuuucagagccaccagaauu

SEQ ID NO: 6309 - RNA, 1749 nt, Artificial Sequence
  mRNA product Design a-1 comprising derived and/or modified sequence from LASV(Lassa virus/H.sapiens-wt/NGA/2015/ISTH_0543;Clade II)__AVO03639__GPCstabilized (opt5)
gggagagucccgcagucggcguccagcggcucugcuuguucgugugugugucguugcaggccuuauucaagcuuaccaugggccagaucauuaccuucuuucaagaggugccccacgucaucgaagagguuaugaacauugugcugaucgcccucagccugcuugcuauucugaaggggaucuacaauguggccacaugcggacucuucggccuggucuccuuucuucugcucugugggagaucuugcagcacgaccuauaaaggaguguacgaacugcagacacuggagcucgacauggcgaaccugaauaugaccaugccucuuuccuguacaaagaacaauucucaucacuauaucaugguuggcaacgaaaccgggcuggagcucacacugaccaauacgagcauuaucaaccauaaauucugcaaucuuuccgaugcucacaagaaaaaccuguacgaccaugcccucaugucuauuaucagcaccuuucaccuguccauuccgaauuucaaccaguaugaggccaugagcugugauuuuaauggaggcaagaucucugugcaguacaaccugucccacacauaugcugucgacgccgcuaaucauugcggcaccauugccaacggggugcuccaaacauucaugcggauggcguggggaggcagcuacaucgcccuggauucugggugcggauccugggacuguaucaugaccagcuaccaguaucuuguuauucagaacacgacaugggaagaucacugccaguuuucucgccccuccccuaucggcuaccuggggcuccugagccaaagaacccgggacauuuauaucucccgcagacgccggggaacauucaccuggacccucucugauagcgagggcaaugaaacacccggcggguacugucugacgcgguggaugcugauugaggcugagcucaaaugcuuuggaaacaccgccguggcuaaguguaaugaaaaacaugacgaggaguucugcgauaugcugcgccuuuuugacuucaacaagcaggccaucagacggcugaaaacacccgcgcagauguccauccagcucauuaauaaggccgucaacgcucugaucaaugaucaacuuauuaugaagaaccaucugcgcgacaucaugugcauuccuuauugcaauuacagcaaauauugguaccucaaccacaccgugacagggaagaccucucugcccagauguuggcugguguccaauggaagcuaccucaacgaaacgcacuucucugacgauaucgagcagcaggccgacaauaugaucacagagcugcuucaaaaagaauauauugaucggcagggcaagaccccucuggggcucgucgaccuguuuguuuucagcaccuccuuuuaccugaucucuauuuuccuucaccucgugaaaaucccgacacaucgccacauuaccggaaagcccugcccuaaaccccauagacugaaccacaugggcaucuguagcugcggccuguauaagcacccuggggugcccgucaaguggaaacggugaggacuagucccuguucccagagcccacuuuuuuuucuuuuuuugaaauaaaauagccugucuuucagaucuaaaaaaaaaaaaaaaaaaaaaaaaaaaaaaaaaaaaaaaaaaaaaaaaaaaaaaaaaaaaaaaaugcaucccccccccccccccccccccccccccccccaaaggcucuuuucagagccaccagaauu

SEQ ID NO: 6310 - RNA, 1749 nt, Artificial Sequence
  mRNA product Design a-1 comprising derived and/or modified sequence from LASV(Lassa virus/H.sapiens-wt/NGA/2016/ISTH_0009;Clade II)__AVO03571__GPCstabilized (opt5)
gggagagucccgcagucggcguccagcggcucugcuuguucgugugugugucguugcaggccuuauucaagcuuaccaugggccagaucauuaccuucuuucaagaggugccccacgucaucgaagagguuaugaacauugugcugaucgcccucagccugcuugcuauucugaaggggaucuacaauguggccacaugcggacuccugggccuugucuccuuccugcuccugugugggagaucuugcagcacgaccuauaaaggaguguacgaacugcagacacucgagcuggacauggcgucccuuaacaugaccaugccucugucuuguacaaagaauaacagccaucacuauaucaugguuggcaaugaaaccgggcucgagcugacacuuaccaacacguccauuaucaaucauaaauuuugcaaccugucugaugcucacaagaaaaaucucuacgaccaugcccugaugagcauuaucuccaccuuccaccugagcauuccgaacuuuaaucaguaugaggccaugucuugugauuucaacggaggccggaucuccgugcaguacaaucucagccacucuuaugcugucgacgccgcuaaccauugcggcacaauugccaauggggugcugcaaaccuuuaugcgcauggcguggggaggcuccuacaucgcccuugauagcgggugcggaucuugggacuguaucaugacauccuaccaguaucugauuauccagaacaccacgugggaagaucacugccaguucagcagacccuccccuauuggcuaccucgggcugcuuucucaacggacacgcgacaucuauauuagcagacggcgccggggaaccuuuacauggacccuguccgauagcgagggcaacgaaacccccggcggguacugucugacacgcuggaugcucaucgaggcugagcugaagugcuucggaaauacggccguugcuaaauguaacgaaaagcaugacgaggaauuuugcgauaugcuuagacuguucgacuuuaauaaacaggccauccggcgccucaagacccccgcgcagaugucuauucagcugaucaacaaagccgugaaugcucuuauuaacgaucaacugaucaugaagaaucaccucagagacauuaugugcaucccuuauugcaacuacuccaaguauugguaccugaaucacacagucaccgggaaaacaagccugccccgguguuggcucgugucuaacggaagcuaccugaaugaaacccauuucuccgacgauaucgagcagcaggccgacaacaugauuacggagcuucugcaaaaggaauauaucgaucgccagggcaaaacaccucucgggcugguggaccuguucgucuuuucuaccagcuucuaccuuauuuccaucuuucuccaccugguuaagauuccgacccauagacacaucacaggaaaacccugcccuaagccccaucggcugaaucacaugggcauuuguagcugcggccucuauaaccacccuggggugcccgugaaauggaagcgcugaggacuagucccuguucccagagcccacuuuuuuuucuuuuuuugaaauaaaauagccugucuuucagaucuaaaaaaaaaaaaaaaaaaaaaaaaaaaaaaaaaaaaaaaaaaaaaaaaaaaaaaaaaaaaaaaaugcaucccccccccccccccccccccccccccccccaaaggcucuuuucagagccaccagaauu

SEQ ID NO: 6311 - RNA, 1749 nt, Artificial Sequence
  mRNA product Design a-1 comprising derived and/or modified sequence from LASV(Lassa virus/H.sapiens-wt/NGA/2016/ISTH_0017;Clade II)__AVO03567__GPCstabilized (opt5)
gggagagucccgcagucggcguccagcggcucugcuuguucgugugugugucguugcaggccuuauucaagcuuaccaugggccagaucauuaccuucuuucaagaggugccccacgucaucgaagagguuaugaacauugugcugaucgcccucagccugcuugcuauucugaaggggaucuacaauguggccacaugcggacucuucggccuggucuccuuucuucugcucugugggagaucuugcagcacgaccuauaaaggaguguacgaacugcagacacuggagcucgacauggcgucccugaacaugaccaugccucuuucuuguacaaagaauaacagccaucacuauaucaugguuggcaaugaaaccgggcuggagcucacacugaccaacacguccauuaucaaucauaaauucugcaaccuuucugaugcucacaagaaaaaucuguacgaccaugcccucaugagcauuaucuccaccuuucaccugagcauuccgaacuucaaucaguaugaggccaugucuugugauuuuaacggaggcaagaucuccgugcaguacaaucugagccacacauaugcuauugacgccgcuaaccauugcggcaccaucgccaaugggguccuccaaacauucaugcggauggcguggggaggcucuuacaucgcccuggauuccgggugcggaagcugggacuguauuaugaccucuuaccaguaucuuaucauucagaacacgacaugggaagaucacugccaguuuucccgccccagcccuaucggcuaccuggggcuccugucccaaagaacccgggacauuuauaucucucgcagacgccggggaacauucaccuggacccucagcgauuccgagggcaacgaaacacccggcggguacugucugacgcgguggaugcugaucgaggcugagcucaaaugcuuuggaaauaccgccguggcuaaguguaacgaaaaacaugacgaggaguucugcgauaugcugcgccuuuuugacuucaauaagcaggccauuagacggcugaaaacacccgcgcagaugagcauccagcucauuaacaaggccguuaaugcucugaucaacgaucaacuuauuaugaagaaucaucugcgcgacaucaugugcaucccuuauugcaacuacucuaaauauugguaccucaaucacaccgugacagggaagaccucccugcccagauguuggcuggucagcaacggaucuuaccucaaugaaacgcacuucagcgacgauauugagcagcaggccgacaacaugaucacagagcugcuucaaaaagaauauauggaucggcagggcaagaccccucuggggcucguggaccuguuuguguucuccaccucuuuuuaccugauuagcaucuuccuucaccucguccgcauuccgacacauagacacguuaucggaaaacccugcccuaagccccaucggcugaaucacaugggcauuuguuccugcggccuguauaaacacccuggggugcccgugaaguggaagcgcugaggacuagucccuguucccagagcccacuuuuuuuucuuuuuuugaaauaaaauagccugucuuucagaucuaaaaaaaaaaaaaaaaaaaaaaaaaaaaaaaaaaaaaaaaaaaaaaaaaaaaaaaaaaaaaaaaugcaucccccccccccccccccccccccccccccccaaaggcucuuuucagagccaccagaauu

SEQ ID NO: 6312 - RNA, 1749 nt, Artificial Sequence
  mRNA product Design a-1 comprising derived and/or modified sequence from LASV(Lassa virus/H.sapiens-wt/NGA/2018/ISTH_0959;Clade II)__AVV65099__GPCstabilized (opt5)
gggagagucccgcagucggcguccagcggcucugcuuguucgugugugugucguugcaggccuuauucaagcuuaccaugggccagaucauuaccuucuuucaagaggugccccacgucaucgaagagguuaugaacauugugcugaucgcccucagccugcuugcuauucugaaggggaucuacaauguggucacaugcggacucuucggccugguguccuuucuucugcucugugggagaucuugcagcacgaccuauaaaggaguuuacgaacugcagacacuggagcucgacauggccucccugaacaugaccaugccucuuucuuguacaaagaauaacagccaucacuauaucauggugggcaaugaaaccgggcuggagcucacacugaccaacacguccauuaucaaucauaaauucugcaaccuuucugaugcgcacaagaaaaaucuguacgaccaugcucucaugagcauuaucuccaccuuucaccugagcauuccgaacuucaaucaguaugaggccaugucuugugauuuuaacggaggcaagaucuccguccaguacaaucugagccacgccuaugcuauugacgccgcuaaccauugcggcacaaucgccaauggggugcuccaaaccuucaugcggauggcguggggaggcucuuacaucgcccuggauuccgggugcggaagcugggacuguauuaugacaucuuaccaguaucuuaucauucagaacaccacgugggaagaucacugccaguuuucccgccccagcccuaucggcuaccuggggcuccugucccaaagaacacgggacauuuauaucucucgcagacgccggggaaccuucacauggacccucagcgauuccgagggcaacgaaacccccggcggguacugucugacacgguggaugcugaucgaggcugagcucaaaugcuuuggaaauacggccguugcuaaguguaacgaaaaacaugacgaggaguucugcgauaugcugcgccuuuuugacuucaauaagcaggccauuagacggcugaaaacccccgcgcagaugagcauccagcucauuaacaaggccgugaaugcucugaucaacgaucaacuuauuaugaagaaucaucugcgcgacaucaugugcaucccuuauugcaacuacucuaaauauugguaccucaaucacacagucaccgggaagacaucccugcccagauguuggcuggugagcaacggaucuuaccucaaugaaacccacuucagcgacgauauugagcagcaggccgacaacaugaucacggagcugcuucaaaaagaauauauugaucggcagggcaagacaccucuggggcucguggaccuguuugucuucuccaccucuuuuuaccugaucagcauuuuccuucaccucguuaaaaucccgacccaucgccacgugauuggaaagcccugcccuaaaccccauagacugaaucacaugggcaucuguuccugcggccuguauaagcacccuggggugcccgucaaguggaaacggugaggacuagucccuguucccagagcccacuuuuuuuucuuuuuuugaaauaaaauagccugucuuucagaucuaaaaaaaaaaaaaaaaaaaaaaaaaaaaaaaaaaaaaaaaaaaaaaaaaaaaaaaaaaaaaaaaugcaucccccccccccccccccccccccccccccccaaaggcucuuuucagagccaccagaauu

SEQ ID NO: 6313 - RNA, 1749 nt, Artificial Sequence
  mRNA product Design a-1 comprising derived and/or modified sequence from LASV(LASV003-NIG-2008;Clade II)__AIT17580__GPCstabilized (opt5)
gggagagucccgcagucggcguccagcggcucugcuuguucgugugugugucguugcaggccuuauucaagcuuaccaugggccagaucauuaccuucuuucaagaggugccccacgucaucgaagagguuaugaacauugugcugaucgcccucagccugcuugcuauucugaaggggaucuacaauguggccacaugcggacucuucggccuggucuccuuucuucugcucugugggagaucuugcagcacgaccuauaaaggaguguacgaacugcagacacuggagcucgacauggcgucccugaacaugaccaugccucuuucuuguacaaagaauaacagccaucacuauaucaugguuggcaaugaaaccgggcuggagcucacacugaccaacacguccauuaucaaucauaaauucugcaaccuuucugaugcucacaagaaaaaucuguacgaccaugcccucaugagcauuaucuccaccuuucaccugagcauuccgaacuucaaucaguaugaggccaugucuugugauuuuaacggaggcaagaucuccgugcaguacaaucugagccacacauaugcugucgacgccgcuaaccauugcggcaccauugccaauggggugcuccaaacauucaugcggauggcguggggaggcucuuacaucgcccuggauuccgggugcggaagcugggacuguaucaugaccucuuaccaguaucuuauuauccagaacacgacaugggaagaucacugccaguuuucccgccccagcccuauuggcuaccuggggcuccugucccaaagaacccgggacaucuauauuucucgcagacgccggggaacauucaccuggacccucagcgauuccgagagcaacgaaacacccggcggcuacugucugacgcgguggaugcugaucgaggcugagcucaaaugcuuugggaauaccgccguugcuaaguguaacgaaaaacaugacgaggaguucugcgauaugcugcgccuuuuugacuucaauaagcaggccaucagacggcugaaagcgcccgcccagaugucuauucagcucaucaacaaggcugugaaugcccugauuaacgaucaacuuaucaugaagaaucaucugcgcgacauuaugugcaucccuuauugcaacuacuccaaauauugguaccucaaucacacagucaccggcagaacaagccugccccgguguuggcuggugucuaacgggagcuaccucaaugaaacccacuucuccgacgauaucgagcagcaggcugacaacaugauuacggagcugcuucaaaaggaauauauggaucgccagggaaaaacaccucugggccucguggaccuguuugucuucucuaccagcuuuuaccugaucuccauuuuccuucaccucguuaagaucccgacccauagacacgugauugggaaacccugcccuaagccccaucggcugaaucacaugggaaucuguagcugcggccuguauaaacacccuggcgugcccgucaaguggaagcgcugaggacuagucccuguucccagagcccacuuuuuuuucuuuuuuugaaauaaaauagccugucuuucagaucuaaaaaaaaaaaaaaaaaaaaaaaaaaaaaaaaaaaaaaaaaaaaaaaaaaaaaaaaaaaaaaaaugcaucccccccccccccccccccccccccccccccaaaggcucuuuucagagccaccagaauu

SEQ ID NO: 6314 - RNA, 1749 nt, Artificial Sequence
  mRNA product Design a-1 comprising derived and/or modified sequence from LASV(LASV035-NIG-2009;Clade II)__AIT17588__GPCstabilized (opt5)
gggagagucccgcagucggcguccagcggcucugcuuguucgugugugugucguugcaggccuuauucaagcuuaccaugggccagaucauuaccuucuuucaagaggugccccacgucaucgaagagguuaugaacauugugcugaucgcccucagccugcuugcuauucugaaggggaucuacaauguggccacaugcggacucuucggccuggucuccuuucuucugcucugugggagaucuugcagcacgaccuauaaaggaguguacgaacugcagacacuggagcucgacauggcgucccugaacaugaccaugccucuuucuuguacaaagaauaacagccaucacuauaucaugguuggcaaugaaaccgggcuggagcucacacugaccaacacguccauuaucaaucauaaauucugcaaccuuucugaugcucacaagaaaaaucuguacgaccaugcccucaugagcauuaucuccaccuuucaccugagcauuccgaacuucaaucaguaugaggccaugucuugugauuuuaacggaggcaagaucuccgugcaguacaaucugagccacgcuuaugccgucgacgcugccaaccauugcggcacaauugcgaauggggugcuccaaaccuucaugcggauggccuggggaggcucuuacaucgcucuggauuccgggugcggaagcugggacuguaucaugacaucuuaccaguaucuuauuauccagaacaccacgugggaagaucacugccaguuuucccgccccagcccuauuggcuaccuggggcuccugucccaaagaacacgggacaucuauauuucucgcagacgccggggaaccuucacauggacccucagcgauuccgagggcaacgaaacccccggcggguacugucugacacgguggaugcugaucgaggccgagcucaaaugcuuuggaaauacggcuguugccaaguguaacgaaaaacaugacgaggaguucugcgauaugcugcgccuuuuugacuucaauaagcaggcgaucagacggcugaaagcccccgcucagaugagcauucagcucaucaacaaggccgugaaugcucugauuaacgaucaacuuaucaugaagaaucaucugcgcgacauuaugugcaucccuuauugcaacuacucuaaauauugguaccucaaucacaccgucacagggaagaccucccugcccagauguuggcuggugagcaacggaucuuaccucaaugaaacacacuucagcgacgauaucgagcagcaggccgacaacaugauuaccgagcugcuucaaaaagaauauaucgaucggcagggcaagacgccucuggggcucguggaccuguuugucuucuccacaucuuuuuaccugauuagcaucuuccuucaccucguuaaaauuccgacccaucgccacgugaucggaaagcccugcccuaaaccccauagacugaaucacaugggcauuuguuccugcggccuguauaagcacccuggggugcccgucaaguggaaacggugaggacuagucccuguucccagagcccacuuuuuuuucuuuuuuugaaauaaaauagccugucuuucagaucuaaaaaaaaaaaaaaaaaaaaaaaaaaaaaaaaaaaaaaaaaaaaaaaaaaaaaaaaaaaaaaaaugcaucccccccccccccccccccccccccccccccaaaggcucuuuucagagccaccagaauu

SEQ ID NO: 6315 - RNA, 1749 nt, Artificial Sequence
  mRNA product Design a-1 comprising derived and/or modified sequence from LASV(LASV1000-NIG-2009;Clade II)__AIT17782__GPCstabilized (opt5)
gggagagucccgcagucggcguccagcggcucugcuuguucgugugugugucguugcaggccuuauucaagcuuaccaugggccagaucauuaccuucuuucaagaggugccccacgucaucgaagagguuaugaacauugugcugaucgcccucagccugcuugcuauucugaaggggaucuacaauguggccacaugcggacucuucggccuggucuccuuucuucugcucugugggagaucuugcagcacgaccuauaaaggaguguacgaacugcagacacuggagcucgacauggcgucccugaacaugaccaugccucuuucuuguacaaagaauaacagccaucacuauaucaugguuggcaaugaaaccgggcuggagcucacacugaccaacacguccauuaucaaucauaaauucugcaaccuuucugaugcucacaagaaaaaucuguacgaccaugcccucaugagcauuaucuccaccuuucaccugagcauuccgaacuucaaucaguaugaggccaugucuugugauuuuaacggaggcaagaucuccgugcaguacaaucugagccacacauaugcugucgacgccgcuaaccauugcggcaccauugccaauggggugcuccaaacauucaugcggauggcguggggaggcucuuacaucgcccuggauuccgggugcggaagcugggacuguaucaugaccucuuaccaguaucuuauuauccagaacacgacaugggaagaucacugccaguuuucccgccccagcccuauuggcuaccuggggcuccugucccaaagaacccgggacaucuauauuucucgcagacgccggggaacauucaccuggacccucagcgauuccgagggcaacgaaacacccggcggguacugucugacgcgguggaugcugaucgaggcugagcucaaaugcuuuggaaauaccgccguugcuaaguguaacgaaaaacaugacgaggaguucugcgauaugcugcgccuuuuugacuucaauaagcaggccaucaaaagacugaagacacccgcgcagaugagcauucagcucaucaacaaggccgugaaugcucugauuaacgaucaacuuaucaugaaaaaucaucugcgggacauuaugugcaucccuuauugcaacuacucuaaguauugguaccucaaucacaccgucacagggaaaaccucccugccccgcuguuggcuggugagcaacggaucuuaccucaaugaaacgcacuucagcgacgauaucgagcagcaggccgacaacaugauuacagagcugcuucaaaaggaauauaucgauagacagggcaaaaccccucuggggcucguggaccuguuugucuucuccaccucuuuuuaccugauuagcaucuuccuucaccucguuaagauuccgacacaucggcacguggugggaaaacccugcccuaagccccaucgccugaaucacaugggcaucuguuccugcggccuguauaagcacccugggguccccgugaaauggaagagaugaggacuagucccuguucccagagcccacuuuuuuuucuuuuuuugaaauaaaauagccugucuuucagaucuaaaaaaaaaaaaaaaaaaaaaaaaaaaaaaaaaaaaaaaaaaaaaaaaaaaaaaaaaaaaaaaaugcaucccccccccccccccccccccccccccccccaaaggcucuuuucagagccaccagaauu

SEQ ID NO: 6316 - RNA, 1749 nt, Artificial Sequence
  mRNA product Design a-1 comprising derived and/or modified sequence from LASV(LASV221-NIG-2010;Clade II)__AIT17624__GPCstabilized (opt5)
gggagagucccgcagucggcguccagcggcucugcuuguucgugugugugucguugcaggccuuauucaagcuuaccaugggccagaucauuaccuucuuucaagaggugccccacgucaucgaagagguuaugaacauugugcugaucgcccucagccugcuugcuauucugaaggggaucuacaauguggccacaugcggacucuucggccuggucuccuuucuucugcucugugggagaucuugcagcacgaccuauaaaggaguguacgaacugcagacacuggagcucgacauggcgucccugaacaugaccaugccucuuucuuguacaaagaauaacagccaucacuauaucaugguuggcaaugaaaccgggcuggagcucacacugaccaacacguccauuaucaaucauaaauucugcaaccuuucugaugcucacaagaaaaaucuguacgaccaugcccucaugagcauuaucuccaccuuucaccugagcauuccgaacuucaaucaguaugaggccaugucuugugauuuuaacggaggcaagaucuccgugcaguacaaucugagccacacauaugcuauugacgccgcuaaccauugcggcaccaucgccaaugggguccuccaaacauucaugcggauggcguggggaggcucuuacaucgcccuggauuccgggugcggaagcugggacuguauuaugaccucuuaccaguaucuuaucauucagaacacgacaugggaagaucacugccaguuuucccgccccagcccuaucggcuaccuggggcuccugucccaaagaacccgggacauuuauaucucucgcagacgccggggaacauucaccuggacccucagcgauuccgagggcaacgaaacacccggcggguacugucugacgcgguggaugcugaucgaggcugagcucaaaugcuuuggaaauaccgccguggcuaaguguaacgaaaaacaugacgaggaguucugcgauaugcugcgccuuuuugacuucaauaagcaggccauuagacggcugaaaacacccgcgcagaugagcauccagcucauuaacaaggccguuaaugcucugaucaacgaucaacuuauuaugaagaaucaucugcgcgacaucaugugcaucccuuauugcaacuacucuaaauauugguaccucaaucacaccgugacagggaagaccucccugcccagauguuggcuggucagcaacggaucuuaccucaaugaaacgcacuucagcgacgauauugagcagcaggccgacaacaugaucacagagaugcugcaaaaagaauauauggaucggcagggcaagaccccucuugggcugguggaccucuuuguguucuccaccucuuuuuaccugauuagcaucuuccugcaccuugucaaaauuccgacacaucgccacguuaucggaaagcccugcccuaaaccccauagacucaaucacaugggcauuuguuccugcggccuguauaagcacccuggggugcccgugaaguggaaacggugaggacuagucccuguucccagagcccacuuuuuuuucuuuuuuugaaauaaaauagccugucuuucagaucuaaaaaaaaaaaaaaaaaaaaaaaaaaaaaaaaaaaaaaaaaaaaaaaaaaaaaaaaaaaaaaaaugcaucccccccccccccccccccccccccccccccaaaggcucuuuucagagccaccagaauu

SEQ ID NO: 6317 - RNA, 1749 nt, Artificial Sequence
  mRNA product Design a-1 comprising derived and/or modified sequence from LASV(LASV237-NIG-2010;Clade II)__AIT17638__GPCstabilized (opt5)
gggagagucccgcagucggcguccagcggcucugcuuguucgugugugugucguugcaggccuuauucaagcuuaccaugggccagaucauuaccuucuuucaagaggugccccacgucaucgaagagguuaugaacauugugcugaucgcccucagccugcuugcuauucugaaggggaucuacaauguggccacaugcggacucuucggccuggucuccuuucuucugcucugugggagaucuugcagcacgaccuauaaaggaguguacgaacugcagacacuggagcucgacauggcgucccugaacaugaccaugccucuuucuuguacaaagaauaacagccaucacuauaucaugguuggcaaugaaaccgggcuggagcucacacugaccaacacguccauuaucaaucauaaauucugcaaccuuucugaugcucacaagaaagaccuguacgaucaugcccucaugagcauuaucuccaccuuucaccugagcauuccgaauuucaaccaguaugaggccaugucuugugacuuuaauggaggcaagaucuccgugcaguacaaccugagccacacauaugcugucgaugccgcuaaucauugcggcaccauugccaacggggugcuccaaacauucaugcggauggcguggggaggcucuuacaucgcccuggacuccgggugcggaagcugggauuguaucaugaccucuuaccaguaucuuauuauccagaauacgacaugggaagaccacugccaguuuucccgccccagcccuauuggcuaccuggggcuccugucccaaagaacccgggauaucuauauuucucgcagacgccggggaacauucaccuggacccucagcgacuccgagggcaacgaaacacccggcggguacugucugacgcgguggaugcugaucgaggcugagcucaaaugcuuuggaaacaccgccguugcuaaguguaaugaaaaacaugaugaggaguucugcgacaugcugcgccuuuuugauuucaacaagcaggccaucagacggcugaaaacacccgcgcagaugagcauucagcucaucaauaaggccgugaacgcucugauuaaugaccaacuuaucaugaagaaccaucugcgcgacauuaugugcaucccuuauugcaauuacucuaaauauugguaccucaaccacaccgucacagggaagaccucccugcccagauguuggcuggugagcaauggaucuuaccucaacgaaacgcacuucagcgaugacaucgagcagcaggccgauaauaugauuacagagcugcuucaaaaagaauauauggaccggcagggcaagaccccucuggggcucguggaucuguuugucuucuccaccucuuuuuaccugaucagcauuuuccuucaccucaucaaaauuccgacacaucgccacaucaccggaaagcccugcccuaaaccccauagacugaaccacaugggcauuuguuccugcggccuguauaagcacccugggguucccgugaaguggaaacggugaggacuagucccuguucccagagcccacuuuuuuuucuuuuuuugaaauaaaauagccugucuuucagaucuaaaaaaaaaaaaaaaaaaaaaaaaaaaaaaaaaaaaaaaaaaaaaaaaaaaaaaaaaaaaaaaaugcaucccccccccccccccccccccccccccccccaaaggcucuuuucagagccaccagaauu

SEQ ID NO: 6318 - RNA, 1749 nt, Artificial Sequence
  mRNA product Design a-1 comprising derived and/or modified sequence from LASV(LASV253-NIG-2011;Clade II)__AIT17670__GPCstabilized (opt5)
gggagagucccgcagucggcguccagcggcucugcuuguucgugugugugucguugcaggccuuauucaagcuuaccaugggccagaucauuaccuucuuucaagaggugccccacgucaucgaagagguuaugaacauugugcugaucgcccucagccugcuugcuauucugaaggggaucuacaauguggccacaugcggacucuucggccuggucuccuuucuucugcucugugggagaucuugcagcacgaccuauaaaggaguguacgaacugcagacacuggagcucgacauggcgucccugaacaugaccaugccucuuucuuguacaaagaauaacagccaucacuauaucaugguuggcaaugaaaccgggcuggagcucacacugaccaacacguccauuaucaaucauaaauucugcaaccuuucugaugcucacaagaaaaaucuguacgaccaugcccucaugagcauuaucuccaccuuucaccugagcauuccgaacuucaaucaguaugaggccaugucuugugauuuuaacggaggcaagaucuccgugcaguacaaucugagccacacauaugcugucgacgccgcuaaccauugcggcaccauugccaauggggugcuccaaacauucaugcggauggcguggggaggcucuuacaucgcccuggauuccgggugcggaagcugggacuguaucaugaccucuuaccaguaucuuauuauccagaacacgacaugggaagaucacugccaguuuucccgccccagcccuauuggcuaccuggggcuccugucccaaagaacccgggacaucuauauuucucgcagacgccggggaacauucaccuggacccucagcgauuccgagggcaacgaaacacccggcggguacugucugacgcgguggaugcugaucgaggcugagcucaaaugcuuuggaaauaccgccguugcuaaguguaacgaaaaacaugacgaggaguucugcgauaugcugcgccuuuuugacuucaauaagcaggccaucagacggcugaaagcgcccgcccagaugagcauucagcucaucaacaaggcugugaaugcccugauuaacgaucaacuuaucaugaagaaucaucugcgcgacauuaugugcaucccuuauugcaacuacucuaaauauugguaccucaaucacacagucaccgggagaacaucccugccccgguguuggcuggugagcaacggaucuuaccucaaugaaacccacuucagcgacgauaucgagcagcaggcugacaacaugauuacggagcugcuucaaaaggaauauaucgaucgccagggcaaaacaccucuggggcucguggaccuguuugucuucuccaccucuuuuuaccugauuagcaucuuccuucaccucguuaagauuccgacccauagacacaucauuggaaaacccugcccuaagccccaucggcugaaucacaugggcaucuguuccugcggccuguauaaacacccuggggugcccgugaaguggaagcgcugaggacuagucccuguucccagagcccacuuuuuuuucuuuuuuugaaauaaaauagccugucuuucagaucuaaaaaaaaaaaaaaaaaaaaaaaaaaaaaaaaaaaaaaaaaaaaaaaaaaaaaaaaaaaaaaaaugcaucccccccccccccccccccccccccccccccaaaggcucuuuucagagccaccagaauu

SEQ ID NO: 6319 - RNA, 1749 nt, Artificial Sequence
  mRNA product Design a-1 comprising derived and/or modified sequence from LASV(LASV254-NIG-2011;Clade II)__AIT17674__GPCstabilized (opt5)
gggagagucccgcagucggcguccagcggcucugcuuguucgugugugugucguugcaggccuuauucaagcuuaccaugggccagaucauuaccuucuuucaagaggugccccacgucaucgaagagguuaugaacauugugcugaucgcccucagccugcuugcuauucugaaggggaucuacaauguggccacaugcggacucuucggccuggucuccuuucuucugcucugugggagaucuugcagcacgaccuauaaaggaguguacgaacugcagacacuggagcucgacaugaccaaccugaauaugacaaugccucuuuccuguaccaagaacaauucucaucacuauaucaugguuggcaacgaaacagggcuggagcucacccugacgaauaccagcauuaucaaccauaaauucugcaaucuuuccgaugcgcacaagaaaaaccuguacaaucaugcucucaugucuauuaucagcacauuucaccuguccauuccgaacuucaaucaguaugaggccaugagcugugacuuuaacggaggcaagaucucugugcaguacaaucugucccacagcuaugccgucgaugcugccaaccauugcggcaccauugcuaacggggugcuccaaacauucaugcggauggccuggggaggcucuuacaucgcgcuggacuccgggugcggaaauugggauuguaucaugaccagcuaccaguaucuuauuauccagaacacgacaugggaagaccacugccaguuuucucgccccuccccuauuggcuaccuggggcuccugagccaaagaacccgggauaucuauauuucccgcagacgccggggaacauucaccuggacccucucugacagcgagggcaaugaaacacccggcggguacugucugacgcgguggaugcugaucgaggccgagcucaaaugcuuuggaaacaccgcuguugccaaguguaaugaaaaacaugaugaggaguucugcgacaugcugcgccuuuuugauuucaacaagcaggcuaucagacggcugaaaacacccgcccaggcgaauauucagcucaucaacaaggccgugaaugcucugauuaacgaccaacuuaucaugaagaaucaucugcgcgauauuaugugcaucccuuauugcaacuacuccaaauauugguaccucaaucacaccgucacagggaagaccagccugcccagauguuggcuggugucuaacggauccuaccucaaugaaacgcacuucagcgacgacaucgagcagcaggccgauaacaugauuacagagcugcuucaaaaagaauauauggaccggcagggcaagaccccucuggggcucguggaucuguuugucuucucuaccagcuuuuaccugaucuccauuuuccuucaccucguuaaaaucccgacacaucgccacgugauuggaaagcccugcccuaaaccccauagacugaaccacaugggcaucuguucuugcggccuguauaagcacccuggggugcccgucaaguggaaacggugaggacuagucccuguucccagagcccacuuuuuuuucuuuuuuugaaauaaaauagccugucuuucagaucuaaaaaaaaaaaaaaaaaaaaaaaaaaaaaaaaaaaaaaaaaaaaaaaaaaaaaaaaaaaaaaaaugcaucccccccccccccccccccccccccccccccaaaggcucuuuucagagccaccagaauu

SEQ ID NO: 6320 - RNA, 1749 nt, Artificial Sequence
  mRNA product Design a-1 comprising derived and/or modified sequence from LASV(Nig08-A19;Clade III)__ADU56618__GPCstabilized (opt5)
gggagagucccgcagucggcguccagcggcucugcuuguucgugugugugucguugcaggccuuauucaagcuuaccaugggccagaucgugaccuucuuucaagaggucccccacguuauugaagaggugaugaacaucgugcugauugcccucagcauccuggcuauucuuaaggggcuguacaauaucgccacaugcggacucaucggccuggucacguuccuucugcucuccgggagaucuuguagcaugaccuauaaaggaguguacgaacugcagacacuggagcucaacaugaauacccugaacaugacaaugccucuuuccugcaccaagaauaacucucaucacuauauuaugguuggcaaugaaacagggcuggagcucacccugacgaacaccagccuucugcaucacaaauuuuguaaucucuccgacgcgcauaagaaaaaccuguacgaucacacacugaugucuaucauuagcaccuuccaccucuccaucccgaauuuuaaccaguaugaggcuaugagcugcgacuucaauggaggcaagauuacagugcaguacaaccugucucauuccuaugccaucgaugccgcuaaucacuguggcaccgucgccaacggggugcuucaaacguuuaugcggauggcuuggggaggcagcuacauugcccuggacucugggugcggaaagugggauugcaucaugacauccuaccaguaucucaucauucagaacaccacaugggaagaccauugucaguucagcagacccucuccuaucggcuaccuggggcuucugucccaacggacccgcgauauuuauaucagcagacggcgccggggaaccuuuacauggacgcuguccgacucugagggcaaugaaacccccggcggguacugccucacacgcuggaugcugauugaggcggagcuuaaauguuucggaaacaccgccguugcuaagugcaaugaaaaacacgaugaggaauuuugugacaugcugagacucuucgauuuuaacaagcaggccauccggcgccugaaagcucccgcccagaugagcauccagcuuauuaauaaggcggugaacgcccugaucaaugaccaacucauuaugaagaaccaccugagagauaucaugugcauuccuuauugcaauuacuccaaauauugguaccugaaccauacaagcaccgggcggacgucucucccccgcugcuggcuggucuccaauggaagcuaccuuaacgaaacacacuucucugacgacaucgagcagcaggcugauaauaugaucaccgagaugcugcaaaaggaauaucucgacagacagggcaaaaccccucuggggcugguggaucuuuucguguuuagcacauccuucuaccucauuucuaucuuucugcaucuggucaagauuccgacccaccggcauaucguuggaaaacccuguccuaagccccaccgccucaaccacaugggcauuugcagcuguggccuguauaaacagccuggggugcccgugagauggaagcggugaggacuagucccuguucccagagcccacuuuuuuuucuuuuuuugaaauaaaauagccugucuuucagaucuaaaaaaaaaaaaaaaaaaaaaaaaaaaaaaaaaaaaaaaaaaaaaaaaaaaaaaaaaaaaaaaaugcaucccccccccccccccccccccccccccccccaaaggcucuuuucagagccaccagaauu

SEQ ID NO: 6321 - RNA, 1752 nt, Artificial Sequence
  mRNA product Design a-1 comprising derived and/or modified sequence from LASV(G1180-SLE-2010;Clade IV)__AIT17168__GPCstabilized (opt5)
gggagagucccgcagucggcguccagcggcucugcuuguucgugugugugucguugcaggccuuauucaagcuuaccaugggccagaucgugaccuucuuucaagaggucccccacguuauugaagaggugaugaacaucgugcugauugcccucagcauccuggcuguccuuaaggggcuguacaauuucgccacaugcggacucgugggccugcuuacguuucugcuccugugugggagauccugcaccgcgucucgguauaaaggaguuuacgaacugcagacacucgagcugaacauggaaacccuuaauaugacaaugccucugagcuguaccaagaacaauucccaucacuauauuauggugggcaacgagacagggcucgagcugacccuuacgaauaccucuaucaucaaccauaaauucugcaaucugagcgacgcucacaagaaaaaccucuacgaucaugcccugauguccauuaucucuacauuucaccugagcauuccgaauuucaaccaguaugaagccauguccugugacuuuaauggaggcaagaucagcguccaguacaaccucucucacuccuaugcuggcgaugccgcuaaucauugcgggaccguggccaacggaguucugcaaacauucaugcgcauggcguggggcgggagcuacauugcccuugacucuggaugcggcuccugggauuguaucaugaccagcuaccaguaucugauuauccagaacacgacaugggaggaccauugccaguuuucuagacccuccccuaucggguaccucggacugcuuagccaacggacccgcgauauuuauaucuccagacggcgccggggcacauucaccuggacccugucugacagcgaaggcaaggauacacccgggggauacugucugacgcgcuggaugcucauugaggcugagcugaaaugcuuuggcaauaccgccguggcuaaguguaacgaaaaacacgacgaggaguucugcgauaugcuuagacuguuugacuucaauaagcaggccauccagcggcucaaagcgcccgcccagauguccauucaacugaucaacaaggcugucaaugcccuuaucaacgaucagcugauuaugaagaaucaccuccgcgacaucaugugcauuccuuauugcaacuacagcaaauauugguaccugaaucauacaaccacaggaaagaccucucugcccaaauguuggcucguguccaacggcagcuaccugaaugaaacgcacuucucugacgauaucgagcagcaagcugacaacaugauuacagagaugcuucagaaggaauauauggagagacaggggaaaaccccucugggacucguggaucuguuugucuucagcaccuccuuuuaccugaucucuaucuuccuucaucucguuaagauuccgacacaccggcauaucgugggcaaaagcugccccaagccucaccgccugaaucacaugggcauuuguuccugcgggcuguauaagcagcccggagugccugucaaauggaagagaugaggacuagucccuguucccagagcccacuuuuuuuucuuuuuuugaaauaaaauagccugucuuucagaucuaaaaaaaaaaaaaaaaaaaaaaaaaaaaaaaaaaaaaaaaaaaaaaaaaaaaaaaaaaaaaaaaugcaucccccccccccccccccccccccccccccccaaaggcucuuuucagagccaccagaauu

SEQ ID NO: 6322 - RNA, 1752 nt, Artificial Sequence
  mRNA product Design a-1 comprising derived and/or modified sequence from LASV(G1442-SLE-2011;Clade IV)__AIT17180__GPCstabilized (opt5)
gggagagucccgcagucggcguccagcggcucugcuuguucgugugugugucguugcaggccuuauucaagcuuaccaugggccagaucgugaccuucuuucaagaggucccccacguuauugaagaggugaugaacaucgugcugauugcccucagcauccuggcuguccuuaaggggcuguacaauguggccacaugcggacucauuggccugguuacguuccuucugcucugugggagauccugcaccacaacccuguauaaaggaguguacgaacugcagacacucgagcugaacauggaaacccuuaauaugacaaugccucugucuuguaccaagaacaauagccaucacuauauccgggucggcaacgagacggggcucgagcugacccuuacaaauaccuccaucauuaaccauaaauuuugcaaucugucugacgcgcacaagaaaaaccucuacgaucaugcucugaugagcaucauuuccacauuccaccugucuaucccgaauuuuaaccaguaugaagccaugagcugugacuucaauggaggcaagauuuccgugcaguacaaccucagccacucuuaugccggcgaugcugccaaucauugcgggaccguugcuaacggagugcugcaaacguuuaugcgcauggccuggggcggguccuacaucgcgcuugacagcggaugcggcaacugggauuguauuaugacaucuuaccaguaucugaucauccagaauaccacaugggacgaucacugccaguucucccggcccagcccuauuggguaccucggacugcuuucucaacgcaccagagacgucuauaucucccggcgccgccggggcaccuuuacauggacgcugagcgauuccgagggcaaggacacccccgggggauacugucugacaagauggaugcucauugaagccgagcugaaaugcuucggcaacaccgcuguggccaaguguaaugagaaacaugaugaagaguuuugcgacaugcuucggcuguucgauuuuaacaagcaggcuauccagcgccucaaagcccccgcgcagaugucuauucaacugaucaauaaggccgugaacgcucuuaucaaugaccagcugauuaugaagaaccaccucagagacaucaugugcauuccuuauugcaauuacagcaaauauugguaccugaacaauacagccaccggaaagacgucccugcccaaauguuggcucaucagcaacggcucuuaccugaaugagacacacuucuccgaugacauugaacaggaggcugauaacaugaucaccgagaugcuucaaaaggaauauauggagcggcaggggaaaaccccucugggacucgucgaccuguucguuuuuagcacaucuuucuaccugaucagcauuuuucuucaucucgugaagaucccgacccaccgccauauugugggcaaauccugccccaagccucacagacugaaucauaugggcaucuguucuugcgggcuguauaagcagcccggagucccugugcgguggaaacgcugaggacuagucccuguucccagagcccacuuuuuuuucuuuuuuugaaauaaaauagccugucuuucagaucuaaaaaaaaaaaaaaaaaaaaaaaaaaaaaaaaaaaaaaaaaaaaaaaaaaaaaaaaaaaaaaaaugcaucccccccccccccccccccccccccccccccaaaggcucuuuucagagccaccagaauu

SEQ ID NO: 6323 - RNA, 1752 nt, Artificial Sequence
  mRNA product Design a-1 comprising derived and/or modified sequence from LASV(G3010-SLE-2013;Clade IV)__AIT17344__GPCstabilized (opt5)
gggagagucccgcagucggcguccagcggcucugcuuguucgugugugugucguugcaggccuuauucaagcuuaccaugggccagaucgugaccuucuuucaagaggucccccacguuauugaagaggugaugaacaucgugcugauugcccucagcauccuggcuguccuuaaggggcuguacaauuucgccacaugcggacucgugggccugguuacguuucuucugcucugugggagauccugcaccacaucucuguauaaaggaguguacgaacugcagacccucgagcugaacauggaaacacuuaauaugaccaugccucugagcuguacaaagaacaauucccaucacuauauuauggucggcaacgagaccgggcucgagcugacgcuuaccaauacaucuaucaucaaccauaaauucugcaaucugagcgacgcgcacaagaaaaaccucuacaaucaugcucugauguccauuaucucuaccuuucaccugagcauuccgaacuucaaucaguaugaagccauguccugugauuuuaacggaggcaagaucagcgugcaguacaaucucucucacuccuaugccggcgacgcugccagccauugcgggacaguugcuaacggagugcugcaaaccuucaugcggauggccuggggcgggucuuacauugcgcuugauuccggaugcggcaagugggacuguaucaugacgagcuaucaguaccugauuauccagaacacaaccugggaggaucacugccaguuuucucgccccuccccuaucggguaucucggacugcuuagccaaagaacacgggacauuuacaucucccgcagacgccggggcaccuucaccuggacacugucugauagcgaaggcaaagacacgcccgggggauauugucugacccgguggaugcucauugaggccgagcugaagugcuuuggcaauacagcugucgccaaauguaacgaaaagcaugaugaggaguucugcgacaugcuucgccuguuugauuucaauaaacaggcuauccagagacucaagacccccgcccagauguccauucaacugaucaacaaggcggugaaugcccuuaucaacgaccagcugauuaugaaaaaucaccuccgggauaucaugugcauuccuuacugcaacuauagcaaguacugguaccugaaucacacaaccacgggaaaaacaucucugcccaaguguuggcucguguccaacggcagcuaucugaaugaaacccauuucucugacgacaucgagcagcaagcugauaacaugauuaccgagaugcuucagaaagaauacauggagcgccaggggaagacaccucugggacucgucgaccuguuuguuuucagcaccuccuuuuaucugaucucuaucuuccuucaccucgugaaaauuccgacacauagacacaucgugggcaagagcugccccaagccucaucggcugaaucacaugggcauuuguuccugcgggcuguacaaacagcccggagucccugugcgcuggaagagaugaggacuagucccuguucccagagcccacuuuuuuuucuuuuuuugaaauaaaauagccugucuuucagaucuaaaaaaaaaaaaaaaaaaaaaaaaaaaaaaaaaaaaaaaaaaaaaaaaaaaaaaaaaaaaaaaaugcaucccccccccccccccccccccccccccccccaaaggcucuuuucagagccaccagaauu

SEQ ID NO: 6324 - RNA, 1752 nt, Artificial Sequence
  mRNA product Design a-1 comprising derived and/or modified sequence from LASV(G502-SLE-2009;Clade IV)__AIT17126__GPCstabilized (opt5)
gggagagucccgcagucggcguccagcggcucugcuuguucgugugugugucguugcaggccuuauucaagcuuaccaugggccagaucgugaccuucuuucaagaggucccccacguuauugaagaggugaugaacaucgugcugauugcccucagcauccuggcuguccuuaaggggcuguacaauuucgccacaugcggacucgugggccugcuuacguuucugcuccugugugggagauccugcaccacaggacuguauaaaggcguuuacgaacuccagacccuggagcuuaacauggaaacacugaauaugaccaugccucucucuuguacaaagaacaauagccaucacuauauuaugguggggaacgagaccggacuggagcuuacgcugaccaauacauccaucaucaaccauaaauucugcaaucucucugacgcgcacaagaaaaaccuguacgaucaugcucugaugagcauuaucuccaccuuucaccucucuauuccgaauuucaaccaguaugaagccaugagcugugacuuuaauggcggcaagaucuccguccaguacaaccugagccacucuuaugccggggaugcugccgaccauugcggaacaguggcuaauggcguucuucaaaccuucaugcggauggccuggggaggguccuacauugcgcuggauagcggcugcgggagaugggacuguaucaugacgucuuaccaguaucucauuauccagaacacaaccugggaggaucacugccaguuuucccggcccagcccuaucggauaccugggccuucugucucaacgcacaagagacauuuauaucucccggcgccgccggggcaccuucaccuggacacugagcgauuccgaagggaaggacacgcccggaggcuacugucucaccagauggaugcugauugaggccgagcuuaaaugcuuugggaacacagcuguggccaaguguaaugaaaaacaugaugaggaguucugcgacaugcugcggcucuuugauuucaacaagcaggcuauccagcgccugaaagcccccgcgcagaugucuauucaacuuaucaauaaggccgucaacgcucugaucaaugaccagcucgugaugaagaaccaccugagagacauuaugugcaucccuuauugcaauuacagccgguauugguaccugaaccacaccacaaccggccgcacgucccuccccaaauguuggcuggugagcaaugggucuuaccuuaacgaaacacauuucuccgaugacauugagcagcaagccgauaauaugaucaccgagaugcugcagaaggaauauauggagagacagggaaaaaccccucucggccuggucgaccuguuuguuuucagcacaucuuuuuaccuuauuagcaucuuccuccaccuggugaagaucccgacccaucggcacauugugggcaaauccugccccaagccucaucgccugaaccacauggggaucuguucuugcggacucuauaaacagcccggcgucccugugaaguggaagagaugaggacuagucccuguucccagagcccacuuuuuuuucuuuuuuugaaauaaaauagccugucuuucagaucuaaaaaaaaaaaaaaaaaaaaaaaaaaaaaaaaaaaaaaaaaaaaaaaaaaaaaaaaaaaaaaaaugcaucccccccccccccccccccccccccccccccaaaggcucuuuucagagccaccagaauu

SEQ ID NO: 6325 - RNA, 1752 nt, Artificial Sequence
  mRNA product Design a-1 comprising derived and/or modified sequence from LASV(G733-SLE-2010;Clade IV)__AIT17154__GPCstabilized (opt5)
gggagagucccgcagucggcguccagcggcucugcuuguucgugugugugucguugcaggccuuauucaagcuuaccaugggccagaucgugaccuucuuucaagaggucccccacguuauugaagaggugaugaacaucgugcugauugcccucagcauccuggcuguccuuaaggggcuguacaauuucgccacaugcggaauugugggccucguuuccuuucugcuucugugugggagaucuugcacgaccagccucuauaaaggaguguacgaacugcagacacuggagcucaacauggaaacccugaauaugacaaugccucuuuccuguaccaagaacaauucucaucacuauaucauggucggcaacgagacagggcuggagcucacccugacgaauaccagcaucauuaaccauaaauucugcaaucuuuccgacgcgcacaagaaaaaccuguacgaucaugcucucaugucuaucauuagcacauuucaccuguccaucccgaauuucaaccaguaugaagccaugagcugugacuuuaauggaggcaagauuucugugcaguacaaccugucccacagcuaugccggcgaugcugccaaucauugcgggaccaucgcuaacggaguucuccaaacauucaugcggauggccuggggcgggucuuacauugcgcuggacuccggaugcgauagaugggacuguaucaugaccagcuaccaguaucuuaucauucagaacacgacaugggaggaucacugccaguuuucucggcccuccccuaucggcuaccuggggcuccugagccaacgcaccagagacauuuauaucucccggcgccgccggggaacauucaccuggacccucucugauagcgaaggcaaggacacacccggcggguacugucugacgagauggaugcugauugaggccgagcucaaaugcuuuggaaauaccgcuguggccaaguguaacgaaaaacaugaugaggaguucugcgacaugcugcggcuuuuugauuucaauaagcaggcuauccagcgccugaaagcccccgcgcagauguccauccaacucauuaacaaggccgucaaugcucugaucaacgaccagcuuauuaugaagaaucaccugagagacaucaugugcauuccuuauugcaacuacagcaaauauugguaccucaaucacacaaccacagggaagaccucucugcccaaauguuggcugguguccaacggaagcuaccucaaugaaacgcauuucucugaugacaucgagcagcaagccgauaacaugaucacagagaugcugcagaaggaauauauggagcggcagggcaaaaccccucuugggcugguggaccucuuugucuucagcaccuccuuuuaccugauuucuaucuuccugcaccuuguuaagauuccgacacaucgccacguggugggaaaaagcugccccaagccucauagacucaaucacaugggcaucuguuccugcggccuguaugggcagcccggagucccugugaaguggaaacggugaggacuagucccuguucccagagcccacuuuuuuuucuuuuuuugaaauaaaauagccugucuuucagaucuaaaaaaaaaaaaaaaaaaaaaaaaaaaaaaaaaaaaaaaaaaaaaaaaaaaaaaaaaaaaaaaaugcaucccccccccccccccccccccccccccccccaaaggcucuuuucagagccaccagaauu

SEQ ID NO: 6326 - RNA, 1752 nt, Artificial Sequence
  mRNA product Design a-1 comprising derived and/or modified sequence from MOPV/LASV reassortant(IGS-1;Clade IV)__AFY05576__GPCstabilized (opt5)
gggagagucccgcagucggcguccagcggcucugcuuguucgugugugugucguugcaggccuuauucaagcuuaccaugggccagaucgugaccuucuuucaagaggucccccacguuauugaagaggugaugaacaucgugcugauugcccucagcguccuggcugugcuuaaggggcuguacaauuucgccacaugcggacucguuggccuggugacguuucuucugcucugugggagauccugcaccacaucucuguauaaaggagucuacgaacugcagacccucgagcugaacauggaaacacuuaauaugaccaugccucugagcuguacaaagaacaauucccaucacuauaucauggugggcaacgagaccgggcucgagcugacgcuuaccaauacaucuauuaucaaccauaaauucugcaaucugagcgacgcgcacaagaaaaaccucuacgaucaugcucugauguccaucauuucuaccuuucaccugagcaucccgaauuucaaccaguaugaagccauguccugugacuuuaauggaggcaagauuagcguucaguacaaccucucucacuccuaugccggcgaugcugccaaucauugcgggacaguggcuaacggaguccugcaaaccuucaugcggauggccuggggcgggagcuacaucgcgcuugacucuggaugcggcaacugggauuguauuaugacguccuaccaguaucugaucauucagaauacaaccugggaggaccacugccaguuuagcagacccucuccuaucggguaccucggacugcuuucccaacggacacgcgauaucuauauuagcagacggcgccggggcaccuucaccuggacacuguccgacucugaaggcgaggauacgcccgggggauacugucugacccgcuggaugcucaucgaggccgaacugaagugcuuuggcaacacagcuguggccaaauguaaugagaagcaugacgaagaguucugcgauaugcuuagacuguuugacuucaacaaacaggcuauucagcggcucaaggcccccgcgcagaugagcauccaacugauuaauaaagccgugaacgcucuuaucaaugaucagcugaucaugaagaaccaccuccgcgacauuaugugcaucccuuauugcaauuacuccaaguauugguaccugaaccacaccacaaccggaagaacgagccugcccaaauguuggcucgucucuaauggcuccuaccugaacgagacacauuucagcgacgauauugagcagcaagccgacaauaugaucaccgaaaugcuucagaaggaguauauggaacggcaggggaaaaccccucugggacucguugaucuguuuguguucucuaccagcuuuuaccugauuuccaucuuccuucaccucgugaagaucccgacacaucgccacauugucggcaaaucuugccccaagccucauagacugaaccacaugggcaucuguagcugcgggcuguauaaacagcccggagugccuguuaaguggaagcggugaggacuagucccuguucccagagcccacuuuuuuuucuuuuuuugaaauaaaauagccugucuuucagaucuaaaaaaaaaaaaaaaaaaaaaaaaaaaaaaaaaaaaaaaaaaaaaaaaaaaaaaaaaaaaaaaaugcaucccccccccccccccccccccccccccccccaaaggcucuuuucagagccaccagaauu

SEQ ID NO: 6327 - RNA, 1752 nt, Artificial Sequence
  mRNA product Design a-1 comprising derived and/or modified sequence from LASV(LM765-SLE-2012;Clade IV)__AIT17814__GPCstabilized (opt5)
gggagagucccgcagucggcguccagcggcucugcuuguucgugugugugucguugcaggccuuauucaagcuuaccaugggccagaucgugaccuucuuucaagaggucccccacguuauugaagaggugaugaacaucgugcugauugcccucagcauccuggcuguccuuaaggggcuguacaauuucgccacaugcggacucgugggccugguuacguuucuucugcucugugggagauccugcaccacaucucuguauaaaggaguguacgaacugcagacccucgagcugaacauggaaacacuuaauaugaccaugccucugagcuguacaaagaacaauucccaucacuauauuauggucggcaacgagaccgggcucgagcugacgcuuaccaauacaucuaucaucgaccauaaauucugcaaccugagcgaugcgcaccggaagaaucucuacgaccaugcucugauguccauuaucucuaccuuucaccugagcauuccgaacuucaaucaguaugaagccauguccugugauuuuaacggaggcaaaaucagcgugcaguacaaucucucucacuccuaugccaaggacgcugccgaucauugcggcacaguugcuaacggggugcugcaaaccuucaugcgcauggccuggggaggcagcuacauugcgcuugacucugggugcggacggugggauuguaucaugacguccuaccaguaucugauuauccagaauacaaccugggaggaccacugccaguuuagccgccccucuccuaucggcuaccucgggcugcuuucccaaagaacacgggauauuuauaucagccgcagacgccggggaaccuucaccuggacacuguccgacucugaaggcaaggauacgcccggcggguacugucugacccgguggaugcucauugaggccgagcugaaaugcuuuggaaacacagcugucgccaaguguaacgaaaaacaugacgaggaguucugcgauaugcuucgccuguuugacuucaauaagcaggcuauccagagacucaaagcccccgcgcagaugagcauucaacugaucaacaaggccgugaaugcucuuaucaacgaccagcugauuaugaagaaucaccuccgggauaucaugugcauuccuuauugcaacuacuccaaauauugguaccugaaucacaccacaaccgggaagacgagccugcccaaauguuggcucgugucuaacggauccuaccugaaugaaacacauuucagcgacgauaucgagcagcaagccgacaacaugauuaccgagaugcuucagaaggaauauauggagcgccagggcaaaaccccucuggggcucgucgaucuguuuguuuucucuaccagcuuuuaccugaucuccaucuuccuucaccucgugaagauuccgacacauagacacaucgugggaaaacccugcccuaagccccaucggcugaaucacaugggcauuuguucuugcggccuguauaagcagccugggguccccgugaaauggaagcgcugaggacuagucccuguucccagagcccacuuuuuuuucuuuuuuugaaauaaaauagccugucuuucagaucuaaaaaaaaaaaaaaaaaaaaaaaaaaaaaaaaaaaaaaaaaaaaaaaaaaaaaaaaaaaaaaaaugcaucccccccccccccccccccccccccccccccaaaggcucuuuucagagccaccagaauu

SEQ ID NO: 6328 - RNA, 1752 nt, Artificial Sequence
  mRNA product Design a-1 comprising derived and/or modified sequence from LASV(LM776-SLE-2012;Clade IV)__AIT17824__GPCstabilized (opt5)
gggagagucccgcagucggcguccagcggcucugcuuguucgugugugugucguugcaggccuuauucaagcuuaccaugggccagaucgugaccuucuuucaagaggucccccacguuauugaagaggugaugaacaucgugcugauugcccucagcauccuggcuguccuuaaggggcuguacaauuucgccacaugcggacucgugggccugguuacguuucuucugcucugugggagauccugcaccacaucuguguauaaaggagucuacgaacugcagacccuggagcucaacauggaaacacugaauaugaccaugccucuuagcuguacaaagaacaauucccaucacuauauuauggugggcaacgagaccgggcuggagcucacgcugaccaauacaucuaucaucaaccauaaauucugcaaucuuagcgacgcgcacaagaaaaaccuguacgaucaugcucucauguccauuaucucuaccuuucaccugagcauuccgaauuucaaccaguaugaagccauguccugugacuuuaauggaggcaagaucagcguucaguacaaccugucucacuccuaugccggcgaugcugccaaucauugcgggacaguggcuaacggaguccuccaaaccuucaugcggauggccuggggcgggagcuacauugcgcuggacucuggaugcggcaagugggauuguaucaugacguccuaccaguaucuuauuauccagaacacaaccugggaggaccauugccaguuuagccgccccucuccuaucggguaccugggacuccugucccaaagaacacgggauauuuauaucagccgcagacgccggggcaccuucaccuggacacucuccgacucugaaggcaaagauacgcccgggggauacugucugacccgguggaugcugauugaggccgagcucaagugcuuuggcaauacagcuguggccaaauguaacgaaaagcacgacgaggaguucugcgauaugcugcgccuuuuugacuucaauaaacaggcuauccagagacugaaggcccccgcgcagaugagcauucaacucaucaacaaggccgugaaugcucugaucaacgaucagcuuauuaugaaaaaucaucugcgggacaucaugugcauuccuuauugcaacuacuccaaguauugguaccucaaucacaccacaaccggaaaaacgagccugcccaaguguuggcuggucucuaacggcuccuaccucaaugaaacacacuucagcgacgauaucgagcagcaagccgacaacaugauuaccgagaugcugcagaaagaauauauggagcgccaggggaagaccccucuuggacugguugaucucuuuguguucucuaccagcuuuuaccugaucuccaucuuccugcaucuugugaaaauuccgacacacagacauaucgucggcaagucuugccccaagccucaccggcucaaucacaugggcauuuguagcugcgggcuguauaaacagcccggagugccuguucgcuggaagagaugaggacuagucccuguucccagagcccacuuuuuuuucuuuuuuugaaauaaaauagccugucuuucagaucuaaaaaaaaaaaaaaaaaaaaaaaaaaaaaaaaaaaaaaaaaaaaaaaaaaaaaaaaaaaaaaaaugcaucccccccccccccccccccccccccccccccaaaggcucuuuucagagccaccagaauu

SEQ ID NO: 6329 - RNA, 1752 nt, Artificial Sequence
  mRNA product Design a-1 comprising derived and/or modified sequence from LASV(Mad39;Clade IV)__ANH09722__GPCstabilized (opt5)
gggagagucccgcagucggcguccagcggcucugcuuguucgugugugugucguugcaggccuuauucaagcuuaccaugggccagaucgugaccuucuuucaagaggucccccacguuauugaagaggugaugaacaucgugcugauugcccucagcauccuggcuguccuuaaggggcuguacaauguggccacaugcggacucauuggccugguuacguuccuucugcucugugggagauccugcaccacaacccuguauaaaggaguguacgaacugcaggcgcucgagcugaacauggaaacacuuaauaugaccaugccucugucuuguacaaagaacaauagccaucacuauauccgggucggcaacgagaccgggcucgagcugacgcuuaccaauacaucccugaucaaccauaaauuuugcaaucucucugacgcucacaagaaaaaccuguacgaucaugcccugaugagcauuaucuccaccuuccaccucucuauuccgaauuuuaaccaguaugaagccaugagcugugacuucaaugauggaaagaucuccgugcaguacaaccugagccacacauaugcuggcgacaccgccaaucauugcggcacgguugcuaacggggugcuucaaacauuuaugcgcauggccuggggaggcucuuacauugcgcuggauuccgggugcggaggcugggacuguaucaugaccagcuaccaguaucucauuauccagaacacaaccugggaggaucacugccaguucucucggcccuccccuaucggguaccugggacuucugagccaacgcaccagagacauuuauaucucucggcgccgccggggcacauuuacguggacccuguccgauagcgaaggcaaggacacacccgggggauacugucucaccagauggaugcugauugaggccgagcuuaaaugcuucggcaauacagcugucgccaaguguaacgaaaaacaugaugaggaauuuugcgacaugcugcgccucuucgauuuuaauaagcaggcuauccagcggcugaaagcccccgcgcagauguccauucaacuuaucaacaaggccgugaaugcucugaucaacgaccagcucauuaugaagaaucaccugagagacaucaugugcauuccuuauugcaacuacucuaaauauugguaccugaaucacaccgugacgggaaagacaagccuccccaaauguuggcuggucuccaacggcagcuaccuuaaugaaacccauuucucugaugacaucgagcagcaagccgauaacaugauuaccgagaugcugcagaaggaauauauggagcggcaggggaaaacaccucucggacugguugaccuguucguguuuuccaccagcuucuaccuuaucucuaucuuucuccaccuggugaagauuccgacacaucgccacgucgugggcaaacccugcccuaagccccauagacugaaucacaugggcaucuguagcugcggguucuauaagcagccuggaguucccgugcgguggaaacgcugaggacuagucccuguucccagagcccacuuuuuuuucuuuuuuugaaauaaaauagccugucuuucagaucuaaaaaaaaaaaaaaaaaaaaaaaaaaaaaaaaaaaaaaaaaaaaaaaaaaaaaaaaaaaaaaaaugcaucccccccccccccccccccccccccccccccaaaggcucuuuucagagccaccagaauu

SEQ ID NO: 6330 - RNA, 1752 nt, Artificial Sequence
  mRNA product Design a-1 comprising derived and/or modified sequence from LASV(Z0947-SLE-2011;Clade IV)__AIT17840__GPCstabilized (opt5)
gggagagucccgcagucggcguccagcggcucugcuuguucgugugugugucguugcaggccuuauucaagcuuaccaugggccagaucgugaccuucuuucaagaggucccccacguuauugaagaggugaugaacaucgugcugauugcccucagcauccuggcuguccuuaaggggcuguacaauuucgccacaugcggacucgugggccugguuacguuucuucugcucugugggagauccugcaccauuucucuguauaaaggaguguacgaacugcagacacucgagcugaacauggaaacccuuaauaugacaaugccucugagcuguaccaagaacaauucccaucacuauaucauggucggcaacgagacagggcucgagcugacccuuacgaauaccucuaucauuaaccauaaauucugcaaucugagcgacgcgcacaagaaaaaccucuacgaucaugcucugauguccaucauuucuacauuucaccugagcaucccgaauuucaaccaguaugaagccauguccugugacuuuaauggaggcaagauuagcgugcaguacaaccucucucacuccuaugccggcgaugcugccaaucauugcgggaccguugcuaacggagugcugcaaacauucaugcggauggccuggggcgggagcuacaucgcgcuugacucuggaugcgauagaugggacuguauuaugaccuccuaccaguaucugaucauccagaacacgacaugggaggaucacugccaguuuagccggcccucuccuauuggcuaccucgggcugcuuucccaacgcaccagagacaucuauauuagccggcgccgccggggaacauucaccuggacccuguccgauucugaaggcaaggacacacccggcggguacugucugacgagauggaugcucaucgaggccgagcugaaaugcuuuggaaauaccgcugucgccaaguguaacgaaaaacaugaugaggaguucugcgacaugcuucggcuguuugauuucaauaagcaggcuauucagcgccucaaagcccccgcgcagaugagcauccaacugaucaacaaggccgugaaugcucuuauuaacgaccagcugaucaugaagaaucaccucagagacauuaugugcaucccuuauugcaacuacuccaaauauugguaccugaaucacacaaccacagggaagaccagccugcccaaauguuggcucgugucuaacggauccuaccugaaugaaacgcauuucagcgaugacauugagcagcaagccgauaacaugaucacagagaugcuucagaaggaauauauggagcggcagggcaaaaccccucuggggcucgucgaccuguuuguuuucucuaccagcuuuuaccugaucuccauuuuccuucaccucgugaagaucccgacacaucgccacauugugggaaaacccugcccuaagccccauagacugaaucacaugggcaucuguucuugcggccuguauaagcagccugggguccccgugaaauggaagcggugaggacuagucccuguucccagagcccacuuuuuuuucuuuuuuugaaauaaaauagccugucuuucagaucuaaaaaaaaaaaaaaaaaaaaaaaaaaaaaaaaaaaaaaaaaaaaaaaaaaaaaaaaaaaaaaaaugcaucccccccccccccccccccccccccccccccaaaggcucuuuucagagccaccagaauu

SEQ ID NO: 6331 - RNA, 1752 nt, Artificial Sequence
  mRNA product Design a-1 comprising derived and/or modified sequence from LASV(Josiah;Clade IV)__NP_694870__GPCstabilized (opt6)
gggagagucccgcagucggcguccagcggcucugcuuguucgugugugugucguugcaggccuuauucaagcuuaccaugggacaaaucguuacauucuuucaagaaguaccccacguaauagaagaagucaugaacauaguacuaauagcacuaucaguucucgcaguacuaaaaggucuauauaauuuugcuacauguggcuuagucggccuaguaaccuuccuacuccuaugcggaagaucaugcaccacuucacucuacaaaggaguauacgaauuacaaacccuagaacuaaacauggaaacacuaaauaugacaaugccacuuucauguaccaaaaacaacagccaccacuauauaaugguaggaaaugaaacaggacuugaauuaacauuaaccaacacaucuauaaucaaucauaaauucugcaaccuaucagaugcacauaagaaaaauuuauacgaucacgcauuaaugucaauaauauccacauuccaccuaucaauaccaaacuuuaaucaauacgaagcaaugucuugcgauuucaacggaggaaaaauaucaguacaauacaaccuuucacacucuuaugcuggagacgcagcaaaucacuguggaacagucgcaaacggagucuuacaaacauuuaugagaauggcauggggaggaucuuacauagcacuagauucaggaugcggaaacugggacugcauaaugacaucauaccaauauuuaaucauacaaaacacaacaugggaagaccacugccaauucucaagaccaucaccuauaggauaccuaggacuuuuaucacaaagaacacgcgacauuuacauauccagaagaagaagaggcacuuucaccuggacacuaucagacucagaaggcaaagacacaccaggaggauacugcuuaacgagauggaugcuaauagaagcagaacuaaaaugcuucggcaacacagcaguagcaaaauguaacgaaaaacaugaugaagaauuuugcgacaugcucagacuauucgauuucaacaaacaagccauacaaagacuaaaagcuccugcacaaaugucaauacaacuaauaaauaaagcaguaaacgcacuaauaaacgaucaacuaauaaugaaaaaccaccuaagagacauaauguguaucccauacugcaacuauucaaaauacugguaccuaaaccacaccacaacaggaagaacaagccuaccaaaaugcuggcuaguaucaaacggaucauauuuaaaugaaacccacuucuccgaugauauagaacaacaagcagauaacaugauaacagaaaugcuacaaaaagaauacauggaacgacaaggaaaaacaccucugggccuaguagaccuauucguauucuccacaucauucuaccuaauauccauauucuuacaccuagucaaaauaccaacacacagacacauaguaggaaaauccugcccaaaaccccauagacucaaucauaugggaauaugcuccuguggacuauacaaacaaccgggaguaccaguaaaauggaaaagauaaggacuagucccuguucccagagcccacuuuuuuuucuuuuuuugaaauaaaauagccugucuuucagaucuaaaaaaaaaaaaaaaaaaaaaaaaaaaaaaaaaaaaaaaaaaaaaaaaaaaaaaaaaaaaaaaaugcaucccccccccccccccccccccccccccccccaaaggcucuuuucagagccaccagaauu

SEQ ID NO: 6332 - RNA, 1749 nt, Artificial Sequence
  mRNA product Design a-1 comprising derived and/or modified sequence from LASV(LP;Clade I)__AAF86701__GPCstabilized (opt6)
gggagagucccgcagucggcguccagcggcucugcuuguucgugugugugucguugcaggccuuauucaagcuuaccaugggacagauaauaacuuucuuccaagaaguaccucacguaauagaagaaguaaugaacauaguauuaauugcacucucacuacucgccauacuaaaaggacuauacaauauugcuaccugcgguauaauuggauuaguagcauucuuauuccuaugcggaaaaucaugcucacuaacauuaaaaggaggauacgaacuacaaacacuagaacuaaauauggaaacacuaaauaugacaaugccacuaucauguacuaaaaacucaucacaccacuacauuagaguaggcaacgaaacgggacuagaauuaacccuuacgaauacaucuauaauaaaucauaaauuuugcaacuuaucagacgcacacaagaaaaaucuauacgaccacgcccuaaugucaauuauuucaacguuccaccuauccauaccaaacuucaaccaauacgaagcaaugucaugugacuucaaugguggcaaaaucuccguacaauacaauuuaucacacuccuacgcaggagaugcagcagaacauugcggcacaguagccaacggaguacuacaaacauuuaugagaauggcauggggcggcagauacauagcauuagauucaggaugcggcaauugggacugcauaaugacuucauaccaauaccuaauaauacaaaacacaacaugggaagaccacugucaauucucaagaccauccccaauaggauaccuaggacugcuuucccaaagaacaagagauauauauauaucacgacgaagacguggaacauucacauggacauuaucagacucagaaggaaacgaaacaccaggaggcuacugucuaacaagauggaugcuuauagaagcagaacuaaaaugcuucggaaauacagccguagcuaaaugcaacgaaaaacacgaugaagaauuuugcgacauguuaagacuuuucgacuucaauaaacaggcuauccgaagacuaaaagcucccgcacaaaugucaauccaacuaauaaacaaagccguaaacgcacuaauaaacgaccaacuaaucaugaaaaaccacuuaagagauauaaugugcauaccauauugcaauuacucuaaauacugguaccucaaucacacaucaucaggacgaacaucauuaccaaaauguuggcuaaucaguaacggaucauaccuuaaugaaacccaauuuucagacgacauagaacaacaagccgauaacaugaucacagaaaugcuacaaaaagaauauauagaacgacaaggaaaaaccccacucggucuaguagacauauucaucuuuucaacaucauucuaccuaauuuccauuuuccuacaccuaaucaaaauaccuacacaccgacacauaguaggaaaaccauguccaaaaccacauagacuaaaccacaugggaguaugcucaugcggauuauacaaacacccuggaguaccaacaaaauggaaaagauaaggacuagucccuguucccagagcccacuuuuuuuucuuuuuuugaaauaaaauagccugucuuucagaucuaaaaaaaaaaaaaaaaaaaaaaaaaaaaaaaaaaaaaaaaaaaaaaaaaaaaaaaaaaaaaaaaugcaucccccccccccccccccccccccccccccccaaaggcucuuuucagagccaccagaauu

SEQ ID NO: 6333 - RNA, 1749 nt, Artificial Sequence
  mRNA product Design a-1 comprising derived and/or modified sequence from LASV(803213;Clade II)__AAF86703__GPCstabilized (opt6)
gggagagucccgcagucggcguccagcggcucugcuuguucgugugugugucguugcaggccuuauucaagcuuaccaugggacaaauaauaacauucuuucaagaagucccacacguaauugaagaaguuaugaauauaguacuaaucgcacuaucgcuauuagcaauacuaaaaggaaucuacaacguagcaacaugcggacuauuuggacucauauccuuucugcuauuaugcggcagauccugcucagucaccuauaaaggaguauaugaacuacaaacacuagaacuaaauauggcuaaucuuaauaugacaaugccacuaucaugcacaaaaaacaacucucaccacuauauaaugguaggaaaugaaaccggacuagagcuuacacuaacaaauaccuccauaauaaaccacaaauuuuguaacuuaucagacgcacacaaaaaaaacuuauacgaccacgcacuaaugucuauaauuagcacauuucacuuauccauaccuaacuuuaaccaauaugaagcaaugucaugcgauuuuaacggcggcaaaaucagcguacaauacaacuuaucccauucauuugccguagaugcagcuaaccacugcggaacaaucgcaaauggcguacuacaaacauucaugagaauggcauggggaggaucuuacauugcacuugauucagguugcggaaauugggacuguaucaugacaucauaucaauaucuaauaauacaaaacaccacaugggaagaccacugccaauucucaagaccaucaccaaucggauaccuaggacuauuaucacaaagaacaagagauauauacauaucaagaagacgaagaggaaccuuuaccuggacauuaucagauucagaaggaaacgaagcccccggaggauacugucucacaagauggaugcuuauagaagcagaacuaaaaugcuuuggaaauaccgccguagcaaaaugcaacgaaaaacacgaugaagaauucugugacaugcuacgacuauucgacuucaacaaacaagcuauaaaaagacuaaaaacaccagcacaaaugucaauccaacuaaucaauaaagcaguaaacgcacuaauaaacgaucaacucauaaugaaaaaccaccuaagagauauaauguguaucccauacuguaacuacuccagauacugguaccuaaaucacacaguaacaggaaaaacaucacuaccacgaugcuggcuaguaucuaacggaaguuacuuaaacgaaacacacuucucugacgauauagaacaacaagcagacaacaugauuacugaaaugcuacaaaaagaauacauggacagacaaggaaaaacaccauuaggacuaguagacuuauucguauucuccaccuccuucuaucuaauauccauauuccuccacuuaguaaaaauacccacacauagacacaucgucggaaaaccauguccaaaaccucaccgccucaaccacaugggaauauguuccugcggauuauacaaacaucccggcguaccagucaaauggaaaagauaaggacuagucccuguucccagagcccacuuuuuuuucuuuuuuugaaauaaaauagccugucuuucagaucuaaaaaaaaaaaaaaaaaaaaaaaaaaaaaaaaaaaaaaaaaaaaaaaaaaaaaaaaaaaaaaaaugcaucccccccccccccccccccccccccccccccaaaggcucuuuucagagccaccagaauu

SEQ ID NO: 6334 - RNA, 1749 nt, Artificial Sequence
  mRNA product Design a-1 comprising derived and/or modified sequence from LASV(GA391;Clade III)__CAA36645__GPCstabilized (opt6)
gggagagucccgcagucggcguccagcggcucugcuuguucgugugugugucguugcaggccuuauucaagcuuaccaugggccaaauaguaacauuuuuccaagaaguaccacacguaauagaagaaguaaugaauaucguccuaauagcacucagcauauuagcaauauuaaaaggacuauauaaugucgcaacauguggacuaauaggucuagucacauuucucuuacuaucaggaagauccugcucccucauauacaaaggaacuuacgaauuacaaacucuagaauuaaacauggaaacacuaaacaugacaaugccacuaucauguaccaaaaacaauucacaccacuacauacgaguaggcaacgaaacaggccuagaauuaacauuaacaaacacaucuauacuaaaccauaaauuuuguaaccuauccgacgcacacaaaaggaaucuauacgaccauucacuaaugagcauaauaucuaccuuccaucuuucuauuccaaacuucaaccaauacgaagccaugucaugcgacuucaacggcggaaaaauaacaguacaauacaacuuaucacacucauucgcaguagaugcagcaggacacugcggaacacuagccaacggaguauuacaaacauucaugagaauggcauggggaggaucuuacauagcacuagacucuggaugcgguaacugggacugcauuaugacaucauaucaauaucuaauaauacaaaauacaacuugggacgaucauugccaauucucacguccaucacccauaggcuauuuaggucuacuaucacaaagaacaagagacauauacauuucgagacgaagaagagguacauucacauggaccuuaucagacucagaagguaacgaaaccccuggaggauacugccuaacaagauggauguuaauagaagccgaacuaaaaugcuucggaaauacagcaguagcaaaauguaacgaaaaacaugacgaagaauuuugcgacaugcuacgacucuucgauuucaacaaacaagcaauaagaagacuaaaaacacccgcacaaauguccauacaacucauaaacaaagcaguaaacgcacucauaaacgaccaacuaauaaugaaaaaucaccuccgagacauaauguguauucccuacugcaacuacucaagauacugguaccuaaaucacacaucaacaggaaaaacuucacuaccaagaugcuggcuuauaucuaacggaucauaccuaaacgaaacaaaauuuagcgacgauauagaacaacaagcagacaacaugauaacagaaauguuacaaaaagaauacauagaucgacaaggaaaaacuccucuaggucuaguagaccuauucguauucucuacaucauucuauuuaauaagcauauuccuacauuuaguaaaaauacccacacaccgccauauaguaggaaaaccauguccaaaaccccacagauuaaaccacauggguauauguucauguggauuauauaaacaaccaggagucccagucagauggaaaagauaaggacuagucccuguucccagagcccacuuuuuuuucuuuuuuugaaauaaaauagccugucuuucagaucuaaaaaaaaaaaaaaaaaaaaaaaaaaaaaaaaaaaaaaaaaaaaaaaaaaaaaaaaaaaaaaaaugcaucccccccccccccccccccccccccccccccaaaggcucuuuucagagccaccagaauu

SEQ ID NO: 6335 - RNA, 1752 nt, Artificial Sequence
  mRNA product Design a-1 comprising derived and/or modified sequence from LASV(AV;Clade V)__CCA30314__GPCstabilized (opt6)
gggagagucccgcagucggcguccagcggcucugcuuguucgugugugugucguugcaggccuuauucaagcuuaccauggggcaaaucguaacauucuuccaagaaguuccacacguaauagaagaaguaaugaauauaguauuaaucgcauuaucaauacuagcaguauuaaaaggacuauauaauauagcaacaugcggccucaucggacuaauaacauuccucuuacuaugcggaagaagcuguucaucaaaucuuuacaaaggaguuuacgaauuacaaucauuagacuuaaacauggaaacacuaaacaugacuaugccauuaucauguacaaaaaacaauucacaccauuauauaagaguaggcaaugacacaggacuagaauuaacacuaacaaacaccucaauacuaaaccacaaauucugcaacuuaucagacgcccacaaaaaagauuuauacgaccacgcacuaauguccauaauaucaaccuuccaccuaucaauaccuaacuucaaucaauaugaagcaaugucaugugacuucaauggaggaaaaauuucuguacaauacaacuuaucucacucauacgcaauagacgcagccaaccacugcggaacgguugcaaacggcauacuacaaacuuucaugagaauggcuugggguggaucauauaucgcucuagauucuggaugcggcaacugggacugcauaaugacauccuaccaauaccuaauuauacaaaacaccacaugggaaaaccacugccaauucagccgaccaucuccaauuggauaccuaggauuauuaucucaacgaacaagagauauauauaucucaagaagaagaagaggcacauucacuuggacacuaagcgacucugaaggaaacgcaaccccaggcgguuauuguuuaacacguuggaugcuaauagaagcagaauuaaaauguuucggaaacacagcaguagcaaaaugcaacgaaaaacacgacgaagaauuuugugacauguuaagauuauucgacuucaacaaacaagcaauaucacgauuaaaaagcccugcacaaauguccauccaauuaauaaauaaagcuguuaaugcacuaauaaacgaccaauuaauaaugaaaaaccacuuaagagacauaauguguauaccauacugcaacuacucaaaauauugguaucucaaccacacuauaacuggaaaaacaucucuaccaaaaugcuggcucguaucaaacggaucauacuuaaaugaaacccacuucucagacgauauagaacaacaagccgacaauaugaucaccgaaaugcuccaaaaagaauacauggaaagacaaggaaaaacaccacuuggauuagucgaccuauucgucuucucaacaucauucuaccuaauauccauauucuuaagacucguaaaaauacccacacauagacauauaguaggaaaaccaugccccaaaccccacagacuaaaccacaugggaauaugcagcuguggacuauacaaacaaccaggaguacccguaagauggaaacgguagggacuagucccuguucccagagcccacuuuuuuuucuuuuuuugaaauaaaauagccugucuuucagaucuaaaaaaaaaaaaaaaaaaaaaaaaaaaaaaaaaaaaaaaaaaaaaaaaaaaaaaaaaaaaaaaaugcaucccccccccccccccccccccccccccccccaaaggcucuuuucagagccaccagaauu

SEQ ID NO: 6336 - RNA, 1749 nt, Artificial Sequence
  mRNA product Design a-1 comprising derived and/or modified sequence from LASV(Togo/2016/7082;Clade VI)__AMR44577__GPCstabilized (opt6)
gggagagucccgcagucggcguccagcggcucugcuuguucgugugugugucguugcaggccuuauucaagcuuaccaugggacaaauaaucacauuuuuccaagaaguaccacauguaauagaagaagucaugaacauaguacuaauagcacucucauuauuagcaauacucaaaggcguauacaauguagcaacuuguggaauaauaggucuagucacauuucuauuucuaugcggacgaucaugcucacuaauauauaaaggauccuacgaauuacaaacauuagaauuaaacauggaaacacucaauaugaccaugccacuauccuguaccaaaaacucaucacaccauuacauaagaguaggaaaugaaacaggauuagaauuaacauuaacaaauacaucuauaauaaaucauaaauucugcaaucucuccgacgcccauaaaagaaacuuauacgaccacgcacuaaugucaauacuaucaaccuuccaccuaucaauuccaaacuuuaaccaauaugaagccauguccugcgauuuuaacggaggaaaaauaagcguucaauacaaccuaucccacgcauacgcuguagacgcagcagaacacugcgguaccguagcaaacggaguacuacaaaccuuuaugagaauggccuggggaggaucauauauagcauuagauucaggaugcggcaacugggacugcauuaugaccucuuaccaauaucuaauaauacaaaacacaaccugggaagaucacugccaauucucaagaccaucaccaauaggcuauuuagguuuauuaucacaaagaacuagagauauauauaucucaagaagaagacgcggaacauuuacuuggacauuaucagacuccgaaggcaaugaaacaccaggaggcuacugucuaacacgauggaugcuaauagaagcagaauuaaaauguuuuggaaacacagccguagccaaaugcaacgaaaaacaugacgaagaauuuugcgacaugcuaagacuauucgacuucaacaaacaagcaauccaaagacuaaaaucaccagcacaaaugucuauacaacuaauuaacaaagcagugaaugccuuaauaaacgaucaacucaucaugaaaaaccaucuuagagauaugauguguauaccauauuguaacuauucuaaauacugguaccucaaucauacaucaucaggacgaacaucccuaccuaaauguuggcucguaucuaacggaucauaccuuaaugaaacccacuucagcgacgacauagaacaacaagccgauaacaugauaacagaaauguuacaaaaagaauauauagauagacaaggaaaaacaccacucggauuagucgaucucuucguauucuccacaucuuucuauuuaauuucuauauuuuuacaccuaauaaaaauacccacacacagacauauaguaggaaaaccauguccaaaaccacacagacuaaaucacaugggcauaugcucauguggauuauacaaacaaccuggagucccaacuagauggaaacgauaaggacuagucccuguucccagagcccacuuuuuuuucuuuuuuugaaauaaaauagccugucuuucagaucuaaaaaaaaaaaaaaaaaaaaaaaaaaaaaaaaaaaaaaaaaaaaaaaaaaaaaaaaaaaaaaaaugcaucccccccccccccccccccccccccccccccaaaggcucuuuucagagccaccagaauu

SEQ ID NO: 6337 - RNA, 1749 nt, Artificial Sequence
  mRNA product Design a-1 comprising derived and/or modified sequence from LASV(KAK-428;Clade n.d. (VII))__ANH09740__GPCstabilized (opt6)
gggagagucccgcagucggcguccagcggcucugcuuguucgugugugugucguugcaggccuuauucaagcuuaccaugggacaaauaguuacauucuuccaagaaguaccacacguaauugaagaagucaugaauauaguauuaaucgcacuuucacuacuagccauacucaaaggauuauacaacuucgcaacaugcggaguuaucggauuaauaacauucuuacucuuaugcggacgaucauguucagcaacauacaaaggccaauacgaacuacaaacacuagaauuaaacauggaauccuuaaacaugacaaugcccuuaucauguaccaaaaacaacucacaucacuauauacgagcagguaauaauaccggacuugaacucacauuaacaaacacuucgaucauaucacacaaauucugcaacuuaucagacgcacacaaaaaaaauuuauacgaccauacuuuaaugucuauaauaaccacauuccacuuaucuauaccaaacuucaaucaauacgaagcaaugucuugcgauuucaacggaggaaaaauaaguauacaauauaaccuaucacacucauacgcaggagacgcagcacaacacuguggaacaguagcaaacggaguacuacaaaccuuuaugagaauggccuggggaggaucuuauuuagcuuuagauucaggaugccgaggaugggauugcauaauaucaucauaccaauacuuaauaauacaaaacaccaccugggacgaccacugccaauucuccagacccaguccuauaggauaccucggauuuguaucacaaaaaaccagagacaucuacauaucaagaagaagacgaggaacauucacauggacacuuucagauagugaaggacacgacaugccaggaggauauugccuaacaagauggauguuaauagaagcagacuuaaaauguuucggaaacacagcaguagcaaaaugcaacgaaaaacacgacgaagaauuuugcgacauguggcgauuauucgauuucaacaaacaagcaauacaaagauuaaaagcacccgcacaaaugaauauacaauuaaucaacaaagccguuaacgcacucauaaacgaccaacuaaugaugaaaaaccauuuacgagacauaaugugcauaccauacugcaacuacuccaaauucugguaccuaaauaacacaacaacaggaagaacaucccuaccucguugcuggcuaaucagcaauggauccuaccuaaaugaaacacacuucucagaugacauagaacaacaagcugauaacaugaucacagaaaugcuacaaaaagaauauauggaucgacaaggaaaaacaccuuuaggauuaguagaccuuuucgucuucucaacuucuuucuaccuaaucacaaucuucuuacauuuaguaaagaucccuacccacagacacauaguuggaaaacccugcccaaaaccacacagacuaaaucacaugggaaucugcucaugcggauuauacaaacaaccagguguaccuguaagauggaaacgauaaggacuagucccuguucccagagcccacuuuuuuuucuuuuuuugaaauaaaauagccugucuuucagaucuaaaaaaaaaaaaaaaaaaaaaaaaaaaaaaaaaaaaaaaaaaaaaaaaaaaaaaaaaaaaaaaaugcaucccccccccccccccccccccccccccccccaaaggcucuuuucagagccaccagaauu

SEQ ID NO: 6338 - RNA, 1749 nt, Artificial Sequence
  mRNA product Design a-1 comprising derived and/or modified sequence from LASV(Pinneo-NIG-1969;Clade I)__AIT17836__GPCstabilized (opt6)
gggagagucccgcagucggcguccagcggcucugcuuguucgugugugugucguugcaggccuuauucaagcuuaccaugggacaaauuauuacauucuuccaagaaguaccucacguaauagaagaaguaaugaacaucguacuaauagcauuaucacuacuagccauacuaaaaggacuauacaacauagcaacauguggaauaauaggccuuguagccuuccuauuccuaugcggaaaauccugcucacuaacacuaaaagguggcuacgaauuacaaacauuagaacuaaacauggaaacuuuaaauaugacaaugccacucuccugcaccaaaaauucaagucaucacuacaucagaguaggaaacgaaacaggauuagaacuaacauuaaccaauacauccaucauaaaccauaaauucuguaaccuaucagaugcacacaaaaaaaacuuauaugaccacgcauuaaugagcauuauaagcaccuuucaccuaucaauaccaaacuucaaccaauaugaagcaaugucaugugacuuuaacgguggaaaaauaucaguacaauauaaccuaucacauucauacgccggugacgcagccgaacacugcggaacaguagcaaacggaguacuacaaacauuuaugcgcauggccuggggaggacgcuacauagcacuagauucaggaugcggaaauugggacuguaucaugacuuccuaccaauauuuaauaauacaaaacacaaccugggaagaucacugucaauuuucccgaccaucaccaauaggauauuuaggacuacuaagucaaagaacaagggauauauacaucucuagaagaaggagaggaacauuuacauggacccuaucugacuccgaaggaaacgaaacaccaggaggauacugcuuaacacgauggauguuaauagaagcagaacucaaaugcuucggaaacacagccguagcaaaauguaacgaaaaacacgaugaagaauucugugacaugcuacgauuauuugauuucaacaaacaagcaauaagacgacucaaagcaccagcacaaaugucaauacaacuaauaaacaaagcaguaaacgcauuaauaaaugaccaacucauaaugaaaaaucaccuaagagauauaaugugcauaccauauugcaauuacucaaaauacugguacuuaaaccacaccucauccggacgaacaucauuaccaaaaugcuggcuaauaucaaauggaaguuaccuaaacgaaacacaauucucagacgacauugagcaacaagccgauaacaugauuacagaaauguuacaaaaagaauacauagaaagacaaggcaaaacucccuuaggccuuguagacauauucauauuuucuacaucauuuuaccuaauaucaauauuucuacacuuaauuaaaauaccaacgcauagacauaucgucggaaaaccaugcccaaaaccacauagauuaaaucacaugggaguaugcucaugcggauuauacaaacacccuggaguaccaacaaaauggaaacgauaaggacuagucccuguucccagagcccacuuuuuuuucuuuuuuugaaauaaaauagccugucuuucagaucuaaaaaaaaaaaaaaaaaaaaaaaaaaaaaaaaaaaaaaaaaaaaaaaaaaaaaaaaaaaaaaaaugcaucccccccccccccccccccccccccccccccaaaggcucuuuucagagccaccagaauu

SEQ ID NO: 6339 - RNA, 1749 nt, Artificial Sequence
  mRNA product Design a-1 comprising derived and/or modified sequence from LASV(ISTH0009-NIG-2011;Clade II)__AIT17404__GPCstabilized (opt6)
gggagagucccgcagucggcguccagcggcucugcuuguucgugugugugucguugcaggccuuauucaagcuuaccaugggacaaauaaucacauuuuuccaagaaguaccccacgucauagaagaaguuaugaacauaguacucauagcauuaagccuacuagcaauauuaaaaggcauauacaacguagcaaccugcggauuauucggacuuguaucuuuccuuuuacucuguggaagaucaugcucuacaacauacaagggcgucuacgaacuacaaacauuagaacuugacauggcaucacucaacaugacaaugccacuaucaugcaccaaaaauaacucacaucauuacauaaugguaggaaacgaaacuggacuugaacuaacacuaaccaacacuucaauaaucaaucauaaauucugcaaccuaucagaugcccacaagaaaaaucuauaugaccaugcauuaaugucuauaauaucuaccuuccaccucuccauaccaaauuuuaaccaauaugaagcaaugucaugugauuucaacggaggaaaaaucucuguacaauacaaccuaucucacgcauacgcaguagacgccgcaaaccauugcggaacaauagccaacggagucuuacaaacauucaugcgaauggcauggggaggaucuuauauagcacuggacucaggauguggaucaugggacugcauaaugacaucauaucaauacuuaaucauacaaaauacaacuugggaagaccacugccaauucucacgaccaucacccauaggauaccuaggacuucuaucacaaagaaccagagacauauacauaucuagacguagaagaggaacauucaccuggacacuaucagacucugaaggcaacgaaacacccggaggcuauugccuaacaagauggaugcuaauagaagcagaacuaaaaugcuuuggaaacaccgcaguagcaaaaugcaaugaaaaacacgacgaagaauuuugcgauaugcuaagauuauucgacuuuaacaaacaagcaauacgacgccuaaaaacucccgcccaaauguccauccaacuaauaaacaaagcaguaaacgcauuaauaaaugaccaacuaauaaugaaaaaucaccuaagagauauaaugugcauaccauacuguaauuacuccaaauacugguaccucaaucauaccguaaccggaaaaacaucauuaccccgaugcuggcuaguaucuaauggcucauaccuaaacgaaacacauuucucagacgacaucgaacaacaagcagacaauaugauaacagaacuauuacaaaaagaauacauggacagacaaggaaaaacuccacuaggcuuaguagacuuauucgucuuuucaaccucauucuacuuaauaucaauauuccuccaucuaauaaaaauacccacacaccgacacauaacaggaaaaccaugcccaaaaccacacagauuaaaccacaugggcauauguaguugugguuuauauaaacacccaggaguaccaguuaaauggaaacguuaaggacuagucccuguucccagagcccacuuuuuuuucuuuuuuugaaauaaaauagccugucuuucagaucuaaaaaaaaaaaaaaaaaaaaaaaaaaaaaaaaaaaaaaaaaaaaaaaaaaaaaaaaaaaaaaaaugcaucccccccccccccccccccccccccccccccaaaggcucuuuucagagccaccagaauu

SEQ ID NO: 6340 - RNA, 1749 nt, Artificial Sequence
  mRNA product Design a-1 comprising derived and/or modified sequence from LASV(ISTH2010-NIG-2012;Clade II)__AIT17482__GPCstabilized (opt6)
gggagagucccgcagucggcguccagcggcucugcuuguucgugugugugucguugcaggccuuauucaagcuuaccaugggacaaauaaucacauucuuccaagaaguuccacacgucauagaagaaguaaugaacauaguucuaauugcccuaucacuacuugcaauacuaaaaggaauauacaacguagcaacaugcggucuuuucggccuaguaucauuccuauuauuaugcggaagaucaugcucaacaacauauaaaggaguauacgaauuacaaacgcucgaacuagauauggcaucauuaaauaugacaaugccacuaucuugcaccaaaaacaacucucaccacuacauaaugguaggaaacgaaaccggccuagaauuaacauuaacuaauacaucaaucauaaaccacaaauucugcaacuuauccgacgcucacaagaaaaaccuauaugaucaugcauuaaugagcauuauaucaacauuccaccuaucuauaccuaacuucaaucaguaugaagcaaugaguugcgacuucaacggaggcaaaauauccguccaauauaacuuaucccaugcauacgcagucgaugcagcaaaccacugcggaaccauagcaaacggaguauuacaaaccuucaugagaauggccuggggaggaucauacauagcacuagacucuggaugcggcuccugggauuguauaaugacauccuaccaauaccucauaauccaaaacauaacaugggaagaucauugccaauucucacgaccaucaccaauaggauaccucggacuauuaucccaaagaacuagagacauauacaucucccgcagaagacgagguacauuuacauggacccucucagacucagaaggaaacgaaacaccaggcggauacugcuuaacacgauggauguuaauagaagcagagcuaaaaugcuucggaaauacugcaguagccaaaugcaacgaaaaacacgacgaagaauuuugcgacauguuaagacuauucgauuucaacaaacaagcaauaagaagacucaaaacaccagcccaaaugucaauacaacuaauaaauaaagcaguaaaugccuuaauuaaugaccaacuaauaaugaaaaaccaucuaagagauauaaugugcauaccuuauugcaacuacaguaaauacugguaccuaaaccauacagucaccggaaaaacuucacuaccaagaugcuggcuaguauccaauggaucauaucuaaacgaaacacacuuuucagacgauaucgaacaacaagcagacaacaugaucacagaacucuuacaaaaagaauacauagauagacaaggcaaaacaccacuaggucuaguagaccuauuuguauucucaacaucauucuaccucauaucaauauuccuccaucuaguaaaaauaccaacucaucgacacguaguaggaaaaccaugucccaaaccccacagauuaaaucauaugggaauaugcucaugcggauuauacaaacauccaggcgucccaguaaaauggaaaagauaaggacuagucccuguucccagagcccacuuuuuuuucuuuuuuugaaauaaaauagccugucuuucagaucuaaaaaaaaaaaaaaaaaaaaaaaaaaaaaaaaaaaaaaaaaaaaaaaaaaaaaaaaaaaaaaaaugcaucccccccccccccccccccccccccccccccaaaggcucuuuucagagccaccagaauu

SEQ ID NO: 6341 - RNA, 1749 nt, Artificial Sequence
  mRNA product Design a-1 comprising derived and/or modified sequence from LASV(Lassa virus/H.sapiens-wt/NGA/2015/ISTH_0543;Clade II)__AVO03639__GPCstabilized (opt6)
gggagagucccgcagucggcguccagcggcucugcuuguucgugugugugucguugcaggccuuauucaagcuuaccaugggacaaauaauaacauucuuccaagaagucccccaugucauagaagaaguaaugaacauaguauuaauugcauuaucauuacuagcuauacuaaaaggaauauacaacguagccaccugcggacuauucggcuuaguaucauuucuauuacuaugcggaagaucuugcucaacaaccuacaaaggcguauacgaacuucaaacauuagaacucgauauggcaaacuuaaacaugacaaugccauuaucauguacaaaaaacaauucucaccacuacauaaugguaggaaaugaaacagguuuagaacuaacauuaacaaauacaucaaucaucaaucauaaauuuuguaaccuaagcgaugcacacaaaaaaaaccuauaugaucacgcauuaaugucaauaauauccacuuuucacuuaucaauaccaaacuucaaccaauaugaagcaauguccugcgacuuuaauggaggcaaaauaucaguacaauacaacuuaucacacacauacgcaguagacgccgcaaaccacuguggaacaauagcaaacggaguacuacaaacguucaugcgcauggcuuggggaggaucauacauagcauuagacucaggaugcggaucuugggacuguauaaugacaucauaccaauauuuagucauucaaaauacaacaugggaagaccacugccaauucucaagaccuucaccaauaggcuacuuaggacucuuaucccaaagaaccagagacauauauauaucucgacggcgaagaggaacuuucacauggacacucagcgacucagaaggaaaugaaacaccaggaggcuauugccucacaagauggauguuaauagaagcagaacuaaaaugcuucggaaacacagcaguugccaaaugcaacgaaaaacacgaugaagaauucugcgacaugcuaagacuuuucgauuuuaacaaacaagcaauacgaagacucaaaacaccagcccaaaugucaauacaacuaauaaacaaagccguaaaugcccuaaucaaugaccaacuuaucaugaaaaaccaucuaagagacaucaugugcauucccuacugcaauuacucaaaauacugguaucucaaucacacagucacuggaaaaacaucacuaccaagaugcuggcuaguaucaaacgguucuuaucuaaacgaaacacacuucucagacgacauugaacaacaagccgacaacaugauaacugaacuucuacaaaaagaauauauagacagacaaggcaaaacaccacuugguuuaguagacuuauucguauucucaaccucauucuaccuaaucucaaucuuccuucacuuaguuaaaauaccaacacaccgacacauaacuggcaaaccauguccaaaaccacacagacucaaccauaugggaauaugcucuugcggauuauacaaacacccaggugucccaguaaaauggaaaagauaaggacuagucccuguucccagagcccacuuuuuuuucuuuuuuugaaauaaaauagccugucuuucagaucuaaaaaaaaaaaaaaaaaaaaaaaaaaaaaaaaaaaaaaaaaaaaaaaaaaaaaaaaaaaaaaaaugcaucccccccccccccccccccccccccccccccaaaggcucuuuucagagccaccagaauu

SEQ ID NO: 6342 - RNA, 1749 nt, Artificial Sequence
  mRNA product Design a-1 comprising derived and/or modified sequence from LASV(Lassa virus/H.sapiens-wt/NGA/2016/ISTH_0009;Clade II)__AVO03571__GPCstabilized (opt6)
gggagagucccgcagucggcguccagcggcucugcuuguucgugugugugucguugcaggccuuauucaagcuuaccaugggccaaauaauaacauucuuccaagaaguaccucacguaauagaagaaguaaugaacaucgucuugauagcauuaucauuauuagccauauuaaaagguauauacaauguagcaacauguggacuacuuggauuaguaucuuucuuacuccuaugcggaagaucuugcucuaccacuuacaaagguguauacgaacuacaaacauuagaauuagacauggcaucacuaaacaugacaaugccauuaucaugcacuaaaaauaacagccaccacuacauaaugguaggaaacgaaacaggacuagaacuaacccuaaccaauacaucaauaauaaaucauaaauucuguaacuuaucugaugcacauaagaaaaaccuauaugaccacgcacuaaugagcauuauaucaaccuuccacuuaucuauaccaaauuucaaccaauaugaagccaugucaugcgauuucaacggaggaagaaucucuguacaauacaaccuaucacacuccuaugcaguagacgccgcaaaccauuguggaacaauagcuaacggaguacuacaaaccuucaugagaauggcuuggggagguucauacauagccuuagacaguggaugcgguucaugggacugcauaaugacaucauaucaauaccuaauaauacaaaauacaacuugggaagaccacugccaauuuucaagaccaucaccaauaggauauuuaggucuauuaucacaaagaacaagagacauauacauuucuagacgaagacgaggaacauucacauggacacuaucagacucagaaggaaacgaaacacccggaggcuacugucuuacacgauggaugcuaauagaagcagaacuaaaaugcuucgguaacacugcaguugcaaaauguaacgaaaaacaugaugaagaauuuugcgacaugcuccgauuauucgauuucaacaaacaagcaauacgucgacuuaaaacaccagcucaaauguccauacaauuaauaaacaaagcaguaaaugcauuaauaaaugaccaacuaauaaugaaaaaccaccuaagagauauaaugugcauaccauacugcaacuacucuaaauacugguacuuaaaccacaccguaaccggaaaaacaucacuaccccgcugcuggcuaguaucaaauggaaguuaccuaaacgaaacacacuuuucagacgacauagaacaacaagcagacaacaugauaacagaacuacuacaaaaagaauacaucgauagacaaggcaaaacaccacuuggccuagucgaucuauucguauucagcacaucauuuuaucucauaucaaucuucuuacacuuagucaaaauaccuacacacagacacauaaccggaaaaccaugucccaaaccacacagacuaaaccacaugggaauaugcuccugcggacuauauaaccacccaggaguaccaguaaaauggaaaagauaaggacuagucccuguucccagagcccacuuuuuuuucuuuuuuugaaauaaaauagccugucuuucagaucuaaaaaaaaaaaaaaaaaaaaaaaaaaaaaaaaaaaaaaaaaaaaaaaaaaaaaaaaaaaaaaaaugcaucccccccccccccccccccccccccccccccaaaggcucuuuucagagccaccagaauu

SEQ ID NO: 6343 - RNA, 1749 nt, Artificial Sequence
  mRNA product Design a-1 comprising derived and/or modified sequence from LASV(Lassa virus/H.sapiens-wt/NGA/2016/ISTH_0017;Clade II)__AVO03567__GPCstabilized (opt6)
gggagagucccgcagucggcguccagcggcucugcuuguucgugugugugucguugcaggccuuauucaagcuuaccaugggacaaauaauaacauucuuccaagaaguaccacacgucauagaagaaguuaugaacauuguacuuauagcacuuucacucuuagcaauccuaaaagguauauacaauguagcuaccugcggacuauuuggacuaguaucauucuuauuacuauguggcagaucaugcucaacaacauacaaaggaguauacgaauuacaaacacuagaacuugacauggcaucacuaaacaugacuaugccuuuauccugcaccaaaaacaacucacaccacuacauaaugguaggaaacgaaacaggccuagaacuaacauuaacaaacacaucaaucauaaaccacaaauucuguaacuuaucagaugcacacaaaaaaaaccucuacgaccacgcucuaauguccauaauaucaacauuccacuuaucuauaccaaacuucaaccaauacgaagcaaugucaugcgacuuuaacggcggaaaaauaucaguacaguacaaccuaagccacacauaugccauagacgcagccaaccauuguggaacaauagcaaauggaguacuacaaacuuucaugagaauggcauggggaggaucauauauagcccuagacucaggauguggaucaugggacuguaucaugacaucauaccaauacuuaauaauacaaaauacaaccugggaagaccacugccaauuuucccgacccucaccuauaggauaucuagguuuacuaucccaaagaacacgagacauauacaucucaagaagaagaagagguaccuucaccuggacacucuccgacagcgaaggaaacgaaaccccuggcggauacugucuuacacgauggauguuaauagaagcagaauuaaaauguuuuggaaauacagcaguugcaaaaugcaaugaaaaacacgacgaagaauucugugacaugcuccgacuauuugauuuuaauaaacaagcaauaagacgacuaaaaaccccagcccaaaugucaauacaacuaauaaacaaagcaguuaacgcacuaauaaacgaccaauuaauaaugaaaaaccaccuaagagacauaaugugcauaccauacuguaacuacagcaaauacugguacuuaaaccacaccguaacaggaaaaacaucauuacccagauguuggcuaguauccaaugguucauacuuaaacgaaacacacuuuuccgacgauauagaacaacaagcagacaacaugauaaccgaacuauuacaaaaagaauacauggacagacaaggaaaaaccccacuaggccuaguagaucuauucguauucucaaccucauucuaccucauaaguauauuucuacaccuaguaagaauaccaacccauagacacguaauaggaaaaccaugcccaaaaccacauagacucaaccauaugggaauaugcagcugcggacuguacaaacauccuggaguaccaguuaaauggaaaagauaaggacuagucccuguucccagagcccacuuuuuuuucuuuuuuugaaauaaaauagccugucuuucagaucuaaaaaaaaaaaaaaaaaaaaaaaaaaaaaaaaaaaaaaaaaaaaaaaaaaaaaaaaaaaaaaaaugcaucccccccccccccccccccccccccccccccaaaggcucuuuucagagccaccagaauu

SEQ ID NO: 6344 - RNA, 1749 nt, Artificial Sequence
  mRNA product Design a-1 comprising derived and/or modified sequence from LASV(Lassa virus/H.sapiens-wt/NGA/2018/ISTH_0959;Clade II)__AVV65099__GPCstabilized (opt6)
gggagagucccgcagucggcguccagcggcucugcuuguucgugugugugucguugcaggccuuauucaagcuuaccaugggacaaauaaucacauucuuccaagaaguaccacacguaauagaagaaguaaugaauauaguucucauagcauuaucacuccuugcaauauuaaaaggaauauauaacguaguaacuugcggacuauucggccuaguauccuuucuacuacuauguggaagaucaugcuccaccaccuauaaaggaguauacgaacuucaaacacuugaacuagacauggccucauuaaauaugaccaugccauuaaguugcacaaaaaacaacucacaccauuacauaaugguaggaaacgaaacaggacuagaauuaacacuuacaaacacaucuauaaucaaucacaaauucugcaaucuauccgacgcccacaaaaaaaaccuauacgaccaugcacuuaugucaauaauaucaaccuuccaccuuucaauuccaaacuucaaucaauacgaagcaaugucuugcgauuucaacggaggaaaaauaucaguacaauacaaucuaucccaugccuacgcaauagacgcugcaaaucacugcggaacaauagcaaacggcguccuccaaacauucaugagaauggcauggggaggcucauauaucgcauuagacucuggauguggaucaugggauuguaucaugacaaguuaccaauaccuaauuauacaaaauacaaccugggaagaccacugccaauucucaagacccuccccaauaggauaucuaggacuauuaucacaacgaacuagagacauauauauaucacgaagaagaagagguacauucacauggacacuaucagacucagaaggaaacgaaacaccaggcgguuauugcuuaacacgauggaugcuaauagaagcagaacuaaaaugcuuugguaauacagcuguagcaaaaugcaaugaaaaacaugacgaagaauucugugacaugcucagauuauuugauuuuaacaaacaagcaauaagaagguuaaaaacaccugcacaaaugucaauacaauuaauaaacaaagccguuaacgcacuaauaaacgaccaauuaauaaugaaaaaccaucuucgcgacauaaugugcauaccauacugcaacuacucuaaauacugguacuuaaaccacacaguaacaggcaaaacauccuuaccacgaugcuggcuaguaucaaacgguuccuacuuaaacgaaacccacuucucagaugacauagaacaacaagcagacaacaugaucacagaauuauuacaaaaagaauacauagauagacaaggaaaaacaccacuaggccucgucgauuuauucgucuuuucaacaucauuuuauuuaauuucaauauuccuacauuuaguaaaaauaccaacacaccgacacguaauaggaaaaccuuguccaaaaccccacagauuaaaccauaugggaauauguuccugcggccuauauaaacauccaggcguucccgucaaauggaaacguuaaggacuagucccuguucccagagcccacuuuuuuuucuuuuuuugaaauaaaauagccugucuuucagaucuaaaaaaaaaaaaaaaaaaaaaaaaaaaaaaaaaaaaaaaaaaaaaaaaaaaaaaaaaaaaaaaaugcaucccccccccccccccccccccccccccccccaaaggcucuuuucagagccaccagaauu

SEQ ID NO: 6345 - RNA, 1749 nt, Artificial Sequence
  mRNA product Design a-1 comprising derived and/or modified sequence from LASV(LASV003-NIG-2008;Clade II)__AIT17580__GPCstabilized (opt6)
gggagagucccgcagucggcguccagcggcucugcuuguucgugugugugucguugcaggccuuauucaagcuuaccaugggacaaauaauaacauuuuuccaagaagucccacacguaauagaagaaguaaugaacaucguccuaauagcauuaucauuacuagcaauucuaaaaggaauauacaauguagcaacuuguggccuauucggccuaguaucauuccuauuauuauguggccgaagcugcucaacaaccuacaaagguguauacgaacuacaaacccuagaauuagacauggcaucacuaaauaugacaaugccacuauccugcaccaaaaacaacucccaucacuacauaaugguaggcaacgaaacaggcuuagaacuaacacuaacaaacacuucaauaauaaaccacaaauucugcaaccuauccgacgcccacaagaaaaauuuauaugaccacgcauuaaugucaauaauaucaacauuccacuuauccauacccaauuucaaccaauacgaagcaaugucaugugauuucaacggagguaaaaucagcguacaauacaauuuaucacauacauaugcaguagacgcagcaaaccauuguggcacaauagcaaacggaguauuacaaacauucaugagaauggcuuggggaggaucauacauugcacucgacucaggaugcggaucaugggauugcauaaugacaucauaccaauaccuaauaauacaaaacacaaccugggaagaucacugccaauucuccagaccaucaccaaucgguuauuuaggacuacuaucacaaagaacaagagacauauauauaucacgaagaagacgaggaacauuuaccuggacccuaucagauucagaaucaaaugaaacaccaggcggauacugccuaacaagauggauguuaauagaagcagaauuaaaaugcuuuggaaauacagcaguagcaaaauguaacgaaaaacacgaugaagaauuuugcgauaugcuacgacuauuugacuucaacaaacaagcaauaagacgacuaaaagccccugcacaaaugucaauacaauuaauuaauaaagcaguuaaugcauuaauaaaugaccaacuaauaaugaaaaaccacuuaagagacaucauguguauaccauauugcaacuauagcaaauacugguacuuaaaccacacaguuacaggaagaacaagccuaccccgauguuggcucguauccaacggaucauaccuuaacgaaacacacuuuucagaugacauagaacaacaagcagauaacaugauaacagaauuauuacaaaaagaauacauggaccgacaaggcaaaacaccacuaggccuaguagaccuauuuguauuuuccaccuccuucuaccuaauaucaauuuucuuacacuuaguaaaaaucccuacacaccgacacguaauaggaaaaccaugcccaaaaccacaccgauuaaaccacaugggaauauguucauguggauuauacaaacacccaggaguaccagucaaauggaaaagauaaggacuagucccuguucccagagcccacuuuuuuuucuuuuuuugaaauaaaauagccugucuuucagaucuaaaaaaaaaaaaaaaaaaaaaaaaaaaaaaaaaaaaaaaaaaaaaaaaaaaaaaaaaaaaaaaaugcaucccccccccccccccccccccccccccccccaaaggcucuuuucagagccaccagaauu

SEQ ID NO: 6346 - RNA, 1749 nt, Artificial Sequence
  mRNA product Design a-1 comprising derived and/or modified sequence from LASV(LASV035-NIG-2009;Clade II)__AIT17588__GPCstabilized (opt6)
gggagagucccgcagucggcguccagcggcucugcuuguucgugugugugucguugcaggccuuauucaagcuuaccaugggacaaauaauaaccuuuuuccaagaaguaccacacguaauagaagaaguaaugaacauaguacuuauagcauuaagccuccuugcuauuuuaaaaggaauauacaauguagcaacauguggacuauucggacuaguaucauuucuuuuauuaugcggaagaucauguuccacaacauacaaaggaguuuacgaauuacaaacauuagaacuagacauggcaucauuaaacaugacaaugccacuauccugcacaaaaaacaacucacaucauuacaucaugguaggaaaugaaacaggauuagaacuuacacuaacaaacacaagcauaauaaaccacaaauucugcaaccuaucagacgcacacaaaaaaaaucuauaugaccacgcacuaaugucaauuauauccacauuucacuuaucaaucccaaacuucaaccaauacgaagcaaugucaugcgacuuuaauggaggaaaaauuucuguacaauauaaccuaucacaugccuacgcuguagaugcugcaaaccacugcgguacaaucgcaaauggaguauuacaaacauucaugagaauggcuuggggaggaucauacauagcauuagacucaggaugcggcucaugggacuguauaaugacaucuuaccaguaucuaauaauacaaaacacaaccugggaagaucacugccaauucucacgacccucaccaauuggauacuuagguuuacuaucacaaagaacccgcgauauauacaucuccagaagacgcagaggaacauuuaccuggacauuaagcgacuccgaaggaaaugaaacaccuggaggauacugcuuaacuagauggauguuaauagaagccgaacuuaaaugcuucggaaauacagcuguugcuaaaugcaacgaaaaacacgacgaagaauucugcgacaugcuaagauuauucgacuucaacaaacaagcuauaagaagacuaaaagcaccagcacaaaugucaauacaauuaauaaauaaagcaguuaacgcauuaauaaacgaucaacuuauuaugaaaaaccaccuaagagacauaaugugcauaccauacuguaacuacucaaaauauugguacuuaaaccacacaguaacaggaaaaacaucacucccaagauguugguuaguaagcaacggcuccuaccuaaacgaaacacauuucagugacgauaucgaacaacaagccgauaauaugaucacagaacuacuacaaaaagaauauaucgauagacaaggaaaaacacccuuaggacuaguagaccucuucguauucucaacauccuucuacuuaauauccauauucuuacaccuaguaaaaauaccaacacauagacacguaauaggaaaaccauguccaaaaccucacagacuaaaccacaugggaauuuguuccuguggacuauauaaacaccccggcguaccaguaaaauggaaacgauaaggacuagucccuguucccagagcccacuuuuuuuucuuuuuuugaaauaaaauagccugucuuucagaucuaaaaaaaaaaaaaaaaaaaaaaaaaaaaaaaaaaaaaaaaaaaaaaaaaaaaaaaaaaaaaaaaugcaucccccccccccccccccccccccccccccccaaaggcucuuuucagagccaccagaauu

SEQ ID NO: 6347 - RNA, 1749 nt, Artificial Sequence
  mRNA product Design a-1 comprising derived and/or modified sequence from LASV(LASV1000-NIG-2009;Clade II)__AIT17782__GPCstabilized (opt6)
gggagagucccgcagucggcguccagcggcucugcuuguucgugugugugucguugcaggccuuauucaagcuuaccaugggacaaauaauaaccuucuuccaagaaguaccacacguaauugaagaaguaaugaauauaguucuaauagcacucucacuauuagccauacuuaaaggcauauauaauguagcaacaugcggauuauucggauuaguaucauuucuauuacuaugcggacgauccuguagcacaacauacaaaggaguauacgaacuacaaacauuagaauuagauauggcaucacuaaauaugacaaugcccuuaucuuguaccaaaaacaacucacaccacuacauaaugguuggaaacgaaacaggacuagaauuaacacuaacaaacacaucaauaauaaaucacaaauucugcaaccuaucagacgcucauaagaaaaaccuauacgaccacgcccuaauguccauaauaucaaccuuucaccuaucaauacccaauuuuaaccaauacgaagcuaugucaugcgauuucaacggcggaaaaauauccguacaauacaauuuaucacauacauaugcaguugaugccgcaaaucacugcggaacaauagcaaauggcguucuacaaacauuuaugagaauggcuuggggcggaucauacauagcacuugauucuggcugcggaucaugggauugcauaaugacauccuaccaauacuuaauaauacaaaacaccaccugggaagaccacugccaauucucaagaccaucaccuauaggcuacuuaggacuauuaucacaaagaacccgagacauauacauauccagaagacgaagaggcaccuucacauggacacuaucagauucagaaggaaacgaaacaccagguggcuauugcuuaaccagauggaugcuaauagaagccgaauuaaaaugcuuuggaaacacagcaguagcaaaaugcaacgaaaaacaugacgaagaauuuugcgauaugcuuagauuauucgauuuuaauaaacaagcaauaaaacgucuaaaaacaccagcacaaaugagcauucaauuaauaaacaaagccgucaacgcucuaauaaaugaccaacuaauaaugaaaaaccacuuaagagacauaaugugcauaccuuauuguaacuacucaaaauauugguaccuaaaccauacugucacaggaaaaacaucauuacccagaugcuggcuaguaucaaauggaucuuaucuaaaugaaacacacuucucagacgacauagaacaacaagcagacaacaugauaaccgaacuacuucaaaaagaauacauagacagacaaggaaaaacaccauuaggccuaguagaccuauucguauucucuacauccuuuuauuuaauaagcauauuucuacaucuaguaaaaauaccuacacauagacauguaguaggcaaaccaugcccaaaaccacacagacucaaccacaugggaauauguagcuguggauuauacaaacaucccggcguucccguuaaauggaaaagauaaggacuagucccuguucccagagcccacuuuuuuuucuuuuuuugaaauaaaauagccugucuuucagaucuaaaaaaaaaaaaaaaaaaaaaaaaaaaaaaaaaaaaaaaaaaaaaaaaaaaaaaaaaaaaaaaaugcaucccccccccccccccccccccccccccccccaaaggcucuuuucagagccaccagaauu

SEQ ID NO: 6348 - RNA, 1749 nt, Artificial Sequence
  mRNA product Design a-1 comprising derived and/or modified sequence from LASV(LASV221-NIG-2010;Clade II)__AIT17624__GPCstabilized (opt6)
gggagagucccgcagucggcguccagcggcucugcuuguucgugugugugucguugcaggccuuauucaagcuuaccaugggccaaaucauaaccuuuuuccaagaaguaccucauguaauagaagaaguaaugaacauaguucucaucgcacuaucacuccuagcaauacuaaaaggaauauacaacguugcaaccuguggauuauuuggauuaguaucauuuuuauuacucugcggcagaucuuguucaacaacauauaaaggaguauacgaauuacaaacauuagaauuagacauggcaucacuuaacaugaccaugccacuaucuugcacuaaaaacaauucacaccacuauaucaugguaggaaaugaaacaggauuagaauuaacauuaacaaacacaucaauaauaaaccacaaauucugcaaucuauccgacgcacacaagaaaaacuuauaugaccaugcacuuaugagcauaauaucuacauuucaccuaucaauaccaaauuuuaaccaauacgaggcaaugucuugcgacuuuaacggaggcaaaauaucaguccaauacaaccuaucacacaccuacgcaauagacgcagcaaaccacugcggaacaaucgcuaauggaguauuacaaacauucaugagaauggccuggggcggaagcuacaucgcauuagacucaggaugcggaucaugggacuguaucaugacaucauaccaauaccuuauaauacaaaacacaacaugggaagaccacugccaauucucacgaccaucccccauaggauaccuaggacuacuaucucaaagaacaagagacauauacauaucacgaagacgucgcgguacuuuuacauggacacucucagauuccgaaggcaacgaaacaccaggagguuacugccuaacaagauggaugcuuauagaagcagaauuaaaaugcuuuggaaauacagcuguagcaaaaugcaacgaaaaacacgaugaagaauuuugcgacaugcuaagauuauucgacuuuaauaaacaagcaauaagaagacuaaaaacaccagcccaaaugucaauacaacuaauaaacaaagcuguaaacgcccucauaaacgaccaauuaauaaugaaaaaucacuuaagagacauaaugugcaucccauauuguaacuauucaaaauacugguaucuaaaccauacaguaacaggaaaaaccagcuuaccaagaugcuggcuaguauccaacggaucauacuuaaacgaaacacacuuuucagacgacauagaacaacaagcugacaauaugauaacagaaaugcuucaaaaagaauauauggaccgacaaggaaaaacaccauuaggauuaguagaucucuucguauucucaacaucauucuacuuaauaucaauauuccuacaccucgucaaaauacccacacauagacauguaauaggcaaaccauguccaaaaccacacagacucaaccauaugggaauauguucaugcggucuauauaaacacccaggagucccaguaaaauggaaaagauaaggacuagucccuguucccagagcccacuuuuuuuucuuuuuuugaaauaaaauagccugucuuucagaucuaaaaaaaaaaaaaaaaaaaaaaaaaaaaaaaaaaaaaaaaaaaaaaaaaaaaaaaaaaaaaaaaugcaucccccccccccccccccccccccccccccccaaaggcucuuuucagagccaccagaauu

SEQ ID NO: 6349 - RNA, 1749 nt, Artificial Sequence
  mRNA product Design a-1 comprising derived and/or modified sequence from LASV(LASV237-NIG-2010;Clade II)__AIT17638__GPCstabilized (opt6)
gggagagucccgcagucggcguccagcggcucugcuuguucgugugugugucguugcaggccuuauucaagcuuaccaugggacaaauaauaacuuucuuccaagaaguaccacacguaauagaagaagucaugaauauaguccuaauagcacucucauuacuagcaauacuaaaaggaauauacaacguagccaccugcggacuauucggauuaguaucauuccuucuuuuaugcgguagaucuugcucaacaacauacaaaggaguuuacgaauuacaaacacuagaacuagauauggcuucacuaaauaugacuaugccacuauccugcacaaaaaacaacucacaucacuacauaauggucggaaacgaaaccggucuagaauuaacauuaacaaacacaucaauuaucaaccauaaauuuugcaaucucuccgacgcacauaaaaaagaccuauacgaucacgcacuaaugucaauuaucucaacuuuccaccuaucaauaccaaauuuuaaucaauacgaagcaaugucaugcgauuuuaauggaggaaaaauaucuguacaauauaacuuaucacacaccuacgcaguagacgcagcaaaccauugcggaacaauagcaaacggaguuuuacaaacuuucaugagaauggcauggggaggauccuacauagcauuagacucaggaugcggaaguugggauuguauaaugacuucauaccaauaccucauaauacaaaauaccacuugggaagaccacugccaauucucacgaccuucaccaaucggauacuuaggucuccuaucacaaagaaccagagacauauacauaucaagacgaagacgcggaacuuucacauggacacuaucagauucugaaggaaacgaaacuccaggaggauacugcuuaacaagauggauguuaauagaagccgaacuaaaaugcuucggaaacacagcaguagcaaaauguaacgaaaaacacgacgaagaauuuugcgacauguuaagacucuucgacuucaauaaacaagcaauaagaagacuaaaaacaccagcacaaaugucuauacaacuaauuaauaaagcaguaaacgcauuaauaaaugaccaacuaauuaugaaaaaccaucuacgcgacauaaugugcauaccauacugcaacuauucuaaauauugguauuuaaaccacacaguaacaggaaaaacaucccuacccagguguugguuaguaagcaauggaucauacuuaaaugaaacacauuucucugaugacaucgaacaacaagcagacaauaugauaacagaacuacuucaaaaagaauacauggacagacaaggaaaaacaccauuaggucuaguagauuuauucgucuucucuacaucauuuuaucuaauaucaaucuucuuacaucuaauaaaaauaccaacccacagacauauaacaggcaaaccaugcccaaaaccucauagacuaaaccacaugggaauaugcucauguggccuauacaaacacccaggcgucccagucaaauggaaaagauaaggacuagucccuguucccagagcccacuuuuuuuucuuuuuuugaaauaaaauagccugucuuucagaucuaaaaaaaaaaaaaaaaaaaaaaaaaaaaaaaaaaaaaaaaaaaaaaaaaaaaaaaaaaaaaaaaugcaucccccccccccccccccccccccccccccccaaaggcucuuuucagagccaccagaauu

SEQ ID NO: 6350 - RNA, 1749 nt, Artificial Sequence
  mRNA product Design a-1 comprising derived and/or modified sequence from LASV(LASV253-NIG-2011;Clade II)__AIT17670__GPCstabilized (opt6)
gggagagucccgcagucggcguccagcggcucugcuuguucgugugugugucguugcaggccuuauucaagcuuaccaugggccaaauaauaacauucuuucaagaaguaccacacguaauagaagaaguaaugaauaucguacuaauagcucucucacuccuagcaauacuaaaaggaauauacaacguagcuaccugcggccuauuuggccuugucuccuuccuacuccuaugcggacgaucaugcucaacaacauauaaaggagucuacgaacuucaaacauuagaacuagacauggcaucacuaaacaugacaaugccccuaucauguacaaaaaauaauucucaccacuauaucaugguagguaacgaaacaggccuagaacuaacccucacaaacaccucaauaauuaaccacaaauucugcaauuuauccgacgcacauaaaaaaaaccucuaugaccacgcacuaauguccauaauauccacauuccaucucucaauacccaacuucaaccaauacgaagcaaugucaugugacuucaauggaggaaaaauuucaguacaauacaaccucucacauacauacgccguugacgcagcaaaccacugcggcacaauagcuaacggcguccuacaaacauucaugagaauggccuggggaggaucauauauugcuuuagauucaggauguggauccugggauugcauaaugacaucauaccaauaccuuauaauacaaaacacaacaugggaagaccauugccaauucucaagaccaucacccauaggauaccuaggacuauuaucacaacgcacacgagacaucuauauaucaagaagaagacgaggaacauucacauggacacucuccgacuccgaaggaaaugaaacaccaggaggauacugucuaaccagauggauguuaaucgaagcagaacuaaaaugcuucggaaacacagcaguagcaaaaugcaacgaaaaacaugaugaagaauucugcgacaugcuacgauuauucgauuucaauaaacaagccauaagacgacucaaagcaccagcacaaaugucaauacaacuaauaaauaaagcaguuaacgcacuaauuaacgaucaacuaauaaugaaaaaucacuuaagagauauaaugugcauaccauacuguaacuacuccaaauacugguacuuaaaccauacaguaaccggaagaacaagccuaccaagaugcuggcuagugucaaacggaucauaucucaacgaaacacauuucucagacgauaucgaacaacaagcagacaauaugauaacagaauuauuacaaaaagaauacaucgacagacaaggaaaaacuccauuaggauuaguagaucuauuuguauucucaacuucauucuauuuaauaucaauauucuuacacuuaguaaaaaucccaacacacagacacauaauaggcaaaccuugcccuaaaccacacagauuaaaccauaugggaaucugcucaugcggauuauauaaacacccaggagucccagucaaauggaaacgauaaggacuagucccuguucccagagcccacuuuuuuuucuuuuuuugaaauaaaauagccugucuuucagaucuaaaaaaaaaaaaaaaaaaaaaaaaaaaaaaaaaaaaaaaaaaaaaaaaaaaaaaaaaaaaaaaaugcaucccccccccccccccccccccccccccccccaaaggcucuuuucagagccaccagaauu

SEQ ID NO: 6351 - RNA, 1749 nt, Artificial Sequence
  mRNA product Design a-1 comprising derived and/or modified sequence from LASV(LASV254-NIG-2011;Clade II)__AIT17674__GPCstabilized (opt6)
gggagagucccgcagucggcguccagcggcucugcuuguucgugugugugucguugcaggccuuauucaagcuuaccaugggacaaauaaucacauucuuucaagaaguaccacacguaauagaagaaguaaugaacauaguccuaauagccuuaagucuccuagcaauauuaaaaggaaucuauaauguugcaacaugcggcuuauucggucuaguaucauuucuauuacuaugcggaagaucauguuccacaaccuauaaaggaguauacgaauuacaaacccuggaacuagacaugacaaacuuaaauaugacaaugccacuuaguugcaccaaaaauaauucacaccacuacauaauggucggaaacgaaacaggauuagaauuaacacuaacaaacacaucuauaauaaaccacaaauucugcaauuuaucagaugcucacaagaaaaaccuauacaaucacgcauuaauguccauaauauccaccuuccaucuaucaaucccaaacuuuaaccaauacgaagcaauguccugcgacuuuaacggaggaaaaauaucaguacaauauaacuuaucccacucauaugcaguagaugccgccaaucacugcggaacaauagcaaacggaguacuacaaacauucaugagaauggcuuggggaggaagcuacauugcccuagacucaggauguggaaauugggauuguaucaugacauccuaucaauaccuaauaauacaaaauaccacaugggaagaucacugccaauucucacgaccaucaccaauaggauauuuaggacuccucucccaacgaacucgagacauuuauauuucacgaagacgaagaggaacuuucacauggacucuaucagauagcgaaggaaaugaaacacccggaggauauugccuaacaagauggaugcugauagaagcagaacuaaaauguuucggaaauacagcaguagcaaaaugcaaugaaaaacaugacgaagaauuuugcgauauguuaagauuauucgacuucaacaaacaagcaauacgcagacuuaaaacaccagcacaagcaaacauacaacuaauaaacaaagcaguaaaugcauuaauuaacgaccaacuaauaaugaaaaaccaucuaagagacaucaugugcauaccauauuguaacuauucaaaauauugguaccuaaaucacacaguaacaggaaaaaccucacuaccuagguguugguuaguaucaaacggaagcuaccuaaacgaaacacauuucuccgacgacauagaacaacaagcagacaacaugauaacugaacuauuacaaaaagaauauauggacagacaaggaaaaacgcccuuaggacuuguagacuuauucguauucucaaccucauuuuaccuaauaucaauauuccuacaccucguaaaaauaccaacacacagacaugucauaggaaaaccuugcccaaaaccucacagacuaaaccacaugggaauaugcuccugcggccuauacaaacauccaggaguaccuguaaaauggaaaagauaaggacuagucccuguucccagagcccacuuuuuuuucuuuuuuugaaauaaaauagccugucuuucagaucuaaaaaaaaaaaaaaaaaaaaaaaaaaaaaaaaaaaaaaaaaaaaaaaaaaaaaaaaaaaaaaaaugcaucccccccccccccccccccccccccccccccaaaggcucuuuucagagccaccagaauu

SEQ ID NO: 6352 - RNA, 1749 nt, Artificial Sequence
  mRNA product Design a-1 comprising derived and/or modified sequence from LASV(Nig08-A19;Clade III)__ADU56618__GPCstabilized (opt6)
gggagagucccgcagucggcguccagcggcucugcuuguucgugugugugucguugcaggccuuauucaagcuuaccaugggucaaauaguaacauucuuccaagaagucccccacguuauagaagaaguaaugaacauagucuuaauagcauuaucaauacuagccauccuuaaaggacuauacaauauagcaaccugcggacuuauuggccuaguaacauuucuacucuuaucaggaagaucaugcuccaugacuuauaaaggaguauacgaacuucaaacacuagaacuuaacaugaauacuuuaaauaugacaaugccauuaucaugcaccaaaaacaacucacaccauuacaucaugguuggcaacgaaacaggauuagaacuaacuuuaacaaacacaucauuacuacaucacaaauucugcaaucuaagcgacgcacauaagaaaaaucuauacgaccacacacuaaugucaauaauaucaacauuucaucuaucaauaccaaacuucaaucaauacgaagcaaugagcugugauuucaacggaggaaaaauaacaguccaauacaaccuaucacacucuuacgcaauagacgcagcaaaccacugcggaacagucgcuaaugggguacuacaaaccuucaugagaauggcauggggcggcucauacaucgcacuugauagcggauguggcaaaugggauugcauuaugacaucauaccaauaccuaauaauccaaaauacaacgugggaagaccacugccaauucaguagaccuucaccaauaggauacuuaggauuacuaucacaacgaaccagagauaucuacauauccagaagaagacgcggcacauucacauggacccucucagacucagaagguaaugaaacaccaggaggauacugcuuaacaagauggaugcuuauagaagcagaauuaaaaugcuucggaaacaccgcuguagcaaaaugcaacgaaaaacacgacgaagaauuuugcgacaugcuaagacuauucgacuucaacaaacaagcaaucagacgauuaaaagcucccgcacaaauguccauacaacuaauaaauaaagcaguaaaugcuuuaauaaacgaccaacuaauaaugaaaaaccaccuaagagacauuaugugcauacccuauugcaacuacucaaaauacugguaucuaaaccauacaucaacugguagaacaucacuaccaagaugcugguuaguaucaaacggauccuacuuaaaugaaacacacuucucugaugacauagaacaacaagcagacaacaugauaacagaaaugcuucaaaaagaauacuuagacagacaagguaaaacaccucucgggcuaguagaccuauucguauucucaacaucauucuaccuuauaucaauauuccuacauuuaguaaaaaucccaacacaccgacauaucguaggaaaaccaugcccaaaaccacacagauuaaaucacaugggaauauguaguugcggauuauacaaacaacccggaguaccuguacgcuggaaaagauaaggacuagucccuguucccagagcccacuuuuuuuucuuuuuuugaaauaaaauagccugucuuucagaucuaaaaaaaaaaaaaaaaaaaaaaaaaaaaaaaaaaaaaaaaaaaaaaaaaaaaaaaaaaaaaaaaugcaucccccccccccccccccccccccccccccccaaaggcucuuuucagagccaccagaauu

SEQ ID NO: 6353 - RNA, 1752 nt, Artificial Sequence
  mRNA product Design a-1 comprising derived and/or modified sequence from LASV(G1180-SLE-2010;Clade IV)__AIT17168__GPCstabilized (opt6)
gggagagucccgcagucggcguccagcggcucugcuuguucgugugugugucguugcaggccuuauucaagcuuaccaugggacaaauagucacuuuuuuccaagaaguaccacauguaaucgaagaaguaaugaacauaguacuaauagcacuuuccauacuagcuguccuaaaaggacucuacaacuucgccacaugcggacuaguaggccuauuaacauuccuauuauuaugcggccguuccugcacagcaucaagauacaaagguguauacgaacuccaaacacuagaauuaaauauggaaacauuaaacaugacaaugccucuaucaugcacaaaaaacaacucacaucauuacauaaugguaggaaacgaaacaggacuagaacuaacauuaacaaacacaucaauaaucaaucacaaauucugcaauuuaagcgacgcucacaaaaaaaacuuauacgaccacgcauuaaugucaauaauaucaacuuuccaccuuucaaucccaaacuucaaccaauacgaagcaaugucaugugacuucaacggcggaaaaauaucaguucaauacaacuuaucucacucauacgcuggagacgcagcaaaucacuguggaacaguagcaaacggaguucuacaaacauucaugagaauggcauggggaggaucauauauagcauuagacucaggaugcggaucaugggacugcauuaugaccucauaccaauaccuaauaauacaaaacacaacaugggaagaccacugccaauucucuagaccaaguccaauaggauacuuaggacuucuaucacaaagaacacgcgacauauacauaucccgcagacgaagagguacauuuacauggacacuaagcgauuccgaaggaaaagacacaccaggaggauauugccuaacacgcuggaugcucauagaagcugaacuaaaaugcuucggaaauacagcuguagcaaaauguaacgaaaaacacgacgaagaauuuugugacaugcuaaggcuauucgacuucaacaaacaagcaauccaaagauuaaaagcacccgcucaaaugucaauacaacuaauaaacaaagcaguaaacgcacuaauaaacgaccaacuaauaaugaaaaaccaucucagagauauaaugugcauuccauacugcaacuauucaaaauacugguaucuaaaucacacaacaaccgguaaaacaucacuaccaaaaugcugguuaguaagcaacggaucauauuuaaacgaaacacacuucucugacgauauagaacaacaagcagacaauaugauaacagaaauguuacaaaaagaauacauggaaaggcaaggaaaaaccccacuaggauuaguagaccuauuuguauucucaacaaguuuuuacuuaauaucaaucuuucuacaucuaguaaaaauaccaacccacagacacauaguaggaaaauccugccccaaaccucacagacuaaaccacaugggcauaugcuccugcggacuauacaaacaacccggaguaccagucaaauggaaaagauaaggacuagucccuguucccagagcccacuuuuuuuucuuuuuuugaaauaaaauagccugucuuucagaucuaaaaaaaaaaaaaaaaaaaaaaaaaaaaaaaaaaaaaaaaaaaaaaaaaaaaaaaaaaaaaaaaugcaucccccccccccccccccccccccccccccccaaaggcucuuuucagagccaccagaauu

SEQ ID NO: 6354 - RNA, 1752 nt, Artificial Sequence
  mRNA product Design a-1 comprising derived and/or modified sequence from LASV(G1442-SLE-2011;Clade IV)__AIT17180__GPCstabilized (opt6)
gggagagucccgcagucggcguccagcggcucugcuuguucgugugugugucguugcaggccuuauucaagcuuaccaugggacaaauaguuaccuuuuuccaagaaguaccucauguaauagaagaagucaugaauauaguccuaauagcauuaucaauauuagcaguauuaaaaggacuuuacaacguagcaaccuguggacuaauaggucuaguaacauuucuacucuuaugcggaagaucauguacuacaacacuauacaaaggaguauacgaauuacaaacucuagaacuaaauauggaaacacuaaacaugacaaugccacucucauguaccaaaaacaacucacaucacuacauucgaguaggaaaugaaacaggucuagaauuaacauuaacaaacacaucaauaauaaaccauaaauucugcaaccucucagacgcacacaagaaaaacuuauacgaccaugcauuaaugucaauaauuuccacauuccauuuauccauaccaaauuuuaaucaauacgaagcaauguccugcgacuucaacggaggaaaaauauccguucaauauaauuuaagucacucuuaugcaggagacgcagcaaaucacuguggaacaguagccaacggagucuuacaaacauucaugagaauggcauggggagguucauacaucgcccuagacucaggcugcggaaauugggauugcauaaugacauccuaucaauaccuaauaauacaaaacacaaccugggaugaccacugucaauucucaagaccaucuccaauaggauauuuaggauuacuaucacaaagaacaagagacguauacauaagcagaagaagaagaggaacauuuacauggacuuuaucagauucagaaggaaaagacacacccggcggcuacugccugaccagauggaugcuaauagaagcagaauuaaaauguuucggcaacacagcaguagcaaaaugcaaugaaaaacacgacgaagaguucugcgauaugcuaagacuuuucgacuucaauaaacaagcaauucaacgauuaaaagcuccagcacaaauguccauacaacuuauaaacaaagccguaaacgcccuaauuaaugaucaauuaauaaugaaaaaccaccuaagagacauaauguguauaccuuacuguaauuacaguaaauacugguacuuaaauaauacugccacaggaaaaacaucauuaccaaaaugcugguuaauaucaaacggaucauacuuaaacgaaacacacuucucagaugacaucgaacaagaagcugacaacaugauuacagaaauguuacaaaaagaauacauggaaagacaaggaaaaacaccuuuaggucuaguagaucuauucgucuucuccacaucauucuaucucauaucuaucuuucuacaccuaguaaaaauaccaacacacagacacauagucggaaaauccugcccaaaaccacacagauuaaaccacaugggaauuugcucaugcggacuauacaaacaaccaggaguaccaguaagauggaaaagauaaggacuagucccuguucccagagcccacuuuuuuuucuuuuuuugaaauaaaauagccugucuuucagaucuaaaaaaaaaaaaaaaaaaaaaaaaaaaaaaaaaaaaaaaaaaaaaaaaaaaaaaaaaaaaaaaaugcaucccccccccccccccccccccccccccccccaaaggcucuuuucagagccaccagaauu

SEQ ID NO: 6355 - RNA, 1752 nt, Artificial Sequence
  mRNA product Design a-1 comprising derived and/or modified sequence from LASV(G3010-SLE-2013;Clade IV)__AIT17344__GPCstabilized (opt6)
gggagagucccgcagucggcguccagcggcucugcuuguucgugugugugucguugcaggccuuauucaagcuuaccaugggucaaaucguaacauuuuuccaagaaguaccacacgugaucgaagaaguaaugaauauaguacucauagcauuaaguauauuagcuguacuaaaaggccuauauaacuucgccacaugcggucuaguaggucuaguaacauuucuacuauuaugcggaagauccugcacaacaucccuauacaaaggagucuacgaauuacaaacauuagaauuaaacauggaaacacugaacaugacaaugccauuaucaugcaccaaaaacaacucacaccacuacaucauggucggaaaugaaacaggacuagaacuaacacuaacaaacacauccauaauaaaccacaaguuuugcaacuuaucagacgcacauaagaaaaaccucuauaaucacgcacuuauguccauaauauccacauuccaccuauccauaccaaacuucaaccaauacgaagcaaugucaugcgacuucaacggaggaaaaauuucaguacaauacaacuuaucacacucauacgcgggagacgcagcaucucauugcggaacaguagcaaacggaguauuacaaacauuuaugcgaauggcuuggggaggcucauauauagcacuagacucaggaugcggaaaaugggacugcauaaugacauccuaccaauaccuaauaauccaaaauacaacaugggaagaucauugucaauucuccagacccucaccaauaggauaccuuggacuacuaucacaaagaacaagagacauauacauaucaagaagaagacgaggaacauuuaccuggacacuaucagacucugaaggaaaagacacaccaggaggcuauugccuaacaagauggauguuaauagaagcagaacuaaaauguuucggaaauacagccguagcaaaauguaacgaaaaacaugacgaagaauuuugugauauguuacgacuauucgacuucaauaaacaagcaauacaaagacuaaaaacaccagcacaaaugucaauacaauuaauaaacaaagcaguuaacgcacuaauuaaugaucaacuaauaaugaaaaaccauuuaagagacauaauguguauaccuuauugcaauuacucaaaauacugguauuuaaaccacacaacaaccggcaaaacuucuuuaccaaaaugcuggcuaguaucuaacggaucauaucuuaacgaaacacacuucucagaugacauagaacaacaagcagacaacaugauuacagaaauguuacaaaaagaauauauggaaagacaaggaaaaacaccauugggcuuaguugauuuauuuguauucucaaccagcuucuacuuaauaucaauauuccuacaccuaguaaaaauaccuacacaccgacacauaguaggaaaaucaugccccaaaccacacagacuaaaucacaugggaauauguuccuguggacuauauaaacaaccaggaguaccaguaagguggaaaagauaaggacuagucccuguucccagagcccacuuuuuuuucuuuuuuugaaauaaaauagccugucuuucagaucuaaaaaaaaaaaaaaaaaaaaaaaaaaaaaaaaaaaaaaaaaaaaaaaaaaaaaaaaaaaaaaaaugcaucccccccccccccccccccccccccccccccaaaggcucuuuucagagccaccagaauu

SEQ ID NO: 6356 - RNA, 1752 nt, Artificial Sequence
  mRNA product Design a-1 comprising derived and/or modified sequence from LASV(G502-SLE-2009;Clade IV)__AIT17126__GPCstabilized (opt6)
gggagagucccgcagucggcguccagcggcucugcuuguucgugugugugucguugcaggccuuauucaagcuuaccaugggacaaauaguaaccuucuuccaagaaguaccacacguaaucgaagaagucaugaauauaguucuaauagcacucagcaucuuagcaguccuaaaaggacuauacaauuuugcaacaugcggucuaguaggacuacuuacauuccuucuauuauguggaagauccugcacaacaggacuauauaaaggaguauaugaauuacaaacacucgaauuaaacauggaaacacuaaacaugacaaugccacuaucaugcacuaaaaauaacucacaucauuauaucaugguuggaaaugaaacagguuuagaacuaacacuaacaaauacaagcauaaucaaucacaaauucugcaacuuaucugaugcucacaagaaaaacuuauaugaccacgcacuaaugagcaucauaucaacauuucacuuaucaaucccaaauuucaaccaauaugaagcaaugucaugcgauuucaacggaggaaaaauaucaguacaauacaaccucucacauucuuaugcuggagaugcagcagaucacugcggaacaguagcaaacggaguauuacaaacauucaugcgaauggcauggggaggaucauacauagcucucgacuccggaugcggaagaugggauugcauaaugacauccuaucaauaccuuauaauacaaaacacaacaugggaagaccacugccaauucucaagaccaaguccaauaggauaccuaggacuauuaucacaacgaacaagagacauuuacauaucucgacgcagaagaggaaccuucaccuggacauuauccgacucagaaggaaaagauacaccaggaggauacugcuuaacaagauggaugcuaauagaagccgaacucaaaugcuucggaaauacagcaguagccaaaugcaacgaaaaacacgaugaagaauuuugugacaugcuaagacuauucgacuucaacaaacaagcuauacaaagauuaaaagcacccgcccaaauguccauccaacuaauaaauaaagcuguaaacgcacuaaucaaugaccaacucguaaugaaaaaucaucuaagagacauaauguguauacccuacuguaacuacucacgauacugguaccuaaaccauacaacaacaggaagaacaucacuuccaaaaugcugguuagucucuaauggaucauaccuaaacgaaacacacuuuuccgacgauauagaacaacaagcagauaauaugauaacugaaauguuacaaaaagaauacauggaaagacaaggaaaaacuccccuaggucuaguagaccucuucguauuuucaacaucuuuuuaucuaaucucaauauucuuacaccuaguaaaaauaccaacacacaggcauauagucggaaaauccuguccaaaaccacacaggcuaaaccacaugggaauaugcucuuguggacuauacaaacaaccaggagucccaguaaaauggaaaagauaaggacuagucccuguucccagagcccacuuuuuuuucuuuuuuugaaauaaaauagccugucuuucagaucuaaaaaaaaaaaaaaaaaaaaaaaaaaaaaaaaaaaaaaaaaaaaaaaaaaaaaaaaaaaaaaaaugcaucccccccccccccccccccccccccccccccaaaggcucuuuucagagccaccagaauu

SEQ ID NO: 6357 - RNA, 1752 nt, Artificial Sequence
  mRNA product Design a-1 comprising derived and/or modified sequence from LASV(G733-SLE-2010;Clade IV)__AIT17154__GPCstabilized (opt6)
gggagagucccgcagucggcguccagcggcucugcuuguucgugugugugucguugcaggccuuauucaagcuuaccaugggacaaauaguaaccuucuuccaagaaguaccucacguaauagaagaaguaaugaauauaguauuaauagcauuauccauccucgcaguacuuaaagguuuauacaacuuugcaaccugcggcauagucggucuaguauccuuucucuuauuaugcggaagaucauguacaacauccuuauacaaaggaguauacgaacuacaaacauuagaauuaaacauggaaacucucaacaugacaaugccauuaucauguaccaaaaacaauagccaucauuauauaaugguaggaaacgaaacaggacucgaacuaacacuaacaaacacaucaauaauaaaccacaaauucugcaaccuuucagacgcacacaagaaaaaccuauacgaucacgcacuaaugucuauaauaucaacauuccaccuaagcauaccaaauuucaaucaauacgaagccauguccugugacuucaauggaggaaaaauaucaguacaauacaaccuaucacauuccuacgcaggagacgcagcaaaccauugcggaacaauagcaaacggaguucuacaaacauucaugagaauggcauggggaggaagcuacauagcacuagacucaggcugcgaccgaugggauugcauaaugacauccuaccaauaccuaauaauacaaaacacaacaugggaagaccauugccaauucucccgcccaucaccaauaggauacuuaggacuacuaucacaaagaacaagagacauuuauauaucuagacgaagaagaggaacauuuacauggacacuaucagauuccgaaggaaaagacacaccuggcggcuauugucuaaccagauggauguuaauagaagcagaacucaaaugcuuuggaaacacagcaguagccaaaugcaacgaaaaacacgacgaagaauuuugcgacauguuaagacucuucgauuuuaacaaacaagcaauacaaagauuaaaagcacccgcacaaaugucaauacaauuaauaaauaaagcuguaaacgcacuaauaaacgaccaauuaaucaugaaaaaccaucucagagauauaauguguauaccauacuguaauuauucuaaauacugguauuuaaaccacacaaccaccggaaaaacaucauuaccuaaaugcuggcuaguaagcaacgguucuuaucuaaacgaaacacacuuuucagacgacauagaacaacaggcagauaauaugauaaccgaaauguuacaaaaagaauacauggaaagacaaggaaaaacaccauuaggucuaguagaucuauucguauucucaacuagcuucuaccuuauaucaauuuuccuacauuuaguaaaaauacccacacauagacauguaguaggaaaaucauguccaaaaccacacagauuaaaccauaugggaaucuguucuugcggacuauacggacaaccagguguuccaguaaaauggaaaagauaaggacuagucccuguucccagagcccacuuuuuuuucuuuuuuugaaauaaaauagccugucuuucagaucuaaaaaaaaaaaaaaaaaaaaaaaaaaaaaaaaaaaaaaaaaaaaaaaaaaaaaaaaaaaaaaaaugcaucccccccccccccccccccccccccccccccaaaggcucuuuucagagccaccagaauu

SEQ ID NO: 6358 - RNA, 1752 nt, Artificial Sequence
  mRNA product Design a-1 comprising derived and/or modified sequence from MOPV/LASV reassortant(IGS-1;Clade IV)__AFY05576__GPCstabilized (opt6)
gggagagucccgcagucggcguccagcggcucugcuuguucgugugugugucguugcaggccuuauucaagcuuaccaugggccaaaucguaaccuucuuucaagaaguaccucauguaauugaagaaguaaugaauauaguucuuauagcacuaucaguauuagcaguucuaaaaggauuauauaacuucgccacauguggucuaguaggccuaguaaccuuuuuacuacuauguggaagaucaugcaccacaucauuauauaaaggaguauacgaacuucaaacccuagaacuaaauauggaaacacuaaacaugacaaugccauuaucaugcacgaaaaauaacucccaccacuacauuaugguaggaaacgaaacaggucuagaauuaacacucacaaauacaucaauuauaaaccacaaauuuugcaaucucuccgaugcgcacaagaaaaauuuauaugaccacgcacuaaugucaauaauaucaacauuucaccuaagcauaccaaacuucaaccaauaugaagccaugucaugcgauuucaacggaggaaaaaucucaguacaauacaaccuaucccauucauacgcaggagaugcagcaaaucacugcggcacaguagcaaacggcguacuacaaacauuuaugcgcauggccugggguggcucauacauagcucuagauucugguugugguaauugggauuguauaaugacaucuuaccaauaucuaauaauccaaaauacaacaugggaagaccacugccaauucucaagaccaucaccaauaggauauuuagguuuauuaucacaaagaacaagagacaucuauaucucacgaagaagacgaggaacauucacauggacacucucagacucugaaggugaagacacaccaggaggauacugccuaacacgauggauguuaauagaagcagaacuaaaaugcuucggaaauacagcaguugcaaaaugcaacgaaaaacacgaugaagaauuuugcgauauguuacgauuauuugacuuuaacaaacaagcaauacaacgacuaaaagcccccgcacaaaugucaauacaacuaauaaacaaagcaguaaaugcacugauaaaugaucaacuaauaaugaaaaaucacuuaagagacaucauguguaucccauauugcaacuacucaaaauauugguaucuaaaucacacuaccacaggaagaacaucccuaccaaaaugcuggcucguaucuaacggaaguuaccuaaacgaaacacacuuuucagaugauaucgaacaacaagcagacaacaugauaacagaaaugcuacaaaaagaauauauggaaagacaaggaaaaacaccacucggcuuagucgaccucuucgucuuuucaacaucauucuaccuaauaucaaucuuccuacaccucguaaaaauaccaacacacagacauauaguaggaaaaucgugcccaaaaccacauagacuuaaccauaugggaauauguucauguggucuuuacaaacaaccaggcgugccaguaaaauggaaacguuaaggacuagucccuguucccagagcccacuuuuuuuucuuuuuuugaaauaaaauagccugucuuucagaucuaaaaaaaaaaaaaaaaaaaaaaaaaaaaaaaaaaaaaaaaaaaaaaaaaaaaaaaaaaaaaaaaugcaucccccccccccccccccccccccccccccccaaaggcucuuuucagagccaccagaauu

SEQ ID NO: 6359 - RNA, 1752 nt, Artificial Sequence
  mRNA product Design a-1 comprising derived and/or modified sequence from LASV(LM765-SLE-2012;Clade IV)__AIT17814__GPCstabilized (opt6)
gggagagucccgcagucggcguccagcggcucugcuuguucgugugugugucguugcaggccuuauucaagcuuaccaugggacaaauaguaacauucuuucaagaaguaccacauguaauagaagaaguaaugaacaucguauuaauagcauuaaguauacuagccguacuaaaaggacuauauaauuucgccacaugcggacucguaggccuagucaccuuccuacuucuaugcggaagaucuuguacaacaucauuauacaaaggagucuacgaacugcaaacauuagaauuaaacauggaaacacuaaacaugacaaugccacuaucaugcaccaaaaacaauucacaucacuacaucauggugggaaacgaaacaggauuagaacuaacacuuacaaauacaagcauaauagaccacaaauucugcaaccuaucagaugcacacagaaagaacuuauaugaucacgcacuaauguccauaauaucaacauuucaccuauccauaccaaacuucaaccaauaugaagcaaugucaugcgacuucaacggaggaaaaauaucaguacaauacaacuuaucacacaguuacgcaaaagacgcagcagaucauuguggaacaguagcaaacggaguacuacaaacauucaugcgaauggccuggggaggaagcuacauagcgcuagacucaggauguggacgaugggauugcauaaugacuucauaucaauacuuaaucauccaaaacacuacaugggaagaucacugucaauucuccagacccucccccauaggauaccuaggacuauuaucacagagaaccagagauauauauauaucaagaagaagaagaggaacauucacauggacccuaucagacucagaaggaaaagacaccccaggaggauacugcuuaacacgauggaugcucaucgaagcugaauuaaaaugcuucggaaauacagcagucgcaaaaugcaaugaaaaacacgacgaagaauuuugugacaugcuaagauuauucgacuucaacaaacaagccauacaacgacuaaaagcaccagcccaaaugucaauacaauuaauaaacaaagcaguaaacgcauuaauaaaugaccaacuaauaaugaaaaaucaccuuagagauauaauguguauuccauacugcaacuauagcaaauacugguacuuaaaucacaccacaacaggaaaaacaagccucccuaaauguuggcuaguauccaauggaucauaucuuaaugaaacacauuucucagaugauauagaacaacaagcagacaacaugauaaccgaaauguuacaaaaagaauauauggaaagacaaggaaaaacaccauuaggucuaguagauuuauucguauuuucaacaucauucuaucuaauaucaauuuuccuacaucuaguaaaaauacccacccacagacauauaguaggaaaaccaugcccaaaaccacacagacuaaaccacaugggaaucugcucauguggacucuauaaacaaccaggaguaccaguuaaauggaaaagauaaggacuagucccuguucccagagcccacuuuuuuuucuuuuuuugaaauaaaauagccugucuuucagaucuaaaaaaaaaaaaaaaaaaaaaaaaaaaaaaaaaaaaaaaaaaaaaaaaaaaaaaaaaaaaaaaaugcaucccccccccccccccccccccccccccccccaaaggcucuuuucagagccaccagaauu

SEQ ID NO: 6360 - RNA, 1752 nt, Artificial Sequence
  mRNA product Design a-1 comprising derived and/or modified sequence from LASV(LM776-SLE-2012;Clade IV)__AIT17824__GPCstabilized (opt6)
gggagagucccgcagucggcguccagcggcucugcuuguucgugugugugucguugcaggccuuauucaagcuuaccaugggacaaauaguaacauucuuccaagaaguaccucacgucauagaagaagucaugaacauaguccuaauagcccuaucaauacucgcaguacuaaaaggauuauacaauuuugcuacuuguggauuaguaggauuaguaacauucuuacuacucugcggccgaucaugcacuacaucaguauacaaaggaguauacgaacuacaaaccuuagaauuaaauauggaaacauuaaacaugacaaugccacuaucaugcaccaaaaacaacucacaucauuacauaaugguuggaaaugaaacaggccuagaauuaacacuaacaaacacaucaaucauaaaccacaaauucugcaaucugucagacgcacacaagaaaaaccuauaugaccacgcauuaaugucuauaaucucuacauuccauuuaagcauaccaaacuuuaaccaauacgaagcaaugucaugcgacuucaacggaggaaaaauaucaguccaguacaaucuaucacacucauacgcaggagaugcagcaaaccauuguggaacugucgccaacggcguauuacaaacauucaugcgaauggcauggggcggaucauacauagcacuagacucuggaugcggaaaaugggacugcauaaugacaucauaccaauaccuaauaauucaaaacacaacaugggaagaucacugucaauuuucacgaccaucuccaaucggauaucuaggacuacuuucacaaagaaccagagacauauauauaucucgucgccgcagaggaacauuuaccuggacauuaagugacuccgaaggaaaagauaccccaggaggcuauugucuaaccagauggaugcuaauagaagcagaacuaaaaugcuucggaaauacagcuguagcaaaauguaacgaaaaacaugacgaagaauuuugcgauauguuaagacuauucgacuucaauaaacaagcaauacaacgauuaaaagcaccagcacaaaugucaauacaauuaauaaauaaagccgucaaugcucuaauaaacgaccaacuaauaaugaaaaaccauuuacgcgacauaaugugcauacccuacugcaauuacucaaaauauugguaccuaaaucacacaacaaccggaaaaacaucauuaccuaaauguuggcucguaucaaacggauccuaucuaaaugaaacacacuuuucagacgauauagaacaacaagcagauaacaugauuacagaaaugcuucaaaaagaauauauggaaagacaaggcaaaacaccacuaggucuaguagaccucuucguauuuucaaccucauucuacuuaauaucaauauuccuacaucuaguuaaaauaccaacacaccgucacauagucggaaaaucuugcccaaaaccacacagacuaaaccauaugggaauaugcucaugcgguuuauacaaacaaccaggaguaccaguaagauggaaacgauaaggacuagucccuguucccagagcccacuuuuuuuucuuuuuuugaaauaaaauagccugucuuucagaucuaaaaaaaaaaaaaaaaaaaaaaaaaaaaaaaaaaaaaaaaaaaaaaaaaaaaaaaaaaaaaaaaugcaucccccccccccccccccccccccccccccccaaaggcucuuuucagagccaccagaauu

SEQ ID NO: 6361 - RNA, 1752 nt, Artificial Sequence
  mRNA product Design a-1 comprising derived and/or modified sequence from LASV(Mad39;Clade IV)__ANH09722__GPCstabilized (opt6)
gggagagucccgcagucggcguccagcggcucugcuuguucgugugugugucguugcaggccuuauucaagcuuaccaugggacaaauaguaaccuuuuuccaagaaguuccacauguaauagaagaaguaaugaacauaguccuaauagcacuauccauauuagccguacuaaaagguuuauacaauguagccacaugcggacucauaggccuuguaacauuucuacuccuaugcggacgcucaugcacaacaacacuauacaaaggaguauaugaacuacaagcacuagaacucaacauggaaacacuaaacaugacaaugccauuauccugcacaaaaaauaacucucaccacuauaucagaguuggaaacgaaacaggacuagaacuuacauuaacuaacacaucacuaauaaaccacaaauucugcaaucuaucugaugcacacaaaaaaaaccuuuacgaccacgcacuaaugucaauuauaucaacauuccaccuaucaauaccaaacuucaaucaauacgaagcaaugucuugcgacuucaacgauggaaaaauaucaguucaauacaaucuaucacacacauacgccggagacacagccaaccacuguggaacagucgcaaauggcguuuuacaaacauuuaugcgaauggcauggggaggaucuuacauagcacuagacucagguuguggaggaugggauugcauaaugacaucauaucaauaccuaauaauucaaaacacaacaugggaagaucacugccaauuuucaagaccauccccaauaggauaucuaggacuuuuaucacaaagaacgagagacauauacauaucacgaagaagaagaggaacuuucacauggacgcucuccgacuccgaagguaaagacacaccaggaggauacugcuuaacuagauggauguuaauagaagcagaauuaaaaugcuuuggaaauacagcaguagcaaaaugcaacgaaaaacaugaugaagaauucugugacaugcuucgacuauuugacuucaauaaacaagcaauacaaagacuaaaagcaccagcacaaaugucaauccaauuaauaaacaaagcaguaaaugcauugauaaaugaccaauuaauaaugaaaaaucaucuaagagacauaaugugcauaccauauugcaauuacucuaaauauugguaccuaaaccacacugucacuggaaaaaccucacuaccaaaauguugguuaguauccaacggcucauaccuaaacgaaacccauuucuccgaugacauagaacaacaagccgacaacaugauaacagaaaugcuccaaaaagaguacauggaaagacaagguaaaaccccuuuaggauuagucgaccuauucguauucucaacauccuucuaccuaauaucaaucuucuuacaucuuguaaaaauaccaacucaucgccacgucguuggaaaaccaugccccaaaccacaucgacucaaccauauggguauauguuccuguggcuucuacaaacaaccaggagucccaguacgauggaaaagauaaggacuagucccuguucccagagcccacuuuuuuuucuuuuuuugaaauaaaauagccugucuuucagaucuaaaaaaaaaaaaaaaaaaaaaaaaaaaaaaaaaaaaaaaaaaaaaaaaaaaaaaaaaaaaaaaaugcaucccccccccccccccccccccccccccccccaaaggcucuuuucagagccaccagaauu

SEQ ID NO: 6362 - RNA, 1752 nt, Artificial Sequence
  mRNA product Design a-1 comprising derived and/or modified sequence from LASV(Z0947-SLE-2011;Clade IV)__AIT17840__GPCstabilized (opt6)
gggagagucccgcagucggcguccagcggcucugcuuguucgugugugugucguugcaggccuuauucaagcuuaccaugggacaaauaguaacauucuuccaagaaguaccacacguaauagaagaaguaaugaauaucguucucauagcucuuuccauccuagcuguacuaaaaggauuauauaauuucgccacaugcggccuaguaggcuuaguaacauucuuauuacucugcgguagauccugcacaauaucacuauacaaaggaguauacgaauuacaaacccuagaacuuaacauggaaacacuaaacaugacaaugccauuauccuguacaaaaaacaauucucaccacuacauaaugguaggaaacgaaacaggucucgaacuaacucucacaaauaccuccauaauaaaccacaaauucugcaaccucucugaugcucacaaaaaaaaccuauacgaccaugcucuaauguccauaauaucaacuuuucauuuaucaaucccaaacuucaaccaauacgaagcaauguccugugacuuuaacggaggcaaaauuucagugcaauacaacuuaucacacucauacgccggagacgcugcuaaucacugcgguacaguagcaaacggaguauuacaaacauuuaugcgaauggcauggggaggaagcuacaucgcacucgacuccggaugugacagaugggacuguauaaugacaucauaccaauaccuaauaauacaaaacacuacaugggaagaccacugccaauuuucacgcccaucaccaaucggauacuuaggacuacuaucacaaagaaccagagacauauacauuuccagaagaagaagaggaacauucaccuggacccuaucagauucagaaggcaaagauacucccgguggauacugccuaacaagauggaugcuaauagaagcugaauuaaaaugcuucggaaacacagcaguagcaaaaugcaaugaaaaacacgaugaagaauucugcgauaugcuccgccuuuuugacuucaauaaacaggcaauacaacgauuaaaagcacccgcacaaaugaguauacaacuaauaaacaaagcaguaaacgcacuaauaaacgaucaauuaauaaugaaaaaucaucucagagacaucaugugcauaccauauugcaacuauagcaaauacugguacuuaaaccacacaaccacaggcaaaacaucacuaccaaaaugcuggcuaguaucuaacggaucauacuuaaaugaaacacauuucagcgaugauauagaacaacaagcagacaacaugauaacagaaaugcuacaaaaagaauacauggaacgacaaggaaaaaccccauuaggacuaguagacuuauucguauucaguacaucauuuuaccucauaaguaucuuccuacaccuugucaaaauaccaacacaucgacacauaguaggaaaaccaugccccaaaccacauagacuaaaccacaugggaauuugcuccuguggacuauauaaacaacccggcguaccaguaaaauggaaacgauaaggacuagucccuguucccagagcccacuuuuuuuucuuuuuuugaaauaaaauagccugucuuucagaucuaaaaaaaaaaaaaaaaaaaaaaaaaaaaaaaaaaaaaaaaaaaaaaaaaaaaaaaaaaaaaaaaugcaucccccccccccccccccccccccccccccccaaaggcucuuuucagagccaccagaauu

SEQ ID NO: 6363 - RNA, 1752 nt, Artificial Sequence
  mRNA product Design a-1 comprising derived and/or modified sequence from LASV(Josiah;Clade IV)__NP_694870__GPCstabilized (opt11)
gggagagucccgcagucggcguccagcggcucugcuuguucgugugugugucguugcaggccuuauucaagcuuaccaugggccaaaucguaaccuucuuccaagaagucccccacgucaucgaggaagucaugaacauaguccucauagcgcucucaguacucgccguccuaaaaggccucuacaacuucgcaaccugcggacucguaggacugguaacauuccuucuacuaugcggaagaucaugcacuaccucacuauacaaaggagucuacgaacuacaaacccuagaacugaacauggaaacccucaacaugaccaugccccuauccugcaccaaaaacaacagccaucacuacauaaugguaggcaacgaaaccggccuugaacuaacccuaacaaacacauccaucauaaaccacaaauucugcaaccucuccgacgcccacaagaaaaaccucuacgaccacgcucucaugaguaucauauccaccuuucaccuguccaucccaaauuuuaaccaguaugaagccauguccugcgacuucaacggcggaaaaaucuccguacaauacaaccucucccacuccuacgccggcgacgcagccaaccacugcggcaccgucgccaacggcguccuccagaccuucaugcgaauggccuggggaggcuccuacaucgcacucgacuccggaugcggcaauugggacugcaucaugaccuccuaccaauaccucaucauccaaaauaccaccugggaagaccacugccaauucucccgcccaucccccaucggauaccucggacuacuaucccaacggacccgcgacaucuacaucagccgacguaggcgcggaacauucaccuggacgcuaagcgacuccgaaggcaaagacacccccggaggcuacugccugacccgcuggaugcuaaucgaagcagaacuaaaaugcuucggcaacaccgccgucgccaaaugcaacgaaaaacacgacgaggaguucugugacaugcuacgccucuucgacuucaacaaacaagccauacagcgacucaaagcaccggcccaaaugagcauccagcuaaucaacaaagccgucaacgcacucauaaacgaccagcucauaaugaaaaaccaccuacgcgacaucaugugcauccccuacugcaacuacucaaaauacugguaccugaaccacacaacuaccggccgcacaucccucccaaaaugcugguuagucuccaacggcucauaccucaaugaaacccacuucagcgacgacaucgaacaacaagccgacaacaugaucacagaaaugcuccaaaaagaauacauggaacgacaaggaaaaacaccccucggccucgucgaccuauuugucuucuccacaucguucuaccuaauauccaucuuccuccaccucguaaaaauccccacccaucgccacaucgucggcaaauccugccccaaaccacaccgccucaaccauaugggcaucugcuccugcggucucuacaaacaacccggcguucccgucaaauggaaacgcuaaggacuagucccuguucccagagcccacuuuuuuuucuuuuuuugaaauaaaauagccugucuuucagaucuaaaaaaaaaaaaaaaaaaaaaaaaaaaaaaaaaaaaaaaaaaaaaaaaaaaaaaaaaaaaaaaaugcaucccccccccccccccccccccccccccccccaaaggcucuuuucagagccaccagaauu

SEQ ID NO: 6364 - RNA, 1749 nt, Artificial Sequence
  mRNA product Design a-1 comprising derived and/or modified sequence from LASV(LP;Clade I)__AAF86701__GPCstabilized (opt11)
gggagagucccgcagucggcguccagcggcucugcuuguucgugugugugucguugcaggccuuauucaagcuuaccaugggccaaauaauaacauucuuccaagaagucccccacgucaucgaagaagucaugaauaucguacucaucgcccucucgcuccucgcuauccugaaaggccucuacaacaucgccacaugcggcaucauaggccucgucgccuuccuauuucucugcggcaaaucuugcucccucacccuaaaaggaggcuacgaacuccaaacacuagaacucaacauggaaacccucaauaugaccaugccccuuuccugcaccaaaaacuccucccaccacuacauccgcguaggcaacgaaaccggccucgaacucacacucaccaacacaagcaucaucaaccacaaauucugcaaccugucugacgcucacaagaaaaaucuuuacgaucacgcacucaugucgaucauaucaacauuccaccucucgauccccaacuucaaccaauacgaagccauguccugcgacuucaacggcggcaaaaucagcguccaauacaaccucucccacuccuacgccggcgacgcagcagaacacugcggcaccguggcgaacggaguacuccaaaccuucaugcgcauggccuggggcggacgcuacauagcccucgacuccggcuguggcaacugggacugcaucaugaccuccuaccaauaccucaucauccagaauaccaccugggaagaccacugccaauucucccgccccucaccaauaggcuaccucggccuccuaucccaacgaacacgcgacaucuacaucucaagacgcagacgcggcaccuucaccuggacccucucagacucugaaggcaacgaaacccccggaggcuacugccucacacgauggaugcucaucgaagccgaacucaaaugcuucggaaacaccgccguggccaaaugcaacgaaaaacacgacgaggaguucugcgacaugcuccgacucuucgacuucaacaaacaagccauacgccgacuaaaagcccccgcgcaaaugagcauccaacucaucaacaaagccgucaacgcccucaucaaugaucaacucaucaugaaaaaccaccuccgcgacauaaugugcaucccauacugcaacuacucaaaauacugguaccuaaaccacacuuccucaggacgcaccucacuccccaaaugcuggcucaucuccaacggcuccuaccuuaacgaaacacaguucucggacgacaucgaacaacaagcagacaacaugaucaccgaaaugcuacaaaaagaauacaucgaacgccaaggcaaaacaccccuaggccuagucgacauuuucauauucuccaccuccuucuaccucaucucaauuuuccuccaccuaaucaaaauccccacacaucgccacaucguaggaaaaccuugccccaaaccacacagacuaaaccacaugggcgucugcuccugcggccucuacaagcacccaggcguucccacaaaauggaagcgcuaaggacuagucccuguucccagagcccacuuuuuuuucuuuuuuugaaauaaaauagccugucuuucagaucuaaaaaaaaaaaaaaaaaaaaaaaaaaaaaaaaaaaaaaaaaaaaaaaaaaaaaaaaaaaaaaaaugcaucccccccccccccccccccccccccccccccaaaggcucuuuucagagccaccagaauu

SEQ ID NO: 6365 - RNA, 1749 nt, Artificial Sequence
  mRNA product Design a-1 comprising derived and/or modified sequence from LASV(803213;Clade II)__AAF86703__GPCstabilized (opt11)
gggagagucccgcagucggcguccagcggcucugcuuguucgugugugugucguugcaggccuuauucaagcuuaccaugggccaaaucaucaccuucuuccaggaggucccacacgucaucgaggaagucaugaacaucguccucaucgcccucucccuccuagccauccucaaaggcaucuacaacgucgcaaccugcggacucuucggacuaauauccuuccuccuccuuugcggccgcuccuguucgguaaccuacaaaggcguauacgaacugcaaacacuagaacucaacauggccaaccucaacaugaccaugccccuuuccugcaccaagaauaacucccaccacuacaucauggucggcaacgaaaccggucuagaacucacccuaaccaacacuagcauaaucaaccacaaauucugcaaccuaagcgaugcccacaagaaaaaccucuacgaccacgcccuaaugucgaucaucuccacauuucaccuauccauccccaacuucaaccaauacgaagccauguccugcgacuucaacgguggcaaaaucuccguccaauacaaccucucccacagcuucgccgucgacgcagcgaaccauugcggcaccaucgccaacggcguacuacaaacuuucaugcgcauggccuggggcgggagcuacaucgcccucgacuccggcugcggaaacugggacugcauaaugaccucauaccaauaccucauaauccaaaacacaaccugggaagaccacugccaguucucucgaccaucaccaauaggcuaccuaggccuccuaucucaacgcacccgcgacaucuacaucucccgccgccgccgcggcacauucacauggacccucuccgacagcgaaggcaacgaagccccuggcggauacugccucacccguuggaugcucauagaagcagaacucaaaugcuucggcaacacggccgucgcuaaaugcaacgaaaaacacgacgaagaguucugcgacaugcuccgacucuucgacuucaacaaacaagccaucaaacgucucaaaacgcccgcccaaauguccauccagcucaucaacaaagcagucaacgcccucaucaaugaccaacucaucaugaaaaaccaccuacgcgacaucauguguauccccuacugcaacuacagccguuacugguaccuaaaccacacaguaaccggcaaaacaucacucccacgcugcuggcuagucuccaacggcuccuaccucaacgaaacccacuucuccgacgacaucgaacaacaggccgacaacaugaucaccgagaugcuccaaaaggaguacauggaccgccaaggcaaaacaccccucggccucguagaccuauuuguauucuccaccuccuucuaccuaaucuccauauuccuccaucucguaaaaauucccacccaccgacacaucgucggaaagccaugccccaaaccacaccgacucaaccacaugggcaucugcucgugcggccuauacaagcacccaggcguaccuguaaaauggaaacgcuaaggacuagucccuguucccagagcccacuuuuuuuucuuuuuuugaaauaaaauagccugucuuucagaucuaaaaaaaaaaaaaaaaaaaaaaaaaaaaaaaaaaaaaaaaaaaaaaaaaaaaaaaaaaaaaaaaugcaucccccccccccccccccccccccccccccccaaaggcucuuuucagagccaccagaauu

SEQ ID NO: 6366 - RNA, 1749 nt, Artificial Sequence
  mRNA product Design a-1 comprising derived and/or modified sequence from LASV(GA391;Clade III)__CAA36645__GPCstabilized (opt11)
gggagagucccgcagucggcguccagcggcucugcuuguucgugugugugucguugcaggccuuauucaagcuuaccaugggccaaaucguuaccuucuuccaagaaguaccacacguaaucgaagaagucaugaacaucguauuaaucgcccucucaauccucgcuauccucaaaggccuuuacaacguagcuaccugcggccucaucggccuaguaaccuuccuccuccucuccggccgcuccugcucccuuaucuacaaaggcacauacgaacuucaaacccucgaacuaaauauggaaacccuaaacaugacuaugccccuauccugcaccaaaaacaacucgcaccacuacauccgagucggcaaugaaacaggccucgaacucacccuuaccaacacaucgauccuaaaccacaaguuuuguaaccucuccgacgcgcacaaacgcaaccucuacgaccacucccucaugucaaucaucuccaccuuccaccuaucuauacccaacuucaaccaauacgaagcaaugucuugcgacuucaacggcggaaaaaucaccguccaguacaaucuaucacacucauucgcagucgacgccgccggucacugcggaacccucgccaacggaguacuucaaacauucaugcgcauggcauggggcggcuccuacaucgcccuagacucaggcugcggcaacugggacugcauaaugaccuccuaccaauaccucauuauccaaaacaccaccugggacgaccacugccaauucucccgaccuucacccaucggcuaccucgggcuacuaucccaacgaacccgagacaucuacaucucccgcaggcgccgcggcacauucaccuggacccuauccgacagcgaaggcaacgaaacccccgguggcuacugccucacccgcuggaugcucauagaagccgaguuaaaaugcuucgguaacacagccgucgcaaaaugcaacgaaaaacacgacgaagaguucugcgacaugcuccgacuuuucgacuucaauaaacaagccauccgccgccuuaagaccccagcccaaaugucaauccaacucaucaacaaagccguaaacgcccucaucaacgaucaacucaucaugaaaaaccaccuccgugacaucaugugcauacccuacugcaacuacucccgcuauugguaccucaaccacaccuccacaggcaagaccucacucccccgcugcuggcucauauccaauggcucuuaucuaaacgaaaccaaauucucagacgacaucgaacaacaagcugacaacaugaucaccgaaaugcuccaaaaagaauacauagaccgccaaggaaaaacaccccucggccucguagaccucuucgucuucuccaccuccuucuaucucaucucgaucuuccuccaccucgucaaaauacccacccaccgacacauagucggaaaacccugccccaaaccacaccgccucaaccacaugggcaucugcuccugcggccuauacaaacaacccggcguccccgugcgcuggaaacgauaaggacuagucccuguucccagagcccacuuuuuuuucuuuuuuugaaauaaaauagccugucuuucagaucuaaaaaaaaaaaaaaaaaaaaaaaaaaaaaaaaaaaaaaaaaaaaaaaaaaaaaaaaaaaaaaaaugcaucccccccccccccccccccccccccccccccaaaggcucuuuucagagccaccagaauu

SEQ ID NO: 6367 - RNA, 1752 nt, Artificial Sequence
  mRNA product Design a-1 comprising derived and/or modified sequence from LASV(AV;Clade V)__CCA30314__GPCstabilized (opt11)
gggagagucccgcagucggcguccagcggcucugcuuguucgugugugugucguugcaggccuuauucaagcuuaccaugggccaaauaguaaccuucuuccaagaaguuccccacgucaucgaagaagucaugaacaucguccuaauagcccucucaauccuagccguacuaaagggccucuacaacaucgcaaccugcggccucaucggccuaaucaccuuccuacuccugugcggacgcucaugcagcuccaaccuauacaaaggcgucuacgaacuccaaucccuugaccucaacauggaaacucucaacaugaccaugcccuuguccugcaccaaaaacaacucacaccacuacauacgcguaggcaacgacaccggucucgaacuaacccuaaccaacaccucuauccucaaccacaaauucugcaaccuaucagacgcacacaagaaagaccucuacgaccacgcacucaugucgaucauauccaccuuccaccucucaauacccaacuucaaccaauacgaagccaugucaugcgacuuuaacggaggcaaaaucuccguacaauauaaccucucacacuccuacgccaucgacgccgcaaaccacugcggaaccgucgccaacggcauccuccaaacuuucaugcgcauggccuggggaggaucuuacaucgcccuugacagcggaugcgguaacugggauugcaucaugaccuccuaccaauaccucauuauccaaaauacuaccugggaaaaccacugccaguucucccgccccagccccaucggauaccuaggucuacucucccaacgaacccgcgauaucuacaucucccgaagacgccgcggcaccuuuaccuggacacuauccgacucagaagguaacgccaccccagggggauacugccucacgagauggaugcucaucgaagcagaacuuaaaugcuucggcaacaccgccguagcaaaaugcaacgaaaaacacgacgaagaguucugcgacaugcuccgacucuucgacuucaacaaacaagccauaucacgucucaaauccccagcccaaauguccauacaacucauaaacaaagccguuaacgcacucaucaacgaccaacucaucaugaaaaaccaccuccgcgacauaaugugcauacccuacugcaacuacuccaaauacugguaccugaaccacaccauaaccggcaaaacuucacucccuaaaugcuggcucgucucgaacggaucauaccucaacgaaacucacuucuccgacgacaucgaacaacaagccgacaacaugaucaccgaaaugcuccaaaaagaauacauggaacgccaaggcaaaaccccacugggccucgucgaccucuucguauuuuccaccucauucuaccucaucuccaucuuccuccgccucguaaaaauccccacccaccggcacaucgucggaaaacccugccccaaaccccaucgacucaaccacaugggaauuugcucuugugggcuuuacaaacaaccaggcguacccguccgauggaaacgcuaaggacuagucccuguucccagagcccacuuuuuuuucuuuuuuugaaauaaaauagccugucuuucagaucuaaaaaaaaaaaaaaaaaaaaaaaaaaaaaaaaaaaaaaaaaaaaaaaaaaaaaaaaaaaaaaaaugcaucccccccccccccccccccccccccccccccaaaggcucuuuucagagccaccagaauu

SEQ ID NO: 6368 - RNA, 1749 nt, Artificial Sequence
  mRNA product Design a-1 comprising derived and/or modified sequence from LASV(Togo/2016/7082;Clade VI)__AMR44577__GPCstabilized (opt11)
gggagagucccgcagucggcguccagcggcucugcuuguucgugugugugucguugcaggccuuauucaagcuuaccaugggacaaaucaucaccuucuuccaagaagucccccacguaaucgaagaagucaugaacaucguacucauagcccucucccuacuagccauccucaaaggcgucuacaacgucgccacaugcggcaucauaggccucgucaccuuccuauuccucugcggccgcuccuguucccucaucuacaaaggcucguaugaauuacagacccucgaacucaacauggaaacccucaacaugaccaugccccucucaugcaccaaaaacagcucacaccacuacauccguguuggcaacgaaaccggacucgaauuaacccuuaccaacacauccaucaucaaccacaaguucugcaaccucucagacgcucacaaacgcaaccucuacgaccacgcccucauguccauccucuccaccuuccaccuuuccauccccaacuuuaaccaauacgaagccauguccugcgacuucaacggcggcaaaaucuccguccaauacaaccugucccacgccuacgccgucgacgccgccgaacacugcggcacagucgcaaacgguguccuacaaaccuucaugcguauggccuggggcggcuccuacauagcccuagacucuggauguggaaacugggacugcauaaugaccuccuaucaauaccuaaucauccaaaacacuacaugggaagaccacugccaauuuucccgacccucacccauaggcuaccucggccuccucucccaacgcacccgcgacauauacaucucucgucgccgccgcggcacauucaccuggaccuuaagugacucagaaggaaacgaaacccccggaggauacugccucacacgauggaugcucaucgaagcugaacuuaagugcuucggcaacacugccgucgccaaaugcaacgaaaaacacgacgaagaguucugcgacaugcuccgauuauucgacuucaacaagcaagccauccagcgacucaaaucccccgcccaaaugucgauccagcucauaaacaaagccgucaacgcccuuaucaacgaccaacucauaaugaaaaaccaccucagagacaugaugugcauaccguacugcaacuacuccaaguacugguaucucaaccacacauccuccggaagaaccucacuccccaaaugcuggcucguaucgaacggcucuuaccuaaacgaaacacacuuuagugacgacauugaacaacaagccgacaacaugaucaccgaaaugcuccaaaaagaauacaucgacagacaaggcaaaacaccccucggacucgucgaccuauucguauucucaaccucauucuaccucauauccaucuuucuccaccuaauaaaaauacccacccaccgacacaucgucggcaaacccugccccaaaccucaccgccuaaaccacaugggcaucugcuccugcggccucuacaagcaacccggaguccccacccgcuggaaacgauagggacuagucccuguucccagagcccacuuuuuuuucuuuuuuugaaauaaaauagccugucuuucagaucuaaaaaaaaaaaaaaaaaaaaaaaaaaaaaaaaaaaaaaaaaaaaaaaaaaaaaaaaaaaaaaaaugcaucccccccccccccccccccccccccccccccaaaggcucuuuucagagccaccagaauu

SEQ ID NO: 6369 - RNA, 1749 nt, Artificial Sequence
  mRNA product Design a-1 comprising derived and/or modified sequence from LASV(KAK-428;Clade n.d. (VII))__ANH09740__GPCstabilized (opt11)
gggagagucccgcagucggcguccagcggcucugcuuguucgugugugugucguugcaggccuuauucaagcuuaccaugggccaaaucguaaccuucuuccaggaaguaccccacgucaucgaagaaguuaugaacaucguacucaucgcccucucccuccuagcgauccuuaaaggacucuacaacuucgcaaccugcggcgucaucggacucauaacguuccuacuacucugcggacgcuccuguuccgccacguacaaaggccaauacgaacuccagacacuagaacucaacauggaaagccuaaacaugacgaugccccuauccugcaccaaaaacaacucacaccacuacauccgcgccgggaauaacaccggccuagaacuaacacucacaaacaccucgaucaucucccacaaauucugcaaccuaucagacgcccacaagaaaaaccucuacgaccacacgcucaugucaauuauuaccaccuuccaccucucgauaccaaacuucaaucaauacgaagccaugucaugcgacuucaacgguggcaaaaucucuauccaguacaacuugucccacuccuacgccggcgacgcggcccagcacugcggcaccguugcaaacggcguacugcagaccuucaugcgaauggccuggggaggcuccuaccucgcccuagacuccggcugccgcggaugggacugcaucaucuccaguuaccaauaccucaucauccaaaacaccacaugggacgaccacugccaauucucacgccccuccccgaucggcuaccucgguuucgucucccagaaaacgcgcgacauauacaucagccgccgacgucgcggcaccuucacauggacccucagcgacagcgaaggccacgacaugcccggcggcuacugccuaacccgauggaugcuaaucgaagccgaucucaagugcuucggcaacaccgccgucgcaaaaugcaacgaaaaacacgacgaagaguucugcgauauguggcgacucuucgacuucaacaaacaggccauccaaaggcuaaaggccccagcccaaaugaacauucaacuuauaaacaaagcagucaacgcccuuaucaacgaccaacucaugaugaagaaccaccuacgcgacaucaugugcauccccuacuguaacuacuccaaauucugguaccucaacaacaccaccaccggccgcaccucucucccacgcugcuggcucaucagcaacggcuccuaccuaaacgaaacccacuucuccgacgacaucgaacaacaagccgacaacaugauaacugaaaugcugcaaaaagaauacauggaccgucaaggcaaaacaccccucggccucgucgaccucuucguuuucuccaccagcuucuaccucaucaccaucuuccuacaccuugucaagauacccacccaccgccacaucgucggcaaacccugucccaaaccccaccgacucaaccacaugggaaucugcuccugcggccuauacaaacaaccaggcguccccguacgcuggaaacgcuaaggacuagucccuguucccagagcccacuuuuuuuucuuuuuuugaaauaaaauagccugucuuucagaucuaaaaaaaaaaaaaaaaaaaaaaaaaaaaaaaaaaaaaaaaaaaaaaaaaaaaaaaaaaaaaaaaugcaucccccccccccccccccccccccccccccccaaaggcucuuuucagagccaccagaauu

SEQ ID NO: 6370 - RNA, 1749 nt, Artificial Sequence
  mRNA product Design a-1 comprising derived and/or modified sequence from LASV(Pinneo-NIG-1969;Clade I)__AIT17836__GPCstabilized (opt11)
gggagagucccgcagucggcguccagcggcucugcuuguucgugugugugucguugcaggccuuauucaagcuuaccaugggacaaauaaucaccuucuuccaagaagugccccacgucauagaagaagucaugaauaucguccucaucgcacucucccuacucgccauacucaaagggcuguacaacauagcaaccugcggcaucauagggcucguugccuuccucuuccuuugcggcaaaucgugcucccucacccucaaaggcggcuacgaacuacaaacccucgaacucaauauggaaacccuaaacaugaccaugccacuauccuguacaaagaacucaucccaucacuacauccgcguaggcaaugaaacaggccucgaacucacacuaacuaacacguccauaauaaaccacaaauucugcaaccucucagacgcccacaagaaaaaccucuacgaccacgcccucauguccaucaucuccaccuuucaccuauccauucccaacuucaaccaauacgaagccauguccugcgacuucaacggcgguaaaaucucaguacaauacaaccucucacacuccuacgccggcgacgcagccgaacacugcggcaccguagccaacggcguacuacaaacauucaugcgcauggccuggggcggccgcuacauagcacuggacuccggcugcggaaacugggacugcaucaugacauccuaccaauaccucauaauccaaaacaccacaugggaagaccacugccaauucucccgcccaucacccaucggcuaccugggacuccuaucacaacgcacccgagacaucuacaucucccgacgccggcgcggcaccuucacauggacauuaucagacucugaaggcaaugagaccccaggaggcuacugccucacccgcuggaugcucaucgaagccgaacuaaaaugcuucggcaauaccgccguagccaaaugcaacgaaaaacacgaugaagaguucugcgacaugcuccgccuauucgacuucaacaaacaagcaaucagacgccucaaagccccagcccaaauguccauacagcuaauaaacaaagcagucaacgcucucaucaacgaccaacucaucaugaaaaaccaucuccgcgacaucauguguauccccuacugcaacuacagcaaauacugguaucuuaaucacaccuccuccggccgaaccucucuccccaaaugcuggcucauauccaacggauccuaccucaacgaaacccaguucagcgacgacaucgaacaacaagcggacaauaugaucaccgaaaugcuacagaaagaauacaucgaacgccaaggcaaaacaccacucggccuagucgacaucuucaucuucuccaccuccuucuaccucauuagcaucuuccuacaccucauaaaaauccccacacaccgccacaucgucggaaaaccgugccccaaaccucaccgucuuaaccacaugggcgucugcuccugcggccucuacaaacaccccggcguccccaccaaauggaaacgcuaaggacuagucccuguucccagagcccacuuuuuuuucuuuuuuugaaauaaaauagccugucuuucagaucuaaaaaaaaaaaaaaaaaaaaaaaaaaaaaaaaaaaaaaaaaaaaaaaaaaaaaaaaaaaaaaaaugcaucccccccccccccccccccccccccccccccaaaggcucuuuucagagccaccagaauu

SEQ ID NO: 6371 - RNA, 1749 nt, Artificial Sequence
  mRNA product Design a-1 comprising derived and/or modified sequence from LASV(ISTH0009-NIG-2011;Clade II)__AIT17404__GPCstabilized (opt11)
gggagagucccgcagucggcguccagcggcucugcuuguucgugugugugucguugcaggccuuauucaagcuuaccaugggucagaucauuaccuucuuccaggaagucccacacgucaucgaagaagucaugaacaucguacucaucgcccucagucuacucgcgauccuaaaaggcaucuacaacgucgcaaccugcggacucuuuggccuagucucuuuccuccuucucugcggacggucaugcuccaccaccuacaaaggcgucuacgaacuccaaacccucgaacuugacauggcaucccuaaauaugaccaugccgcucuccugcaccaaaaauaacucucaccacuacaucauggucggaaacgaaaccggccucgaacucacccuaacaaacacauccauuaucaaccacaaauuuugcaaccucuccgacgcucauaagaaaaaccucuacgaccacgcccucauguccaucauaucaaccuuccaccuaucaauaccaaacuucaaccaauacgaagccaugagcugcgacuucaacggaggaaagauaucaguccaauacaaccucucccacgccuacgcagucgacgcagccaaccacugcggcacaaucgccaacggcguacuacaaaccuucaugcgcauggccuggggcgguuccuacaucgcccucgacagcggaugcggaagcugggacugcauaaugacauccuaccaauacuuaaucauccaaaacaccacuugggaagaccacugccaauucucacgccccuccccaauaggauaccucggccuacucucgcaacgcacccgugacauauacauaucccgacgccgccgcggcaccuucacauggacccuauccgacagcgaaggcaacgaaacgccuggcggcuacugccucacccgcuggauguuaaucgaagccgagcuaaaaugcuucggcaacacagccguagccaaaugcaacgaaaaacacgacgaagaguucugcgacaugcucagacucuucgacuucaacaaacaagccauacgacgccucaaaaccccagcacaaauguccauccaacuaaucaacaaagccgucaacgcccuuauaaacgaccagcuuauaaugaaaaaccaccuccgcgacaucaugugcauccccuacugcaacuacagcaaauacugguaccuaaaccacacggucaccggcaaaacgucccucccccgcugcuggcuagucuccaacgguuccuaccucaacgaaacccacuucagcgacgacaucgaacaacaggccgacaacaugaucaccgaacuccuccaaaaagaauacauggaccgccaaggcaaaacaccccuaggccucgucgaccucuuugucuucagcaccucauucuaccucauaucuaucuuccuacaccuuaucaaaauccccacccacagacacaucaccggcaagcccugccccaaaccccaccgccucaaccacauggguaucugcagcugcggccucuacaaacacccuggcguacccguaaaguggaaacgcuaaggacuagucccuguucccagagcccacuuuuuuuucuuuuuuugaaauaaaauagccugucuuucagaucuaaaaaaaaaaaaaaaaaaaaaaaaaaaaaaaaaaaaaaaaaaaaaaaaaaaaaaaaaaaaaaaaugcaucccccccccccccccccccccccccccccccaaaggcucuuuucagagccaccagaauu

SEQ ID NO: 6372 - RNA, 1749 nt, Artificial Sequence
  mRNA product Design a-1 comprising derived and/or modified sequence from LASV(ISTH2010-NIG-2012;Clade II)__AIT17482__GPCstabilized (opt11)
gggagagucccgcagucggcguccagcggcucugcuuguucgugugugugucguugcaggccuuauucaagcuuaccaugggccaaaucauaacauucuuccaggaagucccgcacgucaucgaagaggucaugaacaucguacuaaucgcccugucccuccuagccauacuaaaaggcauauacaacguagccacaugcggccuauucggccuugucuccuuccuccuccucuguggccgcuccugcucaaccaccuacaaaggcguauacgaacuccaaacacuagaacucgacauggccucccucaacaugaccaugccccucucauguaccaagaacaacucacaccauuacaucauggucggcaacgaaaccggccuggaacucacccucacuaauaccagcaucaucaaccauaaauucugcaaccuauccgacgcccacaagaaaaaccucuacgaccacgcacuaaugucgaucaucucaaccuuccaccuaucuauccccaacuucaaccaauaugaggccauguccugcgacuucaacggcggcaaaauaagcguacaauacaaccucucccacgccuacgcugucgaugccgcuaaccacugcggaaccaucgcuaacggaguccuacaaaccuucaugcgaauggccuggggcggcagcuacaucgcccuagacuccggaugcggcagcugggacugcaucaugaccuccuaccaauaccuaaucauccaaaacaucaccugggaagaccacugccaauucagccgcccaucaccaaucggcuaccucggccuucucucucaacgaacccgagacaucuacaucucccgccgccgccgcggaaccuucaccuggacucucucugacucagaaggcaacgaaaccccaggaggauauugccucacccguuggaugcucaucgaagcagaacucaaauguuucggcaacaccgccgucgccaaaugcaacgaaaaacacgacgaagaguucugcgacaugcuccgacucuucgacuucaacaaacaagccauccggcgacucaaaacccccgcgcaaauguccauacagcucaucaacaaagccguaaacgcccucaucaacgaccagcuuaucaugaaaaaccaccuucgcgacaucaugugcauccccuacugcaacuacuccaaauauugguaccucaaccacaccguaaccgguaaaacgagccucccccgcugcuggcucgucuccaacggcuccuaccucaaugaaacccacuuuuccgacgacaucgaacaacaagccgacaacaugaucaccgaacuccuucaaaaagaauacauagaccgccaagguaaaaccccgcucggccuaguagaccuuuucguauucucaaccucuuucuaccuaaucuccaucuuccuccaccucgucaaaauccccacccaccgacacgucguagguaaaccaugccccaaaccccaccgacucaaucacauggguaucugcuccugcggacucuacaaacaucccggcguacccgucaaauggaaacgcuaaggacuagucccuguucccagagcccacuuuuuuuucuuuuuuugaaauaaaauagccugucuuucagaucuaaaaaaaaaaaaaaaaaaaaaaaaaaaaaaaaaaaaaaaaaaaaaaaaaaaaaaaaaaaaaaaaugcaucccccccccccccccccccccccccccccccaaaggcucuuuucagagccaccagaauu

SEQ ID NO: 6373 - RNA, 1749 nt, Artificial Sequence
  mRNA product Design a-1 comprising derived and/or modified sequence from LASV(Lassa virus/H.sapiens-wt/NGA/2015/ISTH_0543;Clade II)__AVO03639__GPCstabilized (opt11)
gggagagucccgcagucggcguccagcggcucugcuuguucgugugugugucguugcaggccuuauucaagcuuaccaugggccaaaucaucaccuucuuccaggaaguaccacacgucaucgaagagguaaugaacauaguccucaucgcacucucccuacucgccauauuaaaaggcaucuacaacguagcaaccugcggccuauucggccuagucucauuccuccuccucugcggccgcuccugcuccaccaccuacaaaggaguuuacgaacuccaaacccucgaacucgacauggcaaaccuaaacaugacaaugccucucuccugcaccaaaaacaacucacaccacuacaucauggucggcaacgagaccggccucgaacucacuuuaaccaacaccucaaucaucaaccacaaauucugcaaccuaucggacgcccacaagaaaaaccucuacgaccacgcccugaugucaaucaucucaacauuccaccucuccauacccaacuucaaccaauacgaagcaauguccugcgacuucaacggcggcaaaaucucuguacaauacaaccugucacacaccuacgccgucgacgccgccaaccacugcggaaccaucgccaacggcguccuacaaacauucaugcgcauggcguggggcggauccuacauagcucucgacuccgguugcggcuccugggacuguaucaugacauccuaccaauaccucgucauacaaaacacaaccugggaagaccacugccaauucucccgccccucuccaaucggcuaccugggccuccucagccaacgcacccgugacaucuacaucuccagacgcagacgcggaaccuucacauggacccucucagacuccgaaggcaacgagacccccggcggcuacugccuaaccagauggaugcugaucgaagcagaacugaaauguuucgguaacacugcaguagccaaaugcaacgaaaaacacgacgaagaguucugcgacaugcucagacuuuucgacuucaacaaacaagccauccgccgacuaaaaacccccgcccagaugucuauccaacucaucaacaaagccgucaacgcacucaucaacgaucaacucaucaugaaaaaccaccuccgcgacauuaugugcauaccuuacugcaacuacuccaaauauugguaccucaaccacacagucaccggcaaaaccagccucccccgcugcuggcucgucucaaacggcagcuaccuaaacgaaacccacuucucugaugacauugaacaacaggccgacaacaugauuacagaacuccuacaaaaggaauacaucgacagacaaggaaaaaccccucucggccuaguagaccucuucgucuucucaacauccuucuaccuaaucagcaucuuccuccaccucgucaaaauccccacccaccgccacauaaccggcaaacccugccccaaaccucaccgacucaaccacaugggaaucugcucauguggccucuacaaacaccccggcguacccgucaaauggaaacgcuaaggacuagucccuguucccagagcccacuuuuuuuucuuuuuuugaaauaaaauagccugucuuucagaucuaaaaaaaaaaaaaaaaaaaaaaaaaaaaaaaaaaaaaaaaaaaaaaaaaaaaaaaaaaaaaaaaugcaucccccccccccccccccccccccccccccccaaaggcucuuuucagagccaccagaauu

SEQ ID NO: 6374 - RNA, 1749 nt, Artificial Sequence
  mRNA product Design a-1 comprising derived and/or modified sequence from LASV(Lassa virus/H.sapiens-wt/NGA/2016/ISTH_0009;Clade II)__AVO03571__GPCstabilized (opt11)
gggagagucccgcagucggcguccagcggcucugcuuguucgugugugugucguugcaggccuuauucaagcuuaccaugggacaaaucaucaccuucuuccaagaagucccccacgucaucgaagaagucaugaauaucguccucauagcccuaucucuccuugcuauccucaaaggcaucuacaacgucgcaaccugcggccuacuagggcucgucuccuuccuacuacucugcggccgcuccugcucaaccaccuacaaaggcgucuacgaacuucaaacucucgaacucgauauggccucucuuaacaugacaaugccccucuccugcaccaaaaacaacucccaccacuacaucaugguuggcaaugaaacaggccucgaacucacccuaacaaacaccuccaucaucaaccacaaauucuguaaucucuccgacgcccacaagaaaaaccuauacgaccacgcccuuaugucuauaaucagcaccuuccaccucuccauacccaacuuuaaccaguacgaagccauguccugcgacuuuaacggcggacgcauauccguccaauacaaccugucacacuccuacgccguggacgcugccaaccacugcggcacaauugccaacggcguccugcaaaccuucaugcgcauggccuggggcggcuccuacauagccuuagacuccggaugcggcuccugggacugcaucaugacgucauaccaauaccucaucauacaaaacaccaccugggaagaccacugccaauuuucccgccccagcccaaucggcuaccucggccuucuaucccaacgaacccgcgacaucuacaucucacgccgccgccgcggcaccuucaccuggacccucuccgacuccgaaggcaacgaaacaccaggcggcuacugucucacacgcuggaugcucaucgaagccgaacuaaaaugcuucggcaacaccgccgucgccaaaugcaacgaaaaacacgacgaagaauuuugcgacaugcuacgacuuuucgacuucaacaaacaagcuauccgccgccuaaaaacccccgcucaaauguccauacaacucaucaacaaagccgucaacgcccucaucaacgaccaacuaaucaugaaaaaccaucuccgagacaucaugugcauccccuauuguaacuacuccaaauacugguaccuaaaccacaccguuaccgguaagacaucccuaccacgcugcuggcuagucucaaacggcuccuaccuaaacgaaacccacuucuccgacgacauagaacagcaagcagacaacaugaucacugaacuccuucaaaaagaauacaucgaccgccaagguaaaacaccccucggccucgucgaccuauucgucuucuccaccuccuucuaucuaauauccaucuuccuccaccucgucaaaauccccacccaucgccauaucacuggaaaacccugccccaaaccacaucgacuaaaccacauggguaucugcuccugcggccuauacaaccaccccggcgucccagucaaguggaaacgcuagggacuagucccuguucccagagcccacuuuuuuuucuuuuuuugaaauaaaauagccugucuuucagaucuaaaaaaaaaaaaaaaaaaaaaaaaaaaaaaaaaaaaaaaaaaaaaaaaaaaaaaaaaaaaaaaaugcaucccccccccccccccccccccccccccccccaaaggcucuuuucagagccaccagaauu

SEQ ID NO: 6375 - RNA, 1749 nt, Artificial Sequence
  mRNA product Design a-1 comprising derived and/or modified sequence from LASV(Lassa virus/H.sapiens-wt/NGA/2016/ISTH_0017;Clade II)__AVO03567__GPCstabilized (opt11)
gggagagucccgcagucggcguccagcggcucugcuuguucgugugugugucguugcaggccuuauucaagcuuaccaugggccagauuaucaccuucuuccaggaaguaccacacgucaucgaagaaguaaugaacaucguacucaucgcccuaucccuacucgcaauccucaaaggcaucuacaacguagcaaccugcggccucuucggacucguuuccuuccuccuccuuugcggccgcucaugcuccacaaccuacaaaggcgucuacgaacuacaaacacucgaacucgacauggccucccucaacaugaccaugccccucagcugcaccaaaaacaacagccaccacuacaucauggucggcaacgaaacaggacuugaacucacccucacaaacaccucaaucaucaaccacaaguucugcaaccuaagcgacgcgcacaagaaaaaccuauacgaccacgcccuaaugucaaucaucagcaccuuccaccucucgauucccaacuucaaccaauaugaagcaauguccugcgacuucaacggaggcaaaaucagcguccaguacaaccuaagccacacauacgccauagacgccgcaaaccacugcggcaccaucgccaauggcguccuccaaaccuucaugcgcauggccuggggaggcuccuacauagcacucgacuccggcugcggcucaugggacugcaucaugacauccuaccaauaccucaucauccaaaacacgacaugggaagaccacugccaauucucacgccccucccccauaggcuaccuaggccuccuaucacaacgcacccgcgacaucuacaucuccagacgacgucgagguaccuucaccuggacacucagcgacucagaaggcaacgaaacccccggcggauacugccucacccgcuggaugcuaauagaagcagaacucaaaugcuuuggcaacaccgcugucgcaaaaugcaacgaaaagcacgacgaagaguuuugcgacaugcuccgccucuucgacuucaacaaacaagccauccgucgccucaaaacacccgcccaaauguccauccagcuaaucaauaaagccguuaacgcacuuaucaacgaccaacucaucaugaaaaaccaccucagagacauuaugugcaucccauacugcaacuacuccaaauacugguaccuuaaccacacagucaccggcaaaaccucacuuccccgcugcuggcuagucuccaacggcucauaccucaacgaaacacacuuuagcgacgacauugaacagcaggcagacaacaugaucacagaacuacuccaaaaagaauacauggaccgccaaggaaaaacaccccuaggccuuguagaccuuuucgucuucuccaccuccuucuaccuaaucucaaucuuccuccaccucguucgaauccccacccaccgacaugucauaggaaaacccugccccaaaccccaccgacucaaccacaugggcaucuguuccugcggccucuauaaacaucccggaguccccguuaaauggaaacgcuaaggacuagucccuguucccagagcccacuuuuuuuucuuuuuuugaaauaaaauagccugucuuucagaucuaaaaaaaaaaaaaaaaaaaaaaaaaaaaaaaaaaaaaaaaaaaaaaaaaaaaaaaaaaaaaaaaugcaucccccccccccccccccccccccccccccccaaaggcucuuuucagagccaccagaauu

SEQ ID NO: 6376 - RNA, 1749 nt, Artificial Sequence
  mRNA product Design a-1 comprising derived and/or modified sequence from LASV(Lassa virus/H.sapiens-wt/NGA/2018/ISTH_0959;Clade II)__AVV65099__GPCstabilized (opt11)
gggagagucccgcagucggcguccagcggcucugcuuguucgugugugugucguugcaggccuuauucaagcuuaccaugggccaaaucaucacauucuuccaagaaguaccccacgucaucgaagaagucaugaacaucguucuaauagcccucucccuacuagccauccucaaaggcaucuauaacguagugaccugcggccuauuuggccucgucagcuuccuccuccuaugcggacgauccugcuccaccacauacaaaggagucuacgaacuacaaacacucgaacuugacauggccucccucaacaugaccaugccccucuccugcaccaaaaacaacucccaccauuacaucauggucggcaacgaaaccggccuagaacugacccucacaaauaccuccaucaucaaccacaaauucugcaaccuaagcgacgcccacaagaaaaaucucuacgaucacgcacucaugagcaucauauccaccuuccaccucuccauaccuaacuucaaccaauaugaagccaugucaugcgacuucaacggcggaaaaaucuccguccaauacaaccucagccacgccuacgccaucgacgccgccaaccacugcggaaccauagcgaacggagucuuacaaaccuucaugcgaauggcauggggcggcagcuacaucgcacucgacuccggaugcggcucaugggacugcaucaugaccuccuaccaauaccugauaauccaaaauaccaccugggaagaccauugccaauucagccgccccucccccauaggcuaccugggacuccuuucccaaagaacccgcgacaucuacaucucacgacggcgccgcggcacauucaccuggacccucuccgacagcgaaggcaaugaaaccccaggcggauacugccucacucgcuggaugcuaauagaagccgagcuaaaaugcuucggcaacaccgccgucgcaaaaugcaaugaaaaacacgaugaagaguucugcgacaugcuccgccuauucgacuucaacaaacaagccaucagacggcucaaaacaccagcccaaauguccauccaacucauuaacaaagccgucaacgcccuaaucaaugaccaacucauaaugaaaaaccaccuccgggacaucaugugcauaccauacugcaacuacuccaaauacugguaccucaaucacaccgucaccggcaaaaccucacuaccccgaugcuggcucgucuccaauggcucauaccuaaacgaaacucacuucucagacgacaucgaacaacaagccgacaacaugaucacagaacuccuacaaaaagaauacaucgaccgccaaggcaaaacaccccucggacucguagaucuauucguauucuccaccucauucuaccucaucuccaucuuccuccaccucgucaaaauaccaacccaccgccacgucauaggcaagcccugccccaaaccccaccgccucaaucacaugggcaucugcuccugcggccucuacaaacacccuggggucccaguaaaauggaaacguuagggacuagucccuguucccagagcccacuuuuuuuucuuuuuuugaaauaaaauagccugucuuucagaucuaaaaaaaaaaaaaaaaaaaaaaaaaaaaaaaaaaaaaaaaaaaaaaaaaaaaaaaaaaaaaaaaugcaucccccccccccccccccccccccccccccccaaaggcucuuuucagagccaccagaauu

SEQ ID NO: 6377 - RNA, 1749 nt, Artificial Sequence
  mRNA product Design a-1 comprising derived and/or modified sequence from LASV(LASV003-NIG-2008;Clade II)__AIT17580__GPCstabilized (opt11)
gggagagucccgcagucggcguccagcggcucugcuuguucgugugugugucguugcaggccuuauucaagcuuaccaugggucaaaucauaacauucuuccaagaaguuccacacgucaucgaagaagucaugaacaucguccucauagcccucucccuccucgcaauucucaaaggcaucuacaauguagccaccuguggccuauucggacucgucagcuuccuacuccuaugcggccgcuccugcuccaccaccuacaaagguguauacgagcuacaaacacucgaacucgacauggccucacucaacaugaccaugccacucuccugcaccaaaaacaacucccaccacuauaucauggucgguaacgaaacuggccucgaacuaacgcucacaaacacauccauaauaaaucacaaauucugcaaucucucagacgcccacaagaaaaaccuuuacgaccacgcccucaugucaaucaucuccaccuuccaccucuccauccccaacuucaaccaguacgaagcaaugucaugcgacuucaacggcggaaaaaucuccguccaauacaaccucucacacaccuacgccgucgacgcagccaaccacugcgguaccauagcaaacggaguacuccaaacauucaugcgcauggccuggggcggcuccuacauugcccuggacucaggcugcggcuccugggauugcaucaugacaagcuaccaauaucucaucauccaaaacaccacaugggaagaucacugucaauucucccgccccucaccaaucggauaccucggucuucucucccaacgaacccgcgacaucuacaucucccgccgucgacgcggcaccuucaccuggacccucuccgacuccgaauccaaugaaacucccggaggcuacugccucacucgcuggaugcuaaucgaagccgaacucaaaugcuuuggcaacaccgccguugcaaaaugcaacgaaaaacacgacgaggaguucugcgacaugcuacgccuuuucgacuuuaacaaacaagccauacgacgccucaaagcccccgcacaaauguccauccaacucaucaacaaagcagucaacgcccucaucaacgaucaacucauaaugaaaaaccaccuucgcgauaucaugugcauucccuacuguaacuacucgaaauacugguaccucaaccacaccgucaccggccgcaccucacucccccgcuguuggcucgucuccaacggcucuuaccucaacgaaacccacuucucagacgacaucgaacaacaagccgacaacaugaucaccgaacuccuccagaaagaauacauggaccgacaaggcaaaacuccacucggacucguagaccucuucgucuucucuaccuccuucuaccucauauccaucuuccuccacuuggucaaaauccccacacaccgccaugucaucggaaaaccaugccccaaaccacaccgccucaaucacaugggaauaugcagcugcggccucuacaaacaccccggcguacccgucaaauggaaacgcuaaggacuagucccuguucccagagcccacuuuuuuuucuuuuuuugaaauaaaauagccugucuuucagaucuaaaaaaaaaaaaaaaaaaaaaaaaaaaaaaaaaaaaaaaaaaaaaaaaaaaaaaaaaaaaaaaaugcaucccccccccccccccccccccccccccccccaaaggcucuuuucagagccaccagaauu

SEQ ID NO: 6378 - RNA, 1749 nt, Artificial Sequence
  mRNA product Design a-1 comprising derived and/or modified sequence from LASV(LASV035-NIG-2009;Clade II)__AIT17588__GPCstabilized (opt11)
gggagagucccgcagucggcguccagcggcucugcuuguucgugugugugucguugcaggccuuauucaagcuuaccaugggccaaaucaucaccuucuuccaagaagucccucacgucaucgaagaagucaugaacaucguccucauagcccucucucuacucgccauccucaaaggcaucuacaacgucgcaaccugcggccucuucgggcucguaucguuccuccuccucugcggaagauccugcucaaccaccuacaaaggcgucuacgaacuccaaacccucgaacucgacauggccucacuuaacaugaccaugccccucuccugcaccaaaaacaacucccaccauuacaucauggucgguaacgagaccggccuagaacuaacacucaccaacaccucuauaaucaaccacaaauucugcaaccuaucagacgcccacaagaaaaaccuuuacgaccacgcccuuauguccaucaucuccaccuuccaccuauccauacccaacuucaaccaauacgaagccauguccugcgacuucaauggcggcaaaaucuccguccaauacaaccucucccacgcauacgccgucgacgccgccaaccacuguggcaccaucgccaacgggguacuacaaaccuucaugcgcauggccuggggagguucguacaucgcccucgacucaggaugcggcucaugggacugcaucaugaccuccuaucaauaccucaucauccaaaacaccaccugggaagaccacugccaauuuucaagacccucccccauaggcuaccuaggccugcucucacaacgcacccgagacaucuacaucucccgccgacgacgcggaacauucacauggacucucuccgacucagagggcaacgaaacccccggcggcuacugccuaaccagauggaugcuaaucgaggccgaacucaaaugcuucggcaacaccgccgucgcaaaaugcaacgaaaaacacgacgaagaguucugcgacaugcuccgacucuucgacuucaacaaacaagccauucgacgccuaaaagcccccgcacagaugucaauccaacucaucaacaaagccguaaacgcccuaaucaacgaccaacuaaucaugaaaaaccaccuccgcgacaucaugugcaucccuuauugcaauuacuccaaauacugguaccucaaccacaccgucaccggaaaaacaucccuaccccgaugcuggcuaguauccaacggcuccuaccucaaugaaacgcacuucucagacgacaucgaacaacaagccgauaacaugauaaccgaacuucuccaaaaagaauacaucgacagacagggcaaaacaccccucggacucgucgaccuauucguauucucuaccucauucuaccuaauuucgaucuuccuccaccucgucaaaauacccacccaccgacacguuaucggcaaacccugccccaagccccaccgccucaaccacaugggcauaugcuccugcggccucuacaaacacccaggcguccccgucaaguggaaacgcuaaggacuagucccuguucccagagcccacuuuuuuuucuuuuuuugaaauaaaauagccugucuuucagaucuaaaaaaaaaaaaaaaaaaaaaaaaaaaaaaaaaaaaaaaaaaaaaaaaaaaaaaaaaaaaaaaaugcaucccccccccccccccccccccccccccccccaaaggcucuuuucagagccaccagaauu

SEQ ID NO: 6379 - RNA, 1749 nt, Artificial Sequence
  mRNA product Design a-1 comprising derived and/or modified sequence from LASV(LASV1000-NIG-2009;Clade II)__AIT17782__GPCstabilized (opt11)
gggagagucccgcagucggcguccagcggcucugcuuguucgugugugugucguugcaggccuuauucaagcuuaccaugggccaaauaaucaccuucuuccaagaaguaccucacgucauagaagaagucaugaacaucguccucaucgcccucucccuccucgccauacucaaaggcaucuacaacgucgcaaccuguggccucuucggccucgucucauuccuccuacucugcggcagaucaugcucaaccacauacaaaggcguauacgaacuucagacccucgaacucgacauggccucccucaacaugaccaugccccucuccugcaccaagaacaacucccaucacuacaucauggucggcaacgaaaccggacuagaacucacacuuacgaacaccuccaucaucaaccacaaauucugcaaccuaagcgacgcccacaagaaaaaccuguacgaccacgcucucauguccauaaucuccaccuuccaccucuccauccccaacuucaaccaauacgaagcaaugagcugcgacuucaacggcggcaaaauaucaguccaauacaaccuaucccacaccuacgccgucgacgccgcaaaccacugcggcacaaucgccaacggcguccuccaaaccuucaugcgcauggccuggggcgguagcuacaucgcccucgacuccggcugcggaucaugggacuguaucaugacauccuaucaguaccuaaucauccaaaacaccaccugggaagaccacugccaauuuucccgacccucccccauagguuaccucgggcuccucucccaacgcacacgcgacaucuacaucucucgcagacgccgcggaaccuucaccuggacacucucagacucagaaggcaacgaaacucccggaggauacugccucacacgcuggaugcucaucgaagccgaacucaaaugcuucggaaacaccgcaguagcaaaaugcaacgaaaaacacgacgaagaauuuugcgacaugcucagacuauucgacuucaacaaacaagcuauaaaacgccucaaaacccccgcccaaauguccauccaacucaucaacaaagccgucaacgcacuaaucaacgaccaacuaaucaugaagaaccaccuacgcgacaucaugugcaucccuuacugcaacuacuccaaauacugguaccucaaccacacagucaccggaaaaacuucauuaccccgaugcuggcuggucuccaacggcuccuaccucaacgaaacgcacuucuccgacgacaucgaacaacaagccgacaacaugauaaccgaacuccuccaaaaagaauauaucgaccgccaaggcaaaacuccccucggccucgucgaccucuucguguucucuacauccuucuaccucaucucaaucuuccuacaucucguaaaaauuccaacccaccgccauguaguaggcaaacccugccccaaaccccaccgccucaaccacauggggaucugcucuugcggccuguacaaacaccccggcgucccaguuaaauggaaaagguagggacuagucccuguucccagagcccacuuuuuuuucuuuuuuugaaauaaaauagccugucuuucagaucuaaaaaaaaaaaaaaaaaaaaaaaaaaaaaaaaaaaaaaaaaaaaaaaaaaaaaaaaaaaaaaaaugcaucccccccccccccccccccccccccccccccaaaggcucuuuucagagccaccagaauu

SEQ ID NO: 6380 - RNA, 1749 nt, Artificial Sequence
  mRNA product Design a-1 comprising derived and/or modified sequence from LASV(LASV221-NIG-2010;Clade II)__AIT17624__GPCstabilized (opt11)
gggagagucccgcagucggcguccagcggcucugcuuguucgugugugugucguugcaggccuuauucaagcuuaccaugggccaaauaaucaccuucuuccaagaaguuccccacguaaucgaggaagucaugaacaucguccucaucgcccuaucccuacuugcuauacucaaaggcauauacaaugucgcaaccugcggccucuucgggcuaguaucuuuccuccuacucugcggccguuccugcuccaccaccuacaaaggcgucuacgaacuccaaacacucgagcucgacauggccucccucaacaugacaaugccccuauccuguaccaagaacaacucccaccacuacaucaugguugguaacgaaacaggccuagagcucacacucaccaacaccuccauuaucaaccacaaauucuguaaccucuccgacgcccauaagaaaaaccucuacgaccacgcccucaugagcaucaucuccaccuuccaccucuccauccccaacuucaaccaauacgaagccauguccugcgacuucaacggaggcaaaaucuccguccaauacaaccucucccacacuuacgccaucgacgccgcgaaccacugcggaaccaucgccaacggcguucuccaaaccuucaugcgcauggccuggggaggcucauacaucgcacuagacuccggaugcggcuccugggacuguaucaugaccuccuaccaauaccucauuauacaaaauacaaccugggaagaccacugccaauucucccgaccauccccaaucggauaccucggccuccucucacaacgaacccgagacaucuacaucucucgccgccgccgaggcacauucacguggacacucuccgacuccgagggcaacgaaacccccggaggcuauugccuaacucgcuggaugcucaucgaagccgaacuaaaaugcuucggcaacaccgccgucgcaaaaugcaacgaaaaacacgacgaagaguucugcgacaugcuccgacucuucgacuucaacaaacaggccauccgccgccuuaaaaccccagcacaaauguccauccaacugaucaacaaagccguaaaugcucuaaucaacgaccaacucauaaugaaaaaccaccuccgagacaucaugugcauccccuacuguaacuacuccaaauacugguaccucaaccacaccguaacaggaaaaaccucccuaccacgcugcuggcucgucagcaacggcuccuaccuaaacgaaacccacuuuucugacgacauagaacaacaagccgacaacaugauaacggaaaugcuacaaaaagaauacauggaccggcaaggcaaaaccccgcucggccucguagaccucuucgucuucuccaccuccuucuaccucaucuccaucuuccuccaccucgucaagauccccacccacagacacguaaucggcaaaccuugccccaaaccccacagguugaaccacaugggcaucugcuccugcggccuauacaaacacccaggcguaccagucaaguggaaacgcuaaggacuagucccuguucccagagcccacuuuuuuuucuuuuuuugaaauaaaauagccugucuuucagaucuaaaaaaaaaaaaaaaaaaaaaaaaaaaaaaaaaaaaaaaaaaaaaaaaaaaaaaaaaaaaaaaaugcaucccccccccccccccccccccccccccccccaaaggcucuuuucagagccaccagaauu

SEQ ID NO: 6381 - RNA, 1749 nt, Artificial Sequence
  mRNA product Design a-1 comprising derived and/or modified sequence from LASV(LASV237-NIG-2010;Clade II)__AIT17638__GPCstabilized (opt11)
gggagagucccgcagucggcguccagcggcucugcuuguucgugugugugucguugcaggccuuauucaagcuuaccaugggccaaauaaucaccuucuuucaagaagucccccacgucaucgaagaggucaugaacauuguccucauagcccuaucccuacucgcaauccucaaaggcauuuacaacgucgcuaccugcggccuauucggccuagucagcuuccuccucuuaugcggccgcuccugcucaacaacauacaaaggcguuuacgaguuacaaacccucgaacuagacauggccucucuaaacaugaccaugccccuuuccugcacuaaaaacaacucucaccacuauauuaugguaggcaacgagacaggccuugaacucacccucaccaacaccuccaucauaaaccacaaauucugcaaccuauccgacgcccacaaaaaggaccuuuacgaccacgcccucaugucaaucauaagcaccuuccaccucagcauucccaacuucaaucaauacgaagccauguccugcgauuucaacggcggcaaaaucuccguccaauacaaccuuagccacaccuacgccgucgacgccgccaaccacugcggaaccaucgcaaacggcguacuccagacauucaugcgcauggccuggggcgguuccuacaucgcccucgacucuggcugcggcuccugggacugcaucaugaccuccuaccaauaccucauaauccaaaacacaacaugggaagaccacugccaauucucccguccaucucccaucgguuaccucggccuacuuucccaacgaacccgagacaucuacaucagccgacgucgucgcggcacauucaccuggacacuauccgacucugaaggcaacgaaacccccggcggauauugccuaacccgauggaugcucauagaagccgaacucaaaugcuucggcaacaccgccgucgccaaaugcaacgaaaaacacgacgaagaguucugcgacaugcuacgccucuucgacuucaacaaacaagccauccgucgccuaaaaaccccagcccaaaugucaauacagcucaucaacaaggccgucaacgcccucaucaacgaccaacucaucaugaagaaccaccuccgugacaucaugugcauccccuacugcaacuacucaaaauauugguaccuuaaccacacagucacgggcaaaaccucccucccccgcugcuggcucgucuccaacggauccuaccucaacgaaacucacuucuccgacgacaucgaacaacaagccgacaacaugaucaccgaacuacuccaaaaagaauacauggaccgccaaggcaagacuccccucggccucgucgaccucuucguuuucuccaccuccuucuaccucaucagcaucuuccuacaccucaucaaaaucccgacccaccgccacaucaccggcaaacccugcccgaaaccccaccggcuaaaccacaugggcaucugcuccugcggccucuauaaacaccccgguguccccgucaaauggaaacgauaaggacuagucccuguucccagagcccacuuuuuuuucuuuuuuugaaauaaaauagccugucuuucagaucuaaaaaaaaaaaaaaaaaaaaaaaaaaaaaaaaaaaaaaaaaaaaaaaaaaaaaaaaaaaaaaaaugcaucccccccccccccccccccccccccccccccaaaggcucuuuucagagccaccagaauu

SEQ ID NO: 6382 - RNA, 1749 nt, Artificial Sequence
  mRNA product Design a-1 comprising derived and/or modified sequence from LASV(LASV253-NIG-2011;Clade II)__AIT17670__GPCstabilized (opt11)
gggagagucccgcagucggcguccagcggcucugcuuguucgugugugugucguugcaggccuuauucaagcuuaccaugggccaaaucaucaccuucuuccaagaaguaccacacguaaucgaagaagucaugaacauaguccucauagcacucucccuacucgccauacuuaaaggaauuuacaacguagcaaccugcggucucuucggccuugucuccuuccucuuacugugcggccgaagcugcuccacaacauacaaaggagucuacgaacuacagacccucgaacucgacauggcaucccucaacaugaccaugccccuauccuguaccaaaaacaacucacaccacuacaucaugguagguaacgaaacaggacuugaacuaacccucaccaacacuucaaucauaaaccacaaauucugcaaccucuccgacgcccacaaaaaaaaccucuacgaccacgccuugauguccaucauauccaccuuccaccucuccaucccaaacuuuaaccaauacgaagccauguccugcgacuucaacggaggcaaaauaucaguacaauauaaccuaucccacaccuacgcagucgacgccgccaaccacugcggcaccauagccaacggaguccugcagacauucaugcgaauggcaugggguggaucuuacaucgcucuagacuccgggugcggcuccugggacugcaucaugaccucauaucaauaccucaucauacaaaacaccaccugggaggaccacugucaauucucccgcccuucccccauaggcuaccuggggcuccuaucccaaagaacccgcgacauauacauaucccgccgucgucgaggcaccuucacauggacccucagcgacucagaaggcaacgaaacccccggcggcuacugccucacccguuggaugcuaauagaagcagaacucaaaugcuucggcaacaccgcggucgccaaaugcaacgagaaacacgacgaagaauucugcgacaugcuccgccuauucgacuucaacaaacaagcaauccgccgccuuaaagcccccgcccaaaugucaauccaacucaucaacaaagccguaaacgcacucaucaacgaccaacucaucaugaaaaaccaccuccgcgacauaaugugcauccccuacugcaacuacuccaaauacugguaccucaaccacaccgucaccggccgcaccucucucccccggugcuggcuugucucaaacggcuccuaccucaaugaaacccacuucuccgacgacauagaacaacaagccgacaacaugaucacagaacuccuccaaaaagaauacaucgaccgccaaggcaaaaccccccucggacuagucgaccucuucguuuucuccaccuccuucuaccucaucuccaucuuccuccaccucgucaaaauacccacccaccgucacaucaucggcaaaccaugccccaaaccccaccgccucaaccacaugggcauaugcuccugcggacuguacaaacaccccggaguaccaguaaaauggaaacgcuaaggacuagucccuguucccagagcccacuuuuuuuucuuuuuuugaaauaaaauagccugucuuucagaucuaaaaaaaaaaaaaaaaaaaaaaaaaaaaaaaaaaaaaaaaaaaaaaaaaaaaaaaaaaaaaaaaugcaucccccccccccccccccccccccccccccccaaaggcucuuuucagagccaccagaauu

SEQ ID NO: 6383 - RNA, 1749 nt, Artificial Sequence
  mRNA product Design a-1 comprising derived and/or modified sequence from LASV(LASV254-NIG-2011;Clade II)__AIT17674__GPCstabilized (opt11)
gggagagucccgcagucggcguccagcggcucugcuuguucgugugugugucguugcaggccuuauucaagcuuaccaugggccaaaucaucaccuucuuccaagaagucccccacgucauugaagaagucaugaacaucguccucauugcccugucccuacucgccauccucaaaggcaucuacaacgucgcaaccugcggucuauuuggccucgucagcuuccuccugcuaugcggccguuccugcuccaccaccuacaaaggcgucuacgaacuucaaacccucgaacucgacaugacaaaucuaaacaugaccaugccccugucuugcaccaaaaacaacagccaccacuacaucauggucggcaacgaaaccggccuagaacucacccuaaccaacacauccaucaucaaccacaaauucugcaaccucuccgacgcccauaagaaaaaccucuauaaccacgcccucauguccauaaucucaacauuccaccucucaauaccaaauuuuaaccaauaugaagccauguccugcgacuucaacggcggcaaaaucucaguacaauacaaucucucccacucuuacgccguagacgcagccaaccacugcggaaccauagccaacgguguccuccagaccuucaugcgcauggccuggggaggaucauacaucgcccucgacagcggcugcggaaacugggacugcaucaugaccuccuaccaauaccucaucauucaaaacaccaccugggaagaccacugccaguucucccgccccagcccaaucggauaccuaggccuccucucccaaagaacccgcgacaucuacaucucccguagacgacguggcacauucaccuggacacuaucugacuccgaaggcaacgaaacccccgguggauacugccucacccgcuggaugcucauugaagccgaacucaaaugcuucggaaacacagcagucgccaaaugcaacgaaaaacaugacgaagaguucugcgacaugcuccgccucuucgacuucaacaaacaagccaucagacgccucaaaacccccgcacaagccaacauacaacucaucaauaaagccgucaaugcacucauaaacgaccaacucaucaugaaaaaccaccuccgagacauaauguguauccccuacugcaacuauuccaaauacugguaccuuaaccacaccgucaccgguaaaaccucccucccccgcugcuggcucguauccaacggcuccuaccucaacgaaacccacuucuccgacgacaucgaacaacaagcagacaacaugaucaccgaacuucuacaaaaagaauacauggacagacagggcaaaacgccgcucggacucgucgaccuauucgucuucagcaccuccuucuaccuaauauccaucuuccuacaccuggucaaaauucccacgcaccgacacguaaucggaaaacccugucccaaaccccaccgacucaaccauaugggcaucugcagcugcggccuuuacaaacaccccggcguccccgucaaauggaaacgcuaaggacuagucccuguucccagagcccacuuuuuuuucuuuuuuugaaauaaaauagccugucuuucagaucuaaaaaaaaaaaaaaaaaaaaaaaaaaaaaaaaaaaaaaaaaaaaaaaaaaaaaaaaaaaaaaaaugcaucccccccccccccccccccccccccccccccaaaggcucuuuucagagccaccagaauu

SEQ ID NO: 6384 - RNA, 1749 nt, Artificial Sequence
  mRNA product Design a-1 comprising derived and/or modified sequence from LASV(Nig08-A19;Clade III)__ADU56618__GPCstabilized (opt11)
gggagagucccgcagucggcguccagcggcucugcuuguucgugugugugucguugcaggccuuauucaagcuuaccaugggccaaaucgucacauucuuccaagaaguuccccacgucauagaagaagucaugaauaucguccuaaucgcccucuccauccucgccauucucaaaggacuauacaacaucgcaaccugcggccucaucggccuugucacauuccuucuacucuccggccgauccugcucaaugaccuacaagggagucuacgaacuacaaacacucgaacuaaacaugaacacccuaaacaugacuaugccccucuccugcaccaaaaacaacagccaccacuacaucauggucgggaacgaaaccggacuagagcuaacccucaccaacaccucccuccuccaccacaaguucugcaaccuauccgacgcccacaagaaaaaccucuacgaccacacccucaugucaauaaucuccaccuuccaccucuccauccccaacuucaaccaauacgaagccaugucgugcgacuuuaacggcggcaaaauaacaguccaauacaaccucucccacucguacgccauagacgccgccaaccacugcggcaccgucgcaaacggaguccuacaaaccuucaugcgcauggcauggggcggaucauacaucgcccucgacuccggcugcggcaaaugggacugcaucaugaccagcuaccaauaccucaucauccaaaacacaaccugggaggaccacugccaauucucgcgucccucacccaucggcuaccucggacuccucucccaacgcacccgcgacaucuacauaagccgacgccgccgcggcaccuucaccuggacacuuuccgacuccgaagguaacgaaacccccggaggauacugccucacgcgcuggaugcugauagaagcagaacucaaaugcuucggcaacaccgccgucgccaaaugcaacgaaaaacacgaugaagaguucugcgacaugcuucgccuuuucgauuucaacaaacaagcuauacgccgccucaaagccccagcccaaaugucaauccaacuaauuaacaaagcagucaacgcucucaucaacgaccaacucauaaugaaaaaccaccuaagagacaucaugugcauccccuacugcaacuacuccaaauacugguaucucaaccacacuuccaccggacgaaccagccucccacgcugcuggcuaguauccaacggcucauaccucaacgaaacucacuucucggacgacaucgaacaacaagcagacaacaugaucaccgaaaugcuccaaaaagaauaccucgaccgacaaggcaaaaccccucuagggcucguugaucucuucgucuucucaacaucuuucuaccucaucuccauauuccuucaccucgucaagauccccacacaccgccacaucguaggaaaacccugcccaaaaccacaccgacucaaucacaugggcaucugcagcugcggccucuacaagcaacccggcguacccguccgcuggaagcgcuagggacuagucccuguucccagagcccacuuuuuuuucuuuuuuugaaauaaaauagccugucuuucagaucuaaaaaaaaaaaaaaaaaaaaaaaaaaaaaaaaaaaaaaaaaaaaaaaaaaaaaaaaaaaaaaaaugcaucccccccccccccccccccccccccccccccaaaggcucuuuucagagccaccagaauu

SEQ ID NO: 6385 - RNA, 1752 nt, Artificial Sequence
  mRNA product Design a-1 comprising derived and/or modified sequence from LASV(G1180-SLE-2010;Clade IV)__AIT17168__GPCstabilized (opt11)
gggagagucccgcagucggcguccagcggcucugcuuguucgugugugugucguugcaggccuuauucaagcuuaccaugggccaaauagucaccuucuuccaagaaguaccccacgucaucgaagaagucaugaacauaguccucauagcccucuccauacucgccguccucaaaggccuuuacaacuucgcaaccugcggccuagucggccugcuaaccuuccuacuacucugcggcagauccuguaccgccucacgcuacaaaggagucuacgaguuacaaacacucgaacucaacauggaaacccucaacaugacaaugccccucuccugcacgaaaaauaauucacaccacuacaucauggucggcaacgaaaccggccucgaacucacccucaccaacacaagcaucaucaaccacaaauucugcaaccuaucagacgcacacaagaaaaaccuguacgaccacgcccuaauguccaucaucucuacauuccaccuguccaucccaaacuucaaccaauacgaagcaaugagcugcgacuucaacggcgggaaaaucuccguccaauacaacuuaagccacagcuacgccggagacgccgcaaaccacugcggaacagucgcaaacggcguccuucaaaccuucaugcgcauggccuggggcggcuccuacauugcacuggacuccggcugcggcuccugggacugcaucaugaccuccuaucaauaccuaauaauacaaaacacaaccugggaagaccauugccaauucucccgcccaucacccaucggauaccuaggccuacucucccaacgaacucgagacaucuacaucucccgacgccgccgaggcaccuucaccuggacccucuccgacucagaaggcaaagacacucccggcggauacugccucacccgcuggaugcuuaucgaagccgaacucaaaugcuucggcaacacagccgucgccaaaugcaacgaaaaacacgacgaagaguucugugacaugcuccgacucuucgacuucaacaaacaagccauccaacgccuaaaagcaccagcacaaauguccauccaacucaucaacaaagccgucaaugcccucauuaacgaccaacucaucaugaaaaaccaccuccgagacaucaugugcaucccuuacugcaacuacuccaaauacugguaccuaaaccacaccacaaccggaaaaacaucccuccccaaaugcuggcuuguauccaacggcucauaucucaacgaaacccacuucuccgacgacaucgaacaacaagcagacaacaugauaacagaaaugcuacaaaaagaauacauggaacgacaaggaaaaacaccccuaggcuuggucgaucuauucgucuuuagcacaucauucuaccucauaucaauauuccuccaccucguaaaaauccccacccaccgccacauagucggcaaauccugcccaaaaccacaccgacucaaccacaugggcauauguucaugcggccucuacaaacaacccggcguacccgugaaauggaaacgcuagggacuagucccuguucccagagcccacuuuuuuuucuuuuuuugaaauaaaauagccugucuuucagaucuaaaaaaaaaaaaaaaaaaaaaaaaaaaaaaaaaaaaaaaaaaaaaaaaaaaaaaaaaaaaaaaaugcaucccccccccccccccccccccccccccccccaaaggcucuuuucagagccaccagaauu

SEQ ID NO: 6386 - RNA, 1752 nt, Artificial Sequence
  mRNA product Design a-1 comprising derived and/or modified sequence from LASV(G1442-SLE-2011;Clade IV)__AIT17180__GPCstabilized (opt11)
gggagagucccgcagucggcguccagcggcucugcuuguucgugugugugucguugcaggccuuauucaagcuuaccaugggccaaaucgucaccuucuuccaagaaguaccccacguaaucgaagaagucaugaacaucguccucaucgcacucuccauccuagccguccuaaaaggacuuuacaacguugccacaugcggucuaaucggacucgucaccuuccuccuccugugcggccgcucauguaccaccacacucuacaaaggcgucuacgaacuccaaacacuagaacucaauauggagacccuuaacaugacaaugccccuaagcugcaccaaaaacaauucucaccacuacauccggguagggaaugaaacagggcuagaacucacccucaccaacaccuccaucaucaaccacaaauucugcaaccuauccgacgcccacaagaaaaaccuauacgaccacgcccucauguccaucaucagcaccuuucaccuauccauacccaacuucaaccaauacgaagccauguccugcgacuucaacggcggcaaaauauccguacaauacaaccuaucccacucuuacgccggcgacgcagccaaccacugcggcacagucgcaaacgguguccuacaaacauucaugcgcauggcauggggcggauccuacaucgcccuugacuccggcugcgguaacugggacugcaucaugaccuccuaccaauaccucaucauccaaaacaccacaugggacgaccacugccaauucagcagacccagcccuauaggcuaccuaggccuacucucacaacgcacccgcgacguuuacaucagccgacgacgccgcggaaccuucaccuggacccucuccgacagcgagggcaaagacaccccaggcggcuacugccucacccgcuggaugcucauagaagccgaauuaaaaugcuucggcaacaccgccguagccaaaugcaacgaaaaacacgacgaagaguucugcgacaugcuccgccucuucgacuucaacaaacaagccauucaacgucucaaagcccccgcccaaauguccauccaacucauaaacaaagccguaaacgcccucaucaacgaccaacucaucaugaaaaaccaucugcgagacaucaugugcaucccguacugcaauuacucaaaauacugguaccuaaacaacaccgcuacaggcaaaacaucccuccccaaaugcuggcucaucuccaacggauccuaucuaaacgaaacccacuucuccgacgacaucgaacaagaagccgauaacaugaucaccgaaaugcuccaaaaagaauacauggaacgccaagguaaaacuccccucggccuugucgaccuauucguuuucucaaccucauuuuaccucauauccauauuccuccaccuaguuaaaauacccacccaccgccacaucgucggaaaauccugccccaaaccccaccgccucaaccacaugggcaucugcucaugcggucuauacaaacaacccggaguaccaguccgcuggaaacgcuaaggacuagucccuguucccagagcccacuuuuuuuucuuuuuuugaaauaaaauagccugucuuucagaucuaaaaaaaaaaaaaaaaaaaaaaaaaaaaaaaaaaaaaaaaaaaaaaaaaaaaaaaaaaaaaaaaugcaucccccccccccccccccccccccccccccccaaaggcucuuuucagagccaccagaauu

SEQ ID NO: 6387 - RNA, 1752 nt, Artificial Sequence
  mRNA product Design a-1 comprising derived and/or modified sequence from LASV(G3010-SLE-2013;Clade IV)__AIT17344__GPCstabilized (opt11)
gggagagucccgcagucggcguccagcggcucugcuuguucgugugugugucguugcaggccuuauucaagcuuaccaugggccagauagucaccuucuuucaagaagucccccacguaauagaagaggucaugaacaucguccuaauagcccucucaauccuagccguccuaaaaggccuauacaacuucgccacaugcggccuagucggccuaguaaccuuccuccuacugugcggccgcucuugcacgaccagccucuacaaaggagucuacgaacuacaaacccucgaacucaacauggaaacccuaaacaugaccaugccccucuccugcaccaaaaacaacucccaccacuacaucauggucggaaacgaaacaggccuagaacucacccuaaccaacaccucaauaaucaaccacaaguucugcaaccucucagacgcccauaagaaaaaccuauacaaccacgcacuaauguccaucauuuccaccuuucaccuaucuauccccaacuucaaccaauacgaagccaugucuugcgacuucaauggcggcaaaaucucaguccaauauaaccucagucacuccuacgccggagacgcagccucccacugcggcaccgucgccaacggcguacuccaaaccuucaugaggauggcauggggcggaagcuacaucgcccucgacuccggcugcggcaaaugggauugcaucaugacauccuaccaauaucucaucauacaaaacaccaccugggaggaccacugccaauucucccgccccagccccaucgguuaccucggccuacucucccagcgcacccgcgacaucuacaucucccgcagacgccgcggaaccuucaccuggacccuuuccgacuccgaaggcaaagacacacccggcggcuacugccucacucgauggaugcucaucgaagccgaacugaaaugcuuuggcaacacugccgucgccaaaugcaacgagaaacacgacgaagaauuuugcgacaugcuccgccucuucgacuucaacaaacaagccauucaacgccuuaaaacccccgcgcaaauguccauacaacucaucaacaaggccguaaacgcacucaucaaugaccaacuaaucaugaagaaccaccuccgagacauaaugugcauccccuacugcaacuacuccaaauacugguaucucaaccacacaacaaccggcaagaccucccuccccaaauguuggcucguaucaaacggauccuaccucaacgaaacccacuucuccgacgacaucgaacaacaagcagacaacaugaucaccgagaugcuacaaaaggaauacauggaacgccaaggaaaaacgccccuaggacucgucgaccucuucguauucagcaccuccuucuaccugaucuccaucuuccuccaucuugucaaaaucccaacccaccgccacaucgucggcaagucaugccccaaaccacaccgacuaaaccacaugggaauauguucaugcggccucuacaaacagccgggcguccccgugcgcuggaaaagaugaggacuagucccuguucccagagcccacuuuuuuuucuuuuuuugaaauaaaauagccugucuuucagaucuaaaaaaaaaaaaaaaaaaaaaaaaaaaaaaaaaaaaaaaaaaaaaaaaaaaaaaaaaaaaaaaaugcaucccccccccccccccccccccccccccccccaaaggcucuuuucagagccaccagaauu

SEQ ID NO: 6388 - RNA, 1752 nt, Artificial Sequence
  mRNA product Design a-1 comprising derived and/or modified sequence from LASV(G502-SLE-2009;Clade IV)__AIT17126__GPCstabilized (opt11)
gggagagucccgcagucggcguccagcggcucugcuuguucgugugugugucguugcaggccuuauucaagcuuaccaugggccaaaucgucaccuucuuucaagaagucccccacguuaucgaagaaguuaugaacaucguacucaucgcccucuccauccuagccgucuuaaaagggcucuacaacuucgcaaccugcggccucguaggccuacucaccuuccugcuccucugcggccgaucaugcacaaccggacuuuacaagggcguauacgaacugcaaacccucgaacuaaacauggaaacccucaacaugacuaugccccucuccugcaccaaaaacaacagccaccacuacauaauggucggcaacgaaacaggacuagagcucacccuaaccaacaccucgaucaucaaccacaaguucugcaaccuauccgacgcccacaagaaaaaccucuacgaccacgcgcucauguccauaaucuccaccuuccaccugucaauacccaacuucaaucaauacgaagcaauguccugcgacuucaacggaggcaaaaucuccguacaauacaaucugucccacuccuacgccggagacgccgccgaccacugcggcacaguagccaacggcguacuccaaacuuucaugcgaauggcauggggcggcuccuacaucgcucucgacucaggcugcggacgaugggacugcaucaugaccucauaccaauaccuaaucauccaaaacaccaccugggaagaccacugccaauucucccgacccucgccaaucggauaccugggccugcucucccaacgcacccgcgacaucuacauuucccgccgcagacgcggaaccuucaccuggacccucagcgacuccgagggcaaagacacacccgguggcuacugccuaacacgcuggaugcugaucgaagccgaacucaaaugcuucggaaacaccgccguugcaaaaugcaacgaaaaacacgacgaagaguucugcgacaugcuccgacucuucgacuucaacaaacaagccauacaacgccucaaagcccccgcccaaauguccauacaacucauaaauaaagccgucaacgcccucaucaacgaccagcuaguaaugaaaaaucaccuccgagacaucaugugcauaccauacugcaacuacuccagauacugguaccuaaaccacaccaccaccggccgcaccucccucccuaagugcuggcuaguauccaacggcucauaccucaacgaaacacacuucucagacgacaucgagcaacaagccgacaacaugaucacggaaaugcuacaaaaagaauacauggaacgccaaggaaaaaccccacucggccucgucgaccucuucgucuucuccacuucauucuaccuaaucucaaucuuccuacaccucguaaaaaucccuacccacagacacaucguaggcaaauccugccccaaaccccaccgacuaaaccacaugggaauaugcucuugcggacucuacaaacaacccggcguacccguaaaauggaaaagauaaggacuagucccuguucccagagcccacuuuuuuuucuuuuuuugaaauaaaauagccugucuuucagaucuaaaaaaaaaaaaaaaaaaaaaaaaaaaaaaaaaaaaaaaaaaaaaaaaaaaaaaaaaaaaaaaaugcaucccccccccccccccccccccccccccccccaaaggcucuuuucagagccaccagaauu

SEQ ID NO: 6389 - RNA, 1752 nt, Artificial Sequence
  mRNA product Design a-1 comprising derived and/or modified sequence from LASV(G733-SLE-2010;Clade IV)__AIT17154__GPCstabilized (opt11)
gggagagucccgcagucggcguccagcggcucugcuuguucgugugugugucguugcaggccuuauucaagcuuaccaugggccaaaucguaaccuucuuucaagaagucccccacgucaucgaagaaguuaugaacauaguucuaaucgcccuaucaauccucgccguccucaaaggccucuacaacuucgcaaccugcggaaucguuggucuuguaucauuccuccuacuuugcggacgguccugcaccacuucccuuuacaaaggagucuacgaacuccaaacccucgaacucaacauggaaacccuaaacaugaccaugccccucucaugcaccaagaacaacucccaccacuacaucauggucggcaacgaaaccggccucgagcucacccugacaaacacaucaaucauuaaccacaaguucugcaaccuuuccgacgcccacaagaaaaaccucuacgaccacgcccucauguccauaauauccaccuuccaccucuccauccccaacuucaaccaauacgaagccauguccugcgacuucaacggcggaaaaaucucaguccaauacaaccucucccacuccuaugccggagacgccgccaaccacugcggcaccauagcaaacggcguccuccaaaccuucaugcgcauggccuggggcggcagcuacauagcccucgacagcggcugcgaccgaugggacugcauuaugacuucauaccaauaccuaaucauccaaaacacaaccugggaagaccacugccaauucucacgccccucccccauaggauaccucggccuacuaucccaacgcacccgcgacaucuacaucucccgacgccgccgaggcacguuuaccuggacauuguccgacuccgagggcaaagacacacccggcggcuacugccuaacccgauggaugcucaucgaagccgaacucaaaugcuucggcaacaccgccgucgccaaaugcaaugagaaacacgacgaagaguucugcgauaugcuccgccuauucgacuucaacaaacaagcuauccaacgccucaaagcucccgcccaaaugagcauccaacucaucaacaaagccguuaacgcccucaucaacgaccaacucauaaugaaaaaccaccuccgggacaucaugugcauccccuacugcaacuacaguaaauacugguaccuuaaccacaccacaacaggaaagaccuccuuacccaaaugcuggcucguauccaacggauccuaccuaaacgaaacacauuucuccgacgacaucgaacaacaagccgacaacaugaucacagaaaugcuccaaaaagaauacauggaacgccaaggaaaaaccccacuuggccucgucgaccuauucguauuuagcaccucuuucuaccucaucuccaucuuccuccaccuagucaagauacccacccaccgccacgucgucggcaaaagcugccccaaaccccaccgacuuaaccacaugggcauaugcuccugcggacucuauggccaacccggcguccccguuaaguggaaaagguaaggacuagucccuguucccagagcccacuuuuuuuucuuuuuuugaaauaaaauagccugucuuucagaucuaaaaaaaaaaaaaaaaaaaaaaaaaaaaaaaaaaaaaaaaaaaaaaaaaaaaaaaaaaaaaaaaugcaucccccccccccccccccccccccccccccccaaaggcucuuuucagagccaccagaauu

SEQ ID NO: 6390 - RNA, 1752 nt, Artificial Sequence
  mRNA product Design a-1 comprising derived and/or modified sequence from MOPV/LASV reassortant(IGS-1;Clade IV)__AFY05576__GPCstabilized (opt11)
gggagagucccgcagucggcguccagcggcucugcuuguucgugugugugucguugcaggccuuauucaagcuuaccaugggccaaaucgucaccuucuuccaagaagucccacacgucauagaagaagucaugaauaucguccuuaucgcacuauccguacuagcaguccuuaaaggacuuuacaacuucgcaaccugcggccugguaggccuaguaaccuuccuccuccucugcggacgcucaugcaccaccagccucuacaaaggaguauacgaacuacaaacccucgaacucaacauggaaacccuuaacaugaccaugccccucuccugcacaaagaacaacucccaccacuauauaauggucggcaacgaaacaggccuggaacucacccuaacaaacaccuccauaaucaaccacaaauucugcaaccucuccgacgcccacaagaaaaaccuauacgaccacgcccuaaugucgauaaucuccacauuccaccucagcaucccaaacuucaaccaauacgaagccauguccugcgacuucaacggcggcaaaaucucuguccaauacaaccuaucacacuccuacgccggugacgccgccaaccauugcgggaccgucgccaacggcguccuccaaaccuucaugagaauggccuggggcggaucguacaucgcccuagacagcggaugcgguaacugggacugcaucaugaccagcuaccaauaccucaucauacaaaacacuaccugggaggaccacugccaguucucacgccccuccccuauaggcuaccucggccugcucagccaacgcacccgcgacauauacaucucccgacgacgacgaggcaccuucaccuggacacucuccgauuccgaaggcgaagacaccccuggcggauacugccugacacgauggaugcucauagaggccgaacucaaaugcuucggcaacacagcagucgcaaaaugcaacgaaaaacacgacgaagaguucugcgacaugcuccgccuauucgacuucaacaaacaagccauccaacgauuaaaagccccagcccaaauguccauacaacucaucaacaaagccgucaacgcacuaauaaacgaccagcuaaucaugaaaaaccaccuccgagacaucaugugcauaccauacugcaacuacuccaaauacugguaccucaaccacacaaccacuggacgcaccucucuccccaaaugcuggcucgucucaaacggcagcuaccuuaacgaaacccacuucuccgacgacaucgaacaacaagccgacaacaugaucaccgaaaugcuacaaaaagaauacauggaaagacagggcaagacaccccucggccuagucgaccucuucguauucuccaccuccuucuaccuaaucucaaucuuccuacaccuagucaaaauccccacccaccgccacauaguaggcaaauccugccccaaaccccaucgccucaaccacaugggcauaugcucaugcggucucuacaaacaacccggcguccccgucaaguggaaacgaugaggacuagucccuguucccagagcccacuuuuuuuucuuuuuuugaaauaaaauagccugucuuucagaucuaaaaaaaaaaaaaaaaaaaaaaaaaaaaaaaaaaaaaaaaaaaaaaaaaaaaaaaaaaaaaaaaugcaucccccccccccccccccccccccccccccccaaaggcucuuuucagagccaccagaauu

SEQ ID NO: 6391 - RNA, 1752 nt, Artificial Sequence
  mRNA product Design a-1 comprising derived and/or modified sequence from LASV(LM765-SLE-2012;Clade IV)__AIT17814__GPCstabilized (opt11)
gggagagucccgcagucggcguccagcggcucugcuuguucgugugugugucguugcaggccuuauucaagcuuaccaugggacaaaucgucaccuucuuccaagaagucccgcacgucaucgaggaagucaugaacauaguccucauagcccucucgauacuagccguccuaaaaggccuauacaacuucgcaaccugcggccucguaggccucgucaccuuccuccuccucugcggccgaucguguaccaccucacuauacaaaggagucuacgaacuccaaacucuggaacuuaacauggagacccucaacaugaccaugccccucuccugcaccaaaaacaauucccaccauuacaucauggucggaaacgaaacaggacucgaacuaacccucacgaacacuuccaucauagaucacaaauucugcaaccucagcgacgcccaccgcaaaaaccucuacgaccacgccuuaaugagcaucaucucaacauuccacuuauccauacccaacuucaaccaauacgaagccaugucaugcgauuucaacggcggcaaaaucucaguccaauacaaccuaucccacucuuacgccaaagacgccgccgaccacugcggcacagucgccaacggcguccuccaaaccuucaugcgcauggccuggggcggaagcuacaucgcacucgacucaggcugcggccgcugggacugcauaaugacauccuaccaguaccuuauaauccaaaacacaacaugggaagaccacugucaauucagcagacccagccccaucggauaccuaggccuacucucccaacgcacacgcgacauauacauaucacgccgccgucgcggcaccuucacauggacccuaucagauuccgagggcaaagacacacccggaggcuacugccucacucguuggaugcuaaucgaagcugaacucaaaugcuucgguaacacugccgucgccaaaugcaaugaaaaacacgacgaagaauuuugcgacaugcuccgccucuucgacuucaacaaacaagccauacagcgacuaaaggcccccgcccaaauguccauucaacugaucaacaaagccgucaacgcccuaaucaacgaccaacucaucaugaaaaaccaccuccgcgacauaaugugcaucccauacugcaacuacuccaaguacugguaccuaaaccacaccaccaccggcaaaaccucccuccccaaaugcuggcucgucucuaacggaucuuaccuuaacgaaacccacuucucagacgauaucgagcaacaagcugacaacaugaucaccgaaaugcuccaaaaagaauacauggaaagacaaggcaaaacaccccuaggacucgucgaccucuucgucuucucuaccuccuucuaccucauaucaaucuuucuccaccucgucaagaucccuacccaccgccacaucgucggcaaaccaugccccaaaccccaccgccucaaccacaugggcauaugcuccugcggccucuacaaacagccaggcgucccggucaaauggaaacgauagggacuagucccuguucccagagcccacuuuuuuuucuuuuuuugaaauaaaauagccugucuuucagaucuaaaaaaaaaaaaaaaaaaaaaaaaaaaaaaaaaaaaaaaaaaaaaaaaaaaaaaaaaaaaaaaaugcaucccccccccccccccccccccccccccccccaaaggcucuuuucagagccaccagaauu

SEQ ID NO: 6392 - RNA, 1752 nt, Artificial Sequence
  mRNA product Design a-1 comprising derived and/or modified sequence from LASV(LM776-SLE-2012;Clade IV)__AIT17824__GPCstabilized (opt11)
gggagagucccgcagucggcguccagcggcucugcuuguucgugugugugucguugcaggccuuauucaagcuuaccaugggccaaaucgucacauucuuccaagaagucccccacgucaucgaagaagucaugaacaucguccucaucgcccucucaauccuagccguccucaaaggccuauacaacuucgcuaccugcggccucgucggccucguaaccuuccuccuccuaugcggccgaucuugcaccaccucugucuacaaaggagucuacgaacuccaaacacucgaacuaaacauggaaacccugaacaugacaaugccccucuccuguaccaagaacaacucccaccacuacaucaugguuggcaacgaaaccggccuagaacuuacccucaccaacacuucaaucauaaaccacaaauucugcaaccucuccgacgcccacaagaaaaaccucuacgaccacgcacucauguccaucaucucaaccuuccaccucagcaucccaaacuucaaccaauacgaagccaugucaugcgacuucaacggcggcaaaaucucuguacaauacaaccuaucccacuccuacgccggcgacgcagccaaccacuguggaaccgucgcaaacggcguccuacagacguucaugcgcauggccuggggcggcucauauaucgcccucgacuccggaugcggcaaaugggacugcaucaugaccucauaccaauaccucauaauacaaaacaccacaugggaagaccauugccaguuuucccgcccuuccccgauaggauaccucggccuccuaucccaacgcacccgcgacauuuacaucucacgccgccgccgaggcacauuuacauggacccucucugacuccgaaggcaaagacacccccggaggcuacugccuaacucgcuggaugcucauagaggccgaacucaaaugcuucggcaacacagccguagccaaaugcaacgaaaaacacgaugaagaguucugcgauaugcuccgccucuucgacuucaacaaacaagcaauccaaagacuaaaagcccccgcacaaaugagcauucaacucaucaacaaagcagucaacgcccuuauaaacgaccaacuaaucaugaaaaaccaucuacgcgacaucaugugcauccccuacugcaacuacucaaaauacugguaccuaaaccacacaacaacuggcaaaaccagccuccccaaauguuggcucgucucuaacggcucauaccucaacgaaacccacuucucagacgacaucgaacaacaagccgacaacaugaucaccgaaaugcuccaaaaagaauacauggaacgccagggcaaaacuccacucggccuaguagaccucuucgucuucuccacaaguuucuaccucaucuccauauuccuacaccuagucaaaauccccacccaccgacacaucguaggcaaaucuugccccaaaccucaucgccuaaaccacaugggaaucugcagcugcggucucuacaaacaacccggcgucccaguccgauggaaacgauaaggacuagucccuguucccagagcccacuuuuuuuucuuuuuuugaaauaaaauagccugucuuucagaucuaaaaaaaaaaaaaaaaaaaaaaaaaaaaaaaaaaaaaaaaaaaaaaaaaaaaaaaaaaaaaaaaugcaucccccccccccccccccccccccccccccccaaaggcucuuuucagagccaccagaauu

SEQ ID NO: 6393 - RNA, 1752 nt, Artificial Sequence
  mRNA product Design a-1 comprising derived and/or modified sequence from LASV(Mad39;Clade IV)__ANH09722__GPCstabilized (opt11)
gggagagucccgcagucggcguccagcggcucugcuuguucgugugugugucguugcaggccuuauucaagcuuaccaugggccaaaucgucacauucuuccaagaagucccccacgucaucgaagaagucaugaacaucgugcuaauagcacucuccauccuagccguccuaaaaggccucuauaacgucgcaaccugcggccugaucggccuugucaccuuccuacuccucugcggacgauccuguaccaccacccuuuacaaaggcgucuacgaacuccaagcccucgaauuaaauauggaaacccugaacaugaccaugccccucuccugcaccaaaaauaacucccaucacuacauucgagucggcaacgaaaccggacucgaauuaacccucaccaacacaucccuaaucaaccacaaauucugcaaccucucagacgcccacaagaaaaaccucuacgaccacgcccuuauguccaucaucucaacauuccaccucucaauacccaacuucaaccaauacgaagcaauguccugcgacuucaacgacggcaaaaucucuguccaauacaaccucucacacaccuacgccggcgacacagcaaaccacugcggcaccgucgcaaacggcguacuccaaacauucaugcgaauggcuuggggcggauccuacaucgcacuagacucaggaugcggcggcugggacuguaucaugacauccuaccaauacuuaaucauacaaaacacuaccugggaagaccacugucaauucucacgucccucuccgaucggcuaccucggccuccucucccaacgaacccgcgacaucuauaucucccgccgccgccgcggcaccuucacauggacgcuaagcgauucagagggcaaagacacccccggcggcuacugccugacccgcuggaugcuuaucgaagcagaacucaaaugcuucggcaacacagcagucgccaaaugcaacgaaaaacacgacgaggaguucugcgacaugcuccgccuauucgacuucaacaaacaagccauccaacgccucaaagccccagcacaaauguccauucaacuaaucaacaaagccguaaaugcccucaucaacgaccaacucauuaugaaaaaccaccuucgugacaucaugugcauaccauacugcaacuacuccaaauacugguaccucaaccacaccguuaccggcaaaaccucacucccaaaaugcuggcucgucuccaauggcucguaccuaaacgaaacccacuucagcgacgacaucgaacaacaagccgacaacaugaucaccgaaaugcuacaaaaagaauacauggaacgccaaggcaagacaccccugggccuaguggaccuuuucgucuucuccaccuccuucuaccucauauccauauuccuccaccucgucaaaaucccaacacaccgccacguaguaggaaaacccugcccaaaaccccaccgccucaaccacaugggcaucugcagcugcggauucuacaaacaaccuggcgucccaguccguuggaaacgauaaggacuagucccuguucccagagcccacuuuuuuuucuuuuuuugaaauaaaauagccugucuuucagaucuaaaaaaaaaaaaaaaaaaaaaaaaaaaaaaaaaaaaaaaaaaaaaaaaaaaaaaaaaaaaaaaaugcaucccccccccccccccccccccccccccccccaaaggcucuuuucagagccaccagaauu

SEQ ID NO: 6394 - RNA, 1752 nt, Artificial Sequence
  mRNA product Design a-1 comprising derived and/or modified sequence from LASV(Z0947-SLE-2011;Clade IV)__AIT17840__GPCstabilized (opt11)
gggagagucccgcagucggcguccagcggcucugcuuguucgugugugugucguugcaggccuuauucaagcuuaccaugggucaaaucgucacauuuuuccaagaagucccacacguaauagaagaagucaugaacaucguacuuauagcacucuccauccuugcaguccuuaaaggccucuauaacuucgccacuugcggacucgucggccuaguaacauuccuacuacuguguggccgcuccugcaccaucucacucuacaagggcguauacgaacuccaaacacuugaacucaacauggaaacccuaaacaugaccaugccccucuccugcaccaaaaacaacucucaccacuacauaauggucggaaacgaaacaggacuagaacucacccucaccaacaccucaauaaucaaccacaaauucugcaaccuuuccgaugcacacaagaaaaaccucuacgaccacgcacucauguccauaaucuccaccuuccaccucucaauccccaacuucaaccaauacgaagcaaugucgugcgacuucaacggcgggaaaaucuccguccaauacaaccucucccacuccuacgcuggagacgccgcaaaccacugcgguaccguggccaacgguguccuccagaccuucaugcgcauggccuggggcggauccuacauagcccucgacucagguugugaccgaugggauugcaucaugacauccuaccaauaccucaucauccaaaacaccaccugggaagaccacugccaauucucccgucccucccccauaggcuaccucggccuccucucccaacgcacccgcgauaucuacaucagccgccgacgccgcggcaccuucaccuggacccuuucugacuccgaaggaaaagacacccccggcggcuacugccuaacucgauggaugcucaucgaagccgaacuaaaaugcuucggcaacaccgccgucgccaaaugcaacgaaaaacacgacgaagaguucugcgacaugcuucgccucuucgacuucaacaaacaagccauccagcgccucaaagcccccgcacaaauguccauacaacuaaucaacaaagccgucaacgcccuaauaaacgaccaacucaucaugaaaaaccaccuccgcgauauaaugugcauuccauacugcaacuacuccaaauacugguaucuaaaccacacaaccaccggcaaaaccucccuacccaaaugcuggcucgucuccaacggaucguaucuaaacgaaacucacuucuccgacgacaucgaacaacaagccgacaacaugaucacugagaugcuccagaaagaauacauggaacgacaaggcaaaacaccacuaggccucgucgaccucuucgucuucuccacauccuucuaccucaucucaaucuuccuccaccucguaaaaaucccaacccaccgccacaucgucggaaaacccugccccaagccacaccgccuaaaccacaugggcaucugcuccugcggacucuacaagcaacccggaguacccgucaaauggaaacgauagggacuagucccuguucccagagcccacuuuuuuuucuuuuuuugaaauaaaauagccugucuuucagaucuaaaaaaaaaaaaaaaaaaaaaaaaaaaaaaaaaaaaaaaaaaaaaaaaaaaaaaaaaaaaaaaaugcaucccccccccccccccccccccccccccccccaaaggcucuuuucagagccaccagaauu

SEQ ID NO: 6395 - RNA, 1771 nt, Artificial Sequence
  mRNA product Design a-2 comprising derived and/or modified sequence from LASV(Josiah;Clade IV)__NP_694870__GPCstabilized (wt)
gggagaguccgcucagccagguugcagaagcggcuuagcguguguccuaaucuucucucugcguguagguaggccugugccgcaaacaagcuuaccaugggacaaauagugacauucuuccaggaagugccucauguaauagaagaggugaugaacauuguucucauugcacugucuguacuagcagugcugaaaggucuguacaauuuugcaacguguggccuuguugguuuggucacuuuccuccuguugugugguaggucuugcacaaccagucuuuauaaagggguuuaugagcuucagacucuggaacuaaacauggagacacucaauaugaccaugccucucuccugcacaaagaacaacagucaucauuauauaauggugggcaaugagacaggacuagaacugaccuugaccaacacgagcauuauuaaucacaaauuuugcaaucugucugaugcccacaaaaagaaccucuaugaccacgcucuuaugagcauaaucucaacuuuccacuuguccauccccaacuucaaucaguaugaggcaaugagcugcgauuuuaaugggggaaagauuagugugcaguacaaccugagucacagcuaugcuggggaugcagccaaccauugugguacuguugcaaaugguguguuacagacuuuuaugaggauggcuuggggugggagcuacauugcucuugacucaggcugcggcaacugggacuguauuaugacuaguuaucaauaucugauaauccaaaauacaaccugggaagaucacugccaauucucgagaccaucucccaucgguuaucucgggcuccucucacaaaggacuagagauauuuauauuaguagaagacgccggggcacauucacauggacacugucagauucugaagguaaagacacaccagggggauauugucugaccagguggaugcuaauugaggcugaacuaaaaugcuucgggaacacagcuguggcaaaauguaaugagaagcaugaugaggaauuuugugacaugcugaggcuguuugacuucaacaaacaagccauucaaagguugaaagcucccgcacaaaugagcauucaguugaucaacaaagcaguaaaugcuuugauaaaugaccaacuuauaaugaagaaccaucuacgggacaucaugugcauuccauacuguaauuacagcaaguauugguaccucaaccacacaacuacugggagaacaucacugcccaaauguuggcuuguaucaaaugguucauacuugaacgagacccacuuuucugaugauauugaacaacaagcugacaauaugaucacugagauguuacagaaggaguauauggagaggcaggggaagacaccauugggucuaguugaccucuuuguguucaguacaaguuucuaucuuauuagcaucuuccuucaccuagucaaaauaccaacucauaggcauauuguaggcaagucgugucccaaaccucacagauugaaucauaugggcauuuguuccuguggacucuacaaacagccuggugugccugugaaauggaagagaugaggacuagucccuguucccagagcccacuuuuuuuucuuuuuuugaaauaaaauagccugucuuucagaucuaaaaaaaaaaaaaaaaaaaaaaaaaaaaaaaaaaaaaaaaaaaaaaaaaaaaaaaaaaaaaaaaugcaucccccccccccccccccccccccccccccccaaaggcucuuuucagagccaccagaauu

SEQ ID NO: 6396 - RNA, 1768 nt, Artificial Sequence
  mRNA product Design a-2 comprising derived and/or modified sequence from LASV(LP;Clade I)__AAF86701__GPCstabilized (wt)
gggagaguccgcucagccagguugcagaagcggcuuagcguguguccuaaucuucucucugcguguagguaggccugugccgcaaacaagcuuaccauggggcagauuauuacauucuuucaagaagugccacauguaauagaggaagucaugaacauugugcuaauugcgcuuucucuauuggcaaucuugaagggcuuguauaacaucgcuacaugugggauuauuggauugguugccuuuuuauucuuguguggcaagucuuguucccuaacccuuaaagggggauaugagcugcaaaccuuagaauuaaauauggagacccuaaacaugaccaugcccuuaucaugcaccaagaacagcagucaucauuacauaagagugggcaaugagacuggauuagaauugacuuuaacuaacaccagcauuauaaaucacaaauuuugcaacuuauccgaugcucacaaaaagaaucuuuaugaucaugcucucaugagcaucaucucaacauuccaucuauccauuccaaacuucaaucaguaugaagccaugaguugugauuucaauggagggaaaaucagugugcaauacaaccucucucauuccuaugcuggggaugcggccgaacacugugggacaguugccaacggaguguugcaaacauuuaugagaauggccugggguggaagauacauugcauuagacucaggaugcggaaacugggacuguauaaugaccagcuaccaguaccugauaauucaaaauacaacaugggaggaccacugccaauucucaagaccgucuccuaucggguaccuuggccuuuugucacaaaggacaagagauauauauauaaguaggaggcgccgggggaccuucaccuggacauugucagauucugagggcaaugaaacaccaggugguuauuguuuaaccagguggaugcuaauugaagcagaacucaaguguuuugggaauacagcuguggcaaaaugcaaugagaagcaugaugaggaguuuugugacaugcugagauuguuugauuucaacaagcaagcaauccguagguugaaggcucccgcccagaugaguauucaauuaauaaauaaagccgugaaugccuuaaucaaugaucaauuaaucaugaagaaccauuuaagagacaucaugugcauucccuacugcaauuacagcaaguauugguaccuuaaucauacuaguagcgggagaacaucacuaccaaaguguuggcuuauauccaaugggucauaucuaaaugaaacccaguucucugaugacauagaacagcaagccgacaauaugaucacagagaugcuucagaaagaauacauugaaagacaagggaaaacgcccuugggacuaguggacauuuucaucuuuagcacaagcuuuuaucugaucagcauuuucuugcauuuaauuaaaaucccuacacaucgacacaucguugggaaacccugucccaaaccccauagacuaaaucacaugggaguauguuccuguggacuguacaaacacccugguguuccaacaaaguggaagagauagggacuagucccuguucccagagcccacuuuuuuuucuuuuuuugaaauaaaauagccugucuuucagaucuaaaaaaaaaaaaaaaaaaaaaaaaaaaaaaaaaaaaaaaaaaaaaaaaaaaaaaaaaaaaaaaaugcaucccccccccccccccccccccccccccccccaaaggcucuuuucagagccaccagaauu

SEQ ID NO: 6397 - RNA, 1768 nt, Artificial Sequence
  mRNA product Design a-2 comprising derived and/or modified sequence from LASV(803213;Clade II)__AAF86703__GPCstabilized (wt)
gggagaguccgcucagccagguugcagaagcggcuuagcguguguccuaaucuucucucugcguguagguaggccugugccgcaaacaagcuuaccauggggcaaaucauaacauucuuccaagaggugccucaugucauagaggaggucaugaacauuguccuaauugcccucagucuccuggcgauacuaaaggggauuuacaauguugcuaccuguggucucuuuggguugaucuccuuucuucucuuauguggcagaucauguucaguaaccuauaaagguguuuaugagcuacaaacucuagaacugaacauggcaaaccuuaauaugacgaugcccuugucuuguacgaagaacaacagccaucauuacaucaugguuggaaaugaaacaggccuagagcugaccuuaacaaacacaagcaucauuaaccacaaguuuugcaaccuuucugaugcacauaaaaagaaucucuaugaccaugcucugaugagcaucaucucaacuuuccacuuaucuauuccaaacuuuaaucaguaugaagcaaugaguugugacuucaauggagggaaaauaaguguucaguacaaccucagucacuccuuugcuguggaugcagccaaccacugugggaccauugccaaugguguucugcagaccuuuaugaggauggcuugggguggcaguuacauagcacuugauuccggaugcgggaacugggauuguauaaugacuuccuaucaauacuugauaauucaaaacaccacuugggaagaucacugccaguuuucucgcccaucuccuauugguuacuuaggacuauugucacagagaacuagagauaucuauaucagucgaagacgccggggaacuuucacuuggacccuuucugauucugaagguaaugaagcaccugguggguauugucuaacuagauggauguuaauugaagcagaacugaaaugcuuugggaacacagcaguugcaaagugcaacgaaaaacaugaugaagaauuuugugacauguugagauuguuugauuucaacaaacaagcuauaaagaggcugaaaacacccgcacagaugaguauucagcugauaaacaaggcagugaaugcauuaaucaaugaccaacugauuaugaagaaccaucuaagggacaucaugugcauuccuuauugcaacuacaguagauauugguaucuaaaucacacugugacagggaagacaucacugccaagauguuggcuugugucaaaugguuccuaccuaaacgaaacacauuuuucugaugacauugaacaacaagcagacaacaugauaacagaaauguugcagaaagaguacauggacaggcaggggaaaacaccuuuaggguuaguggaccuuuuugucuuuagcacuagcuuuuaccucauaagcaucuuucuccaucuggucaagaucccaacucacaggcacaucguggggaaaccuugcccuaagccacacagacucaaccacaugggcaucugcucauguggucuguauaaacaucccgguguuccaguaaaauggaagagauaaggacuagucccuguucccagagcccacuuuuuuuucuuuuuuugaaauaaaauagccugucuuucagaucuaaaaaaaaaaaaaaaaaaaaaaaaaaaaaaaaaaaaaaaaaaaaaaaaaaaaaaaaaaaaaaaaugcaucccccccccccccccccccccccccccccccaaaggcucuuuucagagccaccagaauu

SEQ ID NO: 6398 - RNA, 1768 nt, Artificial Sequence
  mRNA product Design a-2 comprising derived and/or modified sequence from LASV(GA391;Clade III)__CAA36645__GPCstabilized (wt)
gggagaguccgcucagccagguugcagaagcggcuuagcguguguccuaaucuucucucugcguguagguaggccugugccgcaaacaagcuuaccaugggacagauugugacauucuuccaagaaguuccucauguuauugaggaagugaugaauauuguccuuauugcacuauccauccuagcaauucugaagggacuauacaauguugccacguguggcuugauagggcuugucacauuccuucuacuuucaggaaggucaugcucacugaucuacaaagggacuuacgagcugcaaacccuugaguugaauauggagacucuuaauaugaccaugccgcuauccugcacaaagaacaacagucaucauuauauaaggguggggaaugagacaggacuugagcucaccuugaccaacaccagcauucuuaaucacaaauucuguaaccucucugaugcccacaaaaggaaucuuuaugaucacagccucaugaguaucaucucuaccuuucaucuguccauucccaacuucaaucaauaugaggcaaugagcugcgauuucaauggggggaaaaucacugugcaauacaaccugagucauagcuucgcaguggaugcagcaggucacugcggcacacuugcaaauggugucuuacaaacauuuaugagaauggcuuggggagggaguuauauugcucuugauucuggaugcgguaacugggacuguauaaugaccaguuaccaauaucuaaucauucagaauacaaccugggaugaccacugccaauuuuccagaccaucaccuauuggcuaccuugggcuucucucacaaagaacuagagacauauacauuagcagaaggcgccgggggacauucaccuggacacuaucagacucagagggaaaugaaacaccagggggauacugccuuacuagauggauguugauugaggccgaauuaaagugcuuuggaaacacugcaguagccaagugcaaugagaaacaugaugaagaauuuugugacaugcuaagguuguucgauuucaacaaacaggccauaaggaggcucaaaacacccgcccaaaugagcauacagcugaucaacaaggcugucaaugcuuuaauaaaugaucagcucaucaugaagaaccacuugagagacaucaugugcauaccauauuguaacuacagcagauauugguaccuuaaccacacaucaacaggaaagaccucacuaccaagguguuggcuuaucucaaauggaucauaucucaaugagaccaaguuuucagaugacaucgaacaacaagcugacaacaugauaacagagaugcuacaaaaggaauacauagauagacagggcaaaacuccacugggguuaguugaccuauuuguuuuuagcacaaguuucuaucugauaagcaucuuucuccaccuggucaaaauaccaacccauagacacauuguagguaaaccuugcccaaaaccccacaggcugaaccacaugggcaucugcuccuguggucuauacaaacagccaggugugccugucagauggaagaggugaggacuagucccuguucccagagcccacuuuuuuuucuuuuuuugaaauaaaauagccugucuuucagaucuaaaaaaaaaaaaaaaaaaaaaaaaaaaaaaaaaaaaaaaaaaaaaaaaaaaaaaaaaaaaaaaaugcaucccccccccccccccccccccccccccccccaaaggcucuuuucagagccaccagaauu

SEQ ID NO: 6399 - RNA, 1771 nt, Artificial Sequence
  mRNA product Design a-2 comprising derived and/or modified sequence from LASV(AV;Clade V)__CCA30314__GPCstabilized (wt)
gggagaguccgcucagccagguugcagaagcggcuuagcguguguccuaaucuucucucugcguguagguaggccugugccgcaaacaagcuuaccauggggcaaauagugacauucuuucaagaggugccucaugugauagaagaggugaugaacauuguucuuauagcauugucuauauuggcaguguugaaaggucucuacaacauugccacaugcggccucaucggcuugaucacuuuccucuuauuauguggaaggucuugcucauccaaccucuacaagggggucuaugaacuucaaucucuggaccugaacauggagacacucaacaugaccaugccccucuccugcacaaagaacaauagucaucacuacauaaggguuggcaaugacacagggcuggaacugaccuugaccaacacgagcauacucaaucacaaauucugcaaccuaucagaugcucacaagaaagaccuauaugaucacgcacucaugagcauaaucucaacuuuccaccugucuauacccaauuucaaccaauacgaagcaaugaguugugacuucaaugggggcaaaaucagugugcaguacaaucuaagccauucuuaugcuauagaugcagcuaaucauugcggcacagucgcgaauggcaucuugcagacuuucaugagaauggcauggggugggagcuauauugcucuugacucaggcugcggaaacugggacuguauuaugacuagcuaucaauaucugauuauucagaacacaaccugggaaaaucacugucaguucucaagaccaucuccuauugguuaucuuggucuccucucacagaggacuagagacauuuacauuagcaggaggcgccggggcacauucacguggacacugucagacucugaggguaaugcuacaccaggagguuauugucugaccagguggauguuaauugaagcugaguugaaaugcuuuggaaacacagcaguagcaaaguguaaugaaaagcaugaugaagaauuuugcgacaugcucagacuuuuugauuuuaauaagcaggcuauaaguagauugaaaucucccgcacaaaugagcauccaacugaucaacaaagcagugaaugcuuugaucaacgaucaauuaauuaugaagaaccacuugcgagacaucaugugcauuccauauuguaauuacagcaaguauugguaccucaaucauacaauaacuggcaaaaccucauuaccuaaauguuggcuuguaucuaaugguucauacuugaaugaaacccauuuuucugacgacaucgagcaacaagcugacaauaugaucacagagaugcuacaaaaggaauacauggagaggcaagggaaaacgccuuuggguuuaguugaucuguuuguguuuagcacaaguuuuuaucuaauuaguaucuuccuccgacuagucaagauuccaacccauagacacauugugggcaaaccauguccuaagccccacagguugaaccacaugggcauuuguucuugcggcuuauacaagcagccuggcguccccgugagauggaagagauagggacuagucccuguucccagagcccacuuuuuuuucuuuuuuugaaauaaaauagccugucuuucagaucuaaaaaaaaaaaaaaaaaaaaaaaaaaaaaaaaaaaaaaaaaaaaaaaaaaaaaaaaaaaaaaaaugcaucccccccccccccccccccccccccccccccaaaggcucuuuucagagccaccagaauu

SEQ ID NO: 6400 - RNA, 1768 nt, Artificial Sequence
  mRNA product Design a-2 comprising derived and/or modified sequence from LASV(Togo/2016/7082;Clade VI)__AMR44577__GPCstabilized (wt)
gggagaguccgcucagccagguugcagaagcggcuuagcguguguccuaaucuucucucugcguguagguaggccugugccgcaaacaagcuuaccauggggcaaauaauaaccuucuuccaggagguuccucauguuauagaggaggugaugaacauuguucugauagcacucucacuccuagcuauccugaaaggggucuacaauguggcaacaugugggauaauugggcuugugaccuuccucuuucucuguggaagaucuuguucacugaucuacaaaggcaguuaugagcugcaaacauuggaguuaaauauggagacccuaaacaugaccaugccucugucaugcacuaaaaauaguagccaccauuauauucgaguugggaacgagacuggcuuagagcugacauugaccaacaccagcauuauaaaucacaaauucuguaaccugucagaugcucacaaacguaaucuguaugaccacgcacucaugagcauccuuuccacauuccaucuguccaucccaaacuucaaccaguaugaggcgaugaguugugacuucaauggaggcaaaaucagugugcaauauaaucucagccaugcuuaugcaguugaugcugccgaacacugcggaacaguugcaaauggugugcuacaaacauucaugaggauggcuuggggaggaaguuacauugcacuugacucugggugcggcaauugggacuguauuaugacaagcuaccaauacuuaaucauucagaauacaacaugggaagaucacugccaauuuucaagaccuucuccuauugguuaucucggcuuauugucacaaagaacaagagacauuuauaucaguaggaggcgccgggguacauucaccuggacacuuucugacucagagggaaaugagacaccaggcggauacuguuuaacaagauggaugcugauagaggcugagcuaaaauguuuuggaaacacagcuguugcaaaguguaaugagaagcaugaugaggaauucugcgacauguuaagguuguuugacuucaacaaacaggcaauucagaggcucaaaucacccgcacaaaugagcauccaguuaauaaauaaagcagugaaugcauugauaaaugaucagcucauuaugaagaaccacuuaagggauaugaugugcauaccguauugcaacuacaguaaguauugguaucucaaucacaccucaucagggagaacaucguugccuaaaugcuggcuuguuuccaauggaaguuaucugaaugagacccacuucucagaugauauugaacaacaggcagacaacaugauaacugaaauguuacaaaaggaauauaucgauaggcaggguaaaacaccuuuaggacuuguugaccuuuuuguuuucagcacgaguuuuuaccuuauaaguauauucuuacacuugauaaagauaccuacucauaggcacauaguuggaaagccaugccccaagccacaccgccucaaccacauggggaucugcucuuguggacuauacaagcagccuggugucccaaccagauggaagagauaaggacuagucccuguucccagagcccacuuuuuuuucuuuuuuugaaauaaaauagccugucuuucagaucuaaaaaaaaaaaaaaaaaaaaaaaaaaaaaaaaaaaaaaaaaaaaaaaaaaaaaaaaaaaaaaaaugcaucccccccccccccccccccccccccccccccaaaggcucuuuucagagccaccagaauu

SEQ ID NO: 6401 - RNA, 1768 nt, Artificial Sequence
  mRNA product Design a-2 comprising derived and/or modified sequence from LASV(KAK-428;Clade n.d. (VII))__ANH09740__GPCstabilized (wt)
gggagaguccgcucagccagguugcagaagcggcuuagcguguguccuaaucuucucucugcguguagguaggccugugccgcaaacaagcuuaccaugggucaaauagugaccuucuuccaggaaguaccucauguuauagaggaagugaugaacauaguucugauagcacuuucucucuuagccauccugaagggccucuacaauuuugccaccuguggaguaauuggacugauaacauuccuuuuacuuuguggaagauccuguucagcgaccuacaaaggccaauaugaacuccaaacuuuagaacuaaauauggagucccuaaacaugaccaugccacugucuugcacaaaaaacaacagucaucauuauaucagagcuggcaacaacacaggccuggaguugacccucaccaacaccagcauuauaucucauaaauucugcaaccuuucugaugcucacaagaagaaccuuuaugaccacacucuuaugaguauaauaacuaccuuucauuuguccaucccaaauuucaaccaguaugaggcaaugaguugugacuuuaacggugggaaaaucagcauacaguacaaccucagucacuccuacgcuggugaugcugcgcaacacuguggaacaguugcaaauggggugcugcaaaccuuuaugagaauggcuuggggagguaguuaucuggcccuugauucaggaugcagagguugggacugcauaauuuccaguuaccaauacuugaucauccaaaacacaacuugggaugaccauugccaguuuucaaggccauccccgaucggguaucuuggguuuguaucgcagaagaccagggacaucuauauaaguagaagacgccggggaacuuuuacauggacacuuucagacuccgagggacaugacaugccaggugguuacugcuugaccagauggaugcucauugaagcugauuuaaaguguuuuggaaacacagcugucgcuaaguguaaugagaaacaugacgaggaguucugugacauguggagguuguuugacuuuaauaagcaagccauucaaaggcucaaagcacccgcccagaugaacauccagcucauaaauaaagcugucaaugcucucauaaaugaccaauugaugaugaaaaaccauuuaagggauaucaugugcauucccuauugcaauuacaguaaauucugguaucucaauaacaccacgacugggagaaccucacugccaagaugcuggcugauuucaaauggguccuacuuaaaugagacucacuucucagaugauauugaacagcaagcugacaauaugauaacugagauguugcagaaagaauacauggacagacaaggaaaaacaccgcuaggacugguugaucucuuuguauucaguacaagcuuuuaccucauuaccauuuucuuacaucuugugaaaauaccaacccacagacacauaguuggcaagccgugcccuaaaccacacagacugaaucacaugggcaucugcuccugugggcucuacaaacagccuggugugccaguacgauggaagagaugaggacuagucccuguucccagagcccacuuuuuuuucuuuuuuugaaauaaaauagccugucuuucagaucuaaaaaaaaaaaaaaaaaaaaaaaaaaaaaaaaaaaaaaaaaaaaaaaaaaaaaaaaaaaaaaaaugcaucccccccccccccccccccccccccccccccaaaggcucuuuucagagccaccagaauu

SEQ ID NO: 6402 - RNA, 1768 nt, Artificial Sequence; identical to SEQ ID NO: 6396
  mRNA product Design a-2 comprising derived and/or modified sequence from LASV(Pinneo-NIG-1969;Clade I)__AIT17836__GPCstabilized (wt)

SEQ ID NO: 6403 - RNA, 1768 nt, Artificial Sequence
  mRNA product Design a-2 comprising derived and/or modified sequence from LASV(ISTH0009-NIG-2011;Clade II)__AIT17404__GPCstabilized (wt)
gggagaguccgcucagccagguugcagaagcggcuuagcguguguccuaaucuucucucugcguguagguaggccugugccgcaaacaagcuuaccaugggacaaaucauaacauuuuuccaggaaguaccucaugucauagaggaagugaugaacauuguccugauugcucucagccuucuggcaauacugaaggggaucuacaauguugccaccuguggccuauuuggacugguguccuuucuccucuuaugugggagaucaugcucaacaacuuauaaggguguuuaugagcuacaaacucuagagcuggacauggcaagccuuaauaugacaaugccccuaucuugcacaaagaacaacagucaccauuacaucauggucggaaaugagacuggcuuggagcugacuuuaacaaauacaaguauuaucaaccacaaguuuuguaaccuuucugaugcacauaaaaagaaucucuaugaccaugcuuuaaugaguaucaucucaaccuuccacuuaucuauuccuaauuuuaaucaguaugaagcaaugaguugugacuucaauggggggaagauaaguguucaguacaaccuuagccacgcuuaugcuguagaugcagccaaucacugugggacuaucgccaauggcguucuucagacuuuuaugaggauggcuugggguggcaguuacauagcacuugauuccggaugcgggaguugggauuguauaaugacuuccuaccaauauuugauaauccagaacaccacuugggaagaucacugccaguuuucucgcccauccccuaucgguuaucuggggcuacugucacaaaggaccagagacauuuacaucagucgaagacgccgggggacuuuuacuuggacucucucugauucugaagguaaugaaacaccggguggguacugucuaacaagauggaugcugauugaggccgaguugaagugcuuugggaacacagcaguugcgaaaugcaaugagaaacaugaugaagaguuuugugacauguuaagacuguuugauuucaacaaacaagcuauaaggaggcuaaagacacccgcacagaugaguauccaacugauaaacaaagcagugaaugcauugaucaaugaccagcuuauuaugaagaaucacuugagagauaucaugugcauuccuuacugcaauuacagcaaguacugguaucuaaaucacacuguaacagggaagacaucguugccaaggugcuggcuugugucaaaugguuccuaccugaaugagacacauuuuucugaugacauugaacaacaggcagacaacaugauaacagaacuguugcaaaaggaguacauggacaggcaagggaaaacacccuuaggguuaguagaucuuuuugucuucagcaccagcuuuuaucucauuagcaucuuccuccaccugaucaaaaucccaacccacagacauaucacagggaaacccugcccuaaaccacacagacuuaaccacaugggcauaugcucauguggucuauacaaacauccugguguaccagucaaguggaaaagauagggacuagucccuguucccagagcccacuuuuuuuucuuuuuuugaaauaaaauagccugucuuucagaucuaaaaaaaaaaaaaaaaaaaaaaaaaaaaaaaaaaaaaaaaaaaaaaaaaaaaaaaaaaaaaaaaugcaucccccccccccccccccccccccccccccccaaaggcucuuuucagagccaccagaauu

SEQ ID NO: 6404 - RNA, 1768 nt, Artificial Sequence
  mRNA product Design a-2 comprising derived and/or modified sequence from LASV(ISTH2010-NIG-2012;Clade II)__AIT17482__GPCstabilized (wt)
gggagaguccgcucagccagguugcagaagcggcuuagcguguguccuaaucuucucucugcguguagguaggccugugccgcaaacaagcuuaccaugggacaaaucauaacauuuuuccaggaaguaccucaugucauagaggaagugaugaacauuguccugauugcucucagccuucuggcaauauugaaggggaucuacaauguugcuaccuguggccucuuuggauugguguccuuccuccucuuauguggaaggucauguucaacaacuuacaaggguguuuaugagcuacaaacucuggagcuagacauggcaagccuuaauaugacaaugcccuuaucuugcacgaagaacaacagccaccauuacaucauggucggaaaugaaacuggcuuggagcuaacuuuaacaaauacaaguaucaucaaccacaaauuuuguaaccucucugaugcacauaagaagaaucuuuaugaucaugcuuuaaugaguaucauuucaaccuuccacuuauccauuccuaacuuuaaucaguaugaagcaaugagcugugacuucaaugggggaaagauaaguguucaguacaaccuuagccacgcuuaugcuguagaugcagccaaccacugugggaccaucgccaauggcguucuucagacuuuuaugaggauggcuugggguggcagcuauauagcacuugauuccggaugcgggaguugggauuguauaaugacuuccuaccaauauuugauaauccaaaacaucacuugggaagaucacugccaguuuucucgcccauccccuaucgguuaccuagggcuacugucacaaaggaccagggacauuuacaucagucgaagacgccgggggacuuuuacuuggacucucucugauucugaagguaaugaaacaccggguggguauugccuaacaagauggaugcugauugaagccgaguugaaaugcuuugggaacacagcaguugcgaaaugcaaugagaaacaugaugaagaguuuugugacauguuaagauuguuugacuuuaacaaacaggcuauaaggaggcuaaagacacccgcacagaugaguauccaacugauaaacaaagcagugaacgcacugaucaaugaccagcugauuaugaagaaucauuugagagauaucaugugcauuccuuacugcaauuacagcaaguacugguaucuaaaucauacuguaacagggaagacaucguugccaaggugcuggcuugugucaaaugguuccuaccugaaugagacacauuuuucugaugacauugaacaacaggcagacaacaugauaacagaacugcugcaaaaggaguacauagacaggcaagggaaaacaccuuuaggguuaguagaucuuuuugucuucagcaccagcuuuuaucucauuagcaucuuccuccaccugguuaaaaucccaacccacagacaugucguaggaaaacccugcccuaaaccacacagacucaaccacaugggcauauguucauguggucuauacaaacauccuggugugccagucaaguggaaaagauagggacuagucccuguucccagagcccacuuuuuuuucuuuuuuugaaauaaaauagccugucuuucagaucuaaaaaaaaaaaaaaaaaaaaaaaaaaaaaaaaaaaaaaaaaaaaaaaaaaaaaaaaaaaaaaaaugcaucccccccccccccccccccccccccccccccaaaggcucuuuucagagccaccagaauu

SEQ ID NO: 6405 - RNA, 1768 nt, Artificial Sequence
  mRNA product Design a-2 comprising derived and/or modified sequence from LASV(Lassa virus/H.sapiens-wt/NGA/2015/ISTH_0543;Clade II)__AVO03639__GPCstabilized (wt)
gggagaguccgcucagccagguugcagaagcggcuuagcguguguccuaaucuucucucugcguguagguaggccugugccgcaaacaagcuuaccaugggacaaaucauaacauuuuuccaggaagugccucaugucauagaggaaguaaugaacauuguccugauugcucucagccuucuggcaauauugaaggggaucuacaauguagccaccuguggccuuuuuggacugguguccuuucuccucuuauguggaagaucaugcucaacaacuuauaagggugucuacgagcuacaaacucuagagcuggacauggcaaaccuuaauaugacaaugccccuaucuugcacaaagaacaacagucaccauuacaucauggucggaaaugaaacuggcuuggagcugacuuuaacaaauacaaguauuaucaaccacaaguuuugcaaccuuucugaugcacauaaaaagaaucucuaugaccaugcuuuaaugaguaucaucucaaccuuccacuuaucuauuccuaauuuuaaucaguaugaagcaaugaguugugacuucaauggagggaagauaaguguucaguacaaccuuagccacacuuaugcuguagaugcagccaaucacugugggacuaucgccaauggcguucuucagacuuuuaugaggauggcuugggguggcaguuacauagcacuugauucuggaugcgggaguugggauuguauaaugacuuccuaccaauaucugguaauccagaacaccacuugggaagaucacugccaauuuucucgcccauccccuaucgguuaucuggggcuacugucacaaaggaccagagacauuuacaucagucgaagacgccgggggacuuucacuuggacucucucugauucugaagguaaugaaacaccggguggguacugucuaacaagauggaugcugauugaggccgaguugaagugcuuugggaacacagcaguugcgaaaugcaaugagaaacaugaugaagaguuuugugacauguuaagacuguucgauuuuaacaaacaagcuauaaggaggcugaagacacccgcacagaugaguauccaacuaauaaacaaagcagugaaugcauugaucaaugaccagcuuauuaugaagaaucacuuaagagauaucaugugcauuccuuacugcaauuacagcaaguacugguaucuaaaucacacugugacagggaagacaucguugccaaggugcuggcuuguaucaaaugguuccuaccugaaugagacacauuuuucugaugauauugaacaacaggcagacaacaugauaacagaacuguugcaaaaggaauacauagacaggcaagggaaaacacccuuaggguuaguagaucuuuuugucuucagcaccagcuuuuaucucauuagcauuuuccuccaccuggucaaaaucccaacucacagacauaucacagggaaacccugcccuaaaccacacagacuuaaccacaugggcauaugcucauguggucuauacaaacauccugguguaccagucaaguggaaaagauagggacuagucccuguucccagagcccacuuuuuuuucuuuuuuugaaauaaaauagccugucuuucagaucuaaaaaaaaaaaaaaaaaaaaaaaaaaaaaaaaaaaaaaaaaaaaaaaaaaaaaaaaaaaaaaaaugcaucccccccccccccccccccccccccccccccaaaggcucuuuucagagccaccagaauu

SEQ ID NO: 6406 - RNA, 1768 nt, Artificial Sequence
  mRNA product Design a-2 comprising derived and/or modified sequence from LASV(Lassa virus/H.sapiens-wt/NGA/2016/ISTH_0009;Clade II)__AVO03571__GPCstabilized (wt)
gggagaguccgcucagccagguugcagaagcggcuuagcguguguccuaaucuucucucugcguguagguaggccugugccgcaaacaagcuuaccaugggacaaaucauaacauuuuuccaggaaguaccucaugucauagaggaagugaugaacauuguccugauugcucucagccuucuggcaauacugaaggggaucuacaauguugccaccuguggccuccuuggacugguguccuuucuccucuuauguggaaggucaugcucaacaacuuauaaggguguuuaugagcuacaaacucuagagcuggacauggcaagccuuaauaugacaaugccccugucuugcacaaagaacaacagucaccauuacaucauggucggaaaugagacuggcuuggagcugacuuuaacaaauacaaguauuaucaaccacaaguuuuguaaccuuucugaugcacauaaaaagaaucucuaugaccaugcucuaaugaguaucaucucaaccuuccacuuaucuauuccuaauuuuaaccaguaugaagcaaugaguugugacuucaauggggggaggauaaguguucaguacaaccuuagccacucuuaugcuguagaugcagccaaucacugugggacuaucgccaauggcguucuucagacuuucaugaggauggcuugggguggcaguuacauagcacuugauuccggaugcgggaguugggauuguauaaugacuuccuaccaauacuugauaauccagaacaccacuugggaagaucacugccaguuuucucgcccauccccuaucgguuauuuggggcuacugucacagaggaccagagacauuuacaucagucgaagacgccgggggacuuuuacuuggacucucucugauucugaagguaaugaaacaccggguggguacugucuaacaagauggaugcugauugaggccgaguugaagugcuuugggaacacagcaguugcgaaaugcaaugagaaacaugaugaagaguucugugacauguuaagacuguuugauuuuaauaaacaagccauaaggaggcugaagacacccgcacagaugaguauccaacugauaaacaaagcagugaaugcauugaucaaugaccagcuuauuaugaagaaccacuugagagauaucaugugcauuccuuacugcaauuacagcaaguacugguaucuaaaucacacuguaacagggaagacaucguugccaaggugcuggcuugugucaaaugguuccuaccugaaugagacacauuuuuccgaugacauugaacaacaggcagacaacaugauaacagaauuguugcagaaggaguacauagacaggcaagggaaaacacccuugggguuaguagaucuuuuugucuucagcaccagcuuuuaucucauuagcaucuuccuccaccuggucaaaauuccaacccacagacauaucacagggaaacccugccccaaaccacacagacuuaaccacaugggcauaugcucauguggucuauacaaccauccuggugugccagucaaguggaaaagauagggacuagucccuguucccagagcccacuuuuuuuucuuuuuuugaaauaaaauagccugucuuucagaucuaaaaaaaaaaaaaaaaaaaaaaaaaaaaaaaaaaaaaaaaaaaaaaaaaaaaaaaaaaaaaaaaugcaucccccccccccccccccccccccccccccccaaaggcucuuuucagagccaccagaauu

SEQ ID NO: 6407 - RNA, 1768 nt, Artificial Sequence
  mRNA product Design a-2 comprising derived and/or modified sequence from LASV(Lassa virus/H.sapiens-wt/NGA/2016/ISTH_0017;Clade II)__AVO03567__GPCstabilized (wt)
gggagaguccgcucagccagguugcagaagcggcuuagcguguguccuaaucuucucucugcguguagguaggccugugccgcaaacaagcuuaccaugggacaaaucauaacauuuuuccaggaaguaccucaugucauagaggaagugaugaacauuguccugauugcucucagccuucuggcaauacugaaagggaucuacaauguugcuaccuguggccucuuuggguugguguccuuccuccucuuaugugggagaucaugcucaacaacuuacaaggguguuuaugagcuacaaacucuagagcuagacauggcaagccuuaauaugacaaugcccuuaucuugcacgaagaacaauucccaccauuacaucauggucggaaaugagacuggcuuggagcugacuuuaacaaauacaagcauuaucaaccacaaguuuuguaaccuuucugaugcacauaaaaagaaucuuuaugaccaugccuuaaugagcaucauuucaaccuuccacuuauccauuccuaacuuuaaucaguaugaagcaaugaguugugacuucaaugggggaaaaauaaguguucaguacaaccuuagccauacuuaugcuauagaugcagcuaaccacugugggaccauugccaauggcguucuucagacuuuuaugaggauggcuugggguggcaguuacauagcacuugauuccggaugcggcagcugggacugcauuaugacuuccuaccaauauuugauaauccagaacaccacuugggaagaucacugccaguuuucucgcccaucccccaucgguuaucuggggcuacugucacaaaggaccagagacauuuacaucagucgaagacgccgggggacuuuuacauggacccucucugacucugaagguaaugaaacaccagguggguacugucuaacgagauggaugcugauugaggccgaguugaagugcuuugggaacacagcaguugcaaaaugcaaugagaaacaugaugaagaguuuugugauauguuaagauuauuugacuuuaacaaacaagcuauaaggaggcugaagacacccgcgcagaugaguauccaacugauaaacaaagcagugaacgcacugaucaaugaccagcugauuaugaagaaucauuuaagagauaucaugugcauuccuuacugcaauuacagcaaguauugguaucuaaaucacacuguaacagggaagacaucauuaccaagaugcuggcuugugucgaaugguuccuaccugaaugagacacauuuuucugaugacauugaacaacaagcagauaacaugauaacagaacuuuugcaaaaggaauauauggauaggcaagggaaaacacccuuaggguuaguagaucuuuuugucuucagcaccagcuuuuaucucauuagcaucuuccuccaccuggucagaaucccaacucacagacaugucauagggaaacccugcccuaaaccacacagacucaaccacaugggcauaugcucauguggucuguacaaacauccuggugugccagucaaauggaaaagauagggacuagucccuguucccagagcccacuuuuuuuucuuuuuuugaaauaaaauagccugucuuucagaucuaaaaaaaaaaaaaaaaaaaaaaaaaaaaaaaaaaaaaaaaaaaaaaaaaaaaaaaaaaaaaaaaugcaucccccccccccccccccccccccccccccccaaaggcucuuuucagagccaccagaauu

SEQ ID NO: 6408 - RNA, 1768 nt, Artificial Sequence
  mRNA product Design a-2 comprising derived and/or modified sequence from LASV(Lassa virus/H.sapiens-wt/NGA/2018/ISTH_0959;Clade II)__AVV65099__GPCstabilized (wt)
gggagaguccgcucagccagguugcagaagcggcuuagcguguguccuaaucuucucucugcguguagguaggccugugccgcaaacaagcuuaccaugggacaaaucauaacauuuuuccaggaaguaccucaugucauagaggaagugaugaacauuguccugauugcucucagccuuuuggcaauacugaaggggaucuacaauguuguuaccuguggccucuuuggauugguguccuuccuccucuuauguggaagaucauguucaacaacuuacaaggguguuuaugagcuacaaacucuggagcuggacauggcaagccuuaauaugacaaugcccuuaucuugcacgaagaacaacagccaccauuacaucauggucggaaaugagacuggcuuggagcugacuuuaacaaauacaaguaucaucaaccauaaauuuuguaaccucucugaugcacauaaaaagaaucuuuaugaucaugcuuuaaugaguaucauuucaaccuuccacuuauccauuccaaacuuuaaucaguaugaagcaaugagcugugacuucaaugggggaaagauaaguguucaguacaaccuuagccacgccuaugcuauagaugcagccaaccacugcgggacuauugccaauggcguucuucaaacuuuuaugaggauggcuugggguggcagcuauauagcacuugauuccggaugcgggaguugggacuguauaaugacuuccuaccaguauuugauaauccaaaacaccacuugggaagaucauugucaguuuucucgcccauccccuaucgguuaccuagggcuacugucacaaaggaccagggacauuuacaucagucgaagacgccgggggacuuuuacuuggacucucucugauucugaagguaaugaaacaccggguggguauugucuaacaagauggaugcugauugaggccgaguugaaaugcuuugggaacacagcaguugcgaaaugcaaugagaaacaugaugaagaguuuugugacauguuaagauuguuugacuuuaacaaacaagcuauaaggaggcuaaagacacccgcacagaugaguauccagcugauaaacaaagcagugaacgcacugaucaaugaccagcugauuaugaaaaaucauuugagagauaucaugugcauuccuuacugcaauuacagcaaguacugguaucuaaaucauacuguaacagggaagacaucguugccaaggugcuggcuugugucaaaugguuccuaccugaaugagacacauuuuucugaugacauugaacaacaagcagacaauaugauaacagaacugcugcaaaaggaguacauagacaggcaagggaaaacaccuuuaggguuaguagaucuuuuugucuucagcaccagcuuuuaucucauuagcaucuuccuccaccugguuaaaaucccaacccacagacaugucauaggaaaacccugcccuaaaccacacagacuuaaucacaugggcauauguucauguggucuauacaaacauccuggugugccagucaaguggaaaagauagggacuagucccuguucccagagcccacuuuuuuuucuuuuuuugaaauaaaauagccugucuuucagaucuaaaaaaaaaaaaaaaaaaaaaaaaaaaaaaaaaaaaaaaaaaaaaaaaaaaaaaaaaaaaaaaaugcaucccccccccccccccccccccccccccccccaaaggcucuuuucagagccaccagaauu

SEQ ID NO: 6409 - RNA, 1768 nt, Artificial Sequence
  mRNA product Design a-2 comprising derived and/or modified sequence from LASV(LASV003-NIG-2008;Clade II)__AIT17580__GPCstabilized (wt)
gggagaguccgcucagccagguugcagaagcggcuuagcguguguccuaaucuucucucugcguguagguaggccugugccgcaaacaagcuuaccauggggcaaaucauaacauuuuuccaggaagugccucaugucauagaagaagugaugaacauuguccugauugcccucagccuuuuggcaauauugaaagggaucuacaauguugcuacuuguggccucuuuggacugguguccuuucuucucuuauguggaagaucaugcucaacaacuuacaaagguguuuaugagcuacaaacucuagagcuagacauggcaagccuuaauaugacaaugcccuuaucuugcacaaagaauaauagccaccauuacaucauggucggaaaugaaacuggcuuagagcugacuuuaacaaauacaaguaucaucaaccacaaguuuuguaaccuuucugaugcacauaaaaagaaucuuuaugaccaugcuuuaaugagcaucaucucaaccuuccacuuauccauuccuaacuuuaaucaauaugaagcaaugaguugugacuucaauggggggaagauaaguguucaguacaaccuuagccacacuuaugcuguagaugcagcuaaccacugugggacuauugccaauggcguucuucagacuuucaugaggauggcuugggguggcagcuacauagcacuugauuccggaugcgggaguugggauuguauaaugacuuccuaccaauaucugauaauccagaacaccacuugggaagaucauugccaguuuucucgcccaucccccaucgguuaucuggggcuacugucacaaaggaccagggacauuuacaucagucgaagacgccgggggacuuuuacuuggacccucucugauucugaaagcaaugaaacuccagguggguauugucuaacaagguggauguugauugaggccgagcugaagugcuuugggaacacagcaguugcgaaaugcaaugaaaaacaugaugaagaguuuugugacaugcuaagauuguuugacuuuaacaaacaagcuauaaggaggcugaaagcacccgcacagaugagcauccaacuaauaaacaaagcagugaaugcacugaucaaugaccagcugauaaugaagaaucauuuaagagauaucaugugcauuccuuacugcaauuacagcaaauauugguacuugaaucacacuguaacagggaggacaucguuaccaagaugcuggcuugugucaaaugguuccuaccugaaugagacacauuuuucugacgacauugaacaacaagcagacaauaugauaacagaacuguugcagaaggaguacauggacaggcaagggaaaacaccuuuaggguuaguagaucuuuuugucuucagcaccagcuuuuaucucaucagcaucuuccuccaccugguuaaaaucccaacccacagacaugucauagggaaacccugcccuaaaccacacagacucaaccacaugggcauaugcucauguggucuguacaaacauccuggugugccagucaaguggaaaagauagggacuagucccuguucccagagcccacuuuuuuuucuuuuuuugaaauaaaauagccugucuuucagaucuaaaaaaaaaaaaaaaaaaaaaaaaaaaaaaaaaaaaaaaaaaaaaaaaaaaaaaaaaaaaaaaaugcaucccccccccccccccccccccccccccccccaaaggcucuuuucagagccaccagaauu

SEQ ID NO: 6410 - RNA, 1768 nt, Artificial Sequence
  mRNA product Design a-2 comprising derived and/or modified sequence from LASV(LASV035-NIG-2009;Clade II)__AIT17588__GPCstabilized (wt)
gggagaguccgcucagccagguugcagaagcggcuuagcguguguccuaaucuucucucugcguguagguaggccugugccgcaaacaagcuuaccauggggcaaaucauaacauuuuuccaggaagugccucaugucauugaggaggugaugaacauugucuuaauugcucucagucuucuagcaauacugaaagggauuuacaauguugcuaccuguggccucuuuggguugguguccuuucuucucuuauguggaaggucaugcucaacaacuuacaaggguguuuaugagcuucaaacucuagagcuggauauggcaagccuuaauaugacaaugcccuuauccugcacgaagaacaacagccaccacuacaucaugguuggaaaugagacuggcuuggagcugacuuugacaaacacaaguaucaucaaccacaaguucugcaaccuuuccgaugcacauaaaaagaaucucuaugaccaugcuuuaaugagcaucaucucaacuuuccaccuauccaucccuaacuuuaaucaguaugaagcaaugaguugugacuucaauggggggaagauaaguguucaguacaaccucagccacgcuuaugcuguagaugcagcuaaccauugugggaccauugccaauggaguucuucaaacuuuuaugaggauggcuugggguggcaguuacauagcacuugauucuggaugcgggaguugggauuguauaaugacuuccuaccaauauuugauaauccaaaacaccacuugggaagaucacugccaguuuucucgcccauccccuauugguuaucuggggcuacugucacaaagaaccagggauauuuacaucagccgaagacgccggggaacuuuuacuuggacucucucugauucugaaggcaaugaaacaccggguggauauuguuuaacaagauggaugcugauugaggccgaauuaaagugcuuugggaacacagcaguugcgaaaugcaaugagaaacaugaugaagaguuuugugacauguuaagguuguuugacuuuaacaaacaggcuauaaggaggcuaaaggcacccgcacagaugagcauccaacuaauaaacaaagcagugaacgcacugaucaaugaccagcucauuaugaagaaucauuuaagagauaucaugugcauuccuuacugcaauuacagcaaguauugguauuuaaaucacacuguaacagggaagacaucguugccaagaugcuggcuuguaucaaaugguuccuaccugaaugaaacacauuuuucugaugacauugaacaacaagcagauaacaugauaacagaauuguuacagaaagaguacauugacaggcaagggaaaacacccuuaggguugguggaucuuuuugucuucagcacuagcuucuaccuuauuagcaucuuccuccaccugguuaaaaucccaacccacagacaugucauagggaagcccugccccaagccacacagacucaaccacaugggcauaugcucauguggucuguacaaacauccugguguaccagucaaguggaaaagauagggacuagucccuguucccagagcccacuuuuuuuucuuuuuuugaaauaaaauagccugucuuucagaucuaaaaaaaaaaaaaaaaaaaaaaaaaaaaaaaaaaaaaaaaaaaaaaaaaaaaaaaaaaaaaaaaugcaucccccccccccccccccccccccccccccccaaaggcucuuuucagagccaccagaauu

SEQ ID NO: 6411 - RNA, 1768 nt, Artificial Sequence
  mRNA product Design a-2 comprising derived and/or modified sequence from LASV(LASV1000-NIG-2009;Clade II)__AIT17782__GPCstabilized (wt)
gggagaguccgcucagccagguugcagaagcggcuuagcguguguccuaaucuucucucugcguguagguaggccugugccgcaaacaagcuuaccaugggacaaaucauaacauuuuuccaggaaguuccucaugucauagaggaagugaugaacauuguccugauugcucucagccuccuggcaauacuaaaagggaucuacaauguugcuaccuguggccucuuuggauugguguccuuccuccucuuauguggaagaucaugcucaacaacuuacaaggguguuuaugagcugcaaacucuagagcuagacauggcaagccuuaauaugacaaugccucuaucuugcacgaagaauaacagccaccauuacaucauggucggaaaugagacuggcuuggagcugacuuuaacaaacacaaguauuaucaaucacaaguuuuguaaccuuucugaugcacacaaaaagaaucuuuaugaccaugcuuuaaugagcaucaucucaaccuuccauuuaucuauucccaacuucaaucaguaugaagcaaugaguugugacuucaaugggggaaagauaaguguucaguacaaccuuagccacacuuaugcuguagaugcagccaaccacugugggacuaucgccaauggcguccuucagaccuuuaugaggauggcuugggguggcaguuacauagcacuugauuccggaugcgggaguugggacuguauaaugacuuccuaucaauaucugauaauccaaaacaccacuugggaagaucacugccaguuuucucgcccaucuccuaucgguuaucuggggcuacugucacaaaggaccagagacauuuacaucagucgaagacgccgggggacuuucacuuggacucucucugauucugaagguaaugaaacaccggguggguacugucuaacaagguggaugcugauugaggccgaguugaagugcuuugggaacacagcaguugcgaaaugcaaugagaaacaugaugaagaguuuugugacauguuaagauuguuugacuuuaacaaacaagcuauaaagaggcugaagacacccgcacagaugaguauucaacugauaaacaaagcagugaacgcacugaucaaugaccagcugauuaugaagaaucauuugagagacaucaugugcauuccuuacuguaauuacagcaaguauugguaucuaaaucacaccguaacagggaagacaucguugccaaggugcuggcuugugucaaaugguuccuaccugaaugagacacacuuuucugaugacauugaacaacaagcagauaacaugauaacagaacuauugcaaaaggaguacauagacaggcaagggaaaacacccuuaggguuaguagaccuuuuugucuuuagcaccagcuuuuaucucauuagcaucuuccuccaccuggucaaaaucccaacccauagacaugucguagggaaacccugcccuaaaccacacagacucaaccacaugggcauaugcucauguggucuauacaaacauccugguguaccagucaaauggaaaagauagggacuagucccuguucccagagcccacuuuuuuuucuuuuuuugaaauaaaauagccugucuuucagaucuaaaaaaaaaaaaaaaaaaaaaaaaaaaaaaaaaaaaaaaaaaaaaaaaaaaaaaaaaaaaaaaaugcaucccccccccccccccccccccccccccccccaaaggcucuuuucagagccaccagaauu

SEQ ID NO: 6412 - RNA, 1768 nt, Artificial Sequence
  mRNA product Design a-2 comprising derived and/or modified sequence from LASV(LASV221-NIG-2010;Clade II)__AIT17624__GPCstabilized (wt)
gggagaguccgcucagccagguugcagaagcggcuuagcguguguccuaaucuucucucugcguguagguaggccugugccgcaaacaagcuuaccaugggacaaaucauaacauuuuuccaggaaguaccucaugucauagaggaagugaugaacauuguccugauugcucucagccuucuggcaauacugaaagggaucuacaauguugcuaccuguggccucuuuggauugguguccuuccuccucuuauguggaagaucaugcucaacaacuuacaaggguguuuaugagcuacaaacucuagagcuagacauggcaagccuuaauaugacaaugcccuuaucuugcacgaagaacaacucccaccauuacaucauggucggaaaugagacuggcuuggagcugacuuugacaaauacaagcauuaucaaccacaaguuuuguaaccuuucugaugcgcauaaaaagaaucuuuaugaccaugcuuuaaugaguaucaucucaaccuuccacuuguccauuccuaacuuuaaucaguaugaagcaaugaguugugauuucaaugggggaaagauaaguguucaguacaaccuuagccacacuuaugcuauagaugcagccaaccacugugggaccauugccaauggcguucuucagacuuucaugagaauggcuugggguggcaguuacauagcacuugauuccggaugcgggagcugggauugcauaaugacuuccuaccaauauuugauaauccaaaacaccacaugggaagaucacugccaguuuucucgcccaucccccaucgguuaucuggggcuacuaucacaaagaaccagggacauuuacauuagucgaagacgccgggggacuuucacuuggacucucucugacucugaagguaaugaaacaccggguggguauugucuaacaagauggaugcugauugaggccgaguugaagugcuuuggaaacacagcaguugcaaaaugcaaugaaaaacaugaugaagaguuuugugauauguugagauuguuugacuucaacaaacaagcuauaaggaggcuaaagacacccgcacagaugaguauccaacugauaaacaaagcggugaacgcacugaucaaugaccagcugaucaugaagaaucauuugagagauaucaugugcauuccuuacugcaauuacagcaaguauugguaucuaaaucacacuguaacagggaagacaucguugccaagaugcuggcuugugucgaaugguucuuaccugaaugagacacauuuuucugaugacauugaacaacaagcagacaacaugauaacagaaauguugcaaaaggaguacauggacaggcaagggaaaacacccuuaggguuaguagaucuuuuugucuucagcaccagcuuuuaucucauuagcaucuuccuccaccuaguuaaaauuccaacccacagacaugucauagggaaacccugcccuaaaccacacagacucaaccacaugggcauauguucauguggucuguauaagcauccuggcgugccagucaaguggaaaagauagggacuagucccuguucccagagcccacuuuuuuuucuuuuuuugaaauaaaauagccugucuuucagaucuaaaaaaaaaaaaaaaaaaaaaaaaaaaaaaaaaaaaaaaaaaaaaaaaaaaaaaaaaaaaaaaaugcaucccccccccccccccccccccccccccccccaaaggcucuuuucagagccaccagaauu

SEQ ID NO: 6413 - RNA, 1768 nt, Artificial Sequence
  mRNA product Design a-2 comprising derived and/or modified sequence from LASV(LASV237-NIG-2010;Clade II)__AIT17638__GPCstabilized (wt)
gggagaguccgcucagccagguugcagaagcggcuuagcguguguccuaaucuucucucugcguguagguaggccugugccgcaaacaagcuuaccaugggacaaaucauaacauuuuuccaggaaguaccucaugucauagaggaagugaugaacauuguccugauugcucucagccuucuggcaauacugaaggggaucuacaauguugccaccuguggccuauuuggacugguguccuuucuccucuuauguggaagaucaugcucaacaacuuauaaggguguuuaugagcuacaaacucuagagcuggauauggcaagccuuaauaugacaaugccccuaucuugcacaaagaacaacagucaccauuacaucauggucggaaaugagacuggcuuggagcugacuuuaacaaauacaaguauuaucaaccacaaguuuuguaaccuuucugaugcacauaaaaaggaucucuaugaccaugcuuuaaugaguaucaucucaaccuuccacuuaucuauuccuaauuuuaaucaguaugaagcaaugaguugugacuucaauggggggaagauaaguguucaguacaaccuuagccacacuuaugcuguagaugcagccaaucacugugggacuaucgccaauggcguucuucagacuuuuaugaggauggcuugggguggcaguuacauagcacuugauuccggaugcgggaguugggauuguauaaugacuuccuaccaauauuugauaauccagaacaccacuugggaagaucacugccaguuuucucgcccauccccuaucgguuaucuggggcuacugucacaaaggaccagagacauuuacaucagucgaagacgccgggggacuuuuacuuggacucucucugauucugaagguaaugaaacaccggguggguacugucuaacaagauggaugcugauugaggccgaguugaagugcuuugggaacacagcaguugcgaaaugcaaugagaaacaugaugaagaguuuugugacauguuaagacuguuugauuucaacaaacaagcuauaaggaggcuaaagacacccgcacagaugaguauccaacugauaaacaaagcagugaaugcauugaucaaugaccagcuuauuaugaagaaucacuugagagauaucaugugcauuccuuacugcaauuacagcaaguacugguaucugaaucacacuguaacagggaagacaucguugccgaggugcuggcuugugucaaaugguuccuaccugaaugagacacauuuuucugaugacauugaacaacaggcagacaacaugauaacagaacuguugcaaaaggaguacauggacaggcaagggaaaacacccuuaggguuaguagaccuuuuugucuucagcaccagcuuuuaucucauuagcaucuuccuccaccugaucaaaaucccaacccacagacauaucacagggaaacccugcccuaaaccacacagacuuaaccacaugggcauaugcucauguggucuauacaaacauccugguguaccagucaaguggaaaagauagggacuagucccuguucccagagcccacuuuuuuuucuuuuuuugaaauaaaauagccugucuuucagaucuaaaaaaaaaaaaaaaaaaaaaaaaaaaaaaaaaaaaaaaaaaaaaaaaaaaaaaaaaaaaaaaaugcaucccccccccccccccccccccccccccccccaaaggcucuuuucagagccaccagaauu

SEQ ID NO: 6414 - RNA, 1768 nt, Artificial Sequence
  mRNA product Design a-2 comprising derived and/or modified sequence from LASV(LASV253-NIG-2011;Clade II)__AIT17670__GPCstabilized (wt)
gggagaguccgcucagccagguugcagaagcggcuuagcguguguccuaaucuucucucugcguguagguaggccugugccgcaaacaagcuuaccauggggcaaaucauaacauuuuuucaggaagugccucaugucauagaagaagugaugaacauuguccugauugcccucagccuucuggcaauauugaaagggaucuacaauguugcuacuuguggccucuuuggacugguguccuuucuucucuuauguggaagaucaugcucaacaacuuacaaagguguuuaugagcuacaaacucuagagcuagacauggcaagccuuaauaugacaaugcccuuaucuugcacaaagaauaauagccaccauuacaucauggucggaaaugaaacuggcuuagagcugacuuuaacaaauacaaguaucaucaaccacaaguuuuguaaccuuucugaugcacauaaaaagaaucuuuaugaccaugcuuuaaugagcaucaucucaaccuuccacuuauccauuccuaacuucaaucaauaugaagcaaugaguugugacuucaauggggggaagauaaguguucaguacaaccuuagccacacuuaugcuguagaugcagcuaaccacugugggacuauugccaauggcguucuucagacuuuuaugaggauggcuugggguggcagcuacauagcacuugauuccggaugcgggagcugggauuguauaaugacuuccuaccaauauuugauaauccagaacaccacuugggaggaucacugccaguuuucucgcccaucccccaucgguuaucuggggcuacugucacaaaggaccagggacauuuacaucagucgaagacgccggggaacuuuuacuuggacccucucugauucugaaggcaaugaaacuccagguggguauugucuaacaagguggauguugauugaggccgaguugaagugcuuugggaacacagcaguugcgaaaugcaaugagaaacaugaugaagaguuuugugacaugcuaagauuguuugacuuuaauaaacaagcuauaaggagacugaaagcacccgcacagaugaguauucaacuaauaaacaaagcagugaaugcacugaucaaugaccagcugauaaugaagaaucauuuaagagauaucaugugcauuccuuacugcaauuacagcaaguauugguaucugaaucacacuguaacaggaaggacaucguuaccaagaugcuggcuugugucaaaugguuccuaccugaaugagacacauuuuucugacgacauugaacaacaagcagacaacaugauaacagaacuguugcagaaggaguacauagacaggcaagggaaaacaccuuuaggguuaguggaucuuuuugucuucagcaccagcuuuuaucucaucagcaucuuccuccaccugguuaaaaucccaacccacagacauaucauagggaaacccugcccuaaaccacacagacucaaccacaugggcauaugcucauguggucuguacaaacauccuggugugccaguuaaguggaaaagauagggacuagucccuguucccagagcccacuuuuuuuucuuuuuuugaaauaaaauagccugucuuucagaucuaaaaaaaaaaaaaaaaaaaaaaaaaaaaaaaaaaaaaaaaaaaaaaaaaaaaaaaaaaaaaaaaugcaucccccccccccccccccccccccccccccccaaaggcucuuuucagagccaccagaauu

SEQ ID NO: 6415 - RNA, 1768 nt, Artificial Sequence
  mRNA product Design a-2 comprising derived and/or modified sequence from LASV(LASV254-NIG-2011;Clade II)__AIT17674__GPCstabilized (wt)
gggagaguccgcucagccagguugcagaagcggcuuagcguguguccuaaucuucucucugcguguagguaggccugugccgcaaacaagcuuaccaugggacaaaucauaacauuuuuccaggaaguaccucaugucauagaggaagugaugaacauuguucugauugcucucagccuucuggcaauauugaaagggaucuacaauguugcuaccuguggccucuuuggauugguguccuuucuucucuuauguggaagaucaugcucaacaacuuacaaggguguuuaugagcuacaaacucuagagcuagacaugacaaaccucaauaugacaaugccuuuauccugcacgaaaaacaacagccaccauuacaucauggucggaaaugagacuggucuggagcugacuuuaacaaauacaagcaucaucaaccacaaguuuuguaaccuuucugaugcacauaaaaagaaucuuuauaaccaugcuuuaaugaguauuauuucaacuuuccacuuauccauuccuaacuuuaaucaguaugaagcaaugaguugugacuucaaugggggcaagauaaguguccaguacaaccuuagccauaguuaugcuguggaugcagcuaaccacugugggaccauugccaauggcgugcuucagacuuuuaugaggauggcuugggguggcaguuacauagcacuugauuccggaugcgggaauugggauuguauaaugaccuccuaccaauauuugauaauccaaaacaccacuugggaagaucacugucaguuuucucgcccauccccuauugguuaucugggguuacugucacaaaggaccagggacauuuacaucagucgaagacgccgggggacuuuuacuuggacucucucugauucugaagguaaugaaacaccagguggguauugucuaacaagauggaugcugauugaggccgaguugaagugcuuugggaacacagcaguugcgaaauguaaugagaaacaugaugaggaguuuugugacauguuaagauuguuugacuuuaacaaacaagcuauaaggaggcugaagacacccgcacaggcgaauauccaacugauaaauaaagcagugaacgcacugaucaaugaccagcugaucaugaagaaucauuugagagauaucaugugcauuccuuacugcaauuacagcaaguauugguacuuaaaucacacuguaacagggaagacaucguugccaagaugcuggcuugugucaaauggcuccuacuugaaugagacacauuuuucugaugacauugaacaacaagcagacaauaugauaacagaacuguugcagaaggaguacauggacaggcaagggaaaacacccuuaggguugguagaucuuuuugucuucagcaccagcuuuuaucucauuagcaucuuccuccaccugguuaaaaucccaacccacagacaugucauagggaaacccugcccuaaaccacacagacucaaccacaugggcauaugcucauguggucuguacaaacauccugguguaccagucaaguggaaaagauagggacuagucccuguucccagagcccacuuuuuuuucuuuuuuugaaauaaaauagccugucuuucagaucuaaaaaaaaaaaaaaaaaaaaaaaaaaaaaaaaaaaaaaaaaaaaaaaaaaaaaaaaaaaaaaaaugcaucccccccccccccccccccccccccccccccaaaggcucuuuucagagccaccagaauu

SEQ ID NO: 6416 - RNA, 1768 nt, Artificial Sequence
  mRNA product Design a-2 comprising derived and/or modified sequence from LASV(Nig08-A19;Clade III)__ADU56618__GPCstabilized (wt)
gggagaguccgcucagccagguugcagaagcggcuuagcguguguccuaaucuucucucugcguguagguaggccugugccgcaaacaagcuuaccaugggacaaauugugacauucuuccaggaagucccucauguuaucgaggaagugaugaauaucguccucauagcauugucaauuuuggcaauccuaaaaggacucuacaacauugcuacauguggcuugauaggccuugucacauuccucuuacuuucuggaaggucauguucaaugaccuacaaaggaguuuaugaacuacagacccuugaacugaacaugaacacucugaauaugacuaugccgcuaucuuguacaaagaacaauagucaccacuacaucauggugggaaacgagacagggcuugagcucaccuuaaccaacacaagcuugcuccaucacaaauucugcaaccuaucagaugcucauaagaaaaaucuuuaugaucacacucucaugagcauuaucuccacauuccauuuguccauuccuaacuuuaaucaguaugaggcaaugaguugugauuuuaaugguggcaagaucacugugcaauacaaucugagucauagcuaugcaauugaugcagcaaaccauuguggcacaguggcaaacgguguguugcaaacauuuaugaggauggcuuggggagguaguuacauugcccuugauuccggaugcgggaaaugggauuguauaaugaccaguuaucaauacuuaaucauccagaacacaaccugggaagaucauugucaauuuuccagaccauccccaauuggauaucuugggcuccucucacagagaacuagagacauauacauuaguagaagacgccggggaacauuuacuuggacacuuucugacucagaaggaaaugagacaccaggagguuacugucucacuagauggauguugauugaggcugaacuaaaguguuucgggaauacagcuguagcuaagugcaaugaaaaacacgaugaagaguuuugugacaugcuaaggcuauuugacuucaauaagcaagcuauaaggagguuaaaggcacccgcccaaaugagcauacagcugaucaacaaagcaguuaaugcucuaauaaacgaucagcugaucaugaagaaucaucuaagggacaucaugugcauaccauacugcaauuacagcaaguacugguaucucaaucacaccucaacagggaggaccucauuaccgagauguuggcuuguuucaaaugggucauaucucaaugaaacucacuuuucagaugacauugagcagcaagcugauaacaugauaacugaaauguugcaaaaagaauaccuggacagacaaggaaagaccccauugggauugguagaucuuuuugucuucaguacaaguuuuuacuuaaucaguauuuuccuccaucuggucaaaauaccaacccauagacacauuguagggaagccuugccccaaaccucauagguugaaccacaugggcaucugcucuuguggucuauauaaacagccaggaguacccguuagauggaagagauaaggacuagucccuguucccagagcccacuuuuuuuucuuuuuuugaaauaaaauagccugucuuucagaucuaaaaaaaaaaaaaaaaaaaaaaaaaaaaaaaaaaaaaaaaaaaaaaaaaaaaaaaaaaaaaaaaugcaucccccccccccccccccccccccccccccccaaaggcucuuuucagagccaccagaauu

SEQ ID NO: 6417 - RNA, 1771 nt, Artificial Sequence
  mRNA product Design a-2 comprising derived and/or modified sequence from LASV(G1180-SLE-2010;Clade IV)__AIT17168__GPCstabilized (wt)
gggagaguccgcucagccagguugcagaagcggcuuagcguguguccuaaucuucucucugcguguagguaggccugugccgcaaacaagcuuaccaugggacagauagugacauucuuccaggaagugccucauguaauagaagaggugaugaacauuguucucauugcacugucuauacuagcagugcugaaaggucuguacaauuuugcaacauguggccucguuggucuacucacuuuccuccuguuguguggcagaucuugcacagcuagucguuacaaagggguuuaugagcuucagacucuggaacuaaacauggagacacucaauaugaccaugccucucuccugcacaaagaacaacagucaucauuauauaaugguggguaaugagacaggacuagaacugacuuugacuaacacgagcaucauuaaucauaaauuuugcaaucugucugaugcccacaaaaagaaccuuuaugaccacgcucuuaugagcauaauuucaacuuuccacuuauccauccccaacuucaaucaguaugaggcaaugagcugcgauuuuaaugggggaaagauuagugugcaguacaaccugagucacagcuaugcuggggaugcagccaaucauugugguacuguugcaaauggugucuugcagaccuucaugaggauggcuuggggugggagcuacauugcucuugacucaggcugcggcaguugggacuguauuaugacuaguuaucaauaucugauaauccaaaauacaaccugggaagaucacugccaguucucaagaccaucucccauugguuaucucgggcuccuuucacaaagaaccagagauauuuacauuaguagaagacgccggggcacauucacauggacacugucagauucugaaggcaaggacacaccagggggauauugucugaccagauggaugcuaauugaagcugaacuaaaaugcuucgggaacacagcuguggcaaaauguaaugagaagcaugaugaggaauuuugugacaugcugaggcuguuugacuucaacaaacaagccauucaaagguugaaagcucccgcacaaaugagcauucaauugaucaacaaggcaguaaaugcuuugauaaaugaccaacuuauaaugaagaaccauuuacgagacaucaugugcaucccauacuguaauuacagcaaguauugguaccucaaccacacaaccacugggaaaacaucacugccuaaguguuggcuuguaucaaaugguucauacuuaaaugagacccacuuuucugaugauauugagcaacaagcugacaacaugaucacugagauguuacagaaggaguauauggaaaggcagggcaagacaccauugggccuaguugaccucuuuguguuuagcacaaguuucuaucucauuagcaucuuccuucaccuggucaaaauaccaacucauaggcauauuguaggcaagucgugucccaaaccucauagauugaaucacaugggcauauguuccuguggacucuacaaacagcccggugugccugugaaauggaagagaugaggacuagucccuguucccagagcccacuuuuuuuucuuuuuuugaaauaaaauagccugucuuucagaucuaaaaaaaaaaaaaaaaaaaaaaaaaaaaaaaaaaaaaaaaaaaaaaaaaaaaaaaaaaaaaaaaugcaucccccccccccccccccccccccccccccccaaaggcucuuuucagagccaccagaauu

SEQ ID NO: 6418 - RNA, 1771 nt, Artificial Sequence
  mRNA product Design a-2 comprising derived and/or modified sequence from LASV(G1442-SLE-2011;Clade IV)__AIT17180__GPCstabilized (wt)
gggagaguccgcucagccagguugcagaagcggcuuagcguguguccuaaucuucucucugcguguagguaggccugugccgcaaacaagcuuaccaugggacaaauagugacauucuuucaggaagugccucaugugauagaggagguaaugaacauugugcucauugcacuauccauacuggcagugcugaagggucuauacaauguugcaacaugcggccugauugguuuagucaccuuccuauuguuaugugguaggucuugcacaacaacucuuuacaaaggaguuuacgaacuucagacucuggaauuaaacauggagacacucaauaugacuaugccucucucuuguacaaagaacaacagucaccacuauauaaggguggguaaugagacaggacuagaguugacccugaccaacacaagcaucaucaaucacaaguuuugcaaucuaucugaugcucacaaaaagaaccucuaugaucaugcuuugaugagcauaaucucgacuuuucacuuguccauucccaacuucaaccaauaugaggcaaugagcugugacuucaauggagggaagauuagugugcaguauaaccugagucacagcuaugcuggagaugcagccaaccauugugguacaguugcaaaugguguuuuacaaaccuucaugaggauggcuuggggugggaguuacaucgcccuugacucagguugcggcaauugggacuguauuaugacuaguuaucaauaccuaauaauucagaauacgaccugggaugaucauugccaauucucaagaccaucccccaucgguuaucuugggcuccucucacaaaggaccagagauguuuauaucaguagaagacgccggggcacauucacauggacacugucagauucugaaggcaaggacacaccaggaggguacugucugaccagguggaugcuaauugaagcugaacugaaaugcuuuggcaacacagcuguagcaaaauguaaugagaaacaugaugaagaauucugugacaugcuaaggcuguuugacuucaauaaacaagcuauucagagguugaaagcccccgcacaaaugaguauucaguugaucaacaaagcagugaaugcuuugauaaaugaccaacuaauaaugaaaaaccaucuacgggacaucaugugcauuccauacugcaauuacagcaaguacugguaucucaacaacacagccacugggaaaacaucacugcccaaauguuggcuuauaucaaauggcucauauuugaacgaaacucacuucucugaugacauugaacaggaagcugacaauaugaucacugagauguuacaaaaagaauacauggagaggcaggggaagacaccauuaggucugguugaccucuuuguguucagcacaaguuucuaucucauuagcaucuuccuucaccuagucaaaauaccaacucacaggcauauugugggcaaaucauguccuaaaccccauagguugaaucacauggguauuugcucuuguggacuuuauaaacaacccggugugccuguaagauggaagagaugaggacuagucccuguucccagagcccacuuuuuuuucuuuuuuugaaauaaaauagccugucuuucagaucuaaaaaaaaaaaaaaaaaaaaaaaaaaaaaaaaaaaaaaaaaaaaaaaaaaaaaaaaaaaaaaaaugcaucccccccccccccccccccccccccccccccaaaggcucuuuucagagccaccagaauu

SEQ ID NO: 6419 - RNA, 1771 nt, Artificial Sequence
  mRNA product Design a-2 comprising derived and/or modified sequence from LASV(G3010-SLE-2013;Clade IV)__AIT17344__GPCstabilized (wt)
gggagaguccgcucagccagguugcagaagcggcuuagcguguguccuaaucuucucucugcguguagguaggccugugccgcaaacaagcuuaccaugggacagauaguaacauucuuccaggaagugccucaugugauagaagaggugaugaacauuguucucauugcacugucuauauuagcagugcugaaaggucuguacaauuuugcaacauguggccucguugguuugguuaccuuccuccuguuaugugguaggucuugcacaaccagucuuuacaaagggguuuaugagcuucagacucuggaacuaaacauggagacacucaauaugaccaugccucucuccuguacaaagaacaacagucaucauuauauuaugguggguaaugagacaggacuagaacugaccuugaccaacacgagcaucauuaaucauaaauuuugcaaucugucugaugcccacaaaaagaaccucuauaaucacgcucuuaugagcauaauuucaacuuuccaucuguccauucccaacuucaaucaguaugaggcaaugagcugcgauuucaaugggggaaagauuagugugcaguacaaccugagucacaguuaugcuggggaugcggccagccauuguggcacuguugcaaauggugucuuacagacuuucaugaggauggcuugggguggaagcuauauugcucuugacucaggcugcggcaagugggacugcauuaugacuaguuaucaguaccugauaauucaaaauacaaccugggaagaucacugccaauucucaagaccaucucccauuggcuaucucgggcuccucucacaaaggaccagagauauuuauauuaguagaagacgccggggcacauucacauggacacugucggauucugaagguaaggacacaccagggggauauuguuugaccagauggaugcuaauugaagcugaacuaaagugcuucgggaacacagcuguagcaaaauguaaugagaagcaugaugaggaauuuugugacaugcugaggcuguuugacuucaacaaacaagccauucaaagauugaaaacucccgcacaaaugagcauucaguugaucaacaaggcaguaaaugccuuaauaaaugaccagcuuauaaugaagaaccaucuacgagacauaaugugcauuccauacuguaacuacagcaaguauugguaccucaaccacacaaccacugggaaaacaucacugccuaaauguuggcuuguaucaaauggcucauacuugaaugagacccacuuuucugaugauauugaacaacaggcugacaacaugaucacugagauguuacagaaagaguacauggagaggcaggggaagacaccauugggccuggucgaccuuuuuguguucagcacaaguuucuaucucaucaguaucuuucuucaccuagucaaaauaccaacucauagacauauuguaggaaagucgugucccaaaccucacagauugaaucacaugggcauauguuccuguggacucuacaaacagcccggugugccugugagauggaagagaugaggacuagucccuguucccagagcccacuuuuuuuucuuuuuuugaaauaaaauagccugucuuucagaucuaaaaaaaaaaaaaaaaaaaaaaaaaaaaaaaaaaaaaaaaaaaaaaaaaaaaaaaaaaaaaaaaugcaucccccccccccccccccccccccccccccccaaaggcucuuuucagagccaccagaauu

SEQ ID NO: 6420 - RNA, 1771 nt, Artificial Sequence
  mRNA product Design a-2 comprising derived and/or modified sequence from LASV(G502-SLE-2009;Clade IV)__AIT17126__GPCstabilized (wt)
gggagaguccgcucagccagguugcagaagcggcuuagcguguguccuaaucuucucucugcguguagguaggccugugccgcaaacaagcuuaccaugggacagauagugacauucuuccaggaaguaccucauguaauagaagaggugaugaacauuguucucauugcacugucuauacuagcagugcugaaaggucuguauaauuuugcaacauguggccucguuggucuacucaccuuccuccuauuguguggcaggucuugcacaaccggacuuuacaaagggguuuaugagcuucaaacucuggaacuaaacauggagacacucaauaugaccaugccucucuccugcacaaagaacaacagucaucauuauauaaugguggguaaugagacaggacuagaacugacuuugacuaacacgagcaucauuaaucauaaauuuugcaaucugucugaugcccacaaaaagaaccuuuaugaccacgcucuuaugagcauaauuucaacuuuccacuuguccauccccaacuucaaucaguaugaggcaaugagcugcgauuuuaaugggggaaagauuaguguacaguacaaccugagccacaguuaugcuggggaugcggcugaucauuguggcacuguugcaaauggugucuugcagacuuucaugaggauggccuggggugggagcuacauugcucuugacucagguugcggcaggugggacuguauuaugacuaguuaucaauauuugauaauccaaaauacaaccugggaagaucacugccaguucucaagaccaucucccaucgguuaucucgggcuccucucacaaagaacuagagacauuuacauuaguagaaggcgccggggcacauucacauggacacugucagauucugaaggcaaggacacaccaggaggauauugucugacuagauggaugcugauugaggcugaauuaaaaugcuucgggaacacagcuguagcaaaauguaaugagaagcaugaugaggaauuuugugacaugcugaggcuguuugacuucaacaaacaagccauucaaagguuaaaagcucccgcacagaugagcauucaauugaucaacaaggcaguaaaugcuuugauaaaugaccaacuuguaaugaagaaccacuuacgggacaucaugugcauuccauacuguaauuacagcagguauugguaucucaaccacacaaccacuggaagaacaucacugccuaaauguuggcuugugucaaauggcucauacuuaaacgagacccacuuuucugaugauauugagcaacaagcugacaacaugaucacugagauguuacagaaggaauauauggaaaggcagggaaagacaccauuaggucugguugaccucuuuguguucagcacaaguuucuaucuuauuagcaucuuccuucaccuggucaagauaccaacucauaggcauauugugggcaagucgugucccaaaccucauagauugaaucacaugggcauauguuccuguggacucuacaaacagcccgguguaccugugaaauggaagagaugaggacuagucccuguucccagagcccacuuuuuuuucuuuuuuugaaauaaaauagccugucuuucagaucuaaaaaaaaaaaaaaaaaaaaaaaaaaaaaaaaaaaaaaaaaaaaaaaaaaaaaaaaaaaaaaaaugcaucccccccccccccccccccccccccccccccaaaggcucuuuucagagccaccagaauu

SEQ ID NO: 6421 - RNA, 1771 nt, Artificial Sequence
  mRNA product Design a-2 comprising derived and/or modified sequence from LASV(G733-SLE-2010;Clade IV)__AIT17154__GPCstabilized (wt)
gggagaguccgcucagccagguugcagaagcggcuuagcguguguccuaaucuucucucugcguguagguaggccugugccgcaaacaagcuuaccaugggacagauagugacauucuuccaggaagugccucauguaauagaagaggugaugaacauuguucucauugcacugucuauacuagcaguccugaagggucuguacaacuuugcaacauguggcaucguugguuuggucagcuuucuccuguuguguggcaggucuugcacaaccagucuuuacaaagggguuuaugagcuucagacucuggagcuaaacauggagacacuuaacaugaccaugccucucucuugcacaaagaacaacagucaucauuauauaauggugggcaaugagacgggauuggaacugaccuugaccaacacgagcauuaucaaucauaaauuuugcaaucuaucugaugcccauaagaagaaccucuaugaccacgcccuuaugaguauaaucucaaccuuccacuuguccauccccaacuucaaucaguaugaagcaaugagcugugauuucaaugggggaaagauuaguguacaguacaaccugagucacagcuaugcuggggaugcagccaaccauuguggcacaauugcaaauggugucuuacagacuuucaugaggauggccuggggugggagcuacauugcucuugacucaggcugcgacaggugggacugcauaaugaccaguuaucaauaucugauaauccaaaacacaaccugggaagaucacugccaauucucaagaccaucucccaucgguuaucuugggcuccucucacaaaggaccagagauauauauauuaguaggagacgccggggcacauuuacauggacauugucagauucugaagguaaggacacaccaggaggguauugucuaaccagauggaugcugauugaggcugagcugaaaugcuuugggaacacagcuguggcaaaaugcaaugagaaacaugaugaggaauuuugugauaugcuaaggcuguuugacuucaacaaacaagccauucaaagguuaaaagcucccgcacaaaugagcauucaguugaucaacaaagcagugaaugcuuugauaaacgaccaacuaauaaugaagaaccaucuacgggacaucaugugcauuccauacuguaauuacagcaaguacugguaccucaaccacacaacuacugggaaaacaucacugccuaaauguuggcuugugucgaaugguucauacuuaaacgagacucacuuuucugaugacauugaacaacaagcugacaauaugaucacugagauguuacagaaggaauacauggaaaggcaggggaagacaccauugggucuaguugaccucuuuguguucagcacaaguuucuaucucauuagcaucuuccuucauuuggucaaaauaccaacucauaggcauguuguaggcaagucgugucccaagccucacagauugaaucacaugggcauaugcuccugcggacucuauggacagccugguguaccugugaaauggaagagaugaggacuagucccuguucccagagcccacuuuuuuuucuuuuuuugaaauaaaauagccugucuuucagaucuaaaaaaaaaaaaaaaaaaaaaaaaaaaaaaaaaaaaaaaaaaaaaaaaaaaaaaaaaaaaaaaaugcaucccccccccccccccccccccccccccccccaaaggcucuuuucagagccaccagaauu

SEQ ID NO: 6422 - RNA, 1771 nt, Artificial Sequence
  mRNA product Design a-2 comprising derived and/or modified sequence from MOPV/LASV reassortant(IGS-1;Clade IV)__AFY05576__GPCstabilized (wt)
gggagaguccgcucagccagguugcagaagcggcuuagcguguguccuaaucuucucucugcguguagguaggccugugccgcaaacaagcuuaccaugggacaaauagugacauucuuccaggaagugccucauguaauagaagaggugaugaacauuguucucauugcacugucuguacuagcagugcugaaaggucuguacaauuuugcaacguguggccuuguugguuuggucacuuuccuccuguugugugguaggucuugcacaaccagucuuuauaaagggguuuaugagcuucagacucuggaacuaaacauggagacacucaauaugaccaugccucucuccugcacaaagaacaacagucaucauuauauaauggugggcaaugagacaggacuagaacugaccuugaccaacacgagcauuauuaaucacaaauuuugcaaucugucugaugcccacaaaaagaaccucuaugaccacgcucuuaugagcauaaucucaacuuuccacuuguccauccccaacuucaaucaguaugaggcaaugagcugcgauuuuaaugggggaaagauuagugugcaguacaaccugagucacagcuaugcuggggaugcagccaaccauugugguacuguugcaaaugguguguuacagacuuuuaugaggauggcuuggggugggagcuacauugcucuugacucaggcugcggcaacugggacuguauuaugacuaguuaucaauaucugauaauccaaaauacaaccugggaagaucacugccaauucucgagaccaucucccaucgguuaucucgggcuccucucacaaaggacuagagauauuuauauuaguagaagacgccggggcacauucacauggacacugucagauucugaaggugaagacacaccagggggauauugucugaccagguggaugcuaauugaggcugaacuaaaaugcuucgggaacacagcuguggcaaaauguaaugagaagcaugaugaggaauuuugugacaugcugaggcuguuugacuucaacaaacaagccauucaaagguugaaagcucccgcacaaaugagcauucaguugaucaacaaagcaguaaaugcuuugauaaaugaccaacuuauaaugaagaaccaucuacgggacaucaugugcauuccauacuguaauuacagcaaguauugguaccucaaccacacaacuacugggagaacaucacugcccaaauguuggcuuguaucaaaugguucauacuugaacgagacccacuuuucugaugauauugaacaacaagcugacaauaugaucacugagauguuacagaaggaguauauggagaggcaggggaagacaccauugggucuaguugaccucuuuguguucagcacaaguuucuaucuuauuagcaucuuccuucaccuagucaaaauaccaacucauaggcauauuguaggcaagucgugucccaaaccucacagauugaaucauaugggcauuuguuccuguggacucuacaaacagccuggugugccugugaaauggaagagaugaggacuagucccuguucccagagcccacuuuuuuuucuuuuuuugaaauaaaauagccugucuuucagaucuaaaaaaaaaaaaaaaaaaaaaaaaaaaaaaaaaaaaaaaaaaaaaaaaaaaaaaaaaaaaaaaaugcaucccccccccccccccccccccccccccccccaaaggcucuuuucagagccaccagaauu

SEQ ID NO: 6423 - RNA, 1771 nt, Artificial Sequence
  mRNA product Design a-2 comprising derived and/or modified sequence from LASV(LM765-SLE-2012;Clade IV)__AIT17814__GPCstabilized (wt)
gggagaguccgcucagccagguugcagaagcggcuuagcguguguccuaaucuucucucugcguguagguaggccugugccgcaaacaagcuuaccaugggacaaauagugacauucuuccaggaagugccccaugucauagaagaggugaugaacauuguucucauugcacuguccauacuagcagugcugaaaggucuguacaauuuugcaacauguggccucguuggcuuggucacuuuccuccuguuguguggcaggucuuguacaacuagccuuuacaaagggguuuaugagcuucagacucuggaacuaaacauggaaacacucaauaugaccaugccucucuccugcacaaagaacaauagucaucauuauauaauggugggcaaugagacaggacuagaacugaccuugaccaacacgagcauuauugaucauaaauuuugcaaucugucugaugcccacagaaagaaccucuaugaccacgcucuuaugagcauuaucucaacuuuccacuugucuaucccuaacuucaaucaguaugaggcaaugagcugcgauuucaaugggggaaagauuaguguacaguacaaccugagucacagcuaugccaaggacgcagccgaccauuguggaacuguugcaaaugguguauuacagacuuucaugaggauggcuuggggugggagcuacaucgcucuugacucaggcugcggcaggugggacuguauuaugacuaguuaucaauaucugauaauccaaaauacaaccugggaagaucacugccaauucucgagaccaucucccaucgguuaucucgggcuccucucacagaggaccagagauauuuauauuaguagaaggcgccggggcacauucacauggacacugucagauucugaaggcaaggacacaccagggggauauugucuaaccagauggaugcuaauugaggcugagcuaaagugcuucgggaauacagcuguggcaaaauguaaugagaagcaugaugaggaauuuugugacaugcugagguuguuugacuuuaacaagcaagccauucaaagguugaaagcucccgcacaaaugagcauucaguugaucaacaaagcaguaaaugcuuugauaaaugaccaacuuauaaugaagaaccaucuacgggacaucaugugcauuccauacuguaauuacagcaaguauugguaccucaaccacacaacuacuggaaaaacaucacugcccaaguguuggcuuguaucaaaugguucauaccugaacgagacccacuuuucugaugacauugaacaacaagcugacaacaugaucaccgagauguuacagaaggaguauauggagaggcaggggaagacaccauugggucugguugaccucuuuguguucagcacaagcuucuaucucauuagcaucuuccuucaccuaguuaaaauaccaacucauaggcauauuguaggcaagccgugucccaaaccucacagguugaaucauaugggcauuuguuccuguggacucuauaaacagccuggugugccuguaaaauggaagagaugaggacuagucccuguucccagagcccacuuuuuuuucuuuuuuugaaauaaaauagccugucuuucagaucuaaaaaaaaaaaaaaaaaaaaaaaaaaaaaaaaaaaaaaaaaaaaaaaaaaaaaaaaaaaaaaaaugcaucccccccccccccccccccccccccccccccaaaggcucuuuucagagccaccagaauu

SEQ ID NO: 6424 - RNA, 1771 nt, Artificial Sequence
  mRNA product Design a-2 comprising derived and/or modified sequence from LASV(LM776-SLE-2012;Clade IV)__AIT17824__GPCstabilized (wt)
gggagaguccgcucagccagguugcagaagcggcuuagcguguguccuaaucuucucucugcguguagguaggccugugccgcaaacaagcuuaccaugggacagauagugacauucuuccaggaagugccucauguaauagaagaggugaugaacauuguccucauugcgcugucuauauuagcagugcugaaaggucuguacaacuuugcaacauguggccucguugguuugguuacuuuccuccuguuguguggcaggucuugcacaaccaguguuuauaaaggggucuaugagcuucagacucuggaguuaaacauggagacacucaauaugaccaugccucucuccugcacaaagaauaacagucaucauuauauaaugguagguaaugagacaggacuagaacugaccuugaccaacacaagcauuauuaaucauaaauuuugcaaucugucugaugcccacaaaaagaaccucuaugaccaugcccuuaugagcauaauuucaacuuuccacuuguccauccccaacuucaaucaguaugaagcaaugagcugugauuucaaugggggaaagauuagugugcaguacaaccugagucacagcuaugcuggggaugcugccaaccauuguggcacuguugcaaauggugucuuacagacuuucaugaggauggcuuggggugggagcuacauugcucuugacucaggcugcggcaagugggacuguauuaugacuaguuaucaauaucugauaauccaaaauacaaccugggaagaucacugccaauucucaagaccaucuccuaucgguuaucuugggcuucucucacaaaggaccagagauauuuauaucaguagaagacgccggggcacauucacauggacacugucagauucugaaggcaaggacacaccagggggauauugucugaccagauggaugcugauugaagcugaauuaaaaugcuucgggaacacagcuguagcaaaauguaaugagaagcaugaugaggaauuuugugacauguugaggcuguuugacuucaacaaacaagccauucaaagguugaaagcucccgcacaaaugagcauucaguugaucaacaaggcaguaaaugccuugauaaaugaucaacuuauaaugaagaaccaucuacgggacaucaugugcaucccauacuguaauuacagcaaauauugguaccucaaccacacaacuacugggaaaacaucacugccuaaauguuggcuugucucaaaugggucauacuugaacgagacccacuuuucugaugauauugaacaacaagcugacaacaugaucacugagauguuacagaaggaguauauggagaggcaggggaagacaccauugggccuaguugaccucuuuguguucagcacaaguuucuaucucaucagcaucuuccuucaccuagucaaaauaccaacucauaggcauauuguaggcaagucguguccuaaaccucacagauugaaucacaugggcauauguuccuguggacucuacaaacagcccggugugccugugagauggaaaagaugaggacuagucccuguucccagagcccacuuuuuuuucuuuuuuugaaauaaaauagccugucuuucagaucuaaaaaaaaaaaaaaaaaaaaaaaaaaaaaaaaaaaaaaaaaaaaaaaaaaaaaaaaaaaaaaaaugcaucccccccccccccccccccccccccccccccaaaggcucuuuucagagccaccagaauu

SEQ ID NO: 6425 - RNA, 1771 nt, Artificial Sequence
  mRNA product Design a-2 comprising derived and/or modified sequence from LASV(Mad39;Clade IV)__ANH09722__GPCstabilized (wt)
gggagaguccgcucagccagguugcagaagcggcuuagcguguguccuaaucuucucucugcguguagguaggccugugccgcaaacaagcuuaccauggggcaaauugugacauucuuucaggaagugccucauguaauugaggaggugaugaacauuguacucauugcacuauccauacuggcagugcuaaagggucuguacaauguugcaacauguggccucauuggcuugguuaccuuccuccugcugugugguagaucuuguacaaccacucuuuauaaagggguuuaugagcuucaagcucuggaacuaaacauggaaacacucaacaugacuaugccucucucuugcacaaaaaacaacucucaucacuauauaagggugggcaaugaaacaggccuagaacugaccuugaccaacacaagccucauaaaucacaaguucugcaaucugucugaugcucacaaaaagaaccucuaugaucaugcucuuaugagcauaaucucaacuuuccauuuguccauccccaacuucaaucaguaugaagcaaugagcugugauuucaaugaugggaagaucaguguacaguacaaccuaagccacaccuacgcuggggauacagccaaccacugugguacuguugcgaacgguguuuuacagacuuucaugaggauggcuuggggugggaguuacauugcucuugauucaggcugcgguggaugggacugcauuaugaccagcuaucaauauuugauaauucagaacacaaccugggaagaucacugucaguucucaagaccaucucccaucggguaccuugggcuccucucacaaagaaccagagacauuuauaucaguagaagacgccggggcacauucacauggacacuaucagauucugaggguaaagacacaccagggggguacugucuaacuagguggaugcugauugaagcugaauugaaaugcuuuggcaacacagcuguagcaaaaugcaaugagaagcaugaugaggaauuuugugauauguugaggcuauuugacuuuaacaaacaagccauucaaagauugaaagcucccgcacaaaugaguauucagcugaucaacaaagcagugaaugccuugauaaaugaucaacugauaaugaaaaaccauuugcgggacauuaugugcauuccguacugcaacuacagcaaguauugguaucuuaaucacacagucaccggaaagacaucauuacccaaaugcuggcuuguaucaaauggcucauaccuaaacgagacccacuucucugaugauauugagcagcaagcugauaacaugauuacugagaugcuacagaaggaauacauggagagacaggggaagacaccacuuggucugguugaccucuuuguauuuagcacaaguuucuaucucauuagcauuuuccuucaccuagugaaaauaccaacucauaggcauguugugggcaaaccguguccuaaaccucacagacugaaccacauggguauauguucuuguggguucuacaagcaaccuggugugccugugagauggaagagaugaggacuagucccuguucccagagcccacuuuuuuuucuuuuuuugaaauaaaauagccugucuuucagaucuaaaaaaaaaaaaaaaaaaaaaaaaaaaaaaaaaaaaaaaaaaaaaaaaaaaaaaaaaaaaaaaaugcaucccccccccccccccccccccccccccccccaaaggcucuuuucagagccaccagaauu

SEQ ID NO: 6426 - RNA, 1771 nt, Artificial Sequence
  mRNA product Design a-2 comprising derived and/or modified sequence from LASV(Z0947-SLE-2011;Clade IV)__AIT17840__GPCstabilized (wt)
gggagaguccgcucagccagguugcagaagcggcuuagcguguguccuaaucuucucucugcguguagguaggccugugccgcaaacaagcuuaccaugggacaaauagugacauucuuccaggaagugccccaugucauagaagaggugaugaacaucguucucauugcacugucuauacuagcaguguugaaaggucuguacaauuuugcaacauguggccucguuggcuuggucacuuuccuccuguuguguggcaggucuugcacaauuagccuuuacaaggggguuuaugagcuucagacucuggaacuaaacauggaaacacucaauaugaccaugccucucuccuguacaaagaacaacagucaucauuauauaauggugggcaaugagacaggacuagaacugaccuugaccaacacgagcauuauuaaucauaaauuuugcaaucugucugaugcccacaaaaagaaccucuaugaccaugcucuuaugagcauuaucucaacuuuccacuuguccaucccuaacuucaaucaguaugaggcaaugagcugcgauuucaaugggggaaagauuagugugcaguacaaccugagucacagcuaugccggggacgcagccaaccauugugguacuguugcaaaugguguauuacagacuuucaugaggauggcuuggggugggagcuacaucgcucuugacucaggcugcgacaggugggacuguauuaugacuaguuaucaauaucugauaauccaaaauacaaccugggaagaucacugccaauucucgagaccaucucccaucgguuaucucgggcuccucucacaaaggaccagagauauuuauauuaguagaaggcgccggggcacauucacauggacacugucagauucugaaggcaaggacacaccagggggauauugucuaaccagauggaugcuaauugaggcugagcuaaagugcuucgggaacacagccguggcaaaauguaaugagaagcaugaugaggaauuuugugacaugcugagguuguuugacuuuaacaaacaagccauucaaagguugaaagcucccgcacaaaugagcauucaguugaucaacaaagcaguaaaugcuuugauaaaugaccaacuuauaaugaagaaccaucuacgggacaucaugugcauuccauacuguaauuacagcaaguauugguaccucaaccacacaacuacuggaaaaacaucacugcccaaguguuggcuuguaucaaaugguucauaccugaacgagacccacuuuucugaugacaucgaacaacaagcugacaacaugaucacugagauguuacagaaggaguauauggagaggcaggggaagacaccauugggucugguugaccucuuuguguucagcacaagcuucuaucucauuagcaucuuccuucaccuaguuaaaauaccaacucauaggcauauuguaggcaagccgugucccaaaccucacagguugaaucauaugggcauuuguuccuguggacucuauaaacagccuggugugccugugaaauggaagagaugaggacuagucccuguucccagagcccacuuuuuuuucuuuuuuugaaauaaaauagccugucuuucagaucuaaaaaaaaaaaaaaaaaaaaaaaaaaaaaaaaaaaaaaaaaaaaaaaaaaaaaaaaaaaaaaaaugcaucccccccccccccccccccccccccccccccaaaggcucuuuucagagccaccagaauu

SEQ ID NO: 6427 - RNA, 1771 nt, Artificial Sequence
  mRNA product Design a-2 comprising derived and/or modified sequence from LASV(Josiah;Clade IV)__NP_694870__GPCstabilized (opt1)
gggagaguccgcucagccagguugcagaagcggcuuagcguguguccuaaucuucucucugcguguagguaggccugugccgcaaacaagcuuaccaugggccagaucgugaccuucuuccaggaggucccccacgugaucgaggaggugaugaacaucguccugaucgcccucagcgugcuggccgugcugaaggggcucuacaacuucgcgaccugcggccuggucgggcuggugacguuccuccugcugugcggccgcuccugcaccaccagccucuacaaggggguguacgagcugcagacccuggagcucaacauggagacgcugaacaugaccaugccgcuguccugcaccaagaacaacagccaccacuacaucauggucggcaacgagaccggccucgagcugacgcugaccaacaccuccaucaucaaccacaaguucugcaaccucagcgacgcccacaagaagaaccuguacgaccacgcccugauguccaucaucagcaccuuccaccucuccauccccaacuucaaccaguacgaggccaugagcugcgacuucaacgggggcaagaucuccgugcaguacaaccugagccacuccuacgccggggacgcggccaaccacugcggcacgguggccaacgggguccugcagaccuucaugcggauggccuggggcggcagcuacaucgcgcucgacuccgggugcggcaacugggacugcaucaugaccagcuaccaguaccugaucauccagaacaccacgugggaggaccacugccaguucucccggcccagccccaucggguaccugggccuccugucccagcgcacccgggacaucuacaucagccgccggcgccggggcaccuucaccuggacgcugagcgacuccgaggggaaggacaccccgggcggguacugccugacccgcuggaugcucaucgaggccgagcugaagugcuucggcaacaccgccguggccaagugcaacgagaagcacgacgaggaguucugcgacaugcugcggcuguucgacuucaacaagcaggccauccagcgccugaaggcgcccgcccagaugagcauccagcugaucaacaaggccgugaacgcccucaucaacgaccagcugaucaugaagaaccaccuccgggacaucaugugcauccccuacugcaacuacuccaaguacugguaccucaaccacacgaccaccggccgcaccagccugcccaagugcuggcuggucuccaacggcagcuaccucaacgagacgcacuucuccgacgacaucgagcagcaggccgacaacaugaucaccgagaugcugcagaaggaguacauggagcggcaggggaagacgccccugggccucguggaccuguucguguucagcaccuccuucuaccugaucagcaucuuccugcaccucgucaagaucccgacccaccgccacaucguggggaaguccugccccaagccccaccggcugaaccacaugggcaucugcagcugcgggcuguacaagcagcccggcgugccggucaaguggaagcgcugaggacuagucccuguucccagagcccacuuuuuuuucuuuuuuugaaauaaaauagccugucuuucagaucuaaaaaaaaaaaaaaaaaaaaaaaaaaaaaaaaaaaaaaaaaaaaaaaaaaaaaaaaaaaaaaaaugcaucccccccccccccccccccccccccccccccaaaggcucuuuucagagccaccagaauu

SEQ ID NO: 6428 - RNA, 1768 nt, Artificial Sequence
  mRNA product Design a-2 comprising derived and/or modified sequence from LASV(LP;Clade I)__AAF86701__GPCstabilized (opt1)
gggagaguccgcucagccagguugcagaagcggcuuagcguguguccuaaucuucucucugcguguagguaggccugugccgcaaacaagcuuaccaugggccagaucaucaccuucuuccaggaggugccccacgucaucgaggaggugaugaacaucgugcugaucgcccucagccugcuggccauccucaaggggcuguacaacaucgcgaccugcggcaucaucgggcuggucgccuuccucuuccugugcggcaaguccugcagccugacgcucaagggcggguacgagcugcagacccuggagcucaacauggagacccugaacaugaccaugccgcuguccugcacgaagaacagcucccaccacuacauccgcgugggcaacgagaccgggcucgagcugacccugaccaacacgagcaucaucaaccacaaguucugcaaccucuccgacgcccacaagaagaaccuguacgaccacgcccugaugagcaucaucuccaccuuccaccucagcauccccaacuucaaccaguacgaggccauguccugcgacuucaacggcgggaagaucagcgugcaguacaaccugucccacagcuacgcgggcgacgccgccgagcacugcgggaccgucgccaacggcgugcugcagaccuucaugcggauggcguggggcgggcgcuacaucgcccucgacuccggcugcgggaacugggacugcaucaugacgagcuaccaguaccugaucauccagaacaccaccugggaggaccacugccaguucucccggcccagccccaucggcuaccugggccuccugucccagcgcacccgggacaucuacaucagccgccggcgccgggggacguucaccuggacccugagcgacuccgagggcaacgagacccccgggggcuacugccugacgcgcuggaugcucaucgaggccgagcugaagugcuucgggaacaccgccguggccaagugcaacgagaagcacgacgaggaguucugcgacaugcugcggcuguucgacuucaacaagcaggcgauccgccggcugaaggcccccgcccagaugagcauccagcugaucaacaaggccgucaacgcccucaucaacgaccagcugaucaugaagaaccaccuccgcgacaucaugugcauccccuacugcaacuacuccaaguacugguaccucaaccacaccagcuccggccggaccagccugcccaagugcuggcugaucuccaacgggagcuaccucaacgagacgcaguucuccgacgacaucgagcagcaggcggacaacaugaucaccgagaugcugcagaaggaguacaucgagcgccagggcaagaccccgcuggggcucguggacaucuucaucuucagcaccuccuucuaccugaucagcaucuuccugcaccugaucaagaucccgacgcaccggcacaucgugggcaagcccugccccaagccccaccgccucaaccacaugggggucugcuccugcggccuguacaagcacccgggcgugcccaccaaguggaagcggugaggacuagucccuguucccagagcccacuuuuuuuucuuuuuuugaaauaaaauagccugucuuucagaucuaaaaaaaaaaaaaaaaaaaaaaaaaaaaaaaaaaaaaaaaaaaaaaaaaaaaaaaaaaaaaaaaugcaucccccccccccccccccccccccccccccccaaaggcucuuuucagagccaccagaauu

SEQ ID NO: 6429 - RNA, 1768 nt, Artificial Sequence
  mRNA product Design a-2 comprising derived and/or modified sequence from LASV(803213;Clade II)__AAF86703__GPCstabilized (opt1)
gggagaguccgcucagccagguugcagaagcggcuuagcguguguccuaaucuucucucugcguguagguaggccugugccgcaaacaagcuuaccaugggccagaucaucaccuucuuccaggaggugccccacgucaucgaggaggugaugaacaucgugcugaucgcccucagccugcuggccauccucaaggggaucuacaacgucgcgaccugcggccuguucgggcugaucuccuuccuccugcugugcggccgcagcugcuccgugacguacaaggggguguacgagcuccagacccuggagcugaacauggccaaccucaacaugaccaugccgcugagcugcaccaagaacaacucccaccacuacaucauggucggcaacgagacgggccuggagcucacccugaccaacaccagcaucaucaaccacaaguucugcaaccuguccgacgcccacaagaagaaccucuacgaccacgcccugaugagcaucaucuccacguuccaccugagcauccccaacuucaaccaguacgaggccauguccugcgacuucaacgggggcaagaucagcgugcaguacaaccucucccacagcuucgcgguggacgccgccaaccacugcgggaccaucgccaacggcguccugcagaccuucaugcggauggcguggggcggguccuacaucgcccuggacagcggcugcgggaacugggacugcaucaugaccuccuaccaguaccucaucauccagaacacgaccugggaggaccacugccaguucagccgccccucccccaucggcuaccuggggcugcucagccagcggacccgcgacaucuacaucagccggcgccgccggggcaccuucacguggacccucuccgacagcgagggcaacgaggcccccgggggcuacugccugacccgguggaugcugaucgaggccgagcucaagugcuucgggaacaccgccguggcgaagugcaacgagaagcacgacgaggaguucugcgacaugcugcgccuguucgacuucaacaagcaggccaucaagcggcucaagacgcccgcccagauguccauccagcugaucaacaaggccgugaacgcccugaucaacgaccagcucaucaugaagaaccaccuccgcgacaucaugugcauccccuacugcaacuacagccgguacugguaccugaaccacaccgucaccgggaagaccucccugccccgcugcuggcuggugagcaacggcuccuaccugaacgagacgcacuucagcgacgacaucgagcagcaggcggacaacaugaucaccgagaugcuccagaaggaguacauggaccggcagggcaagaccccgcuggggcugguggaccucuucgucuucuccaccagcuucuaccugaucuccaucuuccugcaccuggugaagaucccgacgcaccgccacaucgugggcaagcccugccccaagccccaccggcucaaccacauggggaucugcagcugcggccuguacaagcacccggggguccccgugaaguggaagcgcugaggacuagucccuguucccagagcccacuuuuuuuucuuuuuuugaaauaaaauagccugucuuucagaucuaaaaaaaaaaaaaaaaaaaaaaaaaaaaaaaaaaaaaaaaaaaaaaaaaaaaaaaaaaaaaaaaugcaucccccccccccccccccccccccccccccccaaaggcucuuuucagagccaccagaauu

SEQ ID NO: 6430 - RNA, 1768 nt, Artificial Sequence
  mRNA product Design a-2 comprising derived and/or modified sequence from LASV(GA391;Clade III)__CAA36645__GPCstabilized (opt1)
gggagaguccgcucagccagguugcagaagcggcuuagcguguguccuaaucuucucucugcguguagguaggccugugccgcaaacaagcuuaccaugggccagaucgugaccuucuuccaggaggucccccacgugaucgaggaggugaugaacaucguccugaucgcccucagcauccuggccauccugaaggggcucuacaacguggcgaccugcggccugaucgggcuggugacguuccuccugcuguccggccgcagcugcucccucaucuacaaggggaccuacgagcugcagacccuggagcucaacauggagacccugaacaugacgaugccgcugagcugcaccaagaacaacucccaccacuacauccgggucggcaacgagaccggccucgagcugacccugacgaacaccagcauccucaaccacaaguucugcaaccuguccgacgcccacaagcgcaaccuguacgaccacagccucauguccaucaucagcaccuuccaccuguccauccccaacuucaaccaguacgaggccaugagcugcgacuucaacgggggcaagaucaccgugcaguacaaccugucccacagcuucgccguggacgccgcggggcacugcggcacgcucgccaacgggguccugcagaccuucaugcggauggccuggggcggcuccuacaucgcccuggacagcgggugcggcaacugggacugcaucaugaccuccuaccaguaccucaucauccagaacaccacgugggacgaccacugccaguucagccggcccucccccaucggguaccugggccugcucagccagcgcacccgggacaucuacaucagccgccggcgccggggcaccuucaccuggacgcucuccgacagcgaggggaacgagaccccgggcggguacugccugacccgcuggaugcugaucgaggcggagcucaagugcuucggcaacaccgccguggccaagugcaacgagaagcacgacgaggaguucugcgacaugcugcggcuguucgacuucaacaagcaggccauccgccggcucaagacgcccgcccagauguccauccagcugaucaacaaggcggugaacgcccugaucaacgaccagcucaucaugaagaaccaccuccgcgacaucaugugcauccccuacugcaacuacagccgguacugguaccugaaccacaccuccaccggcaagaccagccugccccgcugcuggcugaucuccaacggcagcuaccugaacgagacgaaguucuccgacgacaucgagcagcaggccgacaacaugaucaccgagaugcuccagaaggaguacaucgaccggcaggggaagacgccccugggccuggucgaccuguucguguucagcaccuccuucuaccucaucagcaucuuccugcaccuggugaagaucccgacccaccgccacaucgucgggaagcccugccccaagccccaccggcucaaccacaugggcaucugcuccugcgggcuguacaagcagccgggcgugcccgugcgcuggaagcggugaggacuagucccuguucccagagcccacuuuuuuuucuuuuuuugaaauaaaauagccugucuuucagaucuaaaaaaaaaaaaaaaaaaaaaaaaaaaaaaaaaaaaaaaaaaaaaaaaaaaaaaaaaaaaaaaaugcaucccccccccccccccccccccccccccccccaaaggcucuuuucagagccaccagaauu

SEQ ID NO: 6431 - RNA, 1771 nt, Artificial Sequence
  mRNA product Design a-2 comprising derived and/or modified sequence from LASV(AV;Clade V)__CCA30314__GPCstabilized (opt1)
gggagaguccgcucagccagguugcagaagcggcuuagcguguguccuaaucuucucucugcguguagguaggccugugccgcaaacaagcuuaccaugggccagaucgugaccuucuuccaggaggucccccacgugaucgaggaggugaugaacaucguccugaucgcccucagcauccuggccgugcugaaggggcucuacaacaucgcgaccugcggccugaucgggcugaucacguuccuccugcugugcggccgcuccugcagcuccaaccucuacaaggggguguacgagcugcagagccuggaccucaacauggagacccugaacaugaccaugccgcuguccugcaccaagaacaacagccaccacuacauccgggucggcaacgacacgggccucgagcugacccugaccaacaccuccauccucaaccacaaguucugcaaccugagcgacgcccacaagaaggaccuguacgaccacgcccucauguccaucaucagcacguuccaccuguccauccccaacuucaaccaguacgaggccaugagcugcgacuucaacgggggcaagaucuccgugcaguacaaccugagccacuccuacgccaucgacgcggccaaccacugcgggaccguggccaacggcauccuccagaccuucaugcgcauggccuggggcgggagcuacaucgcgcuggacuccggcugcgggaacugggacugcaucaugaccagcuaccaguaccugaucauccagaacacgaccugggagaaccacugccaguucucccgccccagccccaucggcuaccucgggcugcugagccagcggacccgcgacaucuacaucucccggcgccgccggggcaccuucacguggacccugagcgacuccgagggcaacgccacccccgggggcuacugccucacccgguggaugcugaucgaggccgagcugaagugcuucgggaacacggccgucgccaagugcaacgagaagcacgacgaggaguucugcgacaugcuccgccuguucgacuucaacaagcaggcgaucagccggcugaagucccccgcccagaugagcauccagcucaucaacaaggccgugaacgcccugaucaacgaccagcugaucaugaagaaccaccuccgcgacaucaugugcauccccuacugcaacuacuccaaguacugguaccugaaccacaccaucaccgggaagaccagccugcccaagugcuggcucguguccaacggcagcuaccugaacgagacgcacuucuccgacgacaucgagcagcaggccgacaacaugaucaccgagaugcugcagaaggaguacauggagcggcagggcaagaccccgcucgggcuggucgaccuguucguguucagcaccuccuucuaccugaucagcaucuuccuccgccuggugaagaucccgacgcaccggcacaucgucggcaagcccugccccaagccccaccgccugaaccacauggggaucugcuccugcggccucuacaagcagccgggggugcccgugcgguggaagcgcugaggacuagucccuguucccagagcccacuuuuuuuucuuuuuuugaaauaaaauagccugucuuucagaucuaaaaaaaaaaaaaaaaaaaaaaaaaaaaaaaaaaaaaaaaaaaaaaaaaaaaaaaaaaaaaaaaugcaucccccccccccccccccccccccccccccccaaaggcucuuuucagagccaccagaauu

SEQ ID NO: 6432 - RNA, 1768 nt, Artificial Sequence
  mRNA product Design a-2 comprising derived and/or modified sequence from LASV(Togo/2016/7082;Clade VI)__AMR44577__GPCstabilized (opt1)
gggagaguccgcucagccagguugcagaagcggcuuagcguguguccuaaucuucucucugcguguagguaggccugugccgcaaacaagcuuaccaugggccagaucaucaccuucuuccaggaggugccccacgucaucgaggaggugaugaacaucgugcugaucgcccucagccugcuggccauccucaagggggucuacaacguggcgaccugcggcaucaucgggcuggugacguuccuguuccucugcggccgcuccugcagccugaucuacaagggguccuacgagcugcagacccucgagcugaacauggagacccugaacaugaccaugccgcucagcugcacgaagaacuccagccaccacuacauccgggucggcaacgagaccggccuggagcugacccucaccaacacguccaucaucaaccacaaguucugcaaccugagcgacgcccacaagcgcaaccuguacgaccacgcccucauguccauccugagcaccuuccaccuguccauccccaacuucaaccaguacgaggccaugagcugcgacuucaacgggggcaagaucuccgugcaguacaaccucagccacgccuacgcgguggacgccgccgagcacugcgggaccgucgccaacggcgugcugcagaccuucaugcggauggcguggggcggguccuacaucgcccuggacagcggcugcgggaacugggacugcaucaugacguccuaccaguaccucaucauccagaacaccaccugggaggaccacugccaguucagccggcccucccccaucggcuaccuggggcugcucagccagcgcacccgggacaucuacaucagccgccggcgccggggcacguucaccuggacccucuccgacagcgagggcaacgagacccccgggggcuacugccugacgcgcuggaugcugaucgaggccgagcucaagugcuucgggaacaccgccguggccaagugcaacgagaagcacgacgaggaguucugcgacaugcugcggcuguucgacuucaacaagcaggcgauccagcgccucaagucccccgcccagaugagcauccagcugaucaacaaggccgucaacgcccugaucaacgaccagcucaucaugaagaaccaccuccgggacaugaugugcauccccuacugcaacuacuccaaguacugguaccugaaccacaccagcuccgggcgcaccagccugcccaagugcuggcugguguccaacggcagcuaccugaacgagacgcacuucuccgacgacaucgagcagcaggccgacaacaugaucaccgagaugcuccagaaggaguacaucgaccggcagggcaagaccccgcuggggcugguggaccucuucgucuucagcaccuccuucuaccugaucagcaucuuccugcaccugaucaagaucccgacgcaccgccacaucgugggcaagcccugccccaagccccaccggcucaaccacauggggaucugcuccugcggccuguacaagcagccgggggugcccacccgcuggaagcggugaggacuagucccuguucccagagcccacuuuuuuuucuuuuuuugaaauaaaauagccugucuuucagaucuaaaaaaaaaaaaaaaaaaaaaaaaaaaaaaaaaaaaaaaaaaaaaaaaaaaaaaaaaaaaaaaaugcaucccccccccccccccccccccccccccccccaaaggcucuuuucagagccaccagaauu

SEQ ID NO: 6433 - RNA, 1768 nt, Artificial Sequence
  mRNA product Design a-2 comprising derived and/or modified sequence from LASV(KAK-428;Clade n.d. (VII))__ANH09740__GPCstabilized (opt1)
gggagaguccgcucagccagguugcagaagcggcuuagcguguguccuaaucuucucucugcguguagguaggccugugccgcaaacaagcuuaccaugggccagaucgugaccuucuuccaggaggucccccacgugaucgaggaggugaugaacaucguccugaucgcccucagccugcuggccauccucaaggggcuguacaacuucgcgaccugcggcgugaucgggcugaucacguuccuccugcugugcggccgcuccugcagcgccaccuacaaggggcaguacgagcuccagacccuggagcugaacauggagucccucaacaugaccaugccgcugagcugcacgaagaacaacucccaccacuacauccgggccggcaacaacaccggccuggagcucacccugaccaacacgagcaucaucucccacaaguucugcaaccugagcgacgcccacaagaagaaccucuacgaccacacccugauguccaucaucaccaccuuccaccugagcauccccaacuucaaccaguacgaggccauguccugcgacuucaacgggggcaagaucagcauccaguacaaccucucccacagcuacgcgggggacgccgcccagcacugcggcacgguggccaacgggguccugcagaccuucaugcgcauggcguggggcggcuccuaccuggcccucgacagcgggugccgcggcugggacugcaucaucuccagcuaccaguaccugaucauccagaacaccaccugggacgaccacugccaguucucccggcccagccccaucggguaccugggcuucgugagccagaagacgcgcgacaucuacaucucccggcgccgccggggcaccuucaccuggacccugagcgacuccgaggggcacgacaugccgggcggguacugccucacgcgguggaugcugaucgaggccgaccugaagugcuucggcaacaccgccguggccaagugcaacgagaagcacgacgaggaguucugcgacauguggcgccucuucgacuucaacaagcaggcgauccagcggcugaaggcccccgcccagaugaacauccagcugaucaacaaggccgucaacgcccucaucaacgaccagcugaugaugaagaaccaccuccgcgacaucaugugcauccccuacugcaacuacagcaaguucugguaccugaacaacaccaccacgggccggaccucccugccccgcugcuggcugaucagcaacggcuccuaccucaacgagacccacuucagcgacgacaucgagcagcaggcggacaacaugaucaccgagaugcugcagaaggaguacauggaccggcaggggaagacgccccugggccucguggaccuguucguguucuccaccagcuucuaccugaucaccaucuuccuccaccuggucaagaucccgacccaccgccacaucguggggaagcccugccccaagccccaccggcugaaccacaugggcaucugcuccugcgggcuguacaagcagccgggcgugcccguccgcuggaagcggugaggacuagucccuguucccagagcccacuuuuuuuucuuuuuuugaaauaaaauagccugucuuucagaucuaaaaaaaaaaaaaaaaaaaaaaaaaaaaaaaaaaaaaaaaaaaaaaaaaaaaaaaaaaaaaaaaugcaucccccccccccccccccccccccccccccccaaaggcucuuuucagagccaccagaauu

SEQ ID NO: 6434 - RNA, 1768 nt, Artificial Sequence; identical to SEQ ID NO: 6428
  mRNA product Design a-2 comprising derived and/or modified sequence from LASV(Pinneo-NIG-1969;Clade I)__AIT17836__GPCstabilized (opt1)

SEQ ID NO: 6435 - RNA, 1768 nt, Artificial Sequence
  mRNA product Design a-2 comprising derived and/or modified sequence from LASV(ISTH0009-NIG-2011;Clade II)__AIT17404__GPCstabilized (opt1)
gggagaguccgcucagccagguugcagaagcggcuuagcguguguccuaaucuucucucugcguguagguaggccugugccgcaaacaagcuuaccaugggccagaucaucaccuucuuccaggaggugccccacgucaucgaggaggugaugaacaucgugcugaucgcccucagccugcuggccauccucaaggggaucuacaacgucgcgaccugcggccuguucgggcugguguccuuccuccugcugugcggccgcagcugcuccacgaccuacaaggggguguacgagcuccagacccuggagcuggacauggccagccucaacaugaccaugccgcuguccugcacgaagaacaacagccaccacuacaucauggucggcaacgagaccggccuggagcucacccugaccaacacguccaucaucaaccacaaguucugcaaccugagcgacgcccacaagaagaaccucuacgaccacgcccugauguccaucaucagcaccuuccaccuguccauccccaacuucaaccaguacgaggccaugagcugcgacuucaacgggggcaagaucuccgugcaguacaaccucagccacgcguacgccguggacgccgccaaccacugcgggaccaucgcgaacggcguccugcagaccuucaugcggauggccuggggcggguccuacaucgcccuggacagcggcugcggguccugggacugcaucaugacgagcuaccaguaccucaucauccagaacaccaccugggaggaccacugccaguucucccgccccagccccaucggcuaccuggggcugcucagccagcggacccgcgacaucuacaucucccggcgccgccggggcacguucaccuggacccucagcgacuccgagggcaacgagacccccgggggcuacugccugacgcgguggaugcugaucgaggccgagcucaagugcuucgggaacaccgccguggcgaagugcaacgagaagcacgacgaggaguucugcgacaugcugcgccuguucgacuucaacaagcaggccauccggcgccucaagacccccgcccagaugagcauccagcugaucaacaaggccgugaacgcccugaucaacgaccagcucaucaugaagaaccaccuccgggacaucaugugcaucccguacugcaacuacuccaaguacugguaccugaaccacaccgucacggggaagaccagccugccccgcugcuggcugguguccaacggcagcuaccugaacgagacccacuucuccgacgacaucgagcagcaggcggacaacaugaucaccgagcuccugcagaaggaguacauggaccggcagggcaagacgccccuggggcucguggaccuguucgucuucagcaccuccuucuaccugaucagcaucuuccugcaccucaucaagaucccgacccaccgccacaucaccggcaagcccugccccaagccccaccggcugaaccacauggggaucugcuccugcggccuguacaagcacccgggggugcccgugaaguggaagcgcugaggacuagucccuguucccagagcccacuuuuuuuucuuuuuuugaaauaaaauagccugucuuucagaucuaaaaaaaaaaaaaaaaaaaaaaaaaaaaaaaaaaaaaaaaaaaaaaaaaaaaaaaaaaaaaaaaugcaucccccccccccccccccccccccccccccccaaaggcucuuuucagagccaccagaauu

SEQ ID NO: 6436 - RNA, 1768 nt, Artificial Sequence
  mRNA product Design a-2 comprising derived and/or modified sequence from LASV(ISTH2010-NIG-2012;Clade II)__AIT17482__GPCstabilized (opt1)
gggagaguccgcucagccagguugcagaagcggcuuagcguguguccuaaucuucucucugcguguagguaggccugugccgcaaacaagcuuaccaugggccagaucaucaccuucuuccaggaggugccccacgucaucgaggaggugaugaacaucgugcugaucgcccucagccugcuggccauccucaaggggaucuacaacgucgcgaccugcggccuguucgggcugguguccuuccuccugcugugcggccgcagcugcuccacgaccuacaaggggguguacgagcuccagacccuggagcuggacauggccagccucaacaugaccaugccgcuguccugcacgaagaacaacagccaccacuacaucauggucggcaacgagaccggccuggagcucacccugaccaacacguccaucaucaaccacaaguucugcaaccugagcgacgcccacaagaagaaccucuacgaccacgcccugauguccaucaucagcaccuuccaccuguccauccccaacuucaaccaguacgaggccaugagcugcgacuucaacgggggcaagaucuccgugcaguacaaccucagccacgcguacgccguggacgccgccaaccacugcgggaccaucgcgaacggcguccugcagaccuucaugcggauggccuggggcggguccuacaucgcccuggacagcggcugcggguccugggacugcaucaugacgagcuaccaguaccucaucauccagaacaucaccugggaggaccacugccaguucucccgccccagccccaucggcuaccuggggcugcucagccagcggacccgcgacaucuacaucucccggcgccgccggggcaccuucacguggacccucagcgacuccgagggcaacgagacccccgggggcuacugccugacccgguggaugcugaucgaggccgagcucaagugcuucgggaacacggccguggcgaagugcaacgagaagcacgacgaggaguucugcgacaugcugcgccuguucgacuucaacaagcaggccauccggcgccucaagacccccgcccagaugagcauccagcugaucaacaaggccgugaacgcccugaucaacgaccagcucaucaugaagaaccaccuccgggacaucaugugcauccccuacugcaacuacuccaaguacugguaccugaaccacaccgucaccgggaagacgagccugccccgcugcuggcugguguccaacggcagcuaccugaacgagacccacuucuccgacgacaucgagcagcaggcggacaacaugaucaccgagcuccugcagaaggaguacaucgaccggcagggcaagaccccgcuggggcucguggaccuguucgucuucagcacguccuucuaccugaucagcaucuuccugcaccucgugaagaucccgacccaccgccacguggucggcaagcccugccccaagccccaccggcugaaccacauggggaucugcuccugcggccuguacaagcacccgggggugcccgugaaguggaagcgcugaggacuagucccuguucccagagcccacuuuuuuuucuuuuuuugaaauaaaauagccugucuuucagaucuaaaaaaaaaaaaaaaaaaaaaaaaaaaaaaaaaaaaaaaaaaaaaaaaaaaaaaaaaaaaaaaaugcaucccccccccccccccccccccccccccccccaaaggcucuuuucagagccaccagaauu

SEQ ID NO: 6437 - RNA, 1768 nt, Artificial Sequence
  mRNA product Design a-2 comprising derived and/or modified sequence from LASV(Lassa virus/H.sapiens-wt/NGA/2015/ISTH_0543;Clade II)__AVO03639__GPCstabilized (opt1)
gggagaguccgcucagccagguugcagaagcggcuuagcguguguccuaaucuucucucugcguguagguaggccugugccgcaaacaagcuuaccaugggccagaucaucaccuucuuccaggaggugccccacgucaucgaggaggugaugaacaucgugcugaucgcccucagccugcuggccauccucaaggggaucuacaacgucgcgaccugcggccuguucgggcugguguccuuccuccugcugugcggccgcagcugcuccacgaccuacaaggggguguacgagcuccagacccuggagcuggacauggccaaccucaacaugaccaugccgcugagcugcacgaagaacaacucccaccacuacaucauggucggcaacgagaccggccuggagcucacccugaccaacacgagcaucaucaaccacaaguucugcaaccuguccgacgcccacaagaagaaccucuacgaccacgcccugaugagcaucaucuccaccuuccaccugagcauccccaacuucaaccaguacgaggccauguccugcgacuucaacgggggcaagaucagcgugcaguacaaccucucccacaccuacgcgguggacgccgccaaccacugcgggaccaucgccaacggcguccugcagacguucaugcggauggcguggggcgggagcuacaucgcccuggacuccggcugcgggagcugggacugcaucaugaccuccuaccaguaccucgugauccagaacaccaccugggaggaccacugccaguucagccgccccucccccaucggcuaccuggggcugcucagccagcggacgcgcgacaucuacaucagccggcgccgccggggcaccuucaccuggacccucuccgacagcgagggcaacgagacgcccgggggcuacugccugacccgguggaugcugaucgaggccgagcucaagugcuucgggaacaccgccguggccaagugcaacgagaagcacgacgaggaguucugcgacaugcugcgccuguucgacuucaacaagcaggcgauccggcgccucaagacccccgcccagauguccauccagcugaucaacaaggccgucaacgcccugaucaacgaccagcucaucaugaagaaccaccuccgggacaucaugugcauccccuacugcaacuacagcaaguacugguaccugaaccacacggugaccgggaagaccucccugccccgcugcuggcuggugagcaacggcuccuaccugaacgagacccacuucagcgacgacaucgagcagcaggccgacaacaugaucacggagcuccugcagaaggaguacaucgaccggcagggcaagaccccgcuggggcucgucgaccuguucguguucuccaccagcuucuaccugaucuccaucuuccugcaccucgugaagaucccgacccaccgccacaucacgggcaagcccugccccaagccccaccggcugaaccacauggggaucugcagcugcggccuguacaagcacccggggguccccgugaaguggaagcgcugaggacuagucccuguucccagagcccacuuuuuuuucuuuuuuugaaauaaaauagccugucuuucagaucuaaaaaaaaaaaaaaaaaaaaaaaaaaaaaaaaaaaaaaaaaaaaaaaaaaaaaaaaaaaaaaaaugcaucccccccccccccccccccccccccccccccaaaggcucuuuucagagccaccagaauu

SEQ ID NO: 6438 - RNA, 1768 nt, Artificial Sequence
  mRNA product Design a-2 comprising derived and/or modified sequence from LASV(Lassa virus/H.sapiens-wt/NGA/2016/ISTH_0009;Clade II)__AVO03571__GPCstabilized (opt1)
gggagaguccgcucagccagguugcagaagcggcuuagcguguguccuaaucuucucucugcguguagguaggccugugccgcaaacaagcuuaccaugggccagaucaucaccuucuuccaggaggugccccacgucaucgaggaggugaugaacaucgugcugaucgcccucagccugcuggccauccucaaggggaucuacaacgucgcgaccugcggccugcuggggcucguguccuuccugcugcucugcggccgcagcugcuccacgaccuacaaggggguguacgagcugcagacccuggagcucgacauggccagccugaacaugaccaugccgcuguccugcacgaagaacaacagccaccacuacaucauggucggcaacgagaccggccucgagcugacccugaccaacacguccaucaucaaccacaaguucugcaaccucagcgacgcccacaagaagaaccuguacgaccacgcccugauguccaucaucagcaccuuccaccucuccauccccaacuucaaccaguacgaggccaugagcugcgacuucaacgggggccggaucuccgugcaguacaaccugagccacuccuacgcgguggacgccgccaaccacugcgggaccaucgccaacggcguccugcagaccuucaugcgcauggcguggggcgggagcuacaucgcccucgacuccggcugcgggagcugggacugcaucaugacguccuaccaguaccugaucauccagaacaccaccugggaggaccacugccaguucagccggcccagccccaucggcuaccuggggcuccugucccagcgcacccgggacaucuacaucagccgccggcgccggggcacguucaccuggacccuguccgacagcgagggcaacgagacccccgggggcuacugccugacgcgcuggaugcucaucgaggccgagcugaagugcuucgggaacaccgccguggccaagugcaacgagaagcacgacgaggaguucugcgacaugcugcggcuguucgacuucaacaagcaggcgauccgccggcugaagacccccgcccagauguccauccagcugaucaacaaggccgugaacgcccucaucaacgaccagcugaucaugaagaaccaccuccgcgacaucaugugcaucccguacugcaacuacagcaaguacugguaccucaaccacaccgucacggggaagaccucccugccccggugcuggcuggugagcaacggcuccuaccucaacgagacccacuucagcgacgacaucgagcagcaggccgacaacaugaucaccgagcugcugcagaaggaguacaucgaccgccagggcaagacgccccucgggcugguggaccuguucgucuucuccaccagcuucuaccugaucuccaucuuccuccaccuggugaagaucccgacccaccggcacaucaccggcaagcccugccccaagccccaccgccugaaccacauggggaucugcagcugcggccucuacaaccacccgggggugcccgucaaguggaagcggugaggacuagucccuguucccagagcccacuuuuuuuucuuuuuuugaaauaaaauagccugucuuucagaucuaaaaaaaaaaaaaaaaaaaaaaaaaaaaaaaaaaaaaaaaaaaaaaaaaaaaaaaaaaaaaaaaugcaucccccccccccccccccccccccccccccccaaaggcucuuuucagagccaccagaauu

SEQ ID NO: 6439 - RNA, 1768 nt, Artificial Sequence
  mRNA product Design a-2 comprising derived and/or modified sequence from LASV(Lassa virus/H.sapiens-wt/NGA/2016/ISTH_0017;Clade II)__AVO03567__GPCstabilized (opt1)
gggagaguccgcucagccagguugcagaagcggcuuagcguguguccuaaucuucucucugcguguagguaggccugugccgcaaacaagcuuaccaugggccagaucaucaccuucuuccaggaggugccccacgucaucgaggaggugaugaacaucgugcugaucgcccucagccugcuggccauccucaaggggaucuacaacgucgcgaccugcggccuguucgggcugguguccuuccuccugcugugcggccgcagcugcuccacgaccuacaaggggguguacgagcuccagacccuggagcuggacauggccagccucaacaugaccaugccgcuguccugcacgaagaacaacagccaccacuacaucauggucggcaacgagaccggccuggagcucacccugaccaacacguccaucaucaaccacaaguucugcaaccugagcgacgcccacaagaagaaccucuacgaccacgcccugauguccaucaucagcaccuuccaccuguccauccccaacuucaaccaguacgaggccaugagcugcgacuucaacgggggcaagaucuccgugcaguacaaccucagccacaccuacgcgaucgacgccgccaaccacugcgggaccaucgccaacggcgugcugcagacguucaugcggauggcguggggcggguccuacaucgcccuggacagcggcugcggguccugggacugcaucaugaccagcuaccaguaccucaucauccagaacaccaccugggaggaccacugccaguucucccgccccagccccaucggcuaccuggggcugcucagccagcggacgcgcgacaucuacaucucccggcgccgccggggcaccuucaccuggacccucagcgacuccgagggcaacgagacgcccgggggcuacugccugacccgguggaugcugaucgaggccgagcucaagugcuucgggaacaccgccgucgccaagugcaacgagaagcacgacgaggaguucugcgacaugcugcgccuguucgacuucaacaagcaggcgauccggcgccucaagacccccgcccagaugagcauccagcugaucaacaaggccgugaacgcccugaucaacgaccagcucaucaugaagaaccaccuccgggacaucaugugcauccccuacugcaacuacuccaaguacugguaccugaaccacacggugaccgggaagaccagccugccccgcugcuggcuggucuccaacggcagcuaccugaacgagacccacuucuccgacgacaucgagcagcaggccgacaacaugaucacggagcuccugcagaaggaguacauggaccggcagggcaagaccccgcuggggcucguggaccuguucguguucagcaccuccuucuaccugaucagcaucuuccugcaccucguccgcaucccgacccaccggcacgugaucggcaagcccugccccaagccccaccgccugaaccacauggggaucugcuccugcggccuguacaagcacccgggggugcccgucaaguggaagcggugaggacuagucccuguucccagagcccacuuuuuuuucuuuuuuugaaauaaaauagccugucuuucagaucuaaaaaaaaaaaaaaaaaaaaaaaaaaaaaaaaaaaaaaaaaaaaaaaaaaaaaaaaaaaaaaaaugcaucccccccccccccccccccccccccccccccaaaggcucuuuucagagccaccagaauu

SEQ ID NO: 6440 - RNA, 1768 nt, Artificial Sequence
  mRNA product Design a-2 comprising derived and/or modified sequence from LASV(Lassa virus/H.sapiens-wt/NGA/2018/ISTH_0959;Clade II)__AVV65099__GPCstabilized (opt1)
gggagaguccgcucagccagguugcagaagcggcuuagcguguguccuaaucuucucucugcguguagguaggccugugccgcaaacaagcuuaccaugggccagaucaucaccuucuuccaggaggugccccacgucaucgaggaggugaugaacaucgugcugaucgcccucagccugcuggccauccucaaggggaucuacaacgucgugaccugcggccuguucgggcugguguccuuccuccugcugugcggccgcagcugcuccacgaccuacaagggggucuacgagcuccagacccuggagcuggacauggcgagccucaacaugaccaugccgcuguccugcacgaagaacaacagccaccacuacaucauggugggcaacgagaccggccuggagcucacccugaccaacacguccaucaucaaccacaaguucugcaaccugagcgacgcccacaagaagaaccucuacgaccacgcccugauguccaucaucagcaccuuccaccuguccauccccaacuucaaccaguacgaggccaugagcugcgacuucaacgggggcaagaucuccgugcaguacaaccucagccacgccuacgcgaucgacgccgccaaccacugcgggaccaucgccaacggcguccugcagaccuucaugcggauggcguggggcggguccuacaucgcccuggacagcggcugcggguccugggacugcaucaugacgagcuaccaguaccucaucauccagaacaccaccugggaggaccacugccaguucucccgccccagccccaucggcuaccuggggcugcucagccagcggacccgcgacaucuacaucucccggcgccgccggggcacguucaccuggacccucagcgacuccgagggcaacgagacccccgggggcuacugccugacgcgguggaugcugaucgaggccgagcucaagugcuucgggaacaccgccguggccaagugcaacgagaagcacgacgaggaguucugcgacaugcugcgccuguucgacuucaacaagcaggcgauccggcgccucaagacccccgcccagaugagcauccagcugaucaacaaggccgugaacgcccugaucaacgaccagcucaucaugaagaaccaccuccgggacaucaugugcaucccguacugcaacuacuccaaguacugguaccugaaccacaccgucacggggaagaccagccugccccgcugcuggcugguguccaacggcagcuaccugaacgagacccacuucuccgacgacaucgagcagcaggccgacaacaugaucaccgagcuccugcagaaggaguacaucgaccggcagggcaagacgccccuggggcucguggaccuguucgucuucagcaccuccuucuaccugaucagcaucuuccugcaccucgugaagaucccgacccaccgccacgugaucggcaagcccugccccaagccccaccggcugaaccacauggggaucugcuccugcggccuguacaagcacccggggguccccgugaaguggaagcgcugaggacuagucccuguucccagagcccacuuuuuuuucuuuuuuugaaauaaaauagccugucuuucagaucuaaaaaaaaaaaaaaaaaaaaaaaaaaaaaaaaaaaaaaaaaaaaaaaaaaaaaaaaaaaaaaaaugcaucccccccccccccccccccccccccccccccaaaggcucuuuucagagccaccagaauu

SEQ ID NO: 6441 - RNA, 1768 nt, Artificial Sequence
  mRNA product Design a-2 comprising derived and/or modified sequence from LASV(LASV003-NIG-2008;Clade II)__AIT17580__GPCstabilized (opt1)
gggagaguccgcucagccagguugcagaagcggcuuagcguguguccuaaucuucucucugcguguagguaggccugugccgcaaacaagcuuaccaugggccagaucaucaccuucuuccaggaggugccccacgucaucgaggaggugaugaacaucgugcugaucgcccucagccugcuggccauccucaaggggaucuacaacgucgcgaccugcggccuguucgggcugguguccuuccuccugcugugcggccgcagcugcuccacgaccuacaaggggguguacgagcuccagacccuggagcuggacauggccagccucaacaugaccaugccgcuguccugcacgaagaacaacagccaccacuacaucauggucggcaacgagaccggccuggagcucacccugaccaacacguccaucaucaaccacaaguucugcaaccugagcgacgcccacaagaagaaccucuacgaccacgcccugauguccaucaucagcaccuuccaccuguccauccccaacuucaaccaguacgaggccaugagcugcgacuucaacgggggcaagaucuccgugcaguacaaccucagccacaccuacgcgguggacgccgccaaccacugcgggaccaucgccaacggcguccugcagacguucaugcggauggcguggggcggguccuacaucgcccuggacagcggcugcggguccugggacugcaucaugaccagcuaccaguaccucaucauccagaacaccaccugggaggaccacugccaguucucccgccccagccccaucggcuaccuggggcugcucagccagcggacgcgcgacaucuacaucucccggcgccgccggggcaccuucaccuggacccucagcgacuccgagagcaacgagacgccgggcggguacugccugacccgguggaugcugaucgaggccgagcucaagugcuucggcaacaccgccguggccaagugcaacgagaagcacgacgaggaguucugcgacaugcugcgccuguucgacuucaacaagcaggcgauccggcgccucaaggcccccgcccagauguccauccagcugaucaacaaggccgugaacgcccugaucaacgaccagcucaucaugaagaaccaccuccgggacaucaugugcauccccuacugcaacuacagcaaguacugguaccugaaccacaccgucacgggccgcaccucccugccccggugcuggcuggugagcaacggguccuaccugaacgagacccacuucagcgacgacaucgagcagcaggcggacaacaugaucaccgagcuccugcagaaggaguacauggaccgccagggcaagacgccccugggccucguggaccuguucgucuucuccaccagcuucuaccugaucuccaucuuccugcaccucgugaagaucccgacccaccggcacgugaucgggaagcccugccccaagccccaccgccugaaccacaugggcaucugcagcugcgggcuguacaagcacccgggcguccccgugaaguggaagcggugaggacuagucccuguucccagagcccacuuuuuuuucuuuuuuugaaauaaaauagccugucuuucagaucuaaaaaaaaaaaaaaaaaaaaaaaaaaaaaaaaaaaaaaaaaaaaaaaaaaaaaaaaaaaaaaaaugcaucccccccccccccccccccccccccccccccaaaggcucuuuucagagccaccagaauu

SEQ ID NO: 6442 - RNA, 1768 nt, Artificial Sequence
  mRNA product Design a-2 comprising derived and/or modified sequence from LASV(LASV035-NIG-2009;Clade II)__AIT17588__GPCstabilized (opt1)
gggagaguccgcucagccagguugcagaagcggcuuagcguguguccuaaucuucucucugcguguagguaggccugugccgcaaacaagcuuaccaugggccagaucaucaccuucuuccaggaggugccccacgucaucgaggaggugaugaacaucgugcugaucgcccucagccugcuggccauccucaaggggaucuacaacgucgcgaccugcggccuguucgggcugguguccuuccuccugcugugcggccgcagcugcuccacgaccuacaaggggguguacgagcuccagacccuggagcuggacauggccagccucaacaugaccaugccgcuguccugcacgaagaacaacagccaccacuacaucauggucggcaacgagaccggccuggagcucacccugaccaacacguccaucaucaaccacaaguucugcaaccugagcgacgcccacaagaagaaccucuacgaccacgcccugauguccaucaucagcaccuuccaccuguccauccccaacuucaaccaguacgaggccaugagcugcgacuucaacgggggcaagaucuccgugcaguacaaccucagccacgcguacgccguggacgccgccaaccacugcgggaccaucgcgaacggcguccugcagaccuucaugcggauggccuggggcggguccuacaucgcccuggacagcggcugcggguccugggacugcaucaugacgagcuaccaguaccucaucauccagaacaccaccugggaggaccacugccaguucucccgccccagccccaucggcuaccuggggcugcucagccagcggacccgcgacaucuacaucucccggcgccgccggggcacguucaccuggacccucagcgacuccgagggcaacgagacccccgggggcuacugccugacgcgguggaugcugaucgaggccgagcucaagugcuucgggaacaccgccguggcgaagugcaacgagaagcacgacgaggaguucugcgacaugcugcgccuguucgacuucaacaagcaggccauccggcgccucaaggcccccgcccagaugagcauccagcugaucaacaaggccgugaacgcgcugaucaacgaccagcucaucaugaagaaccaccuccgggacaucaugugcauccccuacugcaacuacuccaaguacugguaccugaaccacaccgucaccgggaagacgagccugccccgcugcuggcugguguccaacggcagcuaccugaacgagacccacuucuccgacgacaucgagcagcaggccgacaacaugaucaccgagcuccugcagaaggaguacaucgaccggcagggcaagaccccgcuggggcucguggaccuguucgucuucagcacguccuucuaccugaucagcaucuuccugcaccucgugaagaucccgacccaccgccacgugaucggcaagcccugccccaagccccaccggcugaaccacauggggaucugcuccugcggccuguacaagcacccggggguccccgugaaguggaagcgcugaggacuagucccuguucccagagcccacuuuuuuuucuuuuuuugaaauaaaauagccugucuuucagaucuaaaaaaaaaaaaaaaaaaaaaaaaaaaaaaaaaaaaaaaaaaaaaaaaaaaaaaaaaaaaaaaaugcaucccccccccccccccccccccccccccccccaaaggcucuuuucagagccaccagaauu

SEQ ID NO: 6443 - RNA, 1768 nt, Artificial Sequence
  mRNA product Design a-2 comprising derived and/or modified sequence from LASV(LASV1000-NIG-2009;Clade II)__AIT17782__GPCstabilized (opt1)
gggagaguccgcucagccagguugcagaagcggcuuagcguguguccuaaucuucucucugcguguagguaggccugugccgcaaacaagcuuaccaugggccagaucaucaccuucuuccaggaggugccccacgucaucgaggaggugaugaacaucgugcugaucgcccucagccugcuggccauccucaaggggaucuacaacgucgcgaccugcggccuguucgggcugguguccuuccuccugcugugcggccgcagcugcuccacgaccuacaaggggguguacgagcuccagacccuggagcuggacauggccagccucaacaugaccaugccgcuguccugcacgaagaacaacagccaccacuacaucauggucggcaacgagaccggccuggagcucacccugaccaacacguccaucaucaaccacaaguucugcaaccugagcgacgcccacaagaagaaccucuacgaccacgcccugauguccaucaucagcaccuuccaccuguccauccccaacuucaaccaguacgaggccaugagcugcgacuucaacgggggcaagaucuccgugcaguacaaccucagccacaccuacgcgguggacgccgccaaccacugcgggaccaucgccaacggcguccugcagacguucaugcggauggcguggggcggguccuacaucgcccuggacagcggcugcggguccugggacugcaucaugaccagcuaccaguaccucaucauccagaacaccaccugggaggaccacugccaguucucccgccccagccccaucggcuaccuggggcugcucagccagcggacgcgcgacaucuacaucucccggcgccgccggggcaccuucaccuggacccucagcgacuccgagggcaacgagacgcccgggggcuacugccugacccgguggaugcugaucgaggccgagcucaagugcuucgggaacaccgccguggccaagugcaacgagaagcacgacgaggaguucugcgacaugcugcgccuguucgacuucaacaagcaggcgaucaagcggcucaagacccccgcccagaugagcauccagcugaucaacaaggccgugaacgcccugaucaacgaccagcucaucaugaagaaccaccuccgcgacaucaugugcauccccuacugcaacuacuccaaguacugguaccugaaccacacggucaccgggaagaccagccugccccggugcuggcugguguccaacggcagcuaccugaacgagacccacuucuccgacgacaucgagcagcaggccgacaacaugaucacggagcuccugcagaaggaguacaucgaccgccagggcaagaccccgcuggggcucguggaccuguucgucuucagcaccuccuucuaccugaucagcaucuuccugcaccucgugaagaucccgacccaccggcacguggucggcaagcccugccccaagccccaccgccugaaccacauggggaucugcuccugcggccuguacaagcacccgggggugcccgugaaguggaagcggugaggacuagucccuguucccagagcccacuuuuuuuucuuuuuuugaaauaaaauagccugucuuucagaucuaaaaaaaaaaaaaaaaaaaaaaaaaaaaaaaaaaaaaaaaaaaaaaaaaaaaaaaaaaaaaaaaugcaucccccccccccccccccccccccccccccccaaaggcucuuuucagagccaccagaauu

SEQ ID NO: 6444 - RNA, 1768 nt, Artificial Sequence
  mRNA product Design a-2 comprising derived and/or modified sequence from LASV(LASV221-NIG-2010;Clade II)__AIT17624__GPCstabilized (opt1)
gggagaguccgcucagccagguugcagaagcggcuuagcguguguccuaaucuucucucugcguguagguaggccugugccgcaaacaagcuuaccaugggccagaucaucaccuucuuccaggaggugccccacgucaucgaggaggugaugaacaucgugcugaucgcccucagccugcuggccauccucaaggggaucuacaacgucgcgaccugcggccuguucgggcugguguccuuccuccugcugugcggccgcagcugcuccacgaccuacaaggggguguacgagcuccagacccuggagcuggacauggccagccucaacaugaccaugccgcuguccugcacgaagaacaacagccaccacuacaucauggucggcaacgagaccggccuggagcucacccugaccaacacguccaucaucaaccacaaguucugcaaccugagcgacgcccacaagaagaaccucuacgaccacgcccugauguccaucaucagcaccuuccaccuguccauccccaacuucaaccaguacgaggccaugagcugcgacuucaacgggggcaagaucuccgugcaguacaaccucagccacaccuacgcgaucgacgccgccaaccacugcgggaccaucgccaacggcgugcugcagacguucaugcggauggcguggggcggguccuacaucgcccuggacagcggcugcggguccugggacugcaucaugaccagcuaccaguaccucaucauccagaacaccaccugggaggaccacugccaguucucccgccccagccccaucggcuaccuggggcugcucagccagcggacgcgcgacaucuacaucucccggcgccgccggggcaccuucaccuggacccucagcgacuccgagggcaacgagacgcccgggggcuacugccugacccgguggaugcugaucgaggccgagcucaagugcuucgggaacaccgccgucgccaagugcaacgagaagcacgacgaggaguucugcgacaugcugcgccuguucgacuucaacaagcaggcgauccggcgccucaagacccccgcccagaugagcauccagcugaucaacaaggccgugaacgcccugaucaacgaccagcucaucaugaagaaccaccuccgggacaucaugugcauccccuacugcaacuacuccaaguacugguaccugaaccacacggugaccgggaagaccagccugccccgcugcuggcuggucuccaacggcagcuaccugaacgagacccacuucuccgacgacaucgagcagcaggccgacaacaugaucacggagaugcuccagaaggaguacauggaccggcagggcaagaccccgcuggggcugguggaccucuucguguucagcaccuccuucuaccugaucagcaucuuccugcaccuggucaagaucccgacccaccgccacgugaucggcaagcccugccccaagccccaccggcucaaccacauggggaucugcuccugcggccuguacaagcacccgggggugcccgucaaguggaagcgcugaggacuagucccuguucccagagcccacuuuuuuuucuuuuuuugaaauaaaauagccugucuuucagaucuaaaaaaaaaaaaaaaaaaaaaaaaaaaaaaaaaaaaaaaaaaaaaaaaaaaaaaaaaaaaaaaaugcaucccccccccccccccccccccccccccccccaaaggcucuuuucagagccaccagaauu

SEQ ID NO: 6445 - RNA, 1768 nt, Artificial Sequence
  mRNA product Design a-2 comprising derived and/or modified sequence from LASV(LASV237-NIG-2010;Clade II)__AIT17638__GPCstabilized (opt1)
gggagaguccgcucagccagguugcagaagcggcuuagcguguguccuaaucuucucucugcguguagguaggccugugccgcaaacaagcuuaccaugggccagaucaucaccuucuuccaggaggugccccacgucaucgaggaggugaugaacaucgugcugaucgcccucagccugcuggccauccucaaggggaucuacaacgucgcgaccugcggccuguucgggcugguguccuuccuccugcugugcggccgcagcugcuccacgaccuacaaggggguguacgagcuccagacccuggagcuggacauggccagccucaacaugaccaugccgcuguccugcacgaagaacaacagccaccacuacaucauggucggcaacgagaccggccuggagcucacccugaccaacacguccaucaucaaccacaaguucugcaaccugagcgacgcccacaagaaggaccucuacgaccacgcccugauguccaucaucagcaccuuccaccuguccauccccaacuucaaccaguacgaggccaugagcugcgacuucaacgggggcaagaucuccgugcaguacaaccucagccacaccuacgcgguggacgccgccaaccacugcgggaccaucgccaacggcguccugcagacguucaugcggauggcguggggcggguccuacaucgcccuggacagcggcugcggguccugggacugcaucaugaccagcuaccaguaccucaucauccagaacaccaccugggaggaccacugccaguucucccgccccagccccaucggcuaccuggggcugcucagccagcggacgcgcgacaucuacaucucccggcgccgccggggcaccuucaccuggacccucagcgacuccgagggcaacgagacgcccgggggcuacugccugacccgguggaugcugaucgaggccgagcucaagugcuucgggaacaccgccguggccaagugcaacgagaagcacgacgaggaguucugcgacaugcugcgccuguucgacuucaacaagcaggcgauccggcgccucaagacccccgcccagaugagcauccagcugaucaacaaggccgugaacgcccugaucaacgaccagcucaucaugaagaaccaccuccgggacaucaugugcauccccuacugcaacuacuccaaguacugguaccugaaccacacggucaccgggaagaccagccugccccgcugcuggcugguguccaacggcagcuaccugaacgagacccacuucuccgacgacaucgagcagcaggccgacaacaugaucacggagcuccugcagaaggaguacauggaccggcagggcaagaccccgcuggggcucguggaccuguucgucuucagcaccuccuucuaccugaucagcaucuuccugcaccucaucaagaucccgacccaccgccacaucacgggcaagcccugccccaagccccaccggcugaaccacauggggaucugcuccugcggccuguacaagcacccgggggugcccgugaaguggaagcgcugaggacuagucccuguucccagagcccacuuuuuuuucuuuuuuugaaauaaaauagccugucuuucagaucuaaaaaaaaaaaaaaaaaaaaaaaaaaaaaaaaaaaaaaaaaaaaaaaaaaaaaaaaaaaaaaaaugcaucccccccccccccccccccccccccccccccaaaggcucuuuucagagccaccagaauu

SEQ ID NO: 6446 - RNA, 1768 nt, Artificial Sequence
  mRNA product Design a-2 comprising derived and/or modified sequence from LASV(LASV253-NIG-2011;Clade II)__AIT17670__GPCstabilized (opt1)
gggagaguccgcucagccagguugcagaagcggcuuagcguguguccuaaucuucucucugcguguagguaggccugugccgcaaacaagcuuaccaugggccagaucaucaccuucuuccaggaggugccccacgucaucgaggaggugaugaacaucgugcugaucgcccucagccugcuggccauccucaaggggaucuacaacgucgcgaccugcggccuguucgggcugguguccuuccuccugcugugcggccgcagcugcuccacgaccuacaaggggguguacgagcuccagacccuggagcuggacauggccagccucaacaugaccaugccgcuguccugcacgaagaacaacagccaccacuacaucauggucggcaacgagaccggccuggagcucacccugaccaacacguccaucaucaaccacaaguucugcaaccugagcgacgcccacaagaagaaccucuacgaccacgcccugauguccaucaucagcaccuuccaccuguccauccccaacuucaaccaguacgaggccaugagcugcgacuucaacgggggcaagaucuccgugcaguacaaccucagccacaccuacgcgguggacgccgccaaccacugcgggaccaucgccaacggcguccugcagacguucaugcggauggcguggggcggguccuacaucgcccuggacagcggcugcggguccugggacugcaucaugaccagcuaccaguaccucaucauccagaacaccaccugggaggaccacugccaguucucccgccccagccccaucggcuaccuggggcugcucagccagcggacgcgcgacaucuacaucucccggcgccgccggggcaccuucaccuggacccucagcgacuccgagggcaacgagacgcccgggggcuacugccugacccgguggaugcugaucgaggccgagcucaagugcuucgggaacaccgccguggccaagugcaacgagaagcacgacgaggaguucugcgacaugcugcgccuguucgacuucaacaagcaggcgauccggcgccucaaggcccccgcccagaugagcauccagcugaucaacaaggccgugaacgcccugaucaacgaccagcucaucaugaagaaccaccuccgggacaucaugugcaucccguacugcaacuacuccaaguacugguaccugaaccacaccgucacggggcgcaccagccugccccggugcuggcugguguccaacggcagcuaccugaacgagacccacuucuccgacgacaucgagcagcaggcggacaacaugaucaccgagcuccugcagaaggaguacaucgaccgccagggcaagacgccccuggggcucguggaccuguucgucuucagcaccuccuucuaccugaucagcaucuuccugcaccucgugaagaucccgacccaccggcacaucaucggcaagcccugccccaagccccaccgccugaaccacauggggaucugcuccugcggccuguacaagcacccgggggugcccgucaaguggaagcggugaggacuagucccuguucccagagcccacuuuuuuuucuuuuuuugaaauaaaauagccugucuuucagaucuaaaaaaaaaaaaaaaaaaaaaaaaaaaaaaaaaaaaaaaaaaaaaaaaaaaaaaaaaaaaaaaaugcaucccccccccccccccccccccccccccccccaaaggcucuuuucagagccaccagaauu

SEQ ID NO: 6447 - RNA, 1768 nt, Artificial Sequence
  mRNA product Design a-2 comprising derived and/or modified sequence from LASV(LASV254-NIG-2011;Clade II)__AIT17674__GPCstabilized (opt1)
gggagaguccgcucagccagguugcagaagcggcuuagcguguguccuaaucuucucucugcguguagguaggccugugccgcaaacaagcuuaccaugggccagaucaucaccuucuuccaggaggugccccacgucaucgaggaggugaugaacaucgugcugaucgcccucagccugcuggccauccucaaggggaucuacaacgucgcgaccugcggccuguucgggcugguguccuuccuccugcugugcggccgcagcugcuccacgaccuacaaggggguguacgagcuccagacccuggagcuggacaugaccaaccucaacaugacgaugccgcugagcugcaccaagaacaacucccaccacuacaucauggucggcaacgagaccggccuggagcucacccugacgaacaccagcaucaucaaccacaaguucugcaaccuguccgacgcccacaagaagaaccucuacaaccacgcccugaugagcaucaucuccaccuuccaccugagcauccccaacuucaaccaguacgaggccauguccugcgacuucaacgggggcaagaucagcgugcaguacaaccucucccacagcuacgccguggacgcggccaaccacugcgggaccaucgccaacggcguccugcagacguucaugcggauggccuggggcggguccuacaucgcgcuggacagcggcugcgggaacugggacugcaucaugaccuccuaccaguaccucaucauccagaacaccaccugggaggaccacugccaguucagccgccccucccccaucggcuaccuggggcugcucagccagcggacgcgcgacaucuacaucagccggcgccgccggggcaccuucaccuggacccucuccgacagcgagggcaacgagacgcccgggggcuacugccugacccgguggaugcugaucgaggccgagcucaagugcuucgggaacaccgccguggccaagugcaacgagaagcacgacgaggaguucugcgacaugcugcgccuguucgacuucaacaagcaggccauccggcgccucaagacccccgcgcaggccaacauccagcugaucaacaaggccgugaacgcccugaucaacgaccagcucaucaugaagaaccaccuccgggacaucaugugcauccccuacugcaacuacuccaaguacugguaccugaaccacacggucaccgggaagaccagccugccccgcugcuggcugguguccaacggcagcuaccugaacgagacccacuucuccgacgacaucgagcagcaggccgacaacaugaucacggagcuccugcagaaggaguacauggaccggcagggcaagaccccgcuggggcucguggaccuguucgucuucagcaccuccuucuaccugaucagcaucuuccugcaccucgugaagaucccgacccaccgccacgugaucggcaagcccugccccaagccccaccggcugaaccacauggggaucugcuccugcggccuguacaagcacccggggguccccgugaaguggaagcgcugaggacuagucccuguucccagagcccacuuuuuuuucuuuuuuugaaauaaaauagccugucuuucagaucuaaaaaaaaaaaaaaaaaaaaaaaaaaaaaaaaaaaaaaaaaaaaaaaaaaaaaaaaaaaaaaaaugcaucccccccccccccccccccccccccccccccaaaggcucuuuucagagccaccagaauu

SEQ ID NO: 6448 - RNA, 1768 nt, Artificial Sequence
  mRNA product Design a-2 comprising derived and/or modified sequence from LASV(Nig08-A19;Clade III)__ADU56618__GPCstabilized (opt1)
gggagaguccgcucagccagguugcagaagcggcuuagcguguguccuaaucuucucucugcguguagguaggccugugccgcaaacaagcuuaccaugggccagaucgugaccuucuuccaggaggucccccacgugaucgaggaggugaugaacaucguccugaucgcccucagcauccuggccauccugaaggggcucuacaacaucgcgaccugcggccugaucgggcuggugacguuccuccugcuguccggccgcagcugcuccaugaccuacaaggggguguacgagcuccagacccuggagcugaacaugaacacccucaacaugacgaugccgcugagcugcaccaagaacaacucccaccacuacaucauggucggcaacgagaccggccuggagcucacccugacgaacaccagccugcuccaccacaaguucugcaaccuguccgacgcccacaagaagaaccuguacgaccacacccucaugagcaucaucuccaccuuccaccugagcauccccaacuucaaccaguacgaggccauguccugcgacuucaacgggggcaagaucacggugcaguacaaccugagccacuccuacgccaucgacgccgcgaaccacugcgggaccguggccaacggcguccuccagaccuucaugcggauggccuggggcgggagcuacaucgcccuggacuccggcugcgggaagugggacugcaucaugaccagcuaccaguaccugaucauccagaacacgaccugggaggaccacugccaguucucccggcccagccccaucggcuaccucgggcugcugucccagcgcacccgggacaucuacaucagccgccggcgccggggcaccuucacguggacccugagcgacuccgagggcaacgagacccccgggggcuacugccucacccgcuggaugcugaucgaggcggagcugaagugcuucgggaacacggccguggccaagugcaacgagaagcacgacgaggaguucugcgacaugcuccggcuguucgacuucaacaagcaggccauccgccggcugaaggcccccgcgcagaugagcauccagcucaucaacaaggccgugaacgcccugaucaacgaccagcugaucaugaagaaccaccuccgcgacaucaugugcauccccuacugcaacuacuccaaguacugguaccugaaccacaccagcaccgggcggaccucccugccccgcugcuggcucgucagcaacggcuccuaccugaacgagacgcacuucagcgacgacaucgagcagcaggccgacaacaugaucaccgagaugcugcagaaggaguaccucgaccggcagggcaagaccccgcuggggcugguggaccuguucguguucuccaccagcuucuaccucaucuccaucuuccugcaccuggucaagaucccgacgcaccgccacaucgugggcaagcccugccccaagccccaccggcucaaccacauggggaucugcagcugcggccuguacaagcagccgggggugcccguccgcuggaagcggugaggacuagucccuguucccagagcccacuuuuuuuucuuuuuuugaaauaaaauagccugucuuucagaucuaaaaaaaaaaaaaaaaaaaaaaaaaaaaaaaaaaaaaaaaaaaaaaaaaaaaaaaaaaaaaaaaugcaucccccccccccccccccccccccccccccccaaaggcucuuuucagagccaccagaauu

SEQ ID NO: 6449 - RNA, 1771 nt, Artificial Sequence
  mRNA product Design a-2 comprising derived and/or modified sequence from LASV(G1180-SLE-2010;Clade IV)__AIT17168__GPCstabilized (opt1)
gggagaguccgcucagccagguugcagaagcggcuuagcguguguccuaaucuucucucugcguguagguaggccugugccgcaaacaagcuuaccaugggccagaucgugaccuucuuccaggaggucccccacgugaucgaggaggugaugaacaucguccugaucgcccucagcauccuggccgugcugaaggggcucuacaacuucgcgaccugcggccugguggggcugcucaccuuccugcugcucugcggccgcuccugcaccgccagccgguacaagggggucuacgagcugcagacccuggagcucaacauggagacccugaacaugacgaugccgcuguccugcaccaagaacaacagccaccacuacaucauggugggcaacgagaccggccucgagcugacccugacgaacaccuccaucaucaaccacaaguucugcaaccucagcgacgcccacaagaagaaccuguacgaccacgcccugauguccaucaucagcaccuuccaccucuccauccccaacuucaaccaguacgaggccaugagcugcgacuucaacgggggcaagaucuccgugcaguacaaccugagccacuccuacgcgggggacgccgccaaccacugcggcaccgucgccaacggggugcugcagacguucaugcgcauggcguggggcggcagcuacaucgcccucgacuccgggugcggcagcugggacugcaucaugaccuccuaccaguaccugaucauccagaacaccaccugggaggaccacugccaguucagccggcccucccccaucggguaccugggccuccugagccagcgcacgcgggacaucuacaucagccgccggcgccggggcaccuucaccuggacccuguccgacagcgaggggaaggacacgccgggcggguacugccugacccgcuggaugcucaucgaggccgagcugaagugcuucggcaacaccgccguggccaagugcaacgagaagcacgacgaggaguucugcgacaugcugcggcuguucgacuucaacaagcaggcgauccagcgccugaaggcccccgcccagauguccauccagcugaucaacaaggccgucaacgcccucaucaacgaccagcugaucaugaagaaccaccuccgggacaucaugugcauccccuacugcaacuacagcaaguacugguaccucaaccacaccacgaccggcaagaccucccugcccaagugcuggcuggugagcaacggcuccuaccucaacgagacccacuucagcgacgacaucgagcagcaggcggacaacaugaucacggagaugcugcagaaggaguacauggagcgccaggggaagacgccccugggccucguggaccuguucgucuucuccaccagcuucuaccugaucuccaucuuccugcaccucgugaagaucccgacccaccggcacaucgugggcaagagcugccccaagccccaccgccugaaccacauggggaucugcuccugcgggcuguacaagcagcccggcgucccggugaaguggaagcggugaggacuagucccuguucccagagcccacuuuuuuuucuuuuuuugaaauaaaauagccugucuuucagaucuaaaaaaaaaaaaaaaaaaaaaaaaaaaaaaaaaaaaaaaaaaaaaaaaaaaaaaaaaaaaaaaaugcaucccccccccccccccccccccccccccccccaaaggcucuuuucagagccaccagaauu

SEQ ID NO: 6450 - RNA, 1771 nt, Artificial Sequence
  mRNA product Design a-2 comprising derived and/or modified sequence from LASV(G1442-SLE-2011;Clade IV)__AIT17180__GPCstabilized (opt1)
gggagaguccgcucagccagguugcagaagcggcuuagcguguguccuaaucuucucucugcguguagguaggccugugccgcaaacaagcuuaccaugggccagaucgugaccuucuuccaggaggucccccacgugaucgaggaggugaugaacaucguccugaucgcccucagcauccuggccgugcugaaggggcucuacaacguggcgaccugcggccugaucgggcuggucacguuccuccugcugugcggccgcuccugcaccaccacccucuacaaggggguguacgagcugcagacgcuggagcucaacauggagacccugaacaugaccaugccgcugagcugcaccaagaacaacucccaccacuacauccgggugggcaacgagacgggccucgagcugacccugaccaacaccagcaucaucaaccacaaguucugcaaccucuccgacgcccacaagaagaaccuguacgaccacgcccugaugagcaucaucuccacguuccaccucagcauccccaacuucaaccaguacgaggccauguccugcgacuucaacgggggcaagaucagcguccaguacaaccugucccacagcuacgccggggacgcggccaaccacugcggcaccguggccaacggggugcugcagaccuucaugcgcauggccuggggcggcuccuacaucgcgcucgacagcgggugcggcaacugggacugcaucaugaccuccuaccaguaccugaucauccagaacacgaccugggacgaccacugccaguucagccgccccucccccaucggguaccugggccuccugagccagcggacccgcgacgucuacaucucccggcgccgccggggcaccuucacguggacccugagcgacagcgaggggaaggacaccccgggcggguacugccugacccgguggaugcucaucgaggccgagcugaagugcuucggcaacacggccguggccaagugcaacgagaagcacgacgaggaguucugcgacaugcugcgccucuucgacuucaacaagcaggccauccagcggcugaaggcgcccgcccagauguccauccagcugaucaacaaggccgugaacgcccucaucaacgaccagcugaucaugaagaaccaccuccgcgacaucaugugcauccccuacugcaacuacagcaaguacugguaccugaacaacaccgccaccggcaagaccucccugcccaagugcuggcugaucagcaacggcuccuaccucaacgagacgcacuucagcgacgacaucgagcaggaggcggacaacaugaucaccgagaugcugcagaaggaguacauggagcggcaggggaagacgccccugggccucgucgaccuguucguguucuccaccagcuucuaccugaucuccaucuuccugcaccucgugaagaucccgacccaccgccacaucgucggcaagagcugccccaagccccaccggcugaaccacauggggaucugcuccugcgggcuguacaagcagcccggcgugccggugcgcuggaagcggugaggacuagucccuguucccagagcccacuuuuuuuucuuuuuuugaaauaaaauagccugucuuucagaucuaaaaaaaaaaaaaaaaaaaaaaaaaaaaaaaaaaaaaaaaaaaaaaaaaaaaaaaaaaaaaaaaugcaucccccccccccccccccccccccccccccccaaaggcucuuuucagagccaccagaauu

SEQ ID NO: 6451 - RNA, 1771 nt, Artificial Sequence
  mRNA product Design a-2 comprising derived and/or modified sequence from LASV(G3010-SLE-2013;Clade IV)__AIT17344__GPCstabilized (opt1)
gggagaguccgcucagccagguugcagaagcggcuuagcguguguccuaaucuucucucugcguguagguaggccugugccgcaaacaagcuuaccaugggccagaucgugaccuucuuccaggaggucccccacgugaucgaggaggugaugaacaucguccugaucgcccucagcauccuggccgugcugaaggggcucuacaacuucgcgaccugcggccugguggggcuggucacguuccuccugcugugcggccgcuccugcaccaccagccucuacaaggggguguacgagcugcagacccuggagcucaacauggagacgcugaacaugaccaugccgcuguccugcaccaagaacaacagccaccacuacaucauggugggcaacgagaccggccucgagcugacgcugaccaacaccuccaucaucaaccacaaguucugcaaccucagcgacgcccacaagaagaaccuguacaaccacgcccugauguccaucaucagcaccuuccaccucuccauccccaacuucaaccaguacgaggccaugagcugcgacuucaacgggggcaagaucuccguccaguacaaccugagccacuccuacgccggggacgcggccagccacugcggcacgguggccaacggggugcugcagaccuucaugcggauggccuggggcggcuccuacaucgcgcucgacagcgggugcggcaagugggacugcaucaugaccuccuaccaguaccugaucauccagaacaccacgugggaggaccacugccaguucagccgccccucccccaucggguaccugggccuccugagccagcggacccgcgacaucuacaucagccggcgccgccggggcaccuucaccuggacgcuguccgacagcgaggggaaggacaccccgggcggguacugccugacccgguggaugcucaucgaggccgagcugaagugcuucggcaacaccgccgucgccaagugcaacgagaagcacgacgaggaguucugcgacaugcugcgccucuucgacuucaacaagcaggccauccagcggcugaagacgcccgcgcagauguccauccagcugaucaacaaggccgugaacgcccucaucaacgaccagcugaucaugaagaaccaccuccgcgacaucaugugcauccccuacugcaacuacagcaaguacugguaccugaaccacaccaccaccggcaagacgucccugcccaagugcuggcuggugagcaacggcuccuaccucaacgagacccacuucagcgacgacaucgagcagcaggccgacaacaugaucaccgagaugcugcagaaggaguacauggagcggcaggggaagacgccccugggccucgucgaccuguucguguucuccaccagcuucuaccugaucuccaucuuccugcaccucgugaagaucccgacccaccgccacaucgucggcaagagcugccccaagccccaccggcugaaccacauggggaucugcuccugcgggcuguacaagcagcccggcgugccggugcgcuggaagcggugaggacuagucccuguucccagagcccacuuuuuuuucuuuuuuugaaauaaaauagccugucuuucagaucuaaaaaaaaaaaaaaaaaaaaaaaaaaaaaaaaaaaaaaaaaaaaaaaaaaaaaaaaaaaaaaaaugcaucccccccccccccccccccccccccccccccaaaggcucuuuucagagccaccagaauu

SEQ ID NO: 6452 - RNA, 1771 nt, Artificial Sequence
  mRNA product Design a-2 comprising derived and/or modified sequence from LASV(G502-SLE-2009;Clade IV)__AIT17126__GPCstabilized (opt1)
gggagaguccgcucagccagguugcagaagcggcuuagcguguguccuaaucuucucucugcguguagguaggccugugccgcaaacaagcuuaccaugggccagaucgugaccuucuuccaggaggucccccacgugaucgaggaggugaugaacaucguccugaucgcccucagcauccuggccgugcugaaggggcucuacaacuucgcgaccugcggccugguggggcugcucacguuccugcugcucugcggccgcuccugcaccaccgggcuguacaagggcgucuacgagcugcagacccucgagcugaacauggagacgcugaacaugaccaugccgcucagcugcaccaagaacaacucccaccacuacaucauggugggcaacgagaccgggcuggagcugacgcucaccaacaccagcaucaucaaccacaaguucugcaaccuguccgacgcccacaagaagaaccuguacgaccacgcccucaugagcaucaucuccaccuuccaccugagcauccccaacuucaaccaguacgaggccauguccugcgacuucaacggcgggaagaucagcgugcaguacaaccugucccacagcuacgccggcgacgcggccgaccacugcgggacggucgccaacggcgugcuccagaccuucaugcggauggccuggggcggguccuacaucgcgcuggacagcggcugcgggcggugggacugcaucaugaccuccuaccaguaccugaucauccagaacaccacgugggaggaccacugccaguucagccgccccucccccaucggcuaccucggccugcugagccagcggacccgcgacaucuacaucucccggcgccgccgggggaccuucaccuggacgcugagcgacagcgagggcaaggacacccccgggggcuacugccucacccgguggaugcugaucgaggccgagcugaagugcuucgggaacaccgccguggccaagugcaacgagaagcacgacgaggaguucugcgacaugcuccgccuguucgacuucaacaagcaggccauccagcggcugaaggcgcccgcccagauguccauccagcucaucaacaaggccgucaacgcccugaucaacgaccagcuggugaugaagaaccaccuccgcgacaucaugugcauccccuacugcaacuacagccgguacugguaccugaaccacacgaccaccggccgcaccucccugcccaagugcuggcucgugagcaacggguccuaccugaacgagacgcacuucagcgacgacaucgagcagcaggccgacaacaugaucaccgagaugcugcagaaggaguacauggagcggcagggcaagaccccgcucgggcuggucgaccuguucguguucuccaccagcuucuaccugaucuccaucuuccuccaccuggugaagaucccgacgcaccgccacaucgucggcaagagcugccccaagccccaccggcugaaccacauggggaucugcuccugcggccucuacaagcagcccggcgugccggugaaguggaagcgcugaggacuagucccuguucccagagcccacuuuuuuuucuuuuuuugaaauaaaauagccugucuuucagaucuaaaaaaaaaaaaaaaaaaaaaaaaaaaaaaaaaaaaaaaaaaaaaaaaaaaaaaaaaaaaaaaaugcaucccccccccccccccccccccccccccccccaaaggcucuuuucagagccaccagaauu

SEQ ID NO: 6453 - RNA, 1771 nt, Artificial Sequence
  mRNA product Design a-2 comprising derived and/or modified sequence from LASV(G733-SLE-2010;Clade IV)__AIT17154__GPCstabilized (opt1)
gggagaguccgcucagccagguugcagaagcggcuuagcguguguccuaaucuucucucugcguguagguaggccugugccgcaaacaagcuuaccaugggccagaucgugaccuucuuccaggaggucccccacgugaucgaggaggugaugaacaucguccugaucgcccucagcauccuggccgugcugaaggggcucuacaacuucgcgaccugcggcaucguggggcuggucuccuuccugcuccugugcggccgcagcugcacgaccucccuguacaaggggguguacgagcuccagacccuggagcugaacauggagacccucaacaugacgaugccgcugagcugcaccaagaacaacucccaccacuacaucauggugggcaacgagaccggccuggagcucacccugacgaacaccagcaucaucaaccacaaguucugcaaccuguccgacgcccacaagaagaaccucuacgaccacgcccugaugagcaucaucuccaccuuccaccugagcauccccaacuucaaccaguacgaggccauguccugcgacuucaacgggggcaagaucagcguccaguacaaccucucccacagcuacgccggggacgcggccaaccacugcggcaccaucgccaacggggugcugcagacguucaugcggauggccuggggcggcuccuacaucgcgcuggacagcgggugcgaccggugggacugcaucaugaccuccuaccaguaccucaucauccagaacaccaccugggaggaccacugccaguucagccgccccucccccaucggcuaccuggggcugcucagccagcggacgcgcgacaucuacaucagccggcgccgccggggcaccuucaccuggacccucuccgacagcgagggcaaggacacgcccgggggcuacugccugacccgguggaugcugaucgaggccgagcucaagugcuucgggaacaccgccguggccaagugcaacgagaagcacgacgaggaguucugcgacaugcugcgccuguucgacuucaacaagcaggccauccagcggcucaaggcgcccgcccagauguccauccagcugaucaacaaggccgucaacgcccugaucaacgaccagcucaucaugaagaaccaccuccgcgacaucaugugcauccccuacugcaacuacagcaaguacugguaccugaaccacaccacgaccgggaagaccucccugcccaagugcuggcuggugagcaacggcuccuaccugaacgagacccacuucagcgacgacaucgagcagcaggccgacaacaugaucacggagaugcuccagaaggaguacauggagcggcagggcaagaccccgcuggggcugguggaccucuucgucuucuccaccagcuucuaccugaucuccaucuuccugcaccuggugaagaucccgacccaccgccacguggucggcaagagcugccccaagccccaccggcucaaccacauggggaucugcuccugcggccuguacgggcagcccggcgugccggugaaguggaagcgcugaggacuagucccuguucccagagcccacuuuuuuuucuuuuuuugaaauaaaauagccugucuuucagaucuaaaaaaaaaaaaaaaaaaaaaaaaaaaaaaaaaaaaaaaaaaaaaaaaaaaaaaaaaaaaaaaaugcaucccccccccccccccccccccccccccccccaaaggcucuuuucagagccaccagaauu

SEQ ID NO: 6454 - RNA, 1771 nt, Artificial Sequence
  mRNA product Design a-2 comprising derived and/or modified sequence from MOPV/LASV reassortant(IGS-1;Clade IV)__AFY05576__GPCstabilized (opt1)
gggagaguccgcucagccagguugcagaagcggcuuagcguguguccuaaucuucucucugcguguagguaggccugugccgcaaacaagcuuaccaugggccagaucgugaccuucuuccaggaggucccccacgugaucgaggaggugaugaacaucguccugaucgcccucagcgugcuggccgugcugaaggggcucuacaacuucgcgaccugcggccuggucgggcuggugacguuccuccugcugugcggccgcuccugcaccaccagccucuacaaggggguguacgagcugcagacccuggagcucaacauggagacgcugaacaugaccaugccgcuguccugcaccaagaacaacagccaccacuacaucauggucggcaacgagaccggccucgagcugacgcugaccaacaccuccaucaucaaccacaaguucugcaaccucagcgacgcccacaagaagaaccuguacgaccacgcccugauguccaucaucagcaccuuccaccucuccauccccaacuucaaccaguacgaggccaugagcugcgacuucaacgggggcaagaucuccgugcaguacaaccugagccacuccuacgccggggacgcggccaaccacugcggcacgguggccaacgggguccugcagaccuucaugcggauggccuggggcggcagcuacaucgcgcucgacuccgggugcggcaacugggacugcaucaugaccagcuaccaguaccugaucauccagaacaccacgugggaggaccacugccaguucucccggcccagccccaucggguaccugggccuccugucccagcgcacccgggacaucuacaucagccgccggcgccggggcaccuucaccuggacgcugagcgacuccgagggggaggacaccccgggcggguacugccugacccgcuggaugcucaucgaggccgagcugaagugcuucggcaacaccgccguggccaagugcaacgagaagcacgacgaggaguucugcgacaugcugcggcuguucgacuucaacaagcaggccauccagcgccugaaggcgcccgcccagaugagcauccagcugaucaacaaggccgugaacgcccucaucaacgaccagcugaucaugaagaaccaccuccgggacaucaugugcauccccuacugcaacuacuccaaguacugguaccucaaccacacgaccaccggccgcaccagccugcccaagugcuggcuggucuccaacggcagcuaccucaacgagacgcacuucuccgacgacaucgagcagcaggccgacaacaugaucaccgagaugcugcagaaggaguacauggagcggcaggggaagacgccccugggccucguggaccuguucguguucagcaccuccuucuaccugaucagcaucuuccugcaccucgucaagaucccgacccaccgccacaucguggggaaguccugccccaagccccaccggcugaaccacaugggcaucugcagcugcgggcuguacaagcagcccggcgugccggucaaguggaagcgcugaggacuagucccuguucccagagcccacuuuuuuuucuuuuuuugaaauaaaauagccugucuuucagaucuaaaaaaaaaaaaaaaaaaaaaaaaaaaaaaaaaaaaaaaaaaaaaaaaaaaaaaaaaaaaaaaaugcaucccccccccccccccccccccccccccccccaaaggcucuuuucagagccaccagaauu

SEQ ID NO: 6455 - RNA, 1771 nt, Artificial Sequence
  mRNA product Design a-2 comprising derived and/or modified sequence from LASV(LM765-SLE-2012;Clade IV)__AIT17814__GPCstabilized (opt1)
gggagaguccgcucagccagguugcagaagcggcuuagcguguguccuaaucuucucucugcguguagguaggccugugccgcaaacaagcuuaccaugggccagaucgugaccuucuuccaggaggucccccacgugaucgaggaggugaugaacaucguccugaucgcccucagcauccuggccgugcugaaggggcucuacaacuucgcgaccugcggccugguggggcuggucacguuccuccugcugugcggccgcuccugcaccaccagccucuacaaggggguguacgagcugcagacccuggagcucaacauggagacgcugaacaugaccaugccgcuguccugcaccaagaacaacagccaccacuacaucauggugggcaacgagaccggccucgagcugacgcugaccaacaccuccaucaucgaccacaaguucugcaaccucagcgacgcccaccggaagaaccuguacgaccacgcccugauguccaucaucagcaccuuccaccucuccauccccaacuucaaccaguacgaggccaugagcugcgacuucaacgggggcaagaucuccguccaguacaaccugagccacuccuacgccaaggacgcggccgaccacugcgggacgguggccaacggcgugcugcagaccuucaugcgcauggccuggggcgggagcuacaucgcgcucgacuccggcugcgggcgcugggacugcaucaugaccagcuaccaguaccugaucauccagaacaccacgugggaggaccacugccaguucucccggcccagccccaucggcuaccuggggcuccugucccagcgcacccgggacaucuacaucagccgccggcgccggggcaccuucaccuggacgcugagcgacuccgagggcaaggacacccccgggggcuacugccugacccgcuggaugcucaucgaggccgagcugaagugcuucgggaacaccgccgucgccaagugcaacgagaagcacgacgaggaguucugcgacaugcugcggcuguucgacuucaacaagcaggccauccagcgccugaaggcgcccgcccagaugagcauccagcugaucaacaaggccgugaacgcccucaucaacgaccagcugaucaugaagaaccaccuccgggacaucaugugcauccccuacugcaacuacuccaaguacugguaccucaaccacacgaccaccgggaagaccagccugcccaagugcuggcugguguccaacggcagcuaccucaacgagacgcacuucuccgacgacaucgagcagcaggccgacaacaugaucaccgagaugcugcagaaggaguacauggagcgccagggcaagaccccgcuggggcucgucgaccuguucguguucagcaccuccuucuaccugaucagcaucuuccugcaccucgugaagaucccgacgcaccggcacaucgucggcaagcccugccccaagccccaccgccugaaccacauggggaucugcuccugcggccuguacaagcagccgggggugcccgugaaguggaagcggugaggacuagucccuguucccagagcccacuuuuuuuucuuuuuuugaaauaaaauagccugucuuucagaucuaaaaaaaaaaaaaaaaaaaaaaaaaaaaaaaaaaaaaaaaaaaaaaaaaaaaaaaaaaaaaaaaugcaucccccccccccccccccccccccccccccccaaaggcucuuuucagagccaccagaauu

SEQ ID NO: 6456 - RNA, 1771 nt, Artificial Sequence
  mRNA product Design a-2 comprising derived and/or modified sequence from LASV(LM776-SLE-2012;Clade IV)__AIT17824__GPCstabilized (opt1)
gggagaguccgcucagccagguugcagaagcggcuuagcguguguccuaaucuucucucugcguguagguaggccugugccgcaaacaagcuuaccaugggccagaucgugaccuucuuccaggaggucccccacgugaucgaggaggugaugaacaucguccugaucgcccucagcauccuggccgugcugaaggggcucuacaacuucgcgaccugcggccugguggggcuggucacguuccuccugcugugcggccgcuccugcaccaccagcguguacaaggggguguacgagcuccagacccuggagcugaacauggagacgcucaacaugaccaugccgcuguccugcaccaagaacaacagccaccacuacaucauggucggcaacgagaccggccuggagcucacgcugaccaacaccuccaucaucaaccacaaguucugcaaccugagcgacgcccacaagaagaaccucuacgaccacgcccugauguccaucaucagcaccuuccaccuguccauccccaacuucaaccaguacgaggccaugagcugcgacuucaacgggggcaagaucuccgugcaguacaaccucagccacuccuacgccggggacgcggccaaccacugcggcacgguggccaacgggguccugcagaccuucaugcggauggccuggggcggcagcuacaucgcgcuggacuccgggugcggcaagugggacugcaucaugaccagcuaccaguaccucaucauccagaacaccacgugggaggaccacugccaguucucccgccccagccccaucggguaccugggccugcucucccagcggacccgcgacaucuacaucagccggcgccgccggggcaccuucaccuggacgcucagcgacuccgaggggaaggacaccccgggcggguacugccugacccgguggaugcugaucgaggccgagcucaagugcuucggcaacaccgccguggccaagugcaacgagaagcacgacgaggaguucugcgacaugcugcgccuguucgacuucaacaagcaggccauccagcggcucaaggcgcccgcccagaugagcauccagcugaucaacaaggccgugaacgcccugaucaacgaccagcucaucaugaagaaccaccuccgcgacaucaugugcauccccuacugcaacuacuccaaguacugguaccugaaccacacgaccaccggcaagaccagccugcccaagugcuggcuggucuccaacggcagcuaccugaacgagacgcacuucuccgacgacaucgagcagcaggccgacaacaugaucaccgagaugcuccagaaggaguacauggagcggcaggggaagacgccccugggccugguggaccucuucguguucagcaccuccuucuaccugaucagcaucuuccugcaccuggucaagaucccgacccaccgccacaucguggggaaguccugccccaagccccaccggcucaaccacaugggcaucugcagcugcgggcuguacaagcagcccggcgugccgguccgcuggaagcggugaggacuagucccuguucccagagcccacuuuuuuuucuuuuuuugaaauaaaauagccugucuuucagaucuaaaaaaaaaaaaaaaaaaaaaaaaaaaaaaaaaaaaaaaaaaaaaaaaaaaaaaaaaaaaaaaaugcaucccccccccccccccccccccccccccccccaaaggcucuuuucagagccaccagaauu

SEQ ID NO: 6457 - RNA, 1771 nt, Artificial Sequence
  mRNA product Design a-2 comprising derived and/or modified sequence from LASV(Mad39;Clade IV)__ANH09722__GPCstabilized (opt1)
gggagaguccgcucagccagguugcagaagcggcuuagcguguguccuaaucuucucucugcguguagguaggccugugccgcaaacaagcuuaccaugggccagaucgugaccuucuuccaggaggucccccacgugaucgaggaggugaugaacaucguccugaucgcccucagcauccuggccgugcugaaggggcucuacaacguggcgaccugcggccugaucgggcuggucacguuccuccugcugugcggccgcuccugcaccaccacccucuacaaggggguguacgagcugcaggcccuggagcucaacauggagacgcugaacaugaccaugccgcugagcugcaccaagaacaacucccaccacuacauccgggugggcaacgagaccggccucgagcugacgcugaccaacaccagccucaucaaccacaaguucugcaaccuguccgacgcccacaagaagaaccuguacgaccacgcccucaugagcaucaucuccaccuuccaccugagcauccccaacuucaaccaguacgaggccauguccugcgacuucaacgacgggaagaucagcguccaguacaaccugucccacacguacgcgggcgacaccgccaaccacugcgggaccguggccaacggcgugcuccagaccuucaugcgcauggccuggggcgggagcuacaucgcgcuggacuccggcugcgggggcugggacugcaucaugacgagcuaccaguaccugaucauccagaacaccaccugggaggaccacugccaguucucccggcccagccccaucggguaccucggccugcugucccagcggacccgcgacaucuacaucagccggcgccgccggggcacguucaccuggacccuguccgacagcgaggggaaggacaccccgggcggguacugccucacgcgguggaugcugaucgaggccgagcugaagugcuucggcaacaccgccgucgccaagugcaacgagaagcacgacgaggaguucugcgacaugcuccgccuguucgacuucaacaagcaggccauccagcggcugaaggcgcccgcccagaugagcauccagcucaucaacaaggccgugaacgcccugaucaacgaccagcugaucaugaagaaccaccuccgcgacaucaugugcauccccuacugcaacuacuccaaguacugguaccugaaccacaccgugaccggcaagacgagccugcccaagugcuggcucgucuccaacggcagcuaccugaacgagacccacuucuccgacgacaucgagcagcaggccgacaacaugaucaccgagaugcugcagaaggaguacauggagcggcaggggaagacgccccucggccugguggaccuguucguguucagcaccuccuucuaccugaucagcaucuuccuccaccuggucaagaucccgacccaccgccacgugguggggaagcccugccccaagccccaccggcugaaccacaugggcaucugcuccugcggguucuacaagcagccgggcguccccgugcgcuggaagcggugaggacuagucccuguucccagagcccacuuuuuuuucuuuuuuugaaauaaaauagccugucuuucagaucuaaaaaaaaaaaaaaaaaaaaaaaaaaaaaaaaaaaaaaaaaaaaaaaaaaaaaaaaaaaaaaaaugcaucccccccccccccccccccccccccccccccaaaggcucuuuucagagccaccagaauu

SEQ ID NO: 6458 - RNA, 1771 nt, Artificial Sequence
  mRNA product Design a-2 comprising derived and/or modified sequence from LASV(Z0947-SLE-2011;Clade IV)__AIT17840__GPCstabilized (opt1)
gggagaguccgcucagccagguugcagaagcggcuuagcguguguccuaaucuucucucugcguguagguaggccugugccgcaaacaagcuuaccaugggccagaucgugaccuucuuccaggaggucccccacgugaucgaggaggugaugaacaucguccugaucgcccucagcauccuggccgugcugaaggggcucuacaacuucgcgaccugcggccugguggggcuggucacguuccuccugcugugcggccgcuccugcaccaucagccucuacaaggggguguacgagcugcagacccuggagcucaacauggagacccugaacaugacgaugccgcuguccugcaccaagaacaacagccaccacuacaucauggugggcaacgagaccggccucgagcugacccugacgaacaccuccaucaucaaccacaaguucugcaaccucagcgacgcccacaagaagaaccuguacgaccacgcccugauguccaucaucagcaccuuccaccucuccauccccaacuucaaccaguacgaggccaugagcugcgacuucaacgggggcaagaucuccguccaguacaaccugagccacuccuacgccggggacgcggccaaccacugcggcaccguggccaacggggugcugcagacguucaugcggauggccuggggcggcagcuacaucgcgcucgacuccgggugcgaccggugggacugcaucaugaccagcuaccaguaccugaucauccagaacaccaccugggaggaccacugccaguucucccgccccagccccaucggcuaccuggggcuccugucccagcggacgcgcgacaucuacaucagccggcgccgccggggcaccuucaccuggacccugagcgacuccgagggcaaggacacgcccgggggcuacugccugacccgguggaugcucaucgaggccgagcugaagugcuucgggaacaccgccgucgccaagugcaacgagaagcacgacgaggaguucugcgacaugcugcgccucuucgacuucaacaagcaggccauccagcggcugaaggcgcccgcccagaugagcauccagcugaucaacaaggccgugaacgcccucaucaacgaccagcugaucaugaagaaccaccuccgcgacaucaugugcauccccuacugcaacuacuccaaguacugguaccugaaccacaccacgaccgggaagaccagccugcccaagugcuggcugguguccaacggcagcuaccucaacgagacccacuucuccgacgacaucgagcagcaggccgacaacaugaucacggagaugcugcagaaggaguacauggagcggcagggcaagaccccgcuggggcucgucgaccuguucguguucagcaccuccuucuaccugaucagcaucuuccugcaccucgugaagaucccgacccaccgccacaucgucggcaagcccugccccaagccccaccggcugaaccacauggggaucugcuccugcggccuguacaagcagccgggggugcccgugaaguggaagcgcugaggacuagucccuguucccagagcccacuuuuuuuucuuuuuuugaaauaaaauagccugucuuucagaucuaaaaaaaaaaaaaaaaaaaaaaaaaaaaaaaaaaaaaaaaaaaaaaaaaaaaaaaaaaaaaaaaugcaucccccccccccccccccccccccccccccccaaaggcucuuuucagagccaccagaauu

SEQ ID NO: 6459 - RNA, 1771 nt, Artificial Sequence
  mRNA product Design a-2 comprising derived and/or modified sequence from LASV(Josiah;Clade IV)__NP_694870__GPCstabilized (opt1)
gggagaguccgcucagccagguugcagaagcggcuuagcguguguccuaaucuucucucugcguguagguaggccugugccgcaaacaagcuuaccaugggccagaucgugaccuucuuccaggaggucccccacgugaucgaggaggugaugaacaucguccugaucgcccucagcgugcuggccgugcugaaggggcucuacaacuucgcgaccugcggccuggucgggcuggugacguuccuccugcugugcggccgcuccugcaccaccagccucuacaaggggguguacgagcugcagacccuggagcucaacauggagacgcugaacaugaccaugccgcuguccugcaccaagaacaacagccaccacuacaucauggucggcaacgagaccggccucgagcugacgcugaccaacaccuccaucaucaaccacaaguucugcaaccucagcgacgcccacaagaagaaccuguacgaccacgcccugauguccaucaucagcaccuuccaccucuccauccccaacuucaaccaguacgaggccaugagcugcgacuucaacgggggcaagaucuccgugcaguacaaccugagccacuccuacgccggggacgcggccaaccacugcggcacgguggccaacgggguccugcagaccuucaugcggauggccuggggcggcagcuacaucgcgcucgacuccgggugcggcaacugggacugcaucaugaccagcuaccaguaccugaucauccagaacaccacgugggaggaccacugccaguucucccgccccagccccaucggguaccugggccuccugucccagcggacccgcgacaucuacaucagccggcgccggcgcggcaccuucaccuggacgcugagcgacuccgaggggaaggacaccccgggcggguacugccucacccgguggaugcugaucgaggccgagcugaagugcuucggcaacaccgccguggccaagugcaacgagaagcacgacgaggaguucugcgacaugcuccgccuguucgacuucaacaagcaggccauccagcggcugaaggcgcccgcccagaugagcauccagcucaucaacaaggccgugaacgcccugaucaacgaccagcugaucaugaagaaccaccuccgcgacaucaugugcauccccuacugcaacuacuccaaguacugguaccugaaccacacgaccaccgggcggaccagccugcccaagugcuggcucgucuccaacggcagcuaccugaacgagacgcacuucuccgacgacaucgagcagcaggccgacaacaugaucaccgagaugcugcagaaggaguacauggagcgccagggcaagaccccgcucgggcugguggaccuguucguguucagcaccuccuucuaccucaucagcaucuuccugcaccuggucaagauccccacgcaccggcacaucgugggcaaguccugccccaagccccaccgccugaaccacauggggaucugcagcugcggccucuacaagcagccgggggugcccgucaaguggaagcggugaggacuagucccuguucccagagcccacuuuuuuuucuuuuuuugaaauaaaauagccugucuuucagaucuaaaaaaaaaaaaaaaaaaaaaaaaaaaaaaaaaaaaaaaaaaaaaaaaaaaaaaaaaaaaaaaaugcaucccccccccccccccccccccccccccccccaaaggcucuuuucagagccaccagaauu

SEQ ID NO: 6460 - RNA, 1768 nt, Artificial Sequence
  mRNA product Design a-2 comprising derived and/or modified sequence from LASV(LP;Clade I)__AAF86701__GPCstabilized (opt1)
gggagaguccgcucagccagguugcagaagcggcuuagcguguguccuaaucuucucucugcguguagguaggccugugccgcaaacaagcuuaccaugggccagaucaucaccuucuuccaggaggugccccacgucaucgaggaggugaugaacaucgugcugaucgcccucagccugcuggccauccucaaggggcuguacaacaucgcgaccugcggcaucaucgggcuggucgccuuccucuuccugugcggcaaguccugcagccugacgcucaagggcggguacgagcugcagacccuggagcucaacauggagacccugaacaugaccaugccgcuguccugcacgaagaacagcucccaccacuacauccgcgugggcaacgagaccgggcucgagcugacccugaccaacacgagcaucaucaaccacaaguucugcaaccucuccgacgcccacaagaagaaccuguacgaccacgcccugaugagcaucaucuccaccuuccaccucagcauccccaacuucaaccaguacgaggccauguccugcgacuucaacggcgggaagaucagcgugcaguacaaccugucccacagcuacgcgggcgacgccgccgagcacugcgggaccgucgccaacggcgugcugcagaccuucaugcggauggcguggggcgggcgcuacaucgcccucgacuccggcugcgggaacugggacugcaucaugacgagcuaccaguaccugaucauccagaacaccaccugggaggaccacugccaguucucccggcccagccccaucggcuaccugggccuccugucccagcgcacccgggacaucuacaucagccgccggcgccgggggacguucaccuggacccugagcgacuccgagggcaacgagacccccgggggcuacugccucacgcgcuggaugcugaucgaggccgagcugaagugcuucgggaacaccgccguggccaagugcaacgagaagcacgacgaggaguucugcgacaugcuccggcuguucgacuucaacaagcaggcgauccgccggcugaaggccccggcccagaugagcauccagcucaucaacaaggccgucaacgcccugaucaacgaccagcugaucaugaagaaccaccuccgcgacaucaugugcauccccuacugcaacuacuccaaguacugguaccugaaccacaccagcuccggccggaccagccugcccaagugcuggcucaucuccaacggcagcuaccugaacgagacgcaguucuccgacgacaucgagcagcaggcggacaacaugaucaccgagaugcugcagaaggaguacaucgagcgccaggggaagaccccgcucggccugguggacaucuucaucuucagcaccuccuucuaccugaucagcaucuuccuccaccugaucaagauccccacgcaccggcacaucguggggaagcccugccccaagccgcaccgccugaaccacaugggcgucugcuccugcgggcuguacaagcaccccggcgugcccaccaaguggaagcggugaggacuagucccuguucccagagcccacuuuuuuuucuuuuuuugaaauaaaauagccugucuuucagaucuaaaaaaaaaaaaaaaaaaaaaaaaaaaaaaaaaaaaaaaaaaaaaaaaaaaaaaaaaaaaaaaaugcaucccccccccccccccccccccccccccccccaaaggcucuuuucagagccaccagaauu

SEQ ID NO: 6461 - RNA, 1768 nt, Artificial Sequence
  mRNA product Design a-2 comprising derived and/or modified sequence from LASV(803213;Clade II)__AAF86703__GPCstabilized (opt1)
gggagaguccgcucagccagguugcagaagcggcuuagcguguguccuaaucuucucucugcguguagguaggccugugccgcaaacaagcuuaccaugggccagaucaucaccuucuuccaggaggugccccacgucaucgaggaggugaugaacaucgugcugaucgcccucagccugcuggccauccucaaggggaucuacaacgucgcgaccugcggccuguucgggcugaucuccuuccuccugcugugcggccgcagcugcuccgugacguacaaggggguguacgagcuccagacccuggagcugaacauggccaaccucaacaugaccaugccgcugagcugcaccaagaacaacucccaccacuacaucauggucggcaacgagacgggccuggagcucacccugaccaacaccagcaucaucaaccacaaguucugcaaccuguccgacgcccacaagaagaaccucuacgaccacgcccugaugagcaucaucuccacguuccaccugagcauccccaacuucaaccaguacgaggccauguccugcgacuucaacgggggcaagaucagcgugcaguacaaccucucccacagcuucgcgguggacgccgccaaccacugcgggaccaucgccaacggcguccugcagaccuucaugcggauggcguggggcggguccuacaucgcccuggacagcggcugcgggaacugggacugcaucaugaccuccuaccaguaccucaucauccagaacacgaccugggaggaccacugccaguucagccgccccucccccaucggcuaccuggggcugcucagccagcggacccgcgacaucuacaucagccggcgccggcgcggcaccuucacguggacccuguccgacagcgagggcaacgaggcccccgggggcuacugccugacccgguggaugcucaucgaggccgagcugaagugcuucgggaacaccgccguggcgaagugcaacgagaagcacgacgaggaguucugcgacaugcugcgccucuucgacuucaacaagcaggccaucaagcggcugaagacgccggcccagauguccauccagcugaucaacaaggccgugaacgcccucaucaacgaccagcugaucaugaagaaccaccuccgcgacaucaugugcauccccuacugcaacuacagccgguacugguaccugaaccacaccgucaccggcaagaccucccugccccgcugcuggcuggugagcaacggguccuaccucaacgagacgcacuucagcgacgacaucgagcagcaggcggacaacaugaucaccgagaugcugcagaaggaguacauggaccggcagggcaagaccccgcugggccucguggaccuguucgucuucuccaccagcuucuaccugaucuccaucuuccuccaccuggugaagauccccacgcaccgccacaucguggggaagcccugccccaagccgcaccggcugaaccacaugggcaucugcagcugcgggcuguacaagcaccccggcguccccgugaaguggaagcgcugaggacuagucccuguucccagagcccacuuuuuuuucuuuuuuugaaauaaaauagccugucuuucagaucuaaaaaaaaaaaaaaaaaaaaaaaaaaaaaaaaaaaaaaaaaaaaaaaaaaaaaaaaaaaaaaaaugcaucccccccccccccccccccccccccccccccaaaggcucuuuucagagccaccagaauu

SEQ ID NO: 6462 - RNA, 1768 nt, Artificial Sequence
  mRNA product Design a-2 comprising derived and/or modified sequence from LASV(GA391;Clade III)__CAA36645__GPCstabilized (opt1)
gggagaguccgcucagccagguugcagaagcggcuuagcguguguccuaaucuucucucugcguguagguaggccugugccgcaaacaagcuuaccaugggccagaucgugaccuucuuccaggaggucccccacgugaucgaggaggugaugaacaucguccugaucgcccucagcauccuggccauccugaaggggcucuacaacguggcgaccugcggccugaucgggcuggugacguuccuccugcuguccggccgcagcugcucccucaucuacaaggggaccuacgagcugcagacccuggagcucaacauggagacccugaacaugacgaugccgcugagcugcaccaagaacaacucccaccacuacauccgggucggcaacgagaccggccucgagcugacccugacgaacaccagcauccucaaccacaaguucugcaaccuguccgacgcccacaagcgcaaccuguacgaccacagccucauguccaucaucagcaccuuccaccuguccauccccaacuucaaccaguacgaggccaugagcugcgacuucaacgggggcaagaucaccgugcaguacaaccugucccacagcuucgccguggacgccgcggggcacugcggcacgcucgccaacgggguccugcagaccuucaugcggauggccuggggcggcuccuacaucgcccuggacagcgggugcggcaacugggacugcaucaugaccuccuaccaguaccucaucauccagaacaccacgugggacgaccacugccaguucagccgccccucccccaucggguaccugggccugcucagccagcggacccgcgacaucuacaucagccggcgccggcgcggcaccuucaccuggacgcuguccgacagcgaggggaacgagaccccgggcggguacugccugacccgguggaugcucaucgaggcggagcugaagugcuucggcaacaccgccguggccaagugcaacgagaagcacgacgaggaguucugcgacaugcugcgccucuucgacuucaacaagcaggccauccggcgccugaagacgcccgcccagauguccauccagcugaucaacaaggcggugaacgcccucaucaacgaccagcugaucaugaagaaccaccuccgggacaucaugugcauccccuacugcaacuacagccgcuacugguaccugaaccacaccuccaccgggaagaccagccugccccggugcuggcugaucuccaacggcagcuaccucaacgagacgaaguucuccgacgacaucgagcagcaggccgacaacaugaucaccgagaugcugcagaaggaguacaucgaccgccagggcaagaccccgcuggggcucgucgaccuguucguguucagcaccuccuucuaccugaucagcaucuuccugcaccucgugaagauccccacgcaccggcacaucgucggcaagcccugccccaagccgcaccgccugaaccacauggggaucugcuccugcggccuguacaagcagcccggggugcccgugcgguggaagcgcugaggacuagucccuguucccagagcccacuuuuuuuucuuuuuuugaaauaaaauagccugucuuucagaucuaaaaaaaaaaaaaaaaaaaaaaaaaaaaaaaaaaaaaaaaaaaaaaaaaaaaaaaaaaaaaaaaugcaucccccccccccccccccccccccccccccccaaaggcucuuuucagagccaccagaauu

SEQ ID NO: 6463 - RNA, 1771 nt, Artificial Sequence
  mRNA product Design a-2 comprising derived and/or modified sequence from LASV(AV;Clade V)__CCA30314__GPCstabilized (opt1)
gggagaguccgcucagccagguugcagaagcggcuuagcguguguccuaaucuucucucugcguguagguaggccugugccgcaaacaagcuuaccaugggccagaucgugaccuucuuccaggaggucccccacgugaucgaggaggugaugaacaucguccugaucgcccucagcauccuggccgugcugaaggggcucuacaacaucgcgaccugcggccugaucgggcugaucacguuccuccugcugugcggccgcuccugcagcuccaaccucuacaaggggguguacgagcugcagagccuggaccucaacauggagacccugaacaugaccaugccgcuguccugcaccaagaacaacagccaccacuacauccgggucggcaacgacacgggccucgagcugacccugaccaacaccuccauccucaaccacaaguucugcaaccugagcgacgcccacaagaaggaccuguacgaccacgcccucauguccaucaucagcacguuccaccuguccauccccaacuucaaccaguacgaggccaugagcugcgacuucaacgggggcaagaucuccgugcaguacaaccugagccacuccuacgccaucgacgcggccaaccacugcgggaccguggccaacggcauccuccagaccuucaugcgcauggccuggggcgggagcuacaucgcgcuggacuccggcugcgggaacugggacugcaucaugaccagcuaccaguaccugaucauccagaacacgaccugggagaaccacugccaguucucccggcccagccccaucggcuaccucgggcugcugagccagcgcacccgggacaucuacaucucccgccggcgccggggcaccuucacguggacccucagcgacuccgagggcaacgccacccccgggggcuacugccugacccgcuggaugcugaucgaggccgagcucaagugcuucgggaacacggccgucgccaagugcaacgagaagcacgacgaggaguucugcgacaugcugcggcuguucgacuucaacaagcaggcgaucagccgccucaaguccccggcccagaugagcauccagcugaucaacaaggccgugaacgcccugaucaacgaccagcucaucaugaagaaccaccuccgggacaucaugugcauccccuacugcaacuacuccaaguacugguaccugaaccacaccaucaccggcaagaccagccugcccaagugcuggcugguguccaacgggagcuaccugaacgagacgcacuucuccgacgacaucgagcagcaggccgacaacaugaucaccgagaugcuccagaaggaguacauggagcgccagggcaagaccccgcugggccuggucgaccucuucguguucagcaccuccuucuaccugaucagcaucuuccugcggcuggugaagauccccacgcaccgccacaucgucgggaagcccugccccaagccgcaccggcucaaccacaugggcaucugcuccugcgggcuguacaagcagcccggcgugcccgugcgcuggaagcggugaggacuagucccuguucccagagcccacuuuuuuuucuuuuuuugaaauaaaauagccugucuuucagaucuaaaaaaaaaaaaaaaaaaaaaaaaaaaaaaaaaaaaaaaaaaaaaaaaaaaaaaaaaaaaaaaaugcaucccccccccccccccccccccccccccccccaaaggcucuuuucagagccaccagaauu

SEQ ID NO: 6464 - RNA, 1768 nt, Artificial Sequence
  mRNA product Design a-2 comprising derived and/or modified sequence from LASV(Togo/2016/7082;Clade VI)__AMR44577__GPCstabilized (opt1)
gggagaguccgcucagccagguugcagaagcggcuuagcguguguccuaaucuucucucugcguguagguaggccugugccgcaaacaagcuuaccaugggccagaucaucaccuucuuccaggaggugccccacgucaucgaggaggugaugaacaucgugcugaucgcccucagccugcuggccauccucaagggggucuacaacguggcgaccugcggcaucaucgggcuggugacguuccuguuccucugcggccgcuccugcagccugaucuacaagggguccuacgagcugcagacccucgagcugaacauggagacccugaacaugaccaugccgcucagcugcacgaagaacuccagccaccacuacauccgggucggcaacgagaccggccuggagcugacccucaccaacacguccaucaucaaccacaaguucugcaaccugagcgacgcccacaagcgcaaccuguacgaccacgcccucauguccauccugagcaccuuccaccuguccauccccaacuucaaccaguacgaggccaugagcugcgacuucaacgggggcaagaucuccgugcaguacaaccucagccacgccuacgcgguggacgccgccgagcacugcgggaccgucgccaacggcgugcugcagaccuucaugcggauggcguggggcggguccuacaucgcccuggacagcggcugcgggaacugggacugcaucaugacguccuaccaguaccucaucauccagaacaccaccugggaggaccacugccaguucagccgccccucccccaucggcuaccuggggcugcucagccagcggacccgcgacaucuacaucagccggcgccggcgcggcacguucaccuggacccuguccgacagcgagggcaacgagacccccgggggcuacugccugacgcgguggaugcucaucgaggccgagcugaagugcuucgggaacaccgccguggccaagugcaacgagaagcacgacgaggaguucugcgacaugcugcgccucuucgacuucaacaagcaggcgauccagcggcugaaguccccggcccagaugagcauccagcugaucaacaaggccgucaacgcccucaucaacgaccagcugaucaugaagaaccaccuccgcgacaugaugugcauccccuacugcaacuacuccaaguacugguaccugaaccacaccagcuccggccggaccagccugcccaagugcuggcugguguccaacgggagcuaccucaacgagacgcacuucuccgacgacaucgagcagcaggccgacaacaugaucaccgagaugcugcagaaggaguacaucgaccgccagggcaagaccccgcugggccucguggaccuguucgucuucagcaccuccuucuaccugaucagcaucuuccuccaccugaucaagauccccacgcaccggcacaucguggggaagcccugccccaagccgcaccgccugaaccacaugggcaucugcuccugcgggcuguacaagcagcccggcgugcccacccgguggaagcgcugaggacuagucccuguucccagagcccacuuuuuuuucuuuuuuugaaauaaaauagccugucuuucagaucuaaaaaaaaaaaaaaaaaaaaaaaaaaaaaaaaaaaaaaaaaaaaaaaaaaaaaaaaaaaaaaaaugcaucccccccccccccccccccccccccccccccaaaggcucuuuucagagccaccagaauu

SEQ ID NO: 6465 - RNA, 1768 nt, Artificial Sequence
  mRNA product Design a-2 comprising derived and/or modified sequence from LASV(KAK-428;Clade n.d. (VII))__ANH09740__GPCstabilized (opt1)
gggagaguccgcucagccagguugcagaagcggcuuagcguguguccuaaucuucucucugcguguagguaggccugugccgcaaacaagcuuaccaugggccagaucgugaccuucuuccaggaggucccccacgugaucgaggaggugaugaacaucguccugaucgcccucagccugcuggccauccucaaggggcuguacaacuucgcgaccugcggcgugaucgggcugaucacguuccuccugcugugcggccgcuccugcagcgccaccuacaaggggcaguacgagcuccagacccuggagcugaacauggagucccucaacaugaccaugccgcugagcugcacgaagaacaacucccaccacuacauccgggccggcaacaacaccggccuggagcucacccugaccaacacgagcaucaucucccacaaguucugcaaccugagcgacgcccacaagaagaaccucuacgaccacacccugauguccaucaucaccaccuuccaccugagcauccccaacuucaaccaguacgaggccauguccugcgacuucaacgggggcaagaucagcauccaguacaaccucucccacagcuacgcgggggacgccgcccagcacugcggcacgguggccaacgggguccugcagaccuucaugcgcauggcguggggcggcuccuaccuggcccucgacagcgggugccggggcugggacugcaucaucuccagcuaccaguaccugaucauccagaacaccaccugggacgaccacugccaguucucccgccccagccccaucggguaccugggcuucgugagccagaagacgcgggacaucuacaucucccgccggcgccggggcaccuucaccuggacccucagcgacuccgaggggcacgacaugccgggcggguacugccugacgcgcuggaugcugaucgaggccgaccucaagugcuucggcaacaccgccguggccaagugcaacgagaagcacgacgaggaguucugcgacauguggcggcuguucgacuucaacaagcaggcgauccagcgccugaaggcccccgcccagaugaacauccagcucaucaacaaggccgucaacgcccugaucaacgaccagcugaugaugaagaaccaccuccgggacaucaugugcauccccuacugcaacuacagcaaguucugguaccugaacaacaccaccacggggcgcaccucccugccccggugcuggcucaucagcaacggcuccuaccugaacgagacccacuucagcgacgacaucgagcagcaggcggacaacaugaucaccgagaugcugcagaaggaguacauggaccgccagggcaagacgccgcucgggcugguggaccuguucguguucuccaccagcuucuaccucaucaccaucuuccugcaccuggucaagauccccacccaccggcacaucgugggcaagcccugccccaagccgcaccgccucaaccacauggggaucugcuccugcggccuguacaagcagcccggggugcccguccgguggaagcgcugaggacuagucccuguucccagagcccacuuuuuuuucuuuuuuugaaauaaaauagccugucuuucagaucuaaaaaaaaaaaaaaaaaaaaaaaaaaaaaaaaaaaaaaaaaaaaaaaaaaaaaaaaaaaaaaaaugcaucccccccccccccccccccccccccccccccaaaggcucuuuucagagccaccagaauu

SEQ ID NO: 6466 - RNA, 1768 nt, Artificial Sequence; identical to SEQ ID NO: 6460
  mRNA product Design a-2 comprising derived and/or modified sequence from LASV(Pinneo-NIG-1969;Clade I)__AIT17836__GPCstabilized (opt1)

SEQ ID NO: 6467 - RNA, 1768 nt, Artificial Sequence
  mRNA product Design a-2 comprising derived and/or modified sequence from LASV(ISTH0009-NIG-2011;Clade II)__AIT17404__GPCstabilized (opt1)
gggagaguccgcucagccagguugcagaagcggcuuagcguguguccuaaucuucucucugcguguagguaggccugugccgcaaacaagcuuaccaugggccagaucaucaccuucuuccaggaggugccccacgucaucgaggaggugaugaacaucgugcugaucgcccucagccugcuggccauccucaaggggaucuacaacgucgcgaccugcggccuguucgggcugguguccuuccuccugcugugcggccgcagcugcuccacgaccuacaaggggguguacgagcuccagacccuggagcuggacauggccagccucaacaugaccaugccgcuguccugcacgaagaacaacagccaccacuacaucauggucggcaacgagaccggccuggagcucacccugaccaacacguccaucaucaaccacaaguucugcaaccugagcgacgcccacaagaagaaccucuacgaccacgcccugauguccaucaucagcaccuuccaccuguccauccccaacuucaaccaguacgaggccaugagcugcgacuucaacgggggcaagaucuccgugcaguacaaccucagccacgcguacgccguggacgccgccaaccacugcgggaccaucgcgaacggcguccugcagaccuucaugcggauggccuggggcggguccuacaucgcccuggacagcggcugcggguccugggacugcaucaugacgagcuaccaguaccucaucauccagaacaccaccugggaggaccacugccaguucucccgccccagccccaucggcuaccuggggcugcucagccagcggacccgcgacaucuacaucucccggcgccggcgcggcacguucaccuggacccugagcgacuccgagggcaacgagacccccgggggcuacugccugacgcgguggaugcucaucgaggccgagcugaagugcuucgggaacaccgccguggcgaagugcaacgagaagcacgacgaggaguucugcgacaugcugcgccucuucgacuucaacaagcaggccauccggcgccugaagaccccggcccagaugagcauccagcugaucaacaaggccgugaacgcccucaucaacgaccagcugaucaugaagaaccaccuccgggacaucaugugcauccccuacugcaacuacuccaaguacugguaccugaaccacaccgucacgggcaagaccagccugccccgcugcuggcugguguccaacgggagcuaccucaacgagacccacuucuccgacgacaucgagcagcaggcggacaacaugaucaccgagcugcugcagaaggaguacauggaccggcagggcaagacgccgcucggccugguggaccuguucgucuucagcaccuccuucuaccucaucagcaucuuccugcaccugaucaagauccccacccaccgccacaucaccgggaagcccugccccaagccgcaccggcugaaccacaugggcaucugcuccugcgggcucuacaagcaccccggcgugcccgugaaguggaagcgcugaggacuagucccuguucccagagcccacuuuuuuuucuuuuuuugaaauaaaauagccugucuuucagaucuaaaaaaaaaaaaaaaaaaaaaaaaaaaaaaaaaaaaaaaaaaaaaaaaaaaaaaaaaaaaaaaaugcaucccccccccccccccccccccccccccccccaaaggcucuuuucagagccaccagaauu

SEQ ID NO: 6468 - RNA, 1768 nt, Artificial Sequence
  mRNA product Design a-2 comprising derived and/or modified sequence from LASV(ISTH2010-NIG-2012;Clade II)__AIT17482__GPCstabilized (opt1)
gggagaguccgcucagccagguugcagaagcggcuuagcguguguccuaaucuucucucugcguguagguaggccugugccgcaaacaagcuuaccaugggccagaucaucaccuucuuccaggaggugccccacgucaucgaggaggugaugaacaucgugcugaucgcccucagccugcuggccauccucaaggggaucuacaacgucgcgaccugcggccuguucgggcugguguccuuccuccugcugugcggccgcagcugcuccacgaccuacaaggggguguacgagcuccagacccuggagcuggacauggccagccucaacaugaccaugccgcuguccugcacgaagaacaacagccaccacuacaucauggucggcaacgagaccggccuggagcucacccugaccaacacguccaucaucaaccacaaguucugcaaccugagcgacgcccacaagaagaaccucuacgaccacgcccugauguccaucaucagcaccuuccaccuguccauccccaacuucaaccaguacgaggccaugagcugcgacuucaacgggggcaagaucuccgugcaguacaaccucagccacgcguacgccguggacgccgccaaccacugcgggaccaucgcgaacggcguccugcagaccuucaugcggauggccuggggcggguccuacaucgcccuggacagcggcugcggguccugggacugcaucaugacgagcuaccaguaccucaucauccagaacaucaccugggaggaccacugccaguucucccgccccagccccaucggcuaccuggggcugcucagccagcggacccgcgacaucuacaucucccggcgccggcgcggcaccuucacguggacccugagcgacuccgagggcaacgagacccccgggggcuacugccugacccgguggaugcucaucgaggccgagcugaagugcuucgggaacacggccguggcgaagugcaacgagaagcacgacgaggaguucugcgacaugcugcgccucuucgacuucaacaagcaggccauccggcgccugaagaccccggcccagaugagcauccagcugaucaacaaggccgugaacgcccucaucaacgaccagcugaucaugaagaaccaccuccgggacaucaugugcauccccuacugcaacuacuccaaguacugguaccugaaccacaccgucaccggcaagacgagccugccccgcugcuggcugguguccaacgggagcuaccucaacgagacccacuucuccgacgacaucgagcagcaggcggacaacaugaucaccgagcugcugcagaaggaguacaucgaccggcagggcaagaccccgcucggccugguggaccuguucgucuucagcacguccuucuaccucaucagcaucuuccugcaccuggugaagauccccacccaccgccacguggucgggaagcccugccccaagccgcaccggcugaaccacaugggcaucugcuccugcgggcucuacaagcaccccggcgugcccgugaaguggaagcgcugaggacuagucccuguucccagagcccacuuuuuuuucuuuuuuugaaauaaaauagccugucuuucagaucuaaaaaaaaaaaaaaaaaaaaaaaaaaaaaaaaaaaaaaaaaaaaaaaaaaaaaaaaaaaaaaaaugcaucccccccccccccccccccccccccccccccaaaggcucuuuucagagccaccagaauu

SEQ ID NO: 6469 - RNA, 1768 nt, Artificial Sequence
  mRNA product Design a-2 comprising derived and/or modified sequence from LASV(Lassa virus/H.sapiens-wt/NGA/2015/ISTH_0543;Clade II)__AVO03639__GPCstabilized (opt1)
gggagaguccgcucagccagguugcagaagcggcuuagcguguguccuaaucuucucucugcguguagguaggccugugccgcaaacaagcuuaccaugggccagaucaucaccuucuuccaggaggugccccacgucaucgaggaggugaugaacaucgugcugaucgcccucagccugcuggccauccucaaggggaucuacaacgucgcgaccugcggccuguucgggcugguguccuuccuccugcugugcggccgcagcugcuccacgaccuacaaggggguguacgagcuccagacccuggagcuggacauggccaaccucaacaugaccaugccgcugagcugcacgaagaacaacucccaccacuacaucauggucggcaacgagaccggccuggagcucacccugaccaacacgagcaucaucaaccacaaguucugcaaccuguccgacgcccacaagaagaaccucuacgaccacgcccugaugagcaucaucuccaccuuccaccugagcauccccaacuucaaccaguacgaggccauguccugcgacuucaacgggggcaagaucagcgugcaguacaaccucucccacaccuacgcgguggacgccgccaaccacugcgggaccaucgccaacggcguccugcagacguucaugcggauggcguggggcgggagcuacaucgcccuggacuccggcugcgggagcugggacugcaucaugaccuccuaccaguaccucgugauccagaacaccaccugggaggaccacugccaguucagccgccccucccccaucggcuaccuggggcugcucagccagcggacgcgcgacaucuacaucagccggcgccggcgcggcaccuucaccuggacccuguccgacagcgagggcaacgagacgcccgggggcuacugccugacccgguggaugcucaucgaggccgagcugaagugcuucgggaacaccgccguggccaagugcaacgagaagcacgacgaggaguucugcgacaugcugcgccucuucgacuucaacaagcaggcgauccggcgccugaagaccccggcccagauguccauccagcugaucaacaaggccgucaacgcccucaucaacgaccagcugaucaugaagaaccaccuccgggacaucaugugcauccccuacugcaacuacagcaaguacugguaccugaaccacacggugaccggcaagaccucccugccccgcugcuggcuggugagcaacggguccuaccucaacgagacccacuucagcgacgacaucgagcagcaggccgacaacaugaucacggagcugcugcagaaggaguacaucgaccggcagggcaagaccccgcucggccuggucgaccuguucguguucuccaccagcuucuaccucaucuccaucuuccugcaccuggugaagauccccacccaccgccacaucacggggaagcccugccccaagccgcaccggcugaaccacaugggcaucugcagcugcgggcucuacaagcaccccggcguccccgugaaguggaagcgcugaggacuagucccuguucccagagcccacuuuuuuuucuuuuuuugaaauaaaauagccugucuuucagaucuaaaaaaaaaaaaaaaaaaaaaaaaaaaaaaaaaaaaaaaaaaaaaaaaaaaaaaaaaaaaaaaaugcaucccccccccccccccccccccccccccccccaaaggcucuuuucagagccaccagaauu

SEQ ID NO: 6470 - RNA, 1768 nt, Artificial Sequence
  mRNA product Design a-2 comprising derived and/or modified sequence from LASV(Lassa virus/H.sapiens-wt/NGA/2016/ISTH_0009;Clade II)__AVO03571__GPCstabilized (opt1)
gggagaguccgcucagccagguugcagaagcggcuuagcguguguccuaaucuucucucugcguguagguaggccugugccgcaaacaagcuuaccaugggccagaucaucaccuucuuccaggaggugccccacgucaucgaggaggugaugaacaucgugcugaucgcccucagccugcuggccauccucaaggggaucuacaacgucgcgaccugcggccugcuggggcucguguccuuccugcugcucugcggccgcagcugcuccacgaccuacaaggggguguacgagcugcagacccuggagcucgacauggccagccugaacaugaccaugccgcuguccugcacgaagaacaacagccaccacuacaucauggucggcaacgagaccggccucgagcugacccugaccaacacguccaucaucaaccacaaguucugcaaccucagcgacgcccacaagaagaaccuguacgaccacgcccugauguccaucaucagcaccuuccaccucuccauccccaacuucaaccaguacgaggccaugagcugcgacuucaacgggggccggaucuccgugcaguacaaccugagccacuccuacgcgguggacgccgccaaccacugcgggaccaucgccaacggcguccugcagaccuucaugcgcauggcguggggcgggagcuacaucgcccucgacuccggcugcgggagcugggacugcaucaugacguccuaccaguaccugaucauccagaacaccaccugggaggaccacugccaguucagccggcccagccccaucggcuaccuggggcuccugucccagcgcacccgggacaucuacaucagccgccggcgccggggcacguucaccuggacccuguccgacagcgagggcaacgagacccccgggggcuacugccucacgcgcuggaugcugaucgaggccgagcugaagugcuucgggaacaccgccguggccaagugcaacgagaagcacgacgaggaguucugcgacaugcuccggcuguucgacuucaacaagcaggcgauccgccggcugaagaccccggcccagauguccauccagcucaucaacaaggccgugaacgcccugaucaacgaccagcugaucaugaagaaccaccuccgcgacaucaugugcauccccuacugcaacuacagcaaguacugguaccugaaccacaccgucacgggcaagaccucccugccccggugcuggcucgugagcaacggguccuaccugaacgagacccacuucagcgacgacaucgagcagcaggccgacaacaugaucaccgagcugcuccagaaggaguacaucgaccgccagggcaagacgccgcugggccugguggaccucuucgucuucuccaccagcuucuaccugaucuccaucuuccugcaccuggugaagauccccacccaccggcacaucaccgggaagcccugccccaagccgcaccgccucaaccacaugggcaucugcagcugcgggcuguacaaccaccccggcgugcccgucaaguggaagcggugaggacuagucccuguucccagagcccacuuuuuuuucuuuuuuugaaauaaaauagccugucuuucagaucuaaaaaaaaaaaaaaaaaaaaaaaaaaaaaaaaaaaaaaaaaaaaaaaaaaaaaaaaaaaaaaaaugcaucccccccccccccccccccccccccccccccaaaggcucuuuucagagccaccagaauu

SEQ ID NO: 6471 - RNA, 1768 nt, Artificial Sequence
  mRNA product Design a-2 comprising derived and/or modified sequence from LASV(Lassa virus/H.sapiens-wt/NGA/2016/ISTH_0017;Clade II)__AVO03567__GPCstabilized (opt1)
gggagaguccgcucagccagguugcagaagcggcuuagcguguguccuaaucuucucucugcguguagguaggccugugccgcaaacaagcuuaccaugggccagaucaucaccuucuuccaggaggugccccacgucaucgaggaggugaugaacaucgugcugaucgcccucagccugcuggccauccucaaggggaucuacaacgucgcgaccugcggccuguucgggcugguguccuuccuccugcugugcggccgcagcugcuccacgaccuacaaggggguguacgagcuccagacccuggagcuggacauggccagccucaacaugaccaugccgcuguccugcacgaagaacaacagccaccacuacaucauggucggcaacgagaccggccuggagcucacccugaccaacacguccaucaucaaccacaaguucugcaaccugagcgacgcccacaagaagaaccucuacgaccacgcccugauguccaucaucagcaccuuccaccuguccauccccaacuucaaccaguacgaggccaugagcugcgacuucaacgggggcaagaucuccgugcaguacaaccucagccacaccuacgcgaucgacgccgccaaccacugcgggaccaucgccaacggcgugcugcagacguucaugcggauggcguggggcggguccuacaucgcccuggacagcggcugcggguccugggacugcaucaugaccagcuaccaguaccucaucauccagaacaccaccugggaggaccacugccaguucucccgccccagccccaucggcuaccuggggcugcucagccagcggacgcgcgacaucuacaucucccggcgccggcgcggcaccuucaccuggacccugagcgacuccgagggcaacgagacgcccgggggcuacugccugacccgguggaugcucaucgaggccgagcugaagugcuucgggaacaccgccgucgccaagugcaacgagaagcacgacgaggaguucugcgacaugcugcgccucuucgacuucaacaagcaggcgauccggcgccugaagaccccggcccagaugagcauccagcugaucaacaaggccgugaacgcccucaucaacgaccagcugaucaugaagaaccaccuccgggacaucaugugcauccccuacugcaacuacuccaaguacugguaccugaaccacacggugaccggcaagaccagccugccccgcugcuggcuggucuccaacgggagcuaccucaacgagacccacuucuccgacgacaucgagcagcaggccgacaacaugaucacggagcugcugcagaaggaguacauggaccggcagggcaagaccccgcucggccugguggaccuguucguguucagcaccuccuucuaccucaucagcaucuuccugcaccugguccgcauccccacccaccggcacgugaucgggaagcccugccccaagccgcaccgccugaaccacaugggcaucugcuccugcgggcucuacaagcaccccggcgugcccgucaaguggaagcggugaggacuagucccuguucccagagcccacuuuuuuuucuuuuuuugaaauaaaauagccugucuuucagaucuaaaaaaaaaaaaaaaaaaaaaaaaaaaaaaaaaaaaaaaaaaaaaaaaaaaaaaaaaaaaaaaaugcaucccccccccccccccccccccccccccccccaaaggcucuuuucagagccaccagaauu

SEQ ID NO: 6472 - RNA, 1768 nt, Artificial Sequence
  mRNA product Design a-2 comprising derived and/or modified sequence from LASV(Lassa virus/H.sapiens-wt/NGA/2018/ISTH_0959;Clade II)__AVV65099__GPCstabilized (opt1)
gggagaguccgcucagccagguugcagaagcggcuuagcguguguccuaaucuucucucugcguguagguaggccugugccgcaaacaagcuuaccaugggccagaucaucaccuucuuccaggaggugccccacgucaucgaggaggugaugaacaucgugcugaucgcccucagccugcuggccauccucaaggggaucuacaacgucgugaccugcggccuguucgggcugguguccuuccuccugcugugcggccgcagcugcuccacgaccuacaagggggucuacgagcuccagacccuggagcuggacauggcgagccucaacaugaccaugccgcuguccugcacgaagaacaacagccaccacuacaucauggugggcaacgagaccggccuggagcucacccugaccaacacguccaucaucaaccacaaguucugcaaccugagcgacgcccacaagaagaaccucuacgaccacgcccugauguccaucaucagcaccuuccaccuguccauccccaacuucaaccaguacgaggccaugagcugcgacuucaacgggggcaagaucuccgugcaguacaaccucagccacgccuacgcgaucgacgccgccaaccacugcgggaccaucgccaacggcguccugcagaccuucaugcggauggcguggggcggguccuacaucgcccuggacagcggcugcggguccugggacugcaucaugacgagcuaccaguaccucaucauccagaacaccaccugggaggaccacugccaguucucccgccccagccccaucggcuaccuggggcugcucagccagcggacccgcgacaucuacaucucccggcgccggcgcggcacguucaccuggacccugagcgacuccgagggcaacgagacccccgggggcuacugccugacgcgguggaugcucaucgaggccgagcugaagugcuucgggaacaccgccguggccaagugcaacgagaagcacgacgaggaguucugcgacaugcugcgccucuucgacuucaacaagcaggcgauccggcgccugaagaccccggcccagaugagcauccagcugaucaacaaggccgugaacgcccucaucaacgaccagcugaucaugaagaaccaccuccgggacaucaugugcauccccuacugcaacuacuccaaguacugguaccugaaccacaccgucacgggcaagaccagccugccccgcugcuggcugguguccaacgggagcuaccucaacgagacccacuucuccgacgacaucgagcagcaggccgacaacaugaucaccgagcugcugcagaaggaguacaucgaccggcagggcaagacgccgcucggccugguggaccuguucgucuucagcaccuccuucuaccucaucagcaucuuccugcaccuggugaagauccccacccaccgccacgugaucgggaagcccugccccaagccgcaccggcugaaccacaugggcaucugcuccugcgggcucuacaagcaccccggcguccccgugaaguggaagcgcugaggacuagucccuguucccagagcccacuuuuuuuucuuuuuuugaaauaaaauagccugucuuucagaucuaaaaaaaaaaaaaaaaaaaaaaaaaaaaaaaaaaaaaaaaaaaaaaaaaaaaaaaaaaaaaaaaugcaucccccccccccccccccccccccccccccccaaaggcucuuuucagagccaccagaauu

SEQ ID NO: 6473 - RNA, 1768 nt, Artificial Sequence
  mRNA product Design a-2 comprising derived and/or modified sequence from LASV(LASV003-NIG-2008;Clade II)__AIT17580__GPCstabilized (opt1)
gggagaguccgcucagccagguugcagaagcggcuuagcguguguccuaaucuucucucugcguguagguaggccugugccgcaaacaagcuuaccaugggccagaucaucaccuucuuccaggaggugccccacgucaucgaggaggugaugaacaucgugcugaucgcccucagccugcuggccauccucaaggggaucuacaacgucgcgaccugcggccuguucgggcugguguccuuccuccugcugugcggccgcagcugcuccacgaccuacaaggggguguacgagcuccagacccuggagcuggacauggccagccucaacaugaccaugccgcuguccugcacgaagaacaacagccaccacuacaucauggucggcaacgagaccggccuggagcucacccugaccaacacguccaucaucaaccacaaguucugcaaccugagcgacgcccacaagaagaaccucuacgaccacgcccugauguccaucaucagcaccuuccaccuguccauccccaacuucaaccaguacgaggccaugagcugcgacuucaacgggggcaagaucuccgugcaguacaaccucagccacaccuacgcgguggacgccgccaaccacugcgggaccaucgccaacggcguccugcagacguucaugcggauggcguggggcggguccuacaucgcccuggacagcggcugcggguccugggacugcaucaugaccagcuaccaguaccucaucauccagaacaccaccugggaggaccacugccaguucucccgccccagccccaucggcuaccuggggcugcucagccagcggacgcgcgacaucuacaucucccggcgccggcgcggcaccuucaccuggacccugagcgacuccgagagcaacgagacgccgggcggguacugccugacccgguggaugcucaucgaggccgagcugaagugcuucggcaacaccgccguggccaagugcaacgagaagcacgacgaggaguucugcgacaugcugcgccucuucgacuucaacaagcaggcgauccggcgccugaaggcccccgcccagauguccauccagcugaucaacaaggccgugaacgcccucaucaacgaccagcugaucaugaagaaccaccuccgggacaucaugugcauccccuacugcaacuacagcaaguacugguaccugaaccacaccgucacggggcgcaccucccugccccggugcuggcuggugagcaacggcuccuaccucaacgagacccacuucagcgacgacaucgagcagcaggcggacaacaugaucaccgagcugcugcagaaggaguacauggaccgccaggggaagacgccgcucggccugguggaccuguucgucuucuccaccagcuucuaccucaucuccaucuuccugcaccuggugaagauccccacccaccggcacgugaucggcaagcccugccccaagccgcaccgccugaaccacauggggaucugcagcugcggccucuacaagcaccccgggguccccgugaaguggaagcggugaggacuagucccuguucccagagcccacuuuuuuuucuuuuuuugaaauaaaauagccugucuuucagaucuaaaaaaaaaaaaaaaaaaaaaaaaaaaaaaaaaaaaaaaaaaaaaaaaaaaaaaaaaaaaaaaaugcaucccccccccccccccccccccccccccccccaaaggcucuuuucagagccaccagaauu

SEQ ID NO: 6474 - RNA, 1768 nt, Artificial Sequence
  mRNA product Design a-2 comprising derived and/or modified sequence from LASV(LASV035-NIG-2009;Clade II)__AIT17588__GPCstabilized (opt1)
gggagaguccgcucagccagguugcagaagcggcuuagcguguguccuaaucuucucucugcguguagguaggccugugccgcaaacaagcuuaccaugggccagaucaucaccuucuuccaggaggugccccacgucaucgaggaggugaugaacaucgugcugaucgcccucagccugcuggccauccucaaggggaucuacaacgucgcgaccugcggccuguucgggcugguguccuuccuccugcugugcggccgcagcugcuccacgaccuacaaggggguguacgagcuccagacccuggagcuggacauggccagccucaacaugaccaugccgcuguccugcacgaagaacaacagccaccacuacaucauggucggcaacgagaccggccuggagcucacccugaccaacacguccaucaucaaccacaaguucugcaaccugagcgacgcccacaagaagaaccucuacgaccacgcccugauguccaucaucagcaccuuccaccuguccauccccaacuucaaccaguacgaggccaugagcugcgacuucaacgggggcaagaucuccgugcaguacaaccucagccacgcguacgccguggacgccgccaaccacugcgggaccaucgcgaacggcguccugcagaccuucaugcggauggccuggggcggguccuacaucgcccuggacagcggcugcggguccugggacugcaucaugacgagcuaccaguaccucaucauccagaacaccaccugggaggaccacugccaguucucccgccccagccccaucggcuaccuggggcugcucagccagcggacccgcgacaucuacaucucccggcgccggcgcggcacguucaccuggacccugagcgacuccgagggcaacgagacccccgggggcuacugccugacgcgguggaugcucaucgaggccgagcugaagugcuucgggaacaccgccguggcgaagugcaacgagaagcacgacgaggaguucugcgacaugcugcgccucuucgacuucaacaagcaggccauccggcgccugaaggccccggcccagaugagcauccagcugaucaacaaggccgugaacgcgcucaucaacgaccagcugaucaugaagaaccaccuccgggacaucaugugcauccccuacugcaacuacuccaaguacugguaccugaaccacaccgucaccggcaagacgagccugccccgcugcuggcugguguccaacgggagcuaccucaacgagacccacuucuccgacgacaucgagcagcaggccgacaacaugaucaccgagcugcugcagaaggaguacaucgaccggcagggcaagaccccgcucggccugguggaccuguucgucuucagcacguccuucuaccucaucagcaucuuccugcaccuggugaagauccccacccaccgccacgugaucgggaagcccugccccaagccgcaccggcugaaccacaugggcaucugcuccugcgggcucuacaagcaccccggcguccccgugaaguggaagcgcugaggacuagucccuguucccagagcccacuuuuuuuucuuuuuuugaaauaaaauagccugucuuucagaucuaaaaaaaaaaaaaaaaaaaaaaaaaaaaaaaaaaaaaaaaaaaaaaaaaaaaaaaaaaaaaaaaugcaucccccccccccccccccccccccccccccccaaaggcucuuuucagagccaccagaauu

SEQ ID NO: 6475 - RNA, 1768 nt, Artificial Sequence
  mRNA product Design a-2 comprising derived and/or modified sequence from LASV(LASV1000-NIG-2009;Clade II)__AIT17782__GPCstabilized (opt1)
gggagaguccgcucagccagguugcagaagcggcuuagcguguguccuaaucuucucucugcguguagguaggccugugccgcaaacaagcuuaccaugggccagaucaucaccuucuuccaggaggugccccacgucaucgaggaggugaugaacaucgugcugaucgcccucagccugcuggccauccucaaggggaucuacaacgucgcgaccugcggccuguucgggcugguguccuuccuccugcugugcggccgcagcugcuccacgaccuacaaggggguguacgagcuccagacccuggagcuggacauggccagccucaacaugaccaugccgcuguccugcacgaagaacaacagccaccacuacaucauggucggcaacgagaccggccuggagcucacccugaccaacacguccaucaucaaccacaaguucugcaaccugagcgacgcccacaagaagaaccucuacgaccacgcccugauguccaucaucagcaccuuccaccuguccauccccaacuucaaccaguacgaggccaugagcugcgacuucaacgggggcaagaucuccgugcaguacaaccucagccacaccuacgcgguggacgccgccaaccacugcgggaccaucgccaacggcguccugcagacguucaugcggauggcguggggcggguccuacaucgcccuggacagcggcugcggguccugggacugcaucaugaccagcuaccaguaccucaucauccagaacaccaccugggaggaccacugccaguucucccgccccagccccaucggcuaccuggggcugcucagccagcggacgcgcgacaucuacaucucccggcgccggcgcggcaccuucaccuggacccugagcgacuccgagggcaacgagacgcccgggggcuacugccugacccgguggaugcucaucgaggccgagcugaagugcuucgggaacaccgccguggccaagugcaacgagaagcacgacgaggaguucugcgacaugcugcgccucuucgacuucaacaagcaggcgaucaagcggcugaagaccccggcccagaugagcauccagcugaucaacaaggccgugaacgcccucaucaacgaccagcugaucaugaagaaccaccuccgcgacaucaugugcauccccuacugcaacuacuccaaguacugguaccugaaccacacggucaccggcaagaccagccugccccggugcuggcugguguccaacgggagcuaccucaacgagacccacuucuccgacgacaucgagcagcaggccgacaacaugaucacggagcugcugcagaaggaguacaucgaccgccagggcaagaccccgcucggccugguggaccuguucgucuucagcaccuccuucuaccucaucagcaucuuccugcaccuggugaagauccccacccaccggcacguggucgggaagcccugccccaagccgcaccgccugaaccacaugggcaucugcuccugcgggcucuacaagcaccccggcgugcccgugaaguggaagcggugaggacuagucccuguucccagagcccacuuuuuuuucuuuuuuugaaauaaaauagccugucuuucagaucuaaaaaaaaaaaaaaaaaaaaaaaaaaaaaaaaaaaaaaaaaaaaaaaaaaaaaaaaaaaaaaaaugcaucccccccccccccccccccccccccccccccaaaggcucuuuucagagccaccagaauu

SEQ ID NO: 6476 - RNA, 1768 nt, Artificial Sequence
  mRNA product Design a-2 comprising derived and/or modified sequence from LASV(LASV221-NIG-2010;Clade II)__AIT17624__GPCstabilized (opt1)
gggagaguccgcucagccagguugcagaagcggcuuagcguguguccuaaucuucucucugcguguagguaggccugugccgcaaacaagcuuaccaugggccagaucaucaccuucuuccaggaggugccccacgucaucgaggaggugaugaacaucgugcugaucgcccucagccugcuggccauccucaaggggaucuacaacgucgcgaccugcggccuguucgggcugguguccuuccuccugcugugcggccgcagcugcuccacgaccuacaaggggguguacgagcuccagacccuggagcuggacauggccagccucaacaugaccaugccgcuguccugcacgaagaacaacagccaccacuacaucauggucggcaacgagaccggccuggagcucacccugaccaacacguccaucaucaaccacaaguucugcaaccugagcgacgcccacaagaagaaccucuacgaccacgcccugauguccaucaucagcaccuuccaccuguccauccccaacuucaaccaguacgaggccaugagcugcgacuucaacgggggcaagaucuccgugcaguacaaccucagccacaccuacgcgaucgacgccgccaaccacugcgggaccaucgccaacggcgugcugcagacguucaugcggauggcguggggcggguccuacaucgcccuggacagcggcugcggguccugggacugcaucaugaccagcuaccaguaccucaucauccagaacaccaccugggaggaccacugccaguucucccgccccagccccaucggcuaccuggggcugcucagccagcggacgcgcgacaucuacaucucccggcgccggcgcggcaccuucaccuggacccugagcgacuccgagggcaacgagacgcccgggggcuacugccugacccgguggaugcucaucgaggccgagcugaagugcuucgggaacaccgccgucgccaagugcaacgagaagcacgacgaggaguucugcgacaugcugcgccucuucgacuucaacaagcaggcgauccggcgccugaagaccccggcccagaugagcauccagcugaucaacaaggccgugaacgcccucaucaacgaccagcugaucaugaagaaccaccuccgggacaucaugugcauccccuacugcaacuacuccaaguacugguaccugaaccacacggugaccggcaagaccagccugccccgcugcuggcuggucuccaacgggagcuaccucaacgagacccacuucuccgacgacaucgagcagcaggccgacaacaugaucacggagaugcugcagaaggaguacauggaccggcagggcaagaccccgcugggccucguggaccuguucguguucagcaccuccuucuaccugaucagcaucuuccuccaccuggucaagauccccacccaccgccacgugaucgggaagcccugccccaagccgcaccggcugaaccacaugggcaucugcuccugcgggcuguacaagcaccccggcgugcccgucaaguggaagcgcugaggacuagucccuguucccagagcccacuuuuuuuucuuuuuuugaaauaaaauagccugucuuucagaucuaaaaaaaaaaaaaaaaaaaaaaaaaaaaaaaaaaaaaaaaaaaaaaaaaaaaaaaaaaaaaaaaugcaucccccccccccccccccccccccccccccccaaaggcucuuuucagagccaccagaauu

SEQ ID NO: 6477 - RNA, 1768 nt, Artificial Sequence
  mRNA product Design a-2 comprising derived and/or modified sequence from LASV(LASV237-NIG-2010;Clade II)__AIT17638__GPCstabilized (opt1)
gggagaguccgcucagccagguugcagaagcggcuuagcguguguccuaaucuucucucugcguguagguaggccugugccgcaaacaagcuuaccaugggccagaucaucaccuucuuccaggaggugccccacgucaucgaggaggugaugaacaucgugcugaucgcccucagccugcuggccauccucaaggggaucuacaacgucgcgaccugcggccuguucgggcugguguccuuccuccugcugugcggccgcagcugcuccacgaccuacaaggggguguacgagcuccagacccuggagcuggacauggccagccucaacaugaccaugccgcuguccugcacgaagaacaacagccaccacuacaucauggucggcaacgagaccggccuggagcucacccugaccaacacguccaucaucaaccacaaguucugcaaccugagcgacgcccacaagaaggaccucuacgaccacgcccugauguccaucaucagcaccuuccaccuguccauccccaacuucaaccaguacgaggccaugagcugcgacuucaacgggggcaagaucuccgugcaguacaaccucagccacaccuacgcgguggacgccgccaaccacugcgggaccaucgccaacggcguccugcagacguucaugcggauggcguggggcggguccuacaucgcccuggacagcggcugcggguccugggacugcaucaugaccagcuaccaguaccucaucauccagaacaccaccugggaggaccacugccaguucucccgccccagccccaucggcuaccuggggcugcucagccagcggacgcgcgacaucuacaucucccggcgccggcgcggcaccuucaccuggacccugagcgacuccgagggcaacgagacgcccgggggcuacugccugacccgguggaugcucaucgaggccgagcugaagugcuucgggaacaccgccguggccaagugcaacgagaagcacgacgaggaguucugcgacaugcugcgccucuucgacuucaacaagcaggcgauccggcgccugaagaccccggcccagaugagcauccagcugaucaacaaggccgugaacgcccucaucaacgaccagcugaucaugaagaaccaccuccgggacaucaugugcauccccuacugcaacuacuccaaguacugguaccugaaccacacggucaccggcaagaccagccugccccgcugcuggcugguguccaacgggagcuaccucaacgagacccacuucuccgacgacaucgagcagcaggccgacaacaugaucacggagcugcugcagaaggaguacauggaccggcagggcaagaccccgcucggccugguggaccuguucgucuucagcaccuccuucuaccucaucagcaucuuccugcaccugaucaagauccccacccaccgccacaucacggggaagcccugccccaagccgcaccggcugaaccacaugggcaucugcuccugcgggcucuacaagcaccccggcgugcccgugaaguggaagcgcugaggacuagucccuguucccagagcccacuuuuuuuucuuuuuuugaaauaaaauagccugucuuucagaucuaaaaaaaaaaaaaaaaaaaaaaaaaaaaaaaaaaaaaaaaaaaaaaaaaaaaaaaaaaaaaaaaugcaucccccccccccccccccccccccccccccccaaaggcucuuuucagagccaccagaauu

SEQ ID NO: 6478 - RNA, 1768 nt, Artificial Sequence
  mRNA product Design a-2 comprising derived and/or modified sequence from LASV(LASV253-NIG-2011;Clade II)__AIT17670__GPCstabilized (opt1)
gggagaguccgcucagccagguugcagaagcggcuuagcguguguccuaaucuucucucugcguguagguaggccugugccgcaaacaagcuuaccaugggccagaucaucaccuucuuccaggaggugccccacgucaucgaggaggugaugaacaucgugcugaucgcccucagccugcuggccauccucaaggggaucuacaacgucgcgaccugcggccuguucgggcugguguccuuccuccugcugugcggccgcagcugcuccacgaccuacaaggggguguacgagcuccagacccuggagcuggacauggccagccucaacaugaccaugccgcuguccugcacgaagaacaacagccaccacuacaucauggucggcaacgagaccggccuggagcucacccugaccaacacguccaucaucaaccacaaguucugcaaccugagcgacgcccacaagaagaaccucuacgaccacgcccugauguccaucaucagcaccuuccaccuguccauccccaacuucaaccaguacgaggccaugagcugcgacuucaacgggggcaagaucuccgugcaguacaaccucagccacaccuacgcgguggacgccgccaaccacugcgggaccaucgccaacggcguccugcagacguucaugcggauggcguggggcggguccuacaucgcccuggacagcggcugcggguccugggacugcaucaugaccagcuaccaguaccucaucauccagaacaccaccugggaggaccacugccaguucucccgccccagccccaucggcuaccuggggcugcucagccagcggacgcgcgacaucuacaucucccggcgccggcgcggcaccuucaccuggacccugagcgacuccgagggcaacgagacgcccgggggcuacugccugacccgguggaugcucaucgaggccgagcugaagugcuucgggaacaccgccguggccaagugcaacgagaagcacgacgaggaguucugcgacaugcugcgccucuucgacuucaacaagcaggcgauccggcgccugaaggccccggcccagaugagcauccagcugaucaacaaggccgugaacgcccucaucaacgaccagcugaucaugaagaaccaccuccgggacaucaugugcauccccuacugcaacuacuccaaguacugguaccugaaccacaccgucacgggccgcaccagccugccccggugcuggcugguguccaacgggagcuaccucaacgagacccacuucuccgacgacaucgagcagcaggcggacaacaugaucaccgagcugcugcagaaggaguacaucgaccgccagggcaagacgccgcucggccugguggaccuguucgucuucagcaccuccuucuaccucaucagcaucuuccugcaccuggugaagauccccacccaccggcacaucaucgggaagcccugccccaagccgcaccgccugaaccacaugggcaucugcuccugcgggcucuacaagcaccccggcgugcccgucaaguggaagcggugaggacuagucccuguucccagagcccacuuuuuuuucuuuuuuugaaauaaaauagccugucuuucagaucuaaaaaaaaaaaaaaaaaaaaaaaaaaaaaaaaaaaaaaaaaaaaaaaaaaaaaaaaaaaaaaaaugcaucccccccccccccccccccccccccccccccaaaggcucuuuucagagccaccagaauu

SEQ ID NO: 6479 - RNA, 1768 nt, Artificial Sequence
  mRNA product Design a-2 comprising derived and/or modified sequence from LASV(LASV254-NIG-2011;Clade II)__AIT17674__GPCstabilized (opt1)
gggagaguccgcucagccagguugcagaagcggcuuagcguguguccuaaucuucucucugcguguagguaggccugugccgcaaacaagcuuaccaugggccagaucaucaccuucuuccaggaggugccccacgucaucgaggaggugaugaacaucgugcugaucgcccucagccugcuggccauccucaaggggaucuacaacgucgcgaccugcggccuguucgggcugguguccuuccuccugcugugcggccgcagcugcuccacgaccuacaaggggguguacgagcuccagacccuggagcuggacaugaccaaccucaacaugacgaugccgcugagcugcaccaagaacaacucccaccacuacaucauggucggcaacgagaccggccuggagcucacccugacgaacaccagcaucaucaaccacaaguucugcaaccuguccgacgcccacaagaagaaccucuacaaccacgcccugaugagcaucaucuccaccuuccaccugagcauccccaacuucaaccaguacgaggccauguccugcgacuucaacgggggcaagaucagcgugcaguacaaccucucccacagcuacgccguggacgcggccaaccacugcgggaccaucgccaacggcguccugcagacguucaugcggauggccuggggcggguccuacaucgcgcuggacagcggcugcgggaacugggacugcaucaugaccuccuaccaguaccucaucauccagaacaccaccugggaggaccacugccaguucagccgccccucccccaucggcuaccuggggcugcucagccagcggacgcgcgacaucuacaucagccggcgccggcgcggcaccuucaccuggacccuguccgacagcgagggcaacgagacgcccgggggcuacugccugacccgguggaugcucaucgaggccgagcugaagugcuucgggaacaccgccguggccaagugcaacgagaagcacgacgaggaguucugcgacaugcugcgccucuucgacuucaacaagcaggccauccggcgccugaagaccccggcgcaggccaacauccagcugaucaacaaggccgugaacgcccucaucaacgaccagcugaucaugaagaaccaccuccgggacaucaugugcauccccuacugcaacuacuccaaguacugguaccugaaccacacggucaccggcaagaccagccugccccgcugcuggcugguguccaacgggagcuaccucaacgagacccacuucuccgacgacaucgagcagcaggccgacaacaugaucacggagcugcugcagaaggaguacauggaccggcagggcaagaccccgcucggccugguggaccuguucgucuucagcaccuccuucuaccucaucagcaucuuccugcaccuggugaagauccccacccaccgccacgugaucgggaagcccugccccaagccgcaccggcugaaccacaugggcaucugcuccugcgggcucuacaagcaccccggcguccccgugaaguggaagcgcugaggacuagucccuguucccagagcccacuuuuuuuucuuuuuuugaaauaaaauagccugucuuucagaucuaaaaaaaaaaaaaaaaaaaaaaaaaaaaaaaaaaaaaaaaaaaaaaaaaaaaaaaaaaaaaaaaugcaucccccccccccccccccccccccccccccccaaaggcucuuuucagagccaccagaauu

SEQ ID NO: 6480 - RNA, 1768 nt, Artificial Sequence
  mRNA product Design a-2 comprising derived and/or modified sequence from LASV(Nig08-A19;Clade III)__ADU56618__GPCstabilized (opt1)
gggagaguccgcucagccagguugcagaagcggcuuagcguguguccuaaucuucucucugcguguagguaggccugugccgcaaacaagcuuaccaugggccagaucgugaccuucuuccaggaggucccccacgugaucgaggaggugaugaacaucguccugaucgcccucagcauccuggccauccugaaggggcucuacaacaucgcgaccugcggccugaucgggcuggugacguuccuccugcuguccggccgcagcugcuccaugaccuacaaggggguguacgagcuccagacccuggagcugaacaugaacacccucaacaugacgaugccgcugagcugcaccaagaacaacucccaccacuacaucauggucggcaacgagaccggccuggagcucacccugacgaacaccagccugcuccaccacaaguucugcaaccuguccgacgcccacaagaagaaccuguacgaccacacccucaugagcaucaucuccaccuuccaccugagcauccccaacuucaaccaguacgaggccauguccugcgacuucaacgggggcaagaucacggugcaguacaaccugagccacuccuacgccaucgacgccgcgaaccacugcgggaccguggccaacggcguccuccagaccuucaugcggauggccuggggcgggagcuacaucgcccuggacuccggcugcgggaagugggacugcaucaugaccagcuaccaguaccugaucauccagaacacgaccugggaggaccacugccaguucucccgccccagccccaucggcuaccucgggcugcugucccagcggacccgcgacaucuacaucagccggcgccggcgcggcaccuucacguggacccucagcgacuccgagggcaacgagacccccgggggcuacugccugacccgguggaugcugaucgaggcggagcucaagugcuucgggaacacggccguggccaagugcaacgagaagcacgacgaggaguucugcgacaugcugcgccuguucgacuucaacaagcaggccauccggcgccucaaggccccggcgcagaugagcauccagcugaucaacaaggccgugaacgcccugaucaacgaccagcucaucaugaagaaccaccuccgggacaucaugugcauccccuacugcaacuacuccaaguacugguaccugaaccacaccagcaccggccgcaccucccugccccggugcuggcuggucagcaacggguccuaccugaacgagacgcacuucagcgacgacaucgagcagcaggccgacaacaugaucaccgagaugcuccagaaggaguaccuggaccgccagggcaagaccccgcugggccucguggaccuguucguguucuccaccagcuucuaccugaucuccaucuuccugcaccucgucaagauccccacgcaccggcacaucguggggaagcccugccccaagccgcaccgccugaaccacaugggcaucugcagcugcgggcuguacaagcagcccggcgugcccguccgguggaagcgcugaggacuagucccuguucccagagcccacuuuuuuuucuuuuuuugaaauaaaauagccugucuuucagaucuaaaaaaaaaaaaaaaaaaaaaaaaaaaaaaaaaaaaaaaaaaaaaaaaaaaaaaaaaaaaaaaaugcaucccccccccccccccccccccccccccccccaaaggcucuuuucagagccaccagaauu

SEQ ID NO: 6481 - RNA, 1771 nt, Artificial Sequence
  mRNA product Design a-2 comprising derived and/or modified sequence from LASV(G1180-SLE-2010;Clade IV)__AIT17168__GPCstabilized (opt1)
gggagaguccgcucagccagguugcagaagcggcuuagcguguguccuaaucuucucucugcguguagguaggccugugccgcaaacaagcuuaccaugggccagaucgugaccuucuuccaggaggucccccacgugaucgaggaggugaugaacaucguccugaucgcccucagcauccuggccgugcugaaggggcucuacaacuucgcgaccugcggccugguggggcugcucacguuccugcugcucugcggccgcuccugcaccgccagccgguacaagggggucuacgagcugcagacccuggagcucaacauggagacccugaacaugacgaugccgcuguccugcaccaagaacaacagccaccacuacaucauggugggcaacgagaccggccucgagcugacccugacgaacaccuccaucaucaaccacaaguucugcaaccucagcgacgcccacaagaagaaccuguacgaccacgcccugauguccaucaucagcaccuuccaccucuccauccccaacuucaaccaguacgaggccaugagcugcgacuucaacgggggcaagaucuccgugcaguacaaccugagccacuccuacgcgggggacgccgccaaccacugcggcaccgucgccaacggggugcugcagacguucaugcgcauggcguggggcggcagcuacaucgcccucgacuccgggugcggcagcugggacugcaucaugaccuccuaccaguaccugaucauccagaacaccaccugggaggaccacugccaguucagccggcccucccccaucggguaccugggccuccugagccagcgcacgcgggacaucuacaucagccgccggcgccggggcaccuucaccuggacccuguccgacagcgaggggaaggacacgccgggcggguacugccucacccgcuggaugcugaucgaggccgagcugaagugcuucggcaacaccgccguggccaagugcaacgagaagcacgacgaggaguucugcgacaugcuccggcuguucgacuucaacaagcaggcgauccagcgccugaaggcccccgcccagauguccauccagcucaucaacaaggccgucaacgcccugaucaacgaccagcugaucaugaagaaccaccuccgggacaucaugugcauccccuacugcaacuacagcaaguacugguaccugaaccacaccacgaccgggaagaccucccugcccaagugcuggcucgugagcaacggcuccuaccugaacgagacccacuucagcgacgacaucgagcagcaggcggacaacaugaucacggagaugcugcagaaggaguacauggagcgccagggcaagaccccgcucgggcugguggaccuguucgucuucuccaccagcuucuaccucaucuccaucuuccugcaccuggugaagauccccacccaccggcacaucgugggcaagagcugccccaagccccaccgccugaaccacauggggaucugcuccugcggccucuacaagcagccggggguccccgugaaguggaagcggugaggacuagucccuguucccagagcccacuuuuuuuucuuuuuuugaaauaaaauagccugucuuucagaucuaaaaaaaaaaaaaaaaaaaaaaaaaaaaaaaaaaaaaaaaaaaaaaaaaaaaaaaaaaaaaaaaugcaucccccccccccccccccccccccccccccccaaaggcucuuuucagagccaccagaauu

SEQ ID NO: 6482 - RNA, 1771 nt, Artificial Sequence
  mRNA product Design a-2 comprising derived and/or modified sequence from LASV(G1442-SLE-2011;Clade IV)__AIT17180__GPCstabilized (opt1)
gggagaguccgcucagccagguugcagaagcggcuuagcguguguccuaaucuucucucugcguguagguaggccugugccgcaaacaagcuuaccaugggccagaucgugaccuucuuccaggaggucccccacgugaucgaggaggugaugaacaucguccugaucgcccucagcauccuggccgugcugaaggggcucuacaacguggcgaccugcggccugaucgggcuggucacguuccuccugcugugcggccgcuccugcaccaccacccucuacaaggggguguacgagcugcagacgcuggagcucaacauggagacccugaacaugaccaugccgcugagcugcaccaagaacaacucccaccacuacauccgggugggcaacgagacgggccucgagcugacccugaccaacaccagcaucaucaaccacaaguucugcaaccucuccgacgcccacaagaagaaccuguacgaccacgcccugaugagcaucaucuccacguuccaccucagcauccccaacuucaaccaguacgaggccauguccugcgacuucaacgggggcaagaucagcguccaguacaaccugucccacagcuacgccggggacgcggccaaccacugcggcaccguggccaacggggugcugcagaccuucaugcgcauggccuggggcggcuccuacaucgcgcucgacagcgggugcggcaacugggacugcaucaugaccuccuaccaguaccugaucauccagaacacgaccugggacgaccacugccaguucagccggcccucccccaucggguaccugggccuccugagccagcgcacccgggacgucuacaucucccgccggcgccggggcaccuucacguggacccugagcgacagcgaggggaaggacaccccgggcggguacugccucacccgcuggaugcugaucgaggccgagcugaagugcuucggcaacacggccguggccaagugcaacgagaagcacgacgaggaguucugcgacaugcuccggcuguucgacuucaacaagcaggccauccagcgccugaaggcgcccgcccagauguccauccagcucaucaacaaggccgugaacgcccugaucaacgaccagcugaucaugaagaaccaccuccgggacaucaugugcauccccuacugcaacuacagcaaguacugguaccugaacaacaccgccaccgggaagaccucccugcccaagugcuggcucaucagcaacggcuccuaccugaacgagacgcacuucagcgacgacaucgagcaggaggcggacaacaugaucaccgagaugcugcagaaggaguacauggagcgccagggcaagaccccgcucgggcuggucgaccuguucguguucuccaccagcuucuaccucaucuccaucuuccugcaccuggugaagauccccacgcaccggcacaucgucggcaagagcugccccaagccccaccgccugaaccacauggggaucugcuccugcggccucuacaagcagccgggggugcccgugcgguggaagcgcugaggacuagucccuguucccagagcccacuuuuuuuucuuuuuuugaaauaaaauagccugucuuucagaucuaaaaaaaaaaaaaaaaaaaaaaaaaaaaaaaaaaaaaaaaaaaaaaaaaaaaaaaaaaaaaaaaugcaucccccccccccccccccccccccccccccccaaaggcucuuuucagagccaccagaauu

SEQ ID NO: 6483 - RNA, 1771 nt, Artificial Sequence
  mRNA product Design a-2 comprising derived and/or modified sequence from LASV(G3010-SLE-2013;Clade IV)__AIT17344__GPCstabilized (opt1)
gggagaguccgcucagccagguugcagaagcggcuuagcguguguccuaaucuucucucugcguguagguaggccugugccgcaaacaagcuuaccaugggccagaucgugaccuucuuccaggaggucccccacgugaucgaggaggugaugaacaucguccugaucgcccucagcauccuggccgugcugaaggggcucuacaacuucgcgaccugcggccugguggggcuggucacguuccuccugcugugcggccgcuccugcaccaccagccucuacaaggggguguacgagcugcagacccuggagcucaacauggagacgcugaacaugaccaugccgcuguccugcaccaagaacaacagccaccacuacaucauggugggcaacgagaccggccucgagcugacgcugaccaacaccuccaucaucaaccacaaguucugcaaccucagcgacgcccacaagaagaaccuguacaaccacgcccugauguccaucaucagcaccuuccaccucuccauccccaacuucaaccaguacgaggccaugagcugcgacuucaacgggggcaagaucuccguccaguacaaccugagccacuccuacgccggggacgcggccagccacugcggcacgguggccaacggggugcugcagaccuucaugcggauggccuggggcggcuccuacaucgcgcucgacagcgggugcggcaagugggacugcaucaugaccuccuaccaguaccugaucauccagaacaccacgugggaggaccacugccaguucagccgccccucccccaucggguaccugggccuccugagccagcggacccgcgacaucuacaucagccggcgccggcgcggcaccuucaccuggacgcuguccgacagcgaggggaaggacaccccgggcggguacugccucacccgguggaugcugaucgaggccgagcugaagugcuucggcaacaccgccgucgccaagugcaacgagaagcacgacgaggaguucugcgacaugcuccgccuguucgacuucaacaagcaggccauccagcggcugaagacgcccgcgcagauguccauccagcucaucaacaaggccgugaacgcccugaucaacgaccagcugaucaugaagaaccaccuccgcgacaucaugugcauccccuacugcaacuacagcaaguacugguaccugaaccacaccaccaccgggaagacgucccugcccaagugcuggcucgugagcaacggcuccuaccugaacgagacccacuucagcgacgacaucgagcagcaggccgacaacaugaucaccgagaugcugcagaaggaguacauggagcggcagggcaagaccccgcucgggcuggucgaccuguucguguucuccacgagcuucuaccucaucuccaucuuccugcaccuggugaagauccccacccaccgccacaucgucggcaagagcugccccaagccccaccggcugaaccacauggggaucugcuccugcggccucuacaagcagccgggggugcccgugcgcuggaagcggugaggacuagucccuguucccagagcccacuuuuuuuucuuuuuuugaaauaaaauagccugucuuucagaucuaaaaaaaaaaaaaaaaaaaaaaaaaaaaaaaaaaaaaaaaaaaaaaaaaaaaaaaaaaaaaaaaugcaucccccccccccccccccccccccccccccccaaaggcucuuuucagagccaccagaauu

SEQ ID NO: 6484 - RNA, 1771 nt, Artificial Sequence
  mRNA product Design a-2 comprising derived and/or modified sequence from LASV(G502-SLE-2009;Clade IV)__AIT17126__GPCstabilized (opt1)
gggagaguccgcucagccagguugcagaagcggcuuagcguguguccuaaucuucucucugcguguagguaggccugugccgcaaacaagcuuaccaugggccagaucgugaccuucuuccaggaggucccccacgugaucgaggaggugaugaacaucguccugaucgcccucagcauccuggccgugcugaaggggcucuacaacuucgcgaccugcggccugguggggcugcucacguuccugcugcucugcggccgcuccugcaccaccgggcuguacaagggcgucuacgagcugcagacccucgagcugaacauggagacgcugaacaugaccaugccgcucagcugcaccaagaacaacucccaccacuacaucauggugggcaacgagaccgggcuggagcugacgcucaccaacaccagcaucaucaaccacaaguucugcaaccuguccgacgcccacaagaagaaccuguacgaccacgcccucaugagcaucaucuccaccuuccaccugagcauccccaacuucaaccaguacgaggccauguccugcgacuucaacggcgggaagaucagcgugcaguacaaccugucccacagcuacgccggcgacgcggccgaccacugcgggacggucgccaacggcgugcuccagaccuucaugcggauggccuggggcggguccuacaucgcgcuggacagcggcugcgggcgcugggacugcaucaugaccuccuaccaguaccugaucauccagaacaccacgugggaggaccacugccaguucagccggcccucccccaucggcuaccucggccugcugagccagcgcacccgggacaucuacaucucccgccggcgccgggggaccuucaccuggacgcucagcgacagcgagggcaaggacacccccgggggcuacugccugacccgcuggaugcugaucgaggccgagcucaagugcuucgggaacaccgccguggccaagugcaacgagaagcacgacgaggaguucugcgacaugcugcggcuguucgacuucaacaagcaggccauccagcgccucaaggcgccggcccagauguccauccagcugaucaacaaggccgucaacgcccugaucaacgaccagcucgugaugaagaaccaccuccgggacaucaugugcauccccuacugcaacuacagccgcuacugguaccugaaccacacgaccaccggccggaccucccugcccaagugcuggcuggugagcaacggcuccuaccugaacgagacgcacuucagcgacgacaucgagcagcaggccgacaacaugaucaccgagaugcuccagaaggaguacauggagcgccaggggaagaccccgcugggccuggucgaccucuucguguucuccaccagcuucuaccugaucuccaucuuccugcaccuggugaagauccccacgcaccggcacaucgucggcaagagcugccccaagccccaccgccucaaccacauggggaucugcuccugcgggcuguacaagcagccgggcgugcccgugaaguggaagcggugaggacuagucccuguucccagagcccacuuuuuuuucuuuuuuugaaauaaaauagccugucuuucagaucuaaaaaaaaaaaaaaaaaaaaaaaaaaaaaaaaaaaaaaaaaaaaaaaaaaaaaaaaaaaaaaaaugcaucccccccccccccccccccccccccccccccaaaggcucuuuucagagccaccagaauu

SEQ ID NO: 6485 - RNA, 1771 nt, Artificial Sequence
  mRNA product Design a-2 comprising derived and/or modified sequence from LASV(G733-SLE-2010;Clade IV)__AIT17154__GPCstabilized (opt1)
gggagaguccgcucagccagguugcagaagcggcuuagcguguguccuaaucuucucucugcguguagguaggccugugccgcaaacaagcuuaccaugggccagaucgugaccuucuuccaggaggucccccacgugaucgaggaggugaugaacaucguccugaucgcccucagcauccuggccgugcugaaggggcucuacaacuucgcgaccugcggcaucguggggcuggucuccuuccugcuccugugcggccgcagcugcacgaccucccuguacaaggggguguacgagcuccagacccuggagcugaacauggagacccucaacaugacgaugccgcugagcugcaccaagaacaacucccaccacuacaucauggugggcaacgagaccggccuggagcucacccugacgaacaccagcaucaucaaccacaaguucugcaaccuguccgacgcccacaagaagaaccucuacgaccacgcccugaugagcaucaucuccaccuuccaccugagcauccccaacuucaaccaguacgaggccauguccugcgacuucaacgggggcaagaucagcguccaguacaaccucucccacagcuacgccggggacgcggccaaccacugcggcaccaucgccaacggggugcugcagacguucaugcggauggccuggggcggcuccuacaucgcgcuggacagcgggugcgaccgcugggacugcaucaugaccuccuaccaguaccucaucauccagaacaccaccugggaggaccacugccaguucagccggcccucccccaucggcuaccuggggcugcucagccagcgcacgcgggacaucuacaucagccgccggcgccggggcaccuucaccuggacccuguccgacagcgagggcaaggacacgcccgggggcuacugccugacccgcuggaugcucaucgaggccgagcugaagugcuucgggaacaccgccguggccaagugcaacgagaagcacgacgaggaguucugcgacaugcugcggcuguucgacuucaacaagcaggccauccagcgccugaaggcgccggcccagauguccauccagcugaucaacaaggccgucaacgcccucaucaacgaccagcugaucaugaagaaccaccuccgggacaucaugugcauccccuacugcaacuacagcaaguacugguaccucaaccacaccacgaccggcaagaccucccugcccaagugcuggcuggugagcaacggguccuaccucaacgagacccacuucagcgacgacaucgagcagcaggccgacaacaugaucacggagaugcugcagaaggaguacauggagcgccagggcaagaccccgcugggccucguggaccuguucgucuucuccaccagcuucuaccugaucuccaucuuccuccaccuggugaagauccccacccaccggcacguggucggcaagagcugccccaagccccaccgccugaaccacauggggaucugcuccugcgggcuguacggccagccgggggugcccgugaaguggaagcggugaggacuagucccuguucccagagcccacuuuuuuuucuuuuuuugaaauaaaauagccugucuuucagaucuaaaaaaaaaaaaaaaaaaaaaaaaaaaaaaaaaaaaaaaaaaaaaaaaaaaaaaaaaaaaaaaaugcaucccccccccccccccccccccccccccccccaaaggcucuuuucagagccaccagaauu

SEQ ID NO: 6486 - RNA, 1771 nt, Artificial Sequence
  mRNA product Design a-2 comprising derived and/or modified sequence from MOPV/LASV reassortant(IGS-1;Clade IV)__AFY05576__GPCstabilized (opt1)
gggagaguccgcucagccagguugcagaagcggcuuagcguguguccuaaucuucucucugcguguagguaggccugugccgcaaacaagcuuaccaugggccagaucgugaccuucuuccaggaggucccccacgugaucgaggaggugaugaacaucguccugaucgcccucagcgugcuggccgugcugaaggggcucuacaacuucgcgaccugcggccuggucgggcuggugacguuccuccugcugugcggccgcuccugcaccaccagccucuacaaggggguguacgagcugcagacccuggagcucaacauggagacgcugaacaugaccaugccgcuguccugcaccaagaacaacagccaccacuacaucauggucggcaacgagaccggccucgagcugacgcugaccaacaccuccaucaucaaccacaaguucugcaaccucagcgacgcccacaagaagaaccuguacgaccacgcccugauguccaucaucagcaccuuccaccucuccauccccaacuucaaccaguacgaggccaugagcugcgacuucaacgggggcaagaucuccgugcaguacaaccugagccacuccuacgccggggacgcggccaaccacugcggcacgguggccaacgggguccugcagaccuucaugcggauggccuggggcggcagcuacaucgcgcucgacuccgggugcggcaacugggacugcaucaugaccagcuaccaguaccugaucauccagaacaccacgugggaggaccacugccaguucucccgccccagccccaucggguaccugggccuccugucccagcggacccgcgacaucuacaucagccggcgccggcgcggcaccuucaccuggacgcugagcgacuccgagggggaggacaccccgggcggguacugccucacccgguggaugcugaucgaggccgagcugaagugcuucggcaacaccgccguggccaagugcaacgagaagcacgacgaggaguucugcgacaugcuccgccuguucgacuucaacaagcaggccauccagcggcugaaggcgcccgcccagaugagcauccagcucaucaacaaggccgugaacgcccugaucaacgaccagcugaucaugaagaaccaccuccgcgacaucaugugcauccccuacugcaacuacuccaaguacugguaccugaaccacacgaccaccgggcggaccagccugcccaagugcuggcucgucuccaacggcagcuaccugaacgagacgcacuucuccgacgacaucgagcagcaggccgacaacaugaucaccgagaugcugcagaaggaguacauggagcgccagggcaagaccccgcucgggcugguggaccuguucguguucagcaccuccuucuaccucaucagcaucuuccugcaccuggucaagauccccacgcaccggcacaucgugggcaaguccugccccaagccccaccgccugaaccacauggggaucugcagcugcggccucuacaagcagccgggggugcccgucaaguggaagcggugaggacuagucccuguucccagagcccacuuuuuuuucuuuuuuugaaauaaaauagccugucuuucagaucuaaaaaaaaaaaaaaaaaaaaaaaaaaaaaaaaaaaaaaaaaaaaaaaaaaaaaaaaaaaaaaaaugcaucccccccccccccccccccccccccccccccaaaggcucuuuucagagccaccagaauu

SEQ ID NO: 6487 - RNA, 1771 nt, Artificial Sequence
  mRNA product Design a-2 comprising derived and/or modified sequence from LASV(LM765-SLE-2012;Clade IV)__AIT17814__GPCstabilized (opt1)
gggagaguccgcucagccagguugcagaagcggcuuagcguguguccuaaucuucucucugcguguagguaggccugugccgcaaacaagcuuaccaugggccagaucgugaccuucuuccaggaggucccccacgugaucgaggaggugaugaacaucguccugaucgcccucagcauccuggccgugcugaaggggcucuacaacuucgcgaccugcggccugguggggcuggucacguuccuccugcugugcggccgcuccugcaccaccagccucuacaaggggguguacgagcugcagacccuggagcucaacauggagacgcugaacaugaccaugccgcuguccugcaccaagaacaacagccaccacuacaucauggugggcaacgagaccggccucgagcugacgcugaccaacaccuccaucaucgaccacaaguucugcaaccucagcgacgcccaccggaagaaccuguacgaccacgcccugauguccaucaucagcaccuuccaccucuccauccccaacuucaaccaguacgaggccaugagcugcgacuucaacgggggcaagaucuccguccaguacaaccugagccacuccuacgccaaggacgcggccgaccacugcgggacgguggccaacggcgugcugcagaccuucaugcgcauggccuggggcgggagcuacaucgcgcucgacuccggcugcgggcggugggacugcaucaugaccagcuaccaguaccugaucauccagaacaccacgugggaggaccacugccaguucucccgccccagccccaucggcuaccuggggcuccugucccagcggacccgcgacaucuacaucagccggcgccggcgcggcaccuucaccuggacgcugagcgacuccgagggcaaggacacccccgggggcuacugccucacccgguggaugcugaucgaggccgagcugaagugcuucgggaacaccgccgucgccaagugcaacgagaagcacgacgaggaguucugcgacaugcuccgccuguucgacuucaacaagcaggccauccagcggcugaaggcgccggcccagaugagcauccagcucaucaacaaggccgugaacgcccugaucaacgaccagcugaucaugaagaaccaccuccgcgacaucaugugcauccccuacugcaacuacuccaaguacugguaccugaaccacacgaccaccggcaagaccagccugcccaagugcuggcucguguccaacgggagcuaccugaacgagacgcacuucuccgacgacaucgagcagcaggccgacaacaugaucaccgagaugcugcagaaggaguacauggagcggcagggcaagaccccgcucggccuggucgaccuguucguguucagcaccuccuucuaccucaucagcaucuuccugcaccuggugaagauccccacgcaccgccacaucgucgggaagcccugccccaagccgcaccggcugaaccacaugggcaucugcuccugcgggcucuacaagcagcccggcgugcccgugaaguggaagcgcugaggacuagucccuguucccagagcccacuuuuuuuucuuuuuuugaaauaaaauagccugucuuucagaucuaaaaaaaaaaaaaaaaaaaaaaaaaaaaaaaaaaaaaaaaaaaaaaaaaaaaaaaaaaaaaaaaugcaucccccccccccccccccccccccccccccccaaaggcucuuuucagagccaccagaauu

SEQ ID NO: 6488 - RNA, 1771 nt, Artificial Sequence
  mRNA product Design a-2 comprising derived and/or modified sequence from LASV(LM776-SLE-2012;Clade IV)__AIT17824__GPCstabilized (opt1)
gggagaguccgcucagccagguugcagaagcggcuuagcguguguccuaaucuucucucugcguguagguaggccugugccgcaaacaagcuuaccaugggccagaucgugaccuucuuccaggaggucccccacgugaucgaggaggugaugaacaucguccugaucgcccucagcauccuggccgugcugaaggggcucuacaacuucgcgaccugcggccugguggggcuggucacguuccuccugcugugcggccgcuccugcaccaccagcguguacaaggggguguacgagcuccagacccuggagcugaacauggagacgcucaacaugaccaugccgcuguccugcaccaagaacaacagccaccacuacaucauggucggcaacgagaccggccuggagcucacgcugaccaacaccuccaucaucaaccacaaguucugcaaccugagcgacgcccacaagaagaaccucuacgaccacgcccugauguccaucaucagcaccuuccaccuguccauccccaacuucaaccaguacgaggccaugagcugcgacuucaacgggggcaagaucuccgugcaguacaaccucagccacuccuacgccggggacgcggccaaccacugcggcacgguggccaacgggguccugcagaccuucaugcggauggccuggggcggcagcuacaucgcgcuggacuccgggugcggcaagugggacugcaucaugaccagcuaccaguaccucaucauccagaacaccacgugggaggaccacugccaguucucccgccccagccccaucggguaccugggccugcucucccagcggacccgcgacaucuacaucagccggcgccggcgcggcaccuucaccuggacgcugagcgacuccgaggggaaggacaccccgggcggguacugccugacccgguggaugcucaucgaggccgagcugaagugcuucggcaacaccgccguggccaagugcaacgagaagcacgacgaggaguucugcgacaugcugcgccucuucgacuucaacaagcaggccauccagcggcugaaggcgcccgcccagaugagcauccagcugaucaacaaggccgugaacgcccucaucaacgaccagcugaucaugaagaaccaccuccgcgacaucaugugcauccccuacugcaacuacuccaaguacugguaccugaaccacacgaccaccgggaagaccagccugcccaagugcuggcuggucuccaacggcagcuaccucaacgagacgcacuucuccgacgacaucgagcagcaggccgacaacaugaucaccgagaugcugcagaaggaguacauggagcggcagggcaagaccccgcuggggcucguggaccuguucguguucagcaccuccuucuaccugaucagcaucuuccuccaccuggucaagauccccacgcaccgccacaucgugggcaaguccugccccaagccccaccggcugaaccacauggggaucugcagcugcggccuguacaagcagccgggggugcccguccgcuggaagcggugaggacuagucccuguucccagagcccacuuuuuuuucuuuuuuugaaauaaaauagccugucuuucagaucuaaaaaaaaaaaaaaaaaaaaaaaaaaaaaaaaaaaaaaaaaaaaaaaaaaaaaaaaaaaaaaaaugcaucccccccccccccccccccccccccccccccaaaggcucuuuucagagccaccagaauu

SEQ ID NO: 6489 - RNA, 1771 nt, Artificial Sequence
  mRNA product Design a-2 comprising derived and/or modified sequence from LASV(Mad39;Clade IV)__ANH09722__GPCstabilized (opt1)
gggagaguccgcucagccagguugcagaagcggcuuagcguguguccuaaucuucucucugcguguagguaggccugugccgcaaacaagcuuaccaugggccagaucgugaccuucuuccaggaggucccccacgugaucgaggaggugaugaacaucguccugaucgcccucagcauccuggccgugcugaaggggcucuacaacguggcgaccugcggccugaucgggcuggucacguuccuccugcugugcggccgcuccugcaccaccacccucuacaaggggguguacgagcugcaggcccuggagcucaacauggagacgcugaacaugaccaugccgcugagcugcaccaagaacaacucccaccacuacauccgggugggcaacgagaccggccucgagcugacgcugaccaacaccagccucaucaaccacaaguucugcaaccuguccgacgcccacaagaagaaccuguacgaccacgcccucaugagcaucaucuccaccuuccaccugagcauccccaacuucaaccaguacgaggccauguccugcgacuucaacgacgggaagaucagcguccaguacaaccugucccacacguacgcgggcgacaccgccaaccacugcgggaccguggccaacggcgugcuccagaccuucaugcgcauggccuggggcgggagcuacaucgcgcuggacuccggcugcgggggcugggacugcaucaugacgagcuaccaguaccugaucauccagaacaccaccugggaggaccacugccaguucucccggcccagccccaucggguaccucggccugcugucccagcgcacccgggacaucuacaucagccgccggcgccggggcacguucaccuggacccucuccgacagcgaggggaaggacaccccgggcggguacugccugacgcgcuggaugcugaucgaggccgagcucaagugcuucggcaacaccgccgucgccaagugcaacgagaagcacgacgaggaguucugcgacaugcugcggcuguucgacuucaacaagcaggccauccagcgccucaaggcgcccgcccagaugagcauccagcugaucaacaaggccgugaacgcccugaucaacgaccagcucaucaugaagaaccaccuccgggacaucaugugcauccccuacugcaacuacuccaaguacugguaccugaaccacaccgugaccgggaagacgagccugcccaagugcuggcuggucuccaacggcagcuaccugaacgagacccacuucuccgacgacaucgagcagcaggccgacaacaugaucaccgagaugcuccagaaggaguacauggagcgccagggcaagaccccgcuggggcugguggaccucuucguguucagcacguccuucuaccugaucagcaucuuccugcaccuggucaagauccccacccaccggcacguggugggcaagcccugccccaagccgcaccgccucaaccacauggggaucugcuccugcggcuucuacaagcagcccgggguccccgugcgguggaagcgcugaggacuagucccuguucccagagcccacuuuuuuuucuuuuuuugaaauaaaauagccugucuuucagaucuaaaaaaaaaaaaaaaaaaaaaaaaaaaaaaaaaaaaaaaaaaaaaaaaaaaaaaaaaaaaaaaaugcaucccccccccccccccccccccccccccccccaaaggcucuuuucagagccaccagaauu

SEQ ID NO: 6490 - RNA, 1771 nt, Artificial Sequence
  mRNA product Design a-2 comprising derived and/or modified sequence from LASV(Z0947-SLE-2011;Clade IV)__AIT17840__GPCstabilized (opt1)
gggagaguccgcucagccagguugcagaagcggcuuagcguguguccuaaucuucucucugcguguagguaggccugugccgcaaacaagcuuaccaugggccagaucgugaccuucuuccaggaggucccccacgugaucgaggaggugaugaacaucguccugaucgcccucagcauccuggccgugcugaaggggcucuacaacuucgcgaccugcggccugguggggcuggucacguuccuccugcugugcggccgcuccugcaccaucagccucuacaaggggguguacgagcugcagacccuggagcucaacauggagacccugaacaugacgaugccgcuguccugcaccaagaacaacagccaccacuacaucauggugggcaacgagaccggccucgagcugacccugacgaacaccuccaucaucaaccacaaguucugcaaccucagcgacgcccacaagaagaaccuguacgaccacgcccugauguccaucaucagcaccuuccaccucuccauccccaacuucaaccaguacgaggccaugagcugcgacuucaacgggggcaagaucuccguccaguacaaccugagccacuccuacgccggggacgcggccaaccacugcggcaccguggccaacggggugcugcagacguucaugcggauggccuggggcggcagcuacaucgcgcucgacuccgggugcgaccgcugggacugcaucaugaccagcuaccaguaccugaucauccagaacaccaccugggaggaccacugccaguucucccggcccagccccaucggcuaccuggggcuccugucccagcgcacgcgggacaucuacaucagccgccggcgccggggcaccuucaccuggacccugagcgacuccgagggcaaggacacgcccgggggcuacugccucacccgcuggaugcugaucgaggccgagcugaagugcuucgggaacaccgccgucgccaagugcaacgagaagcacgacgaggaguucugcgacaugcuccggcuguucgacuucaacaagcaggccauccagcgccugaaggcgccggcccagaugagcauccagcucaucaacaaggccgugaacgcccugaucaacgaccagcugaucaugaagaaccaccuccgggacaucaugugcauccccuacugcaacuacuccaaguacugguaccugaaccacaccacgaccggcaagaccagccugcccaagugcuggcucguguccaacgggagcuaccugaacgagacccacuucuccgacgacaucgagcagcaggccgacaacaugaucacggagaugcugcagaaggaguacauggagcgccagggcaagaccccgcucggccuggucgaccuguucguguucagcaccuccuucuaccucaucagcaucuuccugcaccuggugaagauccccacccaccggcacaucgucgggaagcccugccccaagccgcaccgccugaaccacaugggcaucugcuccugcgggcucuacaagcagcccggcgugcccgugaaguggaagcggugaggacuagucccuguucccagagcccacuuuuuuuucuuuuuuugaaauaaaauagccugucuuucagaucuaaaaaaaaaaaaaaaaaaaaaaaaaaaaaaaaaaaaaaaaaaaaaaaaaaaaaaaaaaaaaaaaugcaucccccccccccccccccccccccccccccccaaaggcucuuuucagagccaccagaauu

SEQ ID NO: 6491 - RNA, 1771 nt, Artificial Sequence
  mRNA product Design a-2 comprising derived and/or modified sequence from LASV(Josiah;Clade IV)__NP_694870__GPCstabilized (opt2)
gggagaguccgcucagccagguugcagaagcggcuuagcguguguccuaaucuucucucugcguguagguaggccugugccgcaaacaagcuuaccaugggccagaucgucaccuucuuccaggaggucccccacgucaucgaggaggucaugaacaucguccucaucgcccucuccguccucgccguccucaagggccucuacaacuucgccaccugcggccucgucggccucgucaccuuccuccuccucugcggccgcuccugcaccaccucccucuacaagggcgucuacgagcuccagacccucgagcucaacauggagacccucaacaugaccaugccccucuccugcaccaagaacaacucccaccacuacaucauggucggcaacgagaccggccucgagcucacccucaccaacaccuccaucaucaaccacaaguucugcaaccucuccgacgcccacaagaagaaccucuacgaccacgcccucauguccaucaucuccaccuuccaccucuccauccccaacuucaaccaguacgaggccauguccugcgacuucaacggcggcaagaucuccguccaguacaaccucucccacuccuacgccggcgacgccgccaaccacugcggcaccgucgccaacggcguccuccagaccuucaugcgcauggccuggggcggcuccuacaucgcccucgacuccggcugcggcaacugggacugcaucaugaccuccuaccaguaccucaucauccagaacaccaccugggaggaccacugccaguucucccgccccucccccaucggcuaccucggccuccucucccagcgcacccgcgacaucuacaucucccgccgccgccggggcaccuucaccuggacccucuccgacuccgagggcaaggacacccccggcggcuacugccucacccgcuggaugcucaucgaggccgagcucaagugcuucggcaacaccgccgucgccaagugcaacgagaagcacgacgaggaguucugcgacaugcuccgccucuucgacuucaacaagcaggccauccagcgccucaaggcccccgcccagauguccauccagcucaucaacaaggccgucaacgcccucaucaacgaccagcucaucaugaagaaccaccuccgcgacaucaugugcauccccuacugcaacuacuccaaguacugguaccucaaccacaccaccaccggccgcaccucccuccccaagugcuggcucgucuccaacggcuccuaccucaacgagacccacuucuccgacgacaucgagcagcaggccgacaacaugaucaccgagaugcuccagaaggaguacauggagcgccagggcaagaccccccucggccucgucgaccucuucgucuucuccaccuccuucuaccucaucuccaucuuccuccaccucgucaagauccccacccaccgccacaucgucggcaaguccugccccaagccccaccgccucaaccacaugggcaucugcuccugcggccucuacaagcagcccggcguccccgucaaguggaagcgcugaggacuagucccuguucccagagcccacuuuuuuuucuuuuuuugaaauaaaauagccugucuuucagaucuaaaaaaaaaaaaaaaaaaaaaaaaaaaaaaaaaaaaaaaaaaaaaaaaaaaaaaaaaaaaaaaaugcaucccccccccccccccccccccccccccccccaaaggcucuuuucagagccaccagaauu

SEQ ID NO: 6492 - RNA, 1768 nt, Artificial Sequence
  mRNA product Design a-2 comprising derived and/or modified sequence from LASV(LP;Clade I)__AAF86701__GPCstabilized (opt2)
gggagaguccgcucagccagguugcagaagcggcuuagcguguguccuaaucuucucucugcguguagguaggccugugccgcaaacaagcuuaccaugggccagaucaucaccuucuuccaggaggucccccacgucaucgaggaggucaugaacaucguccucaucgcccucucccuccucgccauccucaagggccucuacaacaucgccaccugcggcaucaucggccucgucgccuuccucuuccucugcggcaaguccugcucccucacccucaagggcggcuacgagcuccagacccucgagcucaacauggagacccucaacaugaccaugccccucuccugcaccaagaacuccucccaccacuacauccgcgucggcaacgagaccggccucgagcucacccucaccaacaccuccaucaucaaccacaaguucugcaaccucuccgacgcccacaagaagaaccucuacgaccacgcccucauguccaucaucuccaccuuccaccucuccauccccaacuucaaccaguacgaggccauguccugcgacuucaacggcggcaagaucuccguccaguacaaccucucccacuccuacgccggcgacgccgccgagcacugcggcaccgucgccaacggcguccuccagaccuucaugcgcauggccuggggcggccgcuacaucgcccucgacuccggcugcggcaacugggacugcaucaugaccuccuaccaguaccucaucauccagaacaccaccugggaggaccacugccaguucucccgccccucccccaucggcuaccucggccuccucucccagcgcacccgcgacaucuacaucucccgccgccgccggggcaccuucaccuggacccucuccgacuccgagggcaacgagacccccggcggcuacugccucacccgcuggaugcucaucgaggccgagcucaagugcuucggcaacaccgccgucgccaagugcaacgagaagcacgacgaggaguucugcgacaugcuccgccucuucgacuucaacaagcaggccauccgccgccucaaggcccccgcccagauguccauccagcucaucaacaaggccgucaacgcccucaucaacgaccagcucaucaugaagaaccaccuccgcgacaucaugugcauccccuacugcaacuacuccaaguacugguaccucaaccacaccuccuccggccgcaccucccuccccaagugcuggcucaucuccaacggcuccuaccucaacgagacccaguucuccgacgacaucgagcagcaggccgacaacaugaucaccgagaugcuccagaaggaguacaucgagcgccagggcaagaccccccucggccucgucgacaucuucaucuucuccaccuccuucuaccucaucuccaucuuccuccaccucaucaagauccccacccaccgccacaucgucggcaagcccugccccaagccccaccgccucaaccacaugggcgucugcuccugcggccucuacaagcaccccggcguccccaccaaguggaagcgcugaggacuagucccuguucccagagcccacuuuuuuuucuuuuuuugaaauaaaauagccugucuuucagaucuaaaaaaaaaaaaaaaaaaaaaaaaaaaaaaaaaaaaaaaaaaaaaaaaaaaaaaaaaaaaaaaaugcaucccccccccccccccccccccccccccccccaaaggcucuuuucagagccaccagaauu

SEQ ID NO: 6493 - RNA, 1768 nt, Artificial Sequence
  mRNA product Design a-2 comprising derived and/or modified sequence from LASV(803213;Clade II)__AAF86703__GPCstabilized (opt2)
gggagaguccgcucagccagguugcagaagcggcuuagcguguguccuaaucuucucucugcguguagguaggccugugccgcaaacaagcuuaccaugggccagaucaucaccuucuuccaggaggucccccacgucaucgaggaggucaugaacaucguccucaucgcccucucccuccucgccauccucaagggcaucuacaacgucgccaccugcggccucuucggccucaucuccuuccuccuccucugcggccgcuccugcuccgucaccuacaagggcgucuacgagcuccagacccucgagcucaacauggccaaccucaacaugaccaugccccucuccugcaccaagaacaacucccaccacuacaucauggucggcaacgagaccggccucgagcucacccucaccaacaccuccaucaucaaccacaaguucugcaaccucuccgacgcccacaagaagaaccucuacgaccacgcccucauguccaucaucuccaccuuccaccucuccauccccaacuucaaccaguacgaggccauguccugcgacuucaacggcggcaagaucuccguccaguacaaccucucccacuccuucgccgucgacgccgccaaccacugcggcaccaucgccaacggcguccuccagaccuucaugcgcauggccuggggcggcuccuacaucgcccucgacuccggcugcggcaacugggacugcaucaugaccuccuaccaguaccucaucauccagaacaccaccugggaggaccacugccaguucucccgccccucccccaucggcuaccucggccuccucucccagcgcacccgcgacaucuacaucucccgccgccgccggggcaccuucaccuggacccucuccgacuccgagggcaacgaggcccccggcggcuacugccucacccgcuggaugcucaucgaggccgagcucaagugcuucggcaacaccgccgucgccaagugcaacgagaagcacgacgaggaguucugcgacaugcuccgccucuucgacuucaacaagcaggccaucaagcgccucaagacccccgcccagauguccauccagcucaucaacaaggccgucaacgcccucaucaacgaccagcucaucaugaagaaccaccuccgcgacaucaugugcauccccuacugcaacuacucccgcuacugguaccucaaccacaccgucaccggcaagaccucccucccccgcugcuggcucgucuccaacggcuccuaccucaacgagacccacuucuccgacgacaucgagcagcaggccgacaacaugaucaccgagaugcuccagaaggaguacauggaccgccagggcaagaccccccucggccucgucgaccucuucgucuucuccaccuccuucuaccucaucuccaucuuccuccaccucgucaagauccccacccaccgccacaucgucggcaagcccugccccaagccccaccgccucaaccacaugggcaucugcuccugcggccucuacaagcaccccggcguccccgucaaguggaagcgcugaggacuagucccuguucccagagcccacuuuuuuuucuuuuuuugaaauaaaauagccugucuuucagaucuaaaaaaaaaaaaaaaaaaaaaaaaaaaaaaaaaaaaaaaaaaaaaaaaaaaaaaaaaaaaaaaaugcaucccccccccccccccccccccccccccccccaaaggcucuuuucagagccaccagaauu

SEQ ID NO: 6494 - RNA, 1768 nt, Artificial Sequence
  mRNA product Design a-2 comprising derived and/or modified sequence from LASV(GA391;Clade III)__CAA36645__GPCstabilized (opt2)
gggagaguccgcucagccagguugcagaagcggcuuagcguguguccuaaucuucucucugcguguagguaggccugugccgcaaacaagcuuaccaugggccagaucgucaccuucuuccaggaggucccccacgucaucgaggaggucaugaacaucguccucaucgcccucuccauccucgccauccucaagggccucuacaacgucgccaccugcggccucaucggccucgucaccuuccuccuccucuccggccgcuccugcucccucaucuacaagggcaccuacgagcuccagacccucgagcucaacauggagacccucaacaugaccaugccccucuccugcaccaagaacaacucccaccacuacauccgcgucggcaacgagaccggccucgagcucacccucaccaacaccuccauccucaaccacaaguucugcaaccucuccgacgcccacaagcgcaaccucuacgaccacucccucauguccaucaucuccaccuuccaccucuccauccccaacuucaaccaguacgaggccauguccugcgacuucaacggcggcaagaucaccguccaguacaaccucucccacuccuucgccgucgacgccgccggccacugcggcacccucgccaacggcguccuccagaccuucaugcgcauggccuggggcggcuccuacaucgcccucgacuccggcugcggcaacugggacugcaucaugaccuccuaccaguaccucaucauccagaacaccaccugggacgaccacugccaguucucccgccccucccccaucggcuaccucggccuccucucccagcgcacccgcgacaucuacaucucccgccgccgccggggcaccuucaccuggacccucuccgacuccgagggcaacgagacccccggcggcuacugccucacccgcuggaugcucaucgaggccgagcucaagugcuucggcaacaccgccgucgccaagugcaacgagaagcacgacgaggaguucugcgacaugcuccgccucuucgacuucaacaagcaggccauccgccgccucaagacccccgcccagauguccauccagcucaucaacaaggccgucaacgcccucaucaacgaccagcucaucaugaagaaccaccuccgcgacaucaugugcauccccuacugcaacuacucccgcuacugguaccucaaccacaccuccaccggcaagaccucccucccccgcugcuggcucaucuccaacggcuccuaccucaacgagaccaaguucuccgacgacaucgagcagcaggccgacaacaugaucaccgagaugcuccagaaggaguacaucgaccgccagggcaagaccccccucggccucgucgaccucuucgucuucuccaccuccuucuaccucaucuccaucuuccuccaccucgucaagauccccacccaccgccacaucgucggcaagcccugccccaagccccaccgccucaaccacaugggcaucugcuccugcggccucuacaagcagcccggcguccccguccgcuggaagcgcugaggacuagucccuguucccagagcccacuuuuuuuucuuuuuuugaaauaaaauagccugucuuucagaucuaaaaaaaaaaaaaaaaaaaaaaaaaaaaaaaaaaaaaaaaaaaaaaaaaaaaaaaaaaaaaaaaugcaucccccccccccccccccccccccccccccccaaaggcucuuuucagagccaccagaauu

SEQ ID NO: 6495 - RNA, 1771 nt, Artificial Sequence
  mRNA product Design a-2 comprising derived and/or modified sequence from LASV(AV;Clade V)__CCA30314__GPCstabilized (opt2)
gggagaguccgcucagccagguugcagaagcggcuuagcguguguccuaaucuucucucugcguguagguaggccugugccgcaaacaagcuuaccaugggccagaucgucaccuucuuccaggaggucccccacgucaucgaggaggucaugaacaucguccucaucgcccucuccauccucgccguccucaagggccucuacaacaucgccaccugcggccucaucggccucaucaccuuccuccuccucugcggccgcuccugcuccuccaaccucuacaagggcgucuacgagcuccagucccucgaccucaacauggagacccucaacaugaccaugccccucuccugcaccaagaacaacucccaccacuacauccgcgucggcaacgacaccggccucgagcucacccucaccaacaccuccauccucaaccacaaguucugcaaccucuccgacgcccacaagaaggaccucuacgaccacgcccucauguccaucaucuccaccuuccaccucuccauccccaacuucaaccaguacgaggccauguccugcgacuucaacggcggcaagaucuccguccaguacaaccucucccacuccuacgccaucgacgccgccaaccacugcggcaccgucgccaacggcauccuccagaccuucaugcgcauggccuggggcggcuccuacaucgcccucgacuccggcugcggcaacugggacugcaucaugaccuccuaccaguaccucaucauccagaacaccaccugggagaaccacugccaguucucccgccccucccccaucggcuaccucggccuccucucccagcgcacccgcgacaucuacaucucccgccgccgccggggcaccuucaccuggacccucuccgacuccgagggcaacgccacccccggcggcuacugccucacccgcuggaugcucaucgaggccgagcucaagugcuucggcaacaccgccgucgccaagugcaacgagaagcacgacgaggaguucugcgacaugcuccgccucuucgacuucaacaagcaggccaucucccgccucaagucccccgcccagauguccauccagcucaucaacaaggccgucaacgcccucaucaacgaccagcucaucaugaagaaccaccuccgcgacaucaugugcauccccuacugcaacuacuccaaguacugguaccucaaccacaccaucaccggcaagaccucccuccccaagugcuggcucgucuccaacggcuccuaccucaacgagacccacuucuccgacgacaucgagcagcaggccgacaacaugaucaccgagaugcuccagaaggaguacauggagcgccagggcaagaccccccucggccucgucgaccucuucgucuucuccaccuccuucuaccucaucuccaucuuccuccgccucgucaagauccccacccaccgccacaucgucggcaagcccugccccaagccccaccgccucaaccacaugggcaucugcuccugcggccucuacaagcagcccggcguccccguccgcuggaagcgcugaggacuagucccuguucccagagcccacuuuuuuuucuuuuuuugaaauaaaauagccugucuuucagaucuaaaaaaaaaaaaaaaaaaaaaaaaaaaaaaaaaaaaaaaaaaaaaaaaaaaaaaaaaaaaaaaaugcaucccccccccccccccccccccccccccccccaaaggcucuuuucagagccaccagaauu

SEQ ID NO: 6496 - RNA, 1768 nt, Artificial Sequence
  mRNA product Design a-2 comprising derived and/or modified sequence from LASV(Togo/2016/7082;Clade VI)__AMR44577__GPCstabilized (opt2)
gggagaguccgcucagccagguugcagaagcggcuuagcguguguccuaaucuucucucugcguguagguaggccugugccgcaaacaagcuuaccaugggccagaucaucaccuucuuccaggaggucccccacgucaucgaggaggucaugaacaucguccucaucgcccucucccuccucgccauccucaagggcgucuacaacgucgccaccugcggcaucaucggccucgucaccuuccucuuccucugcggccgcuccugcucccucaucuacaagggcuccuacgagcuccagacccucgagcucaacauggagacccucaacaugaccaugccccucuccugcaccaagaacuccucccaccacuacauccgcgucggcaacgagaccggccucgagcucacccucaccaacaccuccaucaucaaccacaaguucugcaaccucuccgacgcccacaagcgcaaccucuacgaccacgcccucauguccauccucuccaccuuccaccucuccauccccaacuucaaccaguacgaggccauguccugcgacuucaacggcggcaagaucuccguccaguacaaccucucccacgccuacgccgucgacgccgccgagcacugcggcaccgucgccaacggcguccuccagaccuucaugcgcauggccuggggcggcuccuacaucgcccucgacuccggcugcggcaacugggacugcaucaugaccuccuaccaguaccucaucauccagaacaccaccugggaggaccacugccaguucucccgccccucccccaucggcuaccucggccuccucucccagcgcacccgcgacaucuacaucucccgccgccgccggggcaccuucaccuggacccucuccgacuccgagggcaacgagacccccggcggcuacugccucacccgcuggaugcucaucgaggccgagcucaagugcuucggcaacaccgccgucgccaagugcaacgagaagcacgacgaggaguucugcgacaugcuccgccucuucgacuucaacaagcaggccauccagcgccucaagucccccgcccagauguccauccagcucaucaacaaggccgucaacgcccucaucaacgaccagcucaucaugaagaaccaccuccgcgacaugaugugcauccccuacugcaacuacuccaaguacugguaccucaaccacaccuccuccggccgcaccucccuccccaagugcuggcucgucuccaacggcuccuaccucaacgagacccacuucuccgacgacaucgagcagcaggccgacaacaugaucaccgagaugcuccagaaggaguacaucgaccgccagggcaagaccccccucggccucgucgaccucuucgucuucuccaccuccuucuaccucaucuccaucuuccuccaccucaucaagauccccacccaccgccacaucgucggcaagcccugccccaagccccaccgccucaaccacaugggcaucugcuccugcggccucuacaagcagcccggcguccccacccgcuggaagcgcugaggacuagucccuguucccagagcccacuuuuuuuucuuuuuuugaaauaaaauagccugucuuucagaucuaaaaaaaaaaaaaaaaaaaaaaaaaaaaaaaaaaaaaaaaaaaaaaaaaaaaaaaaaaaaaaaaugcaucccccccccccccccccccccccccccccccaaaggcucuuuucagagccaccagaauu

SEQ ID NO: 6497 - RNA, 1768 nt, Artificial Sequence
  mRNA product Design a-2 comprising derived and/or modified sequence from LASV(KAK-428;Clade n.d. (VII))__ANH09740__GPCstabilized (opt2)
gggagaguccgcucagccagguugcagaagcggcuuagcguguguccuaaucuucucucugcguguagguaggccugugccgcaaacaagcuuaccaugggccagaucgucaccuucuuccaggaggucccccacgucaucgaggaggucaugaacaucguccucaucgcccucucccuccucgccauccucaagggccucuacaacuucgccaccugcggcgucaucggccucaucaccuuccuccuccucugcggccgcuccugcuccgccaccuacaagggccaguacgagcuccagacccucgagcucaacauggagucccucaacaugaccaugccccucuccugcaccaagaacaacucccaccacuacauccgcgccggcaacaacaccggccucgagcucacccucaccaacaccuccaucaucucccacaaguucugcaaccucuccgacgcccacaagaagaaccucuacgaccacacccucauguccaucaucaccaccuuccaccucuccauccccaacuucaaccaguacgaggccauguccugcgacuucaacggcggcaagaucuccauccaguacaaccucucccacuccuacgccggcgacgccgcccagcacugcggcaccgucgccaacggcguccuccagaccuucaugcgcauggccuggggcggcuccuaccucgcccucgacuccggcugccgcggcugggacugcaucaucuccuccuaccaguaccucaucauccagaacaccaccugggacgaccacugccaguucucccgccccucccccaucggcuaccucggcuucgucucccagaagacccgcgacaucuacaucucccgccgccgccggggcaccuucaccuggacccucuccgacuccgagggccacgacaugcccggcggcuacugccucacccgcuggaugcucaucgaggccgaccucaagugcuucggcaacaccgccgucgccaagugcaacgagaagcacgacgaggaguucugcgacauguggcgccucuucgacuucaacaagcaggccauccagcgccucaaggcccccgcccagaugaacauccagcucaucaacaaggccgucaacgcccucaucaacgaccagcucaugaugaagaaccaccuccgcgacaucaugugcauccccuacugcaacuacuccaaguucugguaccucaacaacaccaccaccggccgcaccucccucccccgcugcuggcucaucuccaacggcuccuaccucaacgagacccacuucuccgacgacaucgagcagcaggccgacaacaugaucaccgagaugcuccagaaggaguacauggaccgccagggcaagaccccccucggccucgucgaccucuucgucuucuccaccuccuucuaccucaucaccaucuuccuccaccucgucaagauccccacccaccgccacaucgucggcaagcccugccccaagccccaccgccucaaccacaugggcaucugcuccugcggccucuacaagcagcccggcguccccguccgcuggaagcgcugaggacuagucccuguucccagagcccacuuuuuuuucuuuuuuugaaauaaaauagccugucuuucagaucuaaaaaaaaaaaaaaaaaaaaaaaaaaaaaaaaaaaaaaaaaaaaaaaaaaaaaaaaaaaaaaaaugcaucccccccccccccccccccccccccccccccaaaggcucuuuucagagccaccagaauu

SEQ ID NO: 6498 - RNA, 1768 nt, Artificial Sequence; identical to SEQ ID NO: 6492
  mRNA product Design a-2 comprising derived and/or modified sequence from LASV(Pinneo-NIG-1969;Clade I)__AIT17836__GPCstabilized (opt2)

SEQ ID NO: 6499 - RNA, 1768 nt, Artificial Sequence
  mRNA product Design a-2 comprising derived and/or modified sequence from LASV(ISTH0009-NIG-2011;Clade II)__AIT17404__GPCstabilized (opt2)
gggagaguccgcucagccagguugcagaagcggcuuagcguguguccuaaucuucucucugcguguagguaggccugugccgcaaacaagcuuaccaugggccagaucaucaccuucuuccaggaggucccccacgucaucgaggaggucaugaacaucguccucaucgcccucucccuccucgccauccucaagggcaucuacaacgucgccaccugcggccucuucggccucgucuccuuccuccuccucugcggccgcuccugcuccaccaccuacaagggcgucuacgagcuccagacccucgagcucgacauggccucccucaacaugaccaugccccucuccugcaccaagaacaacucccaccacuacaucauggucggcaacgagaccggccucgagcucacccucaccaacaccuccaucaucaaccacaaguucugcaaccucuccgacgcccacaagaagaaccucuacgaccacgcccucauguccaucaucuccaccuuccaccucuccauccccaacuucaaccaguacgaggccauguccugcgacuucaacggcggcaagaucuccguccaguacaaccucucccacgccuacgccgucgacgccgccaaccacugcggcaccaucgccaacggcguccuccagaccuucaugcgcauggccuggggcggcuccuacaucgcccucgacuccggcugcggcuccugggacugcaucaugaccuccuaccaguaccucaucauccagaacaccaccugggaggaccacugccaguucucccgccccucccccaucggcuaccucggccuccucucccagcgcacccgcgacaucuacaucucccgccgccgccggggcaccuucaccuggacccucuccgacuccgagggcaacgagacccccggcggcuacugccucacccgcuggaugcucaucgaggccgagcucaagugcuucggcaacaccgccgucgccaagugcaacgagaagcacgacgaggaguucugcgacaugcuccgccucuucgacuucaacaagcaggccauccgccgccucaagacccccgcccagauguccauccagcucaucaacaaggccgucaacgcccucaucaacgaccagcucaucaugaagaaccaccuccgcgacaucaugugcauccccuacugcaacuacuccaaguacugguaccucaaccacaccgucaccggcaagaccucccucccccgcugcuggcucgucuccaacggcuccuaccucaacgagacccacuucuccgacgacaucgagcagcaggccgacaacaugaucaccgagcuccuccagaaggaguacauggaccgccagggcaagaccccccucggccucgucgaccucuucgucuucuccaccuccuucuaccucaucuccaucuuccuccaccucaucaagauccccacccaccgccacaucaccggcaagcccugccccaagccccaccgccucaaccacaugggcaucugcuccugcggccucuacaagcaccccggcguccccgucaaguggaagcgcugaggacuagucccuguucccagagcccacuuuuuuuucuuuuuuugaaauaaaauagccugucuuucagaucuaaaaaaaaaaaaaaaaaaaaaaaaaaaaaaaaaaaaaaaaaaaaaaaaaaaaaaaaaaaaaaaaugcaucccccccccccccccccccccccccccccccaaaggcucuuuucagagccaccagaauu

SEQ ID NO: 6500 - RNA, 1768 nt, Artificial Sequence
  mRNA product Design a-2 comprising derived and/or modified sequence from LASV(ISTH2010-NIG-2012;Clade II)__AIT17482__GPCstabilized (opt2)
gggagaguccgcucagccagguugcagaagcggcuuagcguguguccuaaucuucucucugcguguagguaggccugugccgcaaacaagcuuaccaugggccagaucaucaccuucuuccaggaggucccccacgucaucgaggaggucaugaacaucguccucaucgcccucucccuccucgccauccucaagggcaucuacaacgucgccaccugcggccucuucggccucgucuccuuccuccuccucugcggccgcuccugcuccaccaccuacaagggcgucuacgagcuccagacccucgagcucgacauggccucccucaacaugaccaugccccucuccugcaccaagaacaacucccaccacuacaucauggucggcaacgagaccggccucgagcucacccucaccaacaccuccaucaucaaccacaaguucugcaaccucuccgacgcccacaagaagaaccucuacgaccacgcccucauguccaucaucuccaccuuccaccucuccauccccaacuucaaccaguacgaggccauguccugcgacuucaacggcggcaagaucuccguccaguacaaccucucccacgccuacgccgucgacgccgccaaccacugcggcaccaucgccaacggcguccuccagaccuucaugcgcauggccuggggcggcuccuacaucgcccucgacuccggcugcggcuccugggacugcaucaugaccuccuaccaguaccucaucauccagaacaucaccugggaggaccacugccaguucucccgccccucccccaucggcuaccucggccuccucucccagcgcacccgcgacaucuacaucucccgccgccgccggggcaccuucaccuggacccucuccgacuccgagggcaacgagacccccggcggcuacugccucacccgcuggaugcucaucgaggccgagcucaagugcuucggcaacaccgccgucgccaagugcaacgagaagcacgacgaggaguucugcgacaugcuccgccucuucgacuucaacaagcaggccauccgccgccucaagacccccgcccagauguccauccagcucaucaacaaggccgucaacgcccucaucaacgaccagcucaucaugaagaaccaccuccgcgacaucaugugcauccccuacugcaacuacuccaaguacugguaccucaaccacaccgucaccggcaagaccucccucccccgcugcuggcucgucuccaacggcuccuaccucaacgagacccacuucuccgacgacaucgagcagcaggccgacaacaugaucaccgagcuccuccagaaggaguacaucgaccgccagggcaagaccccccucggccucgucgaccucuucgucuucuccaccuccuucuaccucaucuccaucuuccuccaccucgucaagauccccacccaccgccacgucgucggcaagcccugccccaagccccaccgccucaaccacaugggcaucugcuccugcggccucuacaagcaccccggcguccccgucaaguggaagcgcugaggacuagucccuguucccagagcccacuuuuuuuucuuuuuuugaaauaaaauagccugucuuucagaucuaaaaaaaaaaaaaaaaaaaaaaaaaaaaaaaaaaaaaaaaaaaaaaaaaaaaaaaaaaaaaaaaugcaucccccccccccccccccccccccccccccccaaaggcucuuuucagagccaccagaauu

SEQ ID NO: 6501 - RNA, 1768 nt, Artificial Sequence
  mRNA product Design a-2 comprising derived and/or modified sequence from LASV(Lassa virus/H.sapiens-wt/NGA/2015/ISTH_0543;Clade II)__AVO03639__GPCstabilized (opt2)
gggagaguccgcucagccagguugcagaagcggcuuagcguguguccuaaucuucucucugcguguagguaggccugugccgcaaacaagcuuaccaugggccagaucaucaccuucuuccaggaggucccccacgucaucgaggaggucaugaacaucguccucaucgcccucucccuccucgccauccucaagggcaucuacaacgucgccaccugcggccucuucggccucgucuccuuccuccuccucugcggccgcuccugcuccaccaccuacaagggcgucuacgagcuccagacccucgagcucgacauggccaaccucaacaugaccaugccccucuccugcaccaagaacaacucccaccacuacaucauggucggcaacgagaccggccucgagcucacccucaccaacaccuccaucaucaaccacaaguucugcaaccucuccgacgcccacaagaagaaccucuacgaccacgcccucauguccaucaucuccaccuuccaccucuccauccccaacuucaaccaguacgaggccauguccugcgacuucaacggcggcaagaucuccguccaguacaaccucucccacaccuacgccgucgacgccgccaaccacugcggcaccaucgccaacggcguccuccagaccuucaugcgcauggccuggggcggcuccuacaucgcccucgacuccggcugcggcuccugggacugcaucaugaccuccuaccaguaccucgucauccagaacaccaccugggaggaccacugccaguucucccgccccucccccaucggcuaccucggccuccucucccagcgcacccgcgacaucuacaucucccgccgccgccggggcaccuucaccuggacccucuccgacuccgagggcaacgagacccccggcggcuacugccucacccgcuggaugcucaucgaggccgagcucaagugcuucggcaacaccgccgucgccaagugcaacgagaagcacgacgaggaguucugcgacaugcuccgccucuucgacuucaacaagcaggccauccgccgccucaagacccccgcccagauguccauccagcucaucaacaaggccgucaacgcccucaucaacgaccagcucaucaugaagaaccaccuccgcgacaucaugugcauccccuacugcaacuacuccaaguacugguaccucaaccacaccgucaccggcaagaccucccucccccgcugcuggcucgucuccaacggcuccuaccucaacgagacccacuucuccgacgacaucgagcagcaggccgacaacaugaucaccgagcuccuccagaaggaguacaucgaccgccagggcaagaccccccucggccucgucgaccucuucgucuucuccaccuccuucuaccucaucuccaucuuccuccaccucgucaagauccccacccaccgccacaucaccggcaagcccugccccaagccccaccgccucaaccacaugggcaucugcuccugcggccucuacaagcaccccggcguccccgucaaguggaagcgcugaggacuagucccuguucccagagcccacuuuuuuuucuuuuuuugaaauaaaauagccugucuuucagaucuaaaaaaaaaaaaaaaaaaaaaaaaaaaaaaaaaaaaaaaaaaaaaaaaaaaaaaaaaaaaaaaaugcaucccccccccccccccccccccccccccccccaaaggcucuuuucagagccaccagaauu

SEQ ID NO: 6502 - RNA, 1768 nt, Artificial Sequence
  mRNA product Design a-2 comprising derived and/or modified sequence from LASV(Lassa virus/H.sapiens-wt/NGA/2016/ISTH_0009;Clade II)__AVO03571__GPCstabilized (opt2)
gggagaguccgcucagccagguugcagaagcggcuuagcguguguccuaaucuucucucugcguguagguaggccugugccgcaaacaagcuuaccaugggccagaucaucaccuucuuccaggaggucccccacgucaucgaggaggucaugaacaucguccucaucgcccucucccuccucgccauccucaagggcaucuacaacgucgccaccugcggccuccucggccucgucuccuuccuccuccucugcggccgcuccugcuccaccaccuacaagggcgucuacgagcuccagacccucgagcucgacauggccucccucaacaugaccaugccccucuccugcaccaagaacaacucccaccacuacaucauggucggcaacgagaccggccucgagcucacccucaccaacaccuccaucaucaaccacaaguucugcaaccucuccgacgcccacaagaagaaccucuacgaccacgcccucauguccaucaucuccaccuuccaccucuccauccccaacuucaaccaguacgaggccauguccugcgacuucaacggcggccgcaucuccguccaguacaaccucucccacuccuacgccgucgacgccgccaaccacugcggcaccaucgccaacggcguccuccagaccuucaugcgcauggccuggggcggcuccuacaucgcccucgacuccggcugcggcuccugggacugcaucaugaccuccuaccaguaccucaucauccagaacaccaccugggaggaccacugccaguucucccgccccucccccaucggcuaccucggccuccucucccagcgcacccgcgacaucuacaucucccgccgccgccggggcaccuucaccuggacccucuccgacuccgagggcaacgagacccccggcggcuacugccucacccgcuggaugcucaucgaggccgagcucaagugcuucggcaacaccgccgucgccaagugcaacgagaagcacgacgaggaguucugcgacaugcuccgccucuucgacuucaacaagcaggccauccgccgccucaagacccccgcccagauguccauccagcucaucaacaaggccgucaacgcccucaucaacgaccagcucaucaugaagaaccaccuccgcgacaucaugugcauccccuacugcaacuacuccaaguacugguaccucaaccacaccgucaccggcaagaccucccucccccgcugcuggcucgucuccaacggcuccuaccucaacgagacccacuucuccgacgacaucgagcagcaggccgacaacaugaucaccgagcuccuccagaaggaguacaucgaccgccagggcaagaccccccucggccucgucgaccucuucgucuucuccaccuccuucuaccucaucuccaucuuccuccaccucgucaagauccccacccaccgccacaucaccggcaagcccugccccaagccccaccgccucaaccacaugggcaucugcuccugcggccucuacaaccaccccggcguccccgucaaguggaagcgcugaggacuagucccuguucccagagcccacuuuuuuuucuuuuuuugaaauaaaauagccugucuuucagaucuaaaaaaaaaaaaaaaaaaaaaaaaaaaaaaaaaaaaaaaaaaaaaaaaaaaaaaaaaaaaaaaaugcaucccccccccccccccccccccccccccccccaaaggcucuuuucagagccaccagaauu

SEQ ID NO: 6503 - RNA, 1768 nt, Artificial Sequence
  mRNA product Design a-2 comprising derived and/or modified sequence from LASV(Lassa virus/H.sapiens-wt/NGA/2016/ISTH_0017;Clade II)__AVO03567__GPCstabilized (opt2)
gggagaguccgcucagccagguugcagaagcggcuuagcguguguccuaaucuucucucugcguguagguaggccugugccgcaaacaagcuuaccaugggccagaucaucaccuucuuccaggaggucccccacgucaucgaggaggucaugaacaucguccucaucgcccucucccuccucgccauccucaagggcaucuacaacgucgccaccugcggccucuucggccucgucuccuuccuccuccucugcggccgcuccugcuccaccaccuacaagggcgucuacgagcuccagacccucgagcucgacauggccucccucaacaugaccaugccccucuccugcaccaagaacaacucccaccacuacaucauggucggcaacgagaccggccucgagcucacccucaccaacaccuccaucaucaaccacaaguucugcaaccucuccgacgcccacaagaagaaccucuacgaccacgcccucauguccaucaucuccaccuuccaccucuccauccccaacuucaaccaguacgaggccauguccugcgacuucaacggcggcaagaucuccguccaguacaaccucucccacaccuacgccaucgacgccgccaaccacugcggcaccaucgccaacggcguccuccagaccuucaugcgcauggccuggggcggcuccuacaucgcccucgacuccggcugcggcuccugggacugcaucaugaccuccuaccaguaccucaucauccagaacaccaccugggaggaccacugccaguucucccgccccucccccaucggcuaccucggccuccucucccagcgcacccgcgacaucuacaucucccgccgccgccggggcaccuucaccuggacccucuccgacuccgagggcaacgagacccccggcggcuacugccucacccgcuggaugcucaucgaggccgagcucaagugcuucggcaacaccgccgucgccaagugcaacgagaagcacgacgaggaguucugcgacaugcuccgccucuucgacuucaacaagcaggccauccgccgccucaagacccccgcccagauguccauccagcucaucaacaaggccgucaacgcccucaucaacgaccagcucaucaugaagaaccaccuccgcgacaucaugugcauccccuacugcaacuacuccaaguacugguaccucaaccacaccgucaccggcaagaccucccucccccgcugcuggcucgucuccaacggcuccuaccucaacgagacccacuucuccgacgacaucgagcagcaggccgacaacaugaucaccgagcuccuccagaaggaguacauggaccgccagggcaagaccccccucggccucgucgaccucuucgucuucuccaccuccuucuaccucaucuccaucuuccuccaccucguccgcauccccacccaccgccacgucaucggcaagcccugccccaagccccaccgccucaaccacaugggcaucugcuccugcggccucuacaagcaccccggcguccccgucaaguggaagcgcugaggacuagucccuguucccagagcccacuuuuuuuucuuuuuuugaaauaaaauagccugucuuucagaucuaaaaaaaaaaaaaaaaaaaaaaaaaaaaaaaaaaaaaaaaaaaaaaaaaaaaaaaaaaaaaaaaugcaucccccccccccccccccccccccccccccccaaaggcucuuuucagagccaccagaauu

SEQ ID NO: 6504 - RNA, 1768 nt, Artificial Sequence
  mRNA product Design a-2 comprising derived and/or modified sequence from LASV(Lassa virus/H.sapiens-wt/NGA/2018/ISTH_0959;Clade II)__AVV65099__GPCstabilized (opt2)
gggagaguccgcucagccagguugcagaagcggcuuagcguguguccuaaucuucucucugcguguagguaggccugugccgcaaacaagcuuaccaugggccagaucaucaccuucuuccaggaggucccccacgucaucgaggaggucaugaacaucguccucaucgcccucucccuccucgccauccucaagggcaucuacaacgucgucaccugcggccucuucggccucgucuccuuccuccuccucugcggccgcuccugcuccaccaccuacaagggcgucuacgagcuccagacccucgagcucgacauggccucccucaacaugaccaugccccucuccugcaccaagaacaacucccaccacuacaucauggucggcaacgagaccggccucgagcucacccucaccaacaccuccaucaucaaccacaaguucugcaaccucuccgacgcccacaagaagaaccucuacgaccacgcccucauguccaucaucuccaccuuccaccucuccauccccaacuucaaccaguacgaggccauguccugcgacuucaacggcggcaagaucuccguccaguacaaccucucccacgccuacgccaucgacgccgccaaccacugcggcaccaucgccaacggcguccuccagaccuucaugcgcauggccuggggcggcuccuacaucgcccucgacuccggcugcggcuccugggacugcaucaugaccuccuaccaguaccucaucauccagaacaccaccugggaggaccacugccaguucucccgccccucccccaucggcuaccucggccuccucucccagcgcacccgcgacaucuacaucucccgccgccgccggggcaccuucaccuggacccucuccgacuccgagggcaacgagacccccggcggcuacugccucacccgcuggaugcucaucgaggccgagcucaagugcuucggcaacaccgccgucgccaagugcaacgagaagcacgacgaggaguucugcgacaugcuccgccucuucgacuucaacaagcaggccauccgccgccucaagacccccgcccagauguccauccagcucaucaacaaggccgucaacgcccucaucaacgaccagcucaucaugaagaaccaccuccgcgacaucaugugcauccccuacugcaacuacuccaaguacugguaccucaaccacaccgucaccggcaagaccucccucccccgcugcuggcucgucuccaacggcuccuaccucaacgagacccacuucuccgacgacaucgagcagcaggccgacaacaugaucaccgagcuccuccagaaggaguacaucgaccgccagggcaagaccccccucggccucgucgaccucuucgucuucuccaccuccuucuaccucaucuccaucuuccuccaccucgucaagauccccacccaccgccacgucaucggcaagcccugccccaagccccaccgccucaaccacaugggcaucugcuccugcggccucuacaagcaccccggcguccccgucaaguggaagcgcugaggacuagucccuguucccagagcccacuuuuuuuucuuuuuuugaaauaaaauagccugucuuucagaucuaaaaaaaaaaaaaaaaaaaaaaaaaaaaaaaaaaaaaaaaaaaaaaaaaaaaaaaaaaaaaaaaugcaucccccccccccccccccccccccccccccccaaaggcucuuuucagagccaccagaauu

SEQ ID NO: 6505 - RNA, 1768 nt, Artificial Sequence
  mRNA product Design a-2 comprising derived and/or modified sequence from LASV(LASV003-NIG-2008;Clade II)__AIT17580__GPCstabilized (opt2)
gggagaguccgcucagccagguugcagaagcggcuuagcguguguccuaaucuucucucugcguguagguaggccugugccgcaaacaagcuuaccaugggccagaucaucaccuucuuccaggaggucccccacgucaucgaggaggucaugaacaucguccucaucgcccucucccuccucgccauccucaagggcaucuacaacgucgccaccugcggccucuucggccucgucuccuuccuccuccucugcggccgcuccugcuccaccaccuacaagggcgucuacgagcuccagacccucgagcucgacauggccucccucaacaugaccaugccccucuccugcaccaagaacaacucccaccacuacaucauggucggcaacgagaccggccucgagcucacccucaccaacaccuccaucaucaaccacaaguucugcaaccucuccgacgcccacaagaagaaccucuacgaccacgcccucauguccaucaucuccaccuuccaccucuccauccccaacuucaaccaguacgaggccauguccugcgacuucaacggcggcaagaucuccguccaguacaaccucucccacaccuacgccgucgacgccgccaaccacugcggcaccaucgccaacggcguccuccagaccuucaugcgcauggccuggggcggcuccuacaucgcccucgacuccggcugcggcuccugggacugcaucaugaccuccuaccaguaccucaucauccagaacaccaccugggaggaccacugccaguucucccgccccucccccaucggcuaccucggccuccucucccagcgcacccgcgacaucuacaucucccgccgccgccggggcaccuucaccuggacccucuccgacuccgaguccaacgagacccccggcggcuacugccucacccgcuggaugcucaucgaggccgagcucaagugcuucggcaacaccgccgucgccaagugcaacgagaagcacgacgaggaguucugcgacaugcuccgccucuucgacuucaacaagcaggccauccgccgccucaaggcccccgcccagauguccauccagcucaucaacaaggccgucaacgcccucaucaacgaccagcucaucaugaagaaccaccuccgcgacaucaugugcauccccuacugcaacuacuccaaguacugguaccucaaccacaccgucaccggccgcaccucccucccccgcugcuggcucgucuccaacggcuccuaccucaacgagacccacuucuccgacgacaucgagcagcaggccgacaacaugaucaccgagcuccuccagaaggaguacauggaccgccagggcaagaccccccucggccucgucgaccucuucgucuucuccaccuccuucuaccucaucuccaucuuccuccaccucgucaagauccccacccaccgccacgucaucggcaagcccugccccaagccccaccgccucaaccacaugggcaucugcuccugcggccucuacaagcaccccggcguccccgucaaguggaagcgcugaggacuagucccuguucccagagcccacuuuuuuuucuuuuuuugaaauaaaauagccugucuuucagaucuaaaaaaaaaaaaaaaaaaaaaaaaaaaaaaaaaaaaaaaaaaaaaaaaaaaaaaaaaaaaaaaaugcaucccccccccccccccccccccccccccccccaaaggcucuuuucagagccaccagaauu

SEQ ID NO: 6506 - RNA, 1768 nt, Artificial Sequence
  mRNA product Design a-2 comprising derived and/or modified sequence from LASV(LASV035-NIG-2009;Clade II)__AIT17588__GPCstabilized (opt2)
gggagaguccgcucagccagguugcagaagcggcuuagcguguguccuaaucuucucucugcguguagguaggccugugccgcaaacaagcuuaccaugggccagaucaucaccuucuuccaggaggucccccacgucaucgaggaggucaugaacaucguccucaucgcccucucccuccucgccauccucaagggcaucuacaacgucgccaccugcggccucuucggccucgucuccuuccuccuccucugcggccgcuccugcuccaccaccuacaagggcgucuacgagcuccagacccucgagcucgacauggccucccucaacaugaccaugccccucuccugcaccaagaacaacucccaccacuacaucauggucggcaacgagaccggccucgagcucacccucaccaacaccuccaucaucaaccacaaguucugcaaccucuccgacgcccacaagaagaaccucuacgaccacgcccucauguccaucaucuccaccuuccaccucuccauccccaacuucaaccaguacgaggccauguccugcgacuucaacggcggcaagaucuccguccaguacaaccucucccacgccuacgccgucgacgccgccaaccacugcggcaccaucgccaacggcguccuccagaccuucaugcgcauggccuggggcggcuccuacaucgcccucgacuccggcugcggcuccugggacugcaucaugaccuccuaccaguaccucaucauccagaacaccaccugggaggaccacugccaguucucccgccccucccccaucggcuaccucggccuccucucccagcgcacccgcgacaucuacaucucccgccgccgccggggcaccuucaccuggacccucuccgacuccgagggcaacgagacccccggcggcuacugccucacccgcuggaugcucaucgaggccgagcucaagugcuucggcaacaccgccgucgccaagugcaacgagaagcacgacgaggaguucugcgacaugcuccgccucuucgacuucaacaagcaggccauccgccgccucaaggcccccgcccagauguccauccagcucaucaacaaggccgucaacgcccucaucaacgaccagcucaucaugaagaaccaccuccgcgacaucaugugcauccccuacugcaacuacuccaaguacugguaccucaaccacaccgucaccggcaagaccucccucccccgcugcuggcucgucuccaacggcuccuaccucaacgagacccacuucuccgacgacaucgagcagcaggccgacaacaugaucaccgagcuccuccagaaggaguacaucgaccgccagggcaagaccccccucggccucgucgaccucuucgucuucuccaccuccuucuaccucaucuccaucuuccuccaccucgucaagauccccacccaccgccacgucaucggcaagcccugccccaagccccaccgccucaaccacaugggcaucugcuccugcggccucuacaagcaccccggcguccccgucaaguggaagcgcugaggacuagucccuguucccagagcccacuuuuuuuucuuuuuuugaaauaaaauagccugucuuucagaucuaaaaaaaaaaaaaaaaaaaaaaaaaaaaaaaaaaaaaaaaaaaaaaaaaaaaaaaaaaaaaaaaugcaucccccccccccccccccccccccccccccccaaaggcucuuuucagagccaccagaauu

SEQ ID NO: 6507 - RNA, 1768 nt, Artificial Sequence
  mRNA product Design a-2 comprising derived and/or modified sequence from LASV(LASV1000-NIG-2009;Clade II)__AIT17782__GPCstabilized (opt2)
gggagaguccgcucagccagguugcagaagcggcuuagcguguguccuaaucuucucucugcguguagguaggccugugccgcaaacaagcuuaccaugggccagaucaucaccuucuuccaggaggucccccacgucaucgaggaggucaugaacaucguccucaucgcccucucccuccucgccauccucaagggcaucuacaacgucgccaccugcggccucuucggccucgucuccuuccuccuccucugcggccgcuccugcuccaccaccuacaagggcgucuacgagcuccagacccucgagcucgacauggccucccucaacaugaccaugccccucuccugcaccaagaacaacucccaccacuacaucauggucggcaacgagaccggccucgagcucacccucaccaacaccuccaucaucaaccacaaguucugcaaccucuccgacgcccacaagaagaaccucuacgaccacgcccucauguccaucaucuccaccuuccaccucuccauccccaacuucaaccaguacgaggccauguccugcgacuucaacggcggcaagaucuccguccaguacaaccucucccacaccuacgccgucgacgccgccaaccacugcggcaccaucgccaacggcguccuccagaccuucaugcgcauggccuggggcggcuccuacaucgcccucgacuccggcugcggcuccugggacugcaucaugaccuccuaccaguaccucaucauccagaacaccaccugggaggaccacugccaguucucccgccccucccccaucggcuaccucggccuccucucccagcgcacccgcgacaucuacaucucccgccgccgccggggcaccuucaccuggacccucuccgacuccgagggcaacgagacccccggcggcuacugccucacccgcuggaugcucaucgaggccgagcucaagugcuucggcaacaccgccgucgccaagugcaacgagaagcacgacgaggaguucugcgacaugcuccgccucuucgacuucaacaagcaggccaucaagcgccucaagacccccgcccagauguccauccagcucaucaacaaggccgucaacgcccucaucaacgaccagcucaucaugaagaaccaccuccgcgacaucaugugcauccccuacugcaacuacuccaaguacugguaccucaaccacaccgucaccggcaagaccucccucccccgcugcuggcucgucuccaacggcuccuaccucaacgagacccacuucuccgacgacaucgagcagcaggccgacaacaugaucaccgagcuccuccagaaggaguacaucgaccgccagggcaagaccccccucggccucgucgaccucuucgucuucuccaccuccuucuaccucaucuccaucuuccuccaccucgucaagauccccacccaccgccacgucgucggcaagcccugccccaagccccaccgccucaaccacaugggcaucugcuccugcggccucuacaagcaccccggcguccccgucaaguggaagcgcugaggacuagucccuguucccagagcccacuuuuuuuucuuuuuuugaaauaaaauagccugucuuucagaucuaaaaaaaaaaaaaaaaaaaaaaaaaaaaaaaaaaaaaaaaaaaaaaaaaaaaaaaaaaaaaaaaugcaucccccccccccccccccccccccccccccccaaaggcucuuuucagagccaccagaauu

SEQ ID NO: 6508 - RNA, 1768 nt, Artificial Sequence
  mRNA product Design a-2 comprising derived and/or modified sequence from LASV(LASV221-NIG-2010;Clade II)__AIT17624__GPCstabilized (opt2)
gggagaguccgcucagccagguugcagaagcggcuuagcguguguccuaaucuucucucugcguguagguaggccugugccgcaaacaagcuuaccaugggccagaucaucaccuucuuccaggaggucccccacgucaucgaggaggucaugaacaucguccucaucgcccucucccuccucgccauccucaagggcaucuacaacgucgccaccugcggccucuucggccucgucuccuuccuccuccucugcggccgcuccugcuccaccaccuacaagggcgucuacgagcuccagacccucgagcucgacauggccucccucaacaugaccaugccccucuccugcaccaagaacaacucccaccacuacaucauggucggcaacgagaccggccucgagcucacccucaccaacaccuccaucaucaaccacaaguucugcaaccucuccgacgcccacaagaagaaccucuacgaccacgcccucauguccaucaucuccaccuuccaccucuccauccccaacuucaaccaguacgaggccauguccugcgacuucaacggcggcaagaucuccguccaguacaaccucucccacaccuacgccaucgacgccgccaaccacugcggcaccaucgccaacggcguccuccagaccuucaugcgcauggccuggggcggcuccuacaucgcccucgacuccggcugcggcuccugggacugcaucaugaccuccuaccaguaccucaucauccagaacaccaccugggaggaccacugccaguucucccgccccucccccaucggcuaccucggccuccucucccagcgcacccgcgacaucuacaucucccgccgccgccggggcaccuucaccuggacccucuccgacuccgagggcaacgagacccccggcggcuacugccucacccgcuggaugcucaucgaggccgagcucaagugcuucggcaacaccgccgucgccaagugcaacgagaagcacgacgaggaguucugcgacaugcuccgccucuucgacuucaacaagcaggccauccgccgccucaagacccccgcccagauguccauccagcucaucaacaaggccgucaacgcccucaucaacgaccagcucaucaugaagaaccaccuccgcgacaucaugugcauccccuacugcaacuacuccaaguacugguaccucaaccacaccgucaccggcaagaccucccucccccgcugcuggcucgucuccaacggcuccuaccucaacgagacccacuucuccgacgacaucgagcagcaggccgacaacaugaucaccgagaugcuccagaaggaguacauggaccgccagggcaagaccccccucggccucgucgaccucuucgucuucuccaccuccuucuaccucaucuccaucuuccuccaccucgucaagauccccacccaccgccacgucaucggcaagcccugccccaagccccaccgccucaaccacaugggcaucugcuccugcggccucuacaagcaccccggcguccccgucaaguggaagcgcugaggacuagucccuguucccagagcccacuuuuuuuucuuuuuuugaaauaaaauagccugucuuucagaucuaaaaaaaaaaaaaaaaaaaaaaaaaaaaaaaaaaaaaaaaaaaaaaaaaaaaaaaaaaaaaaaaugcaucccccccccccccccccccccccccccccccaaaggcucuuuucagagccaccagaauu

SEQ ID NO: 6509 - RNA, 1768 nt, Artificial Sequence
  mRNA product Design a-2 comprising derived and/or modified sequence from LASV(LASV237-NIG-2010;Clade II)__AIT17638__GPCstabilized (opt2)
gggagaguccgcucagccagguugcagaagcggcuuagcguguguccuaaucuucucucugcguguagguaggccugugccgcaaacaagcuuaccaugggccagaucaucaccuucuuccaggaggucccccacgucaucgaggaggucaugaacaucguccucaucgcccucucccuccucgccauccucaagggcaucuacaacgucgccaccugcggccucuucggccucgucuccuuccuccuccucugcggccgcuccugcuccaccaccuacaagggcgucuacgagcuccagacccucgagcucgacauggccucccucaacaugaccaugccccucuccugcaccaagaacaacucccaccacuacaucauggucggcaacgagaccggccucgagcucacccucaccaacaccuccaucaucaaccacaaguucugcaaccucuccgacgcccacaagaaggaccucuacgaccacgcccucauguccaucaucuccaccuuccaccucuccauccccaacuucaaccaguacgaggccauguccugcgacuucaacggcggcaagaucuccguccaguacaaccucucccacaccuacgccgucgacgccgccaaccacugcggcaccaucgccaacggcguccuccagaccuucaugcgcauggccuggggcggcuccuacaucgcccucgacuccggcugcggcuccugggacugcaucaugaccuccuaccaguaccucaucauccagaacaccaccugggaggaccacugccaguucucccgccccucccccaucggcuaccucggccuccucucccagcgcacccgcgacaucuacaucucccgccgccgccggggcaccuucaccuggacccucuccgacuccgagggcaacgagacccccggcggcuacugccucacccgcuggaugcucaucgaggccgagcucaagugcuucggcaacaccgccgucgccaagugcaacgagaagcacgacgaggaguucugcgacaugcuccgccucuucgacuucaacaagcaggccauccgccgccucaagacccccgcccagauguccauccagcucaucaacaaggccgucaacgcccucaucaacgaccagcucaucaugaagaaccaccuccgcgacaucaugugcauccccuacugcaacuacuccaaguacugguaccucaaccacaccgucaccggcaagaccucccucccccgcugcuggcucgucuccaacggcuccuaccucaacgagacccacuucuccgacgacaucgagcagcaggccgacaacaugaucaccgagcuccuccagaaggaguacauggaccgccagggcaagaccccccucggccucgucgaccucuucgucuucuccaccuccuucuaccucaucuccaucuuccuccaccucaucaagauccccacccaccgccacaucaccggcaagcccugccccaagccccaccgccucaaccacaugggcaucugcuccugcggccucuacaagcaccccggcguccccgucaaguggaagcgcugaggacuagucccuguucccagagcccacuuuuuuuucuuuuuuugaaauaaaauagccugucuuucagaucuaaaaaaaaaaaaaaaaaaaaaaaaaaaaaaaaaaaaaaaaaaaaaaaaaaaaaaaaaaaaaaaaugcaucccccccccccccccccccccccccccccccaaaggcucuuuucagagccaccagaauu

SEQ ID NO: 6510 - RNA, 1768 nt, Artificial Sequence
  mRNA product Design a-2 comprising derived and/or modified sequence from LASV(LASV253-NIG-2011;Clade II)__AIT17670__GPCstabilized (opt2)
gggagaguccgcucagccagguugcagaagcggcuuagcguguguccuaaucuucucucugcguguagguaggccugugccgcaaacaagcuuaccaugggccagaucaucaccuucuuccaggaggucccccacgucaucgaggaggucaugaacaucguccucaucgcccucucccuccucgccauccucaagggcaucuacaacgucgccaccugcggccucuucggccucgucuccuuccuccuccucugcggccgcuccugcuccaccaccuacaagggcgucuacgagcuccagacccucgagcucgacauggccucccucaacaugaccaugccccucuccugcaccaagaacaacucccaccacuacaucauggucggcaacgagaccggccucgagcucacccucaccaacaccuccaucaucaaccacaaguucugcaaccucuccgacgcccacaagaagaaccucuacgaccacgcccucauguccaucaucuccaccuuccaccucuccauccccaacuucaaccaguacgaggccauguccugcgacuucaacggcggcaagaucuccguccaguacaaccucucccacaccuacgccgucgacgccgccaaccacugcggcaccaucgccaacggcguccuccagaccuucaugcgcauggccuggggcggcuccuacaucgcccucgacuccggcugcggcuccugggacugcaucaugaccuccuaccaguaccucaucauccagaacaccaccugggaggaccacugccaguucucccgccccucccccaucggcuaccucggccuccucucccagcgcacccgcgacaucuacaucucccgccgccgccggggcaccuucaccuggacccucuccgacuccgagggcaacgagacccccggcggcuacugccucacccgcuggaugcucaucgaggccgagcucaagugcuucggcaacaccgccgucgccaagugcaacgagaagcacgacgaggaguucugcgacaugcuccgccucuucgacuucaacaagcaggccauccgccgccucaaggcccccgcccagauguccauccagcucaucaacaaggccgucaacgcccucaucaacgaccagcucaucaugaagaaccaccuccgcgacaucaugugcauccccuacugcaacuacuccaaguacugguaccucaaccacaccgucaccggccgcaccucccucccccgcugcuggcucgucuccaacggcuccuaccucaacgagacccacuucuccgacgacaucgagcagcaggccgacaacaugaucaccgagcuccuccagaaggaguacaucgaccgccagggcaagaccccccucggccucgucgaccucuucgucuucuccaccuccuucuaccucaucuccaucuuccuccaccucgucaagauccccacccaccgccacaucaucggcaagcccugccccaagccccaccgccucaaccacaugggcaucugcuccugcggccucuacaagcaccccggcguccccgucaaguggaagcgcugaggacuagucccuguucccagagcccacuuuuuuuucuuuuuuugaaauaaaauagccugucuuucagaucuaaaaaaaaaaaaaaaaaaaaaaaaaaaaaaaaaaaaaaaaaaaaaaaaaaaaaaaaaaaaaaaaugcaucccccccccccccccccccccccccccccccaaaggcucuuuucagagccaccagaauu

SEQ ID NO: 6511 - RNA, 1768 nt, Artificial Sequence
  mRNA product Design a-2 comprising derived and/or modified sequence from LASV(LASV254-NIG-2011;Clade II)__AIT17674__GPCstabilized (opt2)
gggagaguccgcucagccagguugcagaagcggcuuagcguguguccuaaucuucucucugcguguagguaggccugugccgcaaacaagcuuaccaugggccagaucaucaccuucuuccaggaggucccccacgucaucgaggaggucaugaacaucguccucaucgcccucucccuccucgccauccucaagggcaucuacaacgucgccaccugcggccucuucggccucgucuccuuccuccuccucugcggccgcuccugcuccaccaccuacaagggcgucuacgagcuccagacccucgagcucgacaugaccaaccucaacaugaccaugccccucuccugcaccaagaacaacucccaccacuacaucauggucggcaacgagaccggccucgagcucacccucaccaacaccuccaucaucaaccacaaguucugcaaccucuccgacgcccacaagaagaaccucuacaaccacgcccucauguccaucaucuccaccuuccaccucuccauccccaacuucaaccaguacgaggccauguccugcgacuucaacggcggcaagaucuccguccaguacaaccucucccacuccuacgccgucgacgccgccaaccacugcggcaccaucgccaacggcguccuccagaccuucaugcgcauggccuggggcggcuccuacaucgcccucgacuccggcugcggcaacugggacugcaucaugaccuccuaccaguaccucaucauccagaacaccaccugggaggaccacugccaguucucccgccccucccccaucggcuaccucggccuccucucccagcgcacccgcgacaucuacaucucccgccgccgccggggcaccuucaccuggacccucuccgacuccgagggcaacgagacccccggcggcuacugccucacccgcuggaugcucaucgaggccgagcucaagugcuucggcaacaccgccgucgccaagugcaacgagaagcacgacgaggaguucugcgacaugcuccgccucuucgacuucaacaagcaggccauccgccgccucaagacccccgcccaggccaacauccagcucaucaacaaggccgucaacgcccucaucaacgaccagcucaucaugaagaaccaccuccgcgacaucaugugcauccccuacugcaacuacuccaaguacugguaccucaaccacaccgucaccggcaagaccucccucccccgcugcuggcucgucuccaacggcuccuaccucaacgagacccacuucuccgacgacaucgagcagcaggccgacaacaugaucaccgagcuccuccagaaggaguacauggaccgccagggcaagaccccccucggccucgucgaccucuucgucuucuccaccuccuucuaccucaucuccaucuuccuccaccucgucaagauccccacccaccgccacgucaucggcaagcccugccccaagccccaccgccucaaccacaugggcaucugcuccugcggccucuacaagcaccccggcguccccgucaaguggaagcgcugaggacuagucccuguucccagagcccacuuuuuuuucuuuuuuugaaauaaaauagccugucuuucagaucuaaaaaaaaaaaaaaaaaaaaaaaaaaaaaaaaaaaaaaaaaaaaaaaaaaaaaaaaaaaaaaaaugcaucccccccccccccccccccccccccccccccaaaggcucuuuucagagccaccagaauu

SEQ ID NO: 6512 - RNA, 1768 nt, Artificial Sequence
  mRNA product Design a-2 comprising derived and/or modified sequence from LASV(Nig08-A19;Clade III)__ADU56618__GPCstabilized (opt2)
gggagaguccgcucagccagguugcagaagcggcuuagcguguguccuaaucuucucucugcguguagguaggccugugccgcaaacaagcuuaccaugggccagaucgucaccuucuuccaggaggucccccacgucaucgaggaggucaugaacaucguccucaucgcccucuccauccucgccauccucaagggccucuacaacaucgccaccugcggccucaucggccucgucaccuuccuccuccucuccggccgcuccugcuccaugaccuacaagggcgucuacgagcuccagacccucgagcucaacaugaacacccucaacaugaccaugccccucuccugcaccaagaacaacucccaccacuacaucauggucggcaacgagaccggccucgagcucacccucaccaacaccucccuccuccaccacaaguucugcaaccucuccgacgcccacaagaagaaccucuacgaccacacccucauguccaucaucuccaccuuccaccucuccauccccaacuucaaccaguacgaggccauguccugcgacuucaacggcggcaagaucaccguccaguacaaccucucccacuccuacgccaucgacgccgccaaccacugcggcaccgucgccaacggcguccuccagaccuucaugcgcauggccuggggcggcuccuacaucgcccucgacuccggcugcggcaagugggacugcaucaugaccuccuaccaguaccucaucauccagaacaccaccugggaggaccacugccaguucucccgccccucccccaucggcuaccucggccuccucucccagcgcacccgcgacaucuacaucucccgccgccgccggggcaccuucaccuggacccucuccgacuccgagggcaacgagacccccggcggcuacugccucacccgcuggaugcucaucgaggccgagcucaagugcuucggcaacaccgccgucgccaagugcaacgagaagcacgacgaggaguucugcgacaugcuccgccucuucgacuucaacaagcaggccauccgccgccucaaggcccccgcccagauguccauccagcucaucaacaaggccgucaacgcccucaucaacgaccagcucaucaugaagaaccaccuccgcgacaucaugugcauccccuacugcaacuacuccaaguacugguaccucaaccacaccuccaccggccgcaccucccucccccgcugcuggcucgucuccaacggcuccuaccucaacgagacccacuucuccgacgacaucgagcagcaggccgacaacaugaucaccgagaugcuccagaaggaguaccucgaccgccagggcaagaccccccucggccucgucgaccucuucgucuucuccaccuccuucuaccucaucuccaucuuccuccaccucgucaagauccccacccaccgccacaucgucggcaagcccugccccaagccccaccgccucaaccacaugggcaucugcuccugcggccucuacaagcagcccggcguccccguccgcuggaagcgcugaggacuagucccuguucccagagcccacuuuuuuuucuuuuuuugaaauaaaauagccugucuuucagaucuaaaaaaaaaaaaaaaaaaaaaaaaaaaaaaaaaaaaaaaaaaaaaaaaaaaaaaaaaaaaaaaaugcaucccccccccccccccccccccccccccccccaaaggcucuuuucagagccaccagaauu

SEQ ID NO: 6513 - RNA, 1771 nt, Artificial Sequence
  mRNA product Design a-2 comprising derived and/or modified sequence from LASV(G1180-SLE-2010;Clade IV)__AIT17168__GPCstabilized (opt2)
gggagaguccgcucagccagguugcagaagcggcuuagcguguguccuaaucuucucucugcguguagguaggccugugccgcaaacaagcuuaccaugggccagaucgucaccuucuuccaggaggucccccacgucaucgaggaggucaugaacaucguccucaucgcccucuccauccucgccguccucaagggccucuacaacuucgccaccugcggccucgucggccuccucaccuuccuccuccucugcggccgcuccugcaccgccucccgcuacaagggcgucuacgagcuccagacccucgagcucaacauggagacccucaacaugaccaugccccucuccugcaccaagaacaacucccaccacuacaucauggucggcaacgagaccggccucgagcucacccucaccaacaccuccaucaucaaccacaaguucugcaaccucuccgacgcccacaagaagaaccucuacgaccacgcccucauguccaucaucuccaccuuccaccucuccauccccaacuucaaccaguacgaggccauguccugcgacuucaacggcggcaagaucuccguccaguacaaccucucccacuccuacgccggcgacgccgccaaccacugcggcaccgucgccaacggcguccuccagaccuucaugcgcauggccuggggcggcuccuacaucgcccucgacuccggcugcggcuccugggacugcaucaugaccuccuaccaguaccucaucauccagaacaccaccugggaggaccacugccaguucucccgccccucccccaucggcuaccucggccuccucucccagcgcacccgcgacaucuacaucucccgccgccgccggggcaccuucaccuggacccucuccgacuccgagggcaaggacacccccggcggcuacugccucacccgcuggaugcucaucgaggccgagcucaagugcuucggcaacaccgccgucgccaagugcaacgagaagcacgacgaggaguucugcgacaugcuccgccucuucgacuucaacaagcaggccauccagcgccucaaggcccccgcccagauguccauccagcucaucaacaaggccgucaacgcccucaucaacgaccagcucaucaugaagaaccaccuccgcgacaucaugugcauccccuacugcaacuacuccaaguacugguaccucaaccacaccaccaccggcaagaccucccuccccaagugcuggcucgucuccaacggcuccuaccucaacgagacccacuucuccgacgacaucgagcagcaggccgacaacaugaucaccgagaugcuccagaaggaguacauggagcgccagggcaagaccccccucggccucgucgaccucuucgucuucuccaccuccuucuaccucaucuccaucuuccuccaccucgucaagauccccacccaccgccacaucgucggcaaguccugccccaagccccaccgccucaaccacaugggcaucugcuccugcggccucuacaagcagcccggcguccccgucaaguggaagcgcugaggacuagucccuguucccagagcccacuuuuuuuucuuuuuuugaaauaaaauagccugucuuucagaucuaaaaaaaaaaaaaaaaaaaaaaaaaaaaaaaaaaaaaaaaaaaaaaaaaaaaaaaaaaaaaaaaugcaucccccccccccccccccccccccccccccccaaaggcucuuuucagagccaccagaauu

SEQ ID NO: 6514 - RNA, 1771 nt, Artificial Sequence
  mRNA product Design a-2 comprising derived and/or modified sequence from LASV(G1442-SLE-2011;Clade IV)__AIT17180__GPCstabilized (opt2)
gggagaguccgcucagccagguugcagaagcggcuuagcguguguccuaaucuucucucugcguguagguaggccugugccgcaaacaagcuuaccaugggccagaucgucaccuucuuccaggaggucccccacgucaucgaggaggucaugaacaucguccucaucgcccucuccauccucgccguccucaagggccucuacaacgucgccaccugcggccucaucggccucgucaccuuccuccuccucugcggccgcuccugcaccaccacccucuacaagggcgucuacgagcuccagacccucgagcucaacauggagacccucaacaugaccaugccccucuccugcaccaagaacaacucccaccacuacauccgcgucggcaacgagaccggccucgagcucacccucaccaacaccuccaucaucaaccacaaguucugcaaccucuccgacgcccacaagaagaaccucuacgaccacgcccucauguccaucaucuccaccuuccaccucuccauccccaacuucaaccaguacgaggccauguccugcgacuucaacggcggcaagaucuccguccaguacaaccucucccacuccuacgccggcgacgccgccaaccacugcggcaccgucgccaacggcguccuccagaccuucaugcgcauggccuggggcggcuccuacaucgcccucgacuccggcugcggcaacugggacugcaucaugaccuccuaccaguaccucaucauccagaacaccaccugggacgaccacugccaguucucccgccccucccccaucggcuaccucggccuccucucccagcgcacccgcgacgucuacaucucccgccgccgccggggcaccuucaccuggacccucuccgacuccgagggcaaggacacccccggcggcuacugccucacccgcuggaugcucaucgaggccgagcucaagugcuucggcaacaccgccgucgccaagugcaacgagaagcacgacgaggaguucugcgacaugcuccgccucuucgacuucaacaagcaggccauccagcgccucaaggcccccgcccagauguccauccagcucaucaacaaggccgucaacgcccucaucaacgaccagcucaucaugaagaaccaccuccgcgacaucaugugcauccccuacugcaacuacuccaaguacugguaccucaacaacaccgccaccggcaagaccucccuccccaagugcuggcucaucuccaacggcuccuaccucaacgagacccacuucuccgacgacaucgagcaggaggccgacaacaugaucaccgagaugcuccagaaggaguacauggagcgccagggcaagaccccccucggccucgucgaccucuucgucuucuccaccuccuucuaccucaucuccaucuuccuccaccucgucaagauccccacccaccgccacaucgucggcaaguccugccccaagccccaccgccucaaccacaugggcaucugcuccugcggccucuacaagcagcccggcguccccguccgcuggaagcgcugaggacuagucccuguucccagagcccacuuuuuuuucuuuuuuugaaauaaaauagccugucuuucagaucuaaaaaaaaaaaaaaaaaaaaaaaaaaaaaaaaaaaaaaaaaaaaaaaaaaaaaaaaaaaaaaaaugcaucccccccccccccccccccccccccccccccaaaggcucuuuucagagccaccagaauu

SEQ ID NO: 6515 - RNA, 1771 nt, Artificial Sequence
  mRNA product Design a-2 comprising derived and/or modified sequence from LASV(G3010-SLE-2013;Clade IV)__AIT17344__GPCstabilized (opt2)
gggagaguccgcucagccagguugcagaagcggcuuagcguguguccuaaucuucucucugcguguagguaggccugugccgcaaacaagcuuaccaugggccagaucgucaccuucuuccaggaggucccccacgucaucgaggaggucaugaacaucguccucaucgcccucuccauccucgccguccucaagggccucuacaacuucgccaccugcggccucgucggccucgucaccuuccuccuccucugcggccgcuccugcaccaccucccucuacaagggcgucuacgagcuccagacccucgagcucaacauggagacccucaacaugaccaugccccucuccugcaccaagaacaacucccaccacuacaucauggucggcaacgagaccggccucgagcucacccucaccaacaccuccaucaucaaccacaaguucugcaaccucuccgacgcccacaagaagaaccucuacaaccacgcccucauguccaucaucuccaccuuccaccucuccauccccaacuucaaccaguacgaggccauguccugcgacuucaacggcggcaagaucuccguccaguacaaccucucccacuccuacgccggcgacgccgccucccacugcggcaccgucgccaacggcguccuccagaccuucaugcgcauggccuggggcggcuccuacaucgcccucgacuccggcugcggcaagugggacugcaucaugaccuccuaccaguaccucaucauccagaacaccaccugggaggaccacugccaguucucccgccccucccccaucggcuaccucggccuccucucccagcgcacccgcgacaucuacaucucccgccgccgccggggcaccuucaccuggacccucuccgacuccgagggcaaggacacccccggcggcuacugccucacccgcuggaugcucaucgaggccgagcucaagugcuucggcaacaccgccgucgccaagugcaacgagaagcacgacgaggaguucugcgacaugcuccgccucuucgacuucaacaagcaggccauccagcgccucaagacccccgcccagauguccauccagcucaucaacaaggccgucaacgcccucaucaacgaccagcucaucaugaagaaccaccuccgcgacaucaugugcauccccuacugcaacuacuccaaguacugguaccucaaccacaccaccaccggcaagaccucccuccccaagugcuggcucgucuccaacggcuccuaccucaacgagacccacuucuccgacgacaucgagcagcaggccgacaacaugaucaccgagaugcuccagaaggaguacauggagcgccagggcaagaccccccucggccucgucgaccucuucgucuucuccaccuccuucuaccucaucuccaucuuccuccaccucgucaagauccccacccaccgccacaucgucggcaaguccugccccaagccccaccgccucaaccacaugggcaucugcuccugcggccucuacaagcagcccggcguccccguccgcuggaagcgcugaggacuagucccuguucccagagcccacuuuuuuuucuuuuuuugaaauaaaauagccugucuuucagaucuaaaaaaaaaaaaaaaaaaaaaaaaaaaaaaaaaaaaaaaaaaaaaaaaaaaaaaaaaaaaaaaaugcaucccccccccccccccccccccccccccccccaaaggcucuuuucagagccaccagaauu

SEQ ID NO: 6516 - RNA, 1771 nt, Artificial Sequence
  mRNA product Design a-2 comprising derived and/or modified sequence from LASV(G502-SLE-2009;Clade IV)__AIT17126__GPCstabilized (opt2)
gggagaguccgcucagccagguugcagaagcggcuuagcguguguccuaaucuucucucugcguguagguaggccugugccgcaaacaagcuuaccaugggccagaucgucaccuucuuccaggaggucccccacgucaucgaggaggucaugaacaucguccucaucgcccucuccauccucgccguccucaagggccucuacaacuucgccaccugcggccucgucggccuccucaccuuccuccuccucugcggccgcuccugcaccaccggccucuacaagggcgucuacgagcuccagacccucgagcucaacauggagacccucaacaugaccaugccccucuccugcaccaagaacaacucccaccacuacaucauggucggcaacgagaccggccucgagcucacccucaccaacaccuccaucaucaaccacaaguucugcaaccucuccgacgcccacaagaagaaccucuacgaccacgcccucauguccaucaucuccaccuuccaccucuccauccccaacuucaaccaguacgaggccauguccugcgacuucaacggcggcaagaucuccguccaguacaaccucucccacuccuacgccggcgacgccgccgaccacugcggcaccgucgccaacggcguccuccagaccuucaugcgcauggccuggggcggcuccuacaucgcccucgacuccggcugcggccgcugggacugcaucaugaccuccuaccaguaccucaucauccagaacaccaccugggaggaccacugccaguucucccgccccucccccaucggcuaccucggccuccucucccagcgcacccgcgacaucuacaucucccgccgccgccggggcaccuucaccuggacccucuccgacuccgagggcaaggacacccccggcggcuacugccucacccgcuggaugcucaucgaggccgagcucaagugcuucggcaacaccgccgucgccaagugcaacgagaagcacgacgaggaguucugcgacaugcuccgccucuucgacuucaacaagcaggccauccagcgccucaaggcccccgcccagauguccauccagcucaucaacaaggccgucaacgcccucaucaacgaccagcucgucaugaagaaccaccuccgcgacaucaugugcauccccuacugcaacuacucccgcuacugguaccucaaccacaccaccaccggccgcaccucccuccccaagugcuggcucgucuccaacggcuccuaccucaacgagacccacuucuccgacgacaucgagcagcaggccgacaacaugaucaccgagaugcuccagaaggaguacauggagcgccagggcaagaccccccucggccucgucgaccucuucgucuucuccaccuccuucuaccucaucuccaucuuccuccaccucgucaagauccccacccaccgccacaucgucggcaaguccugccccaagccccaccgccucaaccacaugggcaucugcuccugcggccucuacaagcagcccggcguccccgucaaguggaagcgcugaggacuagucccuguucccagagcccacuuuuuuuucuuuuuuugaaauaaaauagccugucuuucagaucuaaaaaaaaaaaaaaaaaaaaaaaaaaaaaaaaaaaaaaaaaaaaaaaaaaaaaaaaaaaaaaaaugcaucccccccccccccccccccccccccccccccaaaggcucuuuucagagccaccagaauu

SEQ ID NO: 6517 - RNA, 1771 nt, Artificial Sequence
  mRNA product Design a-2 comprising derived and/or modified sequence from LASV(G733-SLE-2010;Clade IV)__AIT17154__GPCstabilized (opt2)
gggagaguccgcucagccagguugcagaagcggcuuagcguguguccuaaucuucucucugcguguagguaggccugugccgcaaacaagcuuaccaugggccagaucgucaccuucuuccaggaggucccccacgucaucgaggaggucaugaacaucguccucaucgcccucuccauccucgccguccucaagggccucuacaacuucgccaccugcggcaucgucggccucgucuccuuccuccuccucugcggccgcuccugcaccaccucccucuacaagggcgucuacgagcuccagacccucgagcucaacauggagacccucaacaugaccaugccccucuccugcaccaagaacaacucccaccacuacaucauggucggcaacgagaccggccucgagcucacccucaccaacaccuccaucaucaaccacaaguucugcaaccucuccgacgcccacaagaagaaccucuacgaccacgcccucauguccaucaucuccaccuuccaccucuccauccccaacuucaaccaguacgaggccauguccugcgacuucaacggcggcaagaucuccguccaguacaaccucucccacuccuacgccggcgacgccgccaaccacugcggcaccaucgccaacggcguccuccagaccuucaugcgcauggccuggggcggcuccuacaucgcccucgacuccggcugcgaccgcugggacugcaucaugaccuccuaccaguaccucaucauccagaacaccaccugggaggaccacugccaguucucccgccccucccccaucggcuaccucggccuccucucccagcgcacccgcgacaucuacaucucccgccgccgccggggcaccuucaccuggacccucuccgacuccgagggcaaggacacccccggcggcuacugccucacccgcuggaugcucaucgaggccgagcucaagugcuucggcaacaccgccgucgccaagugcaacgagaagcacgacgaggaguucugcgacaugcuccgccucuucgacuucaacaagcaggccauccagcgccucaaggcccccgcccagauguccauccagcucaucaacaaggccgucaacgcccucaucaacgaccagcucaucaugaagaaccaccuccgcgacaucaugugcauccccuacugcaacuacuccaaguacugguaccucaaccacaccaccaccggcaagaccucccuccccaagugcuggcucgucuccaacggcuccuaccucaacgagacccacuucuccgacgacaucgagcagcaggccgacaacaugaucaccgagaugcuccagaaggaguacauggagcgccagggcaagaccccccucggccucgucgaccucuucgucuucuccaccuccuucuaccucaucuccaucuuccuccaccucgucaagauccccacccaccgccacgucgucggcaaguccugccccaagccccaccgccucaaccacaugggcaucugcuccugcggccucuacggccagcccggcguccccgucaaguggaagcgcugaggacuagucccuguucccagagcccacuuuuuuuucuuuuuuugaaauaaaauagccugucuuucagaucuaaaaaaaaaaaaaaaaaaaaaaaaaaaaaaaaaaaaaaaaaaaaaaaaaaaaaaaaaaaaaaaaugcaucccccccccccccccccccccccccccccccaaaggcucuuuucagagccaccagaauu

SEQ ID NO: 6518 - RNA, 1771 nt, Artificial Sequence
  mRNA product Design a-2 comprising derived and/or modified sequence from MOPV/LASV reassortant(IGS-1;Clade IV)__AFY05576__GPCstabilized (opt2)
gggagaguccgcucagccagguugcagaagcggcuuagcguguguccuaaucuucucucugcguguagguaggccugugccgcaaacaagcuuaccaugggccagaucgucaccuucuuccaggaggucccccacgucaucgaggaggucaugaacaucguccucaucgcccucuccguccucgccguccucaagggccucuacaacuucgccaccugcggccucgucggccucgucaccuuccuccuccucugcggccgcuccugcaccaccucccucuacaagggcgucuacgagcuccagacccucgagcucaacauggagacccucaacaugaccaugccccucuccugcaccaagaacaacucccaccacuacaucauggucggcaacgagaccggccucgagcucacccucaccaacaccuccaucaucaaccacaaguucugcaaccucuccgacgcccacaagaagaaccucuacgaccacgcccucauguccaucaucuccaccuuccaccucuccauccccaacuucaaccaguacgaggccauguccugcgacuucaacggcggcaagaucuccguccaguacaaccucucccacuccuacgccggcgacgccgccaaccacugcggcaccgucgccaacggcguccuccagaccuucaugcgcauggccuggggcggcuccuacaucgcccucgacuccggcugcggcaacugggacugcaucaugaccuccuaccaguaccucaucauccagaacaccaccugggaggaccacugccaguucucccgccccucccccaucggcuaccucggccuccucucccagcgcacccgcgacaucuacaucucccgccgccgccggggcaccuucaccuggacccucuccgacuccgagggcgaggacacccccggcggcuacugccucacccgcuggaugcucaucgaggccgagcucaagugcuucggcaacaccgccgucgccaagugcaacgagaagcacgacgaggaguucugcgacaugcuccgccucuucgacuucaacaagcaggccauccagcgccucaaggcccccgcccagauguccauccagcucaucaacaaggccgucaacgcccucaucaacgaccagcucaucaugaagaaccaccuccgcgacaucaugugcauccccuacugcaacuacuccaaguacugguaccucaaccacaccaccaccggccgcaccucccuccccaagugcuggcucgucuccaacggcuccuaccucaacgagacccacuucuccgacgacaucgagcagcaggccgacaacaugaucaccgagaugcuccagaaggaguacauggagcgccagggcaagaccccccucggccucgucgaccucuucgucuucuccaccuccuucuaccucaucuccaucuuccuccaccucgucaagauccccacccaccgccacaucgucggcaaguccugccccaagccccaccgccucaaccacaugggcaucugcuccugcggccucuacaagcagcccggcguccccgucaaguggaagcgcugaggacuagucccuguucccagagcccacuuuuuuuucuuuuuuugaaauaaaauagccugucuuucagaucuaaaaaaaaaaaaaaaaaaaaaaaaaaaaaaaaaaaaaaaaaaaaaaaaaaaaaaaaaaaaaaaaugcaucccccccccccccccccccccccccccccccaaaggcucuuuucagagccaccagaauu

SEQ ID NO: 6519 - RNA, 1771 nt, Artificial Sequence
  mRNA product Design a-2 comprising derived and/or modified sequence from LASV(LM765-SLE-2012;Clade IV)__AIT17814__GPCstabilized (opt2)
gggagaguccgcucagccagguugcagaagcggcuuagcguguguccuaaucuucucucugcguguagguaggccugugccgcaaacaagcuuaccaugggccagaucgucaccuucuuccaggaggucccccacgucaucgaggaggucaugaacaucguccucaucgcccucuccauccucgccguccucaagggccucuacaacuucgccaccugcggccucgucggccucgucaccuuccuccuccucugcggccgcuccugcaccaccucccucuacaagggcgucuacgagcuccagacccucgagcucaacauggagacccucaacaugaccaugccccucuccugcaccaagaacaacucccaccacuacaucauggucggcaacgagaccggccucgagcucacccucaccaacaccuccaucaucgaccacaaguucugcaaccucuccgacgcccaccgcaagaaccucuacgaccacgcccucauguccaucaucuccaccuuccaccucuccauccccaacuucaaccaguacgaggccauguccugcgacuucaacggcggcaagaucuccguccaguacaaccucucccacuccuacgccaaggacgccgccgaccacugcggcaccgucgccaacggcguccuccagaccuucaugcgcauggccuggggcggcuccuacaucgcccucgacuccggcugcggccgcugggacugcaucaugaccuccuaccaguaccucaucauccagaacaccaccugggaggaccacugccaguucucccgccccucccccaucggcuaccucggccuccucucccagcgcacccgcgacaucuacaucucccgccgccgccggggcaccuucaccuggacccucuccgacuccgagggcaaggacacccccggcggcuacugccucacccgcuggaugcucaucgaggccgagcucaagugcuucggcaacaccgccgucgccaagugcaacgagaagcacgacgaggaguucugcgacaugcuccgccucuucgacuucaacaagcaggccauccagcgccucaaggcccccgcccagauguccauccagcucaucaacaaggccgucaacgcccucaucaacgaccagcucaucaugaagaaccaccuccgcgacaucaugugcauccccuacugcaacuacuccaaguacugguaccucaaccacaccaccaccggcaagaccucccuccccaagugcuggcucgucuccaacggcuccuaccucaacgagacccacuucuccgacgacaucgagcagcaggccgacaacaugaucaccgagaugcuccagaaggaguacauggagcgccagggcaagaccccccucggccucgucgaccucuucgucuucuccaccuccuucuaccucaucuccaucuuccuccaccucgucaagauccccacccaccgccacaucgucggcaagcccugccccaagccccaccgccucaaccacaugggcaucugcuccugcggccucuacaagcagcccggcguccccgucaaguggaagcgcugaggacuagucccuguucccagagcccacuuuuuuuucuuuuuuugaaauaaaauagccugucuuucagaucuaaaaaaaaaaaaaaaaaaaaaaaaaaaaaaaaaaaaaaaaaaaaaaaaaaaaaaaaaaaaaaaaugcaucccccccccccccccccccccccccccccccaaaggcucuuuucagagccaccagaauu

SEQ ID NO: 6520 - RNA, 1771 nt, Artificial Sequence
  mRNA product Design a-2 comprising derived and/or modified sequence from LASV(LM776-SLE-2012;Clade IV)__AIT17824__GPCstabilized (opt2)
gggagaguccgcucagccagguugcagaagcggcuuagcguguguccuaaucuucucucugcguguagguaggccugugccgcaaacaagcuuaccaugggccagaucgucaccuucuuccaggaggucccccacgucaucgaggaggucaugaacaucguccucaucgcccucuccauccucgccguccucaagggccucuacaacuucgccaccugcggccucgucggccucgucaccuuccuccuccucugcggccgcuccugcaccaccuccgucuacaagggcgucuacgagcuccagacccucgagcucaacauggagacccucaacaugaccaugccccucuccugcaccaagaacaacucccaccacuacaucauggucggcaacgagaccggccucgagcucacccucaccaacaccuccaucaucaaccacaaguucugcaaccucuccgacgcccacaagaagaaccucuacgaccacgcccucauguccaucaucuccaccuuccaccucuccauccccaacuucaaccaguacgaggccauguccugcgacuucaacggcggcaagaucuccguccaguacaaccucucccacuccuacgccggcgacgccgccaaccacugcggcaccgucgccaacggcguccuccagaccuucaugcgcauggccuggggcggcuccuacaucgcccucgacuccggcugcggcaagugggacugcaucaugaccuccuaccaguaccucaucauccagaacaccaccugggaggaccacugccaguucucccgccccucccccaucggcuaccucggccuccucucccagcgcacccgcgacaucuacaucucccgccgccgccggggcaccuucaccuggacccucuccgacuccgagggcaaggacacccccggcggcuacugccucacccgcuggaugcucaucgaggccgagcucaagugcuucggcaacaccgccgucgccaagugcaacgagaagcacgacgaggaguucugcgacaugcuccgccucuucgacuucaacaagcaggccauccagcgccucaaggcccccgcccagauguccauccagcucaucaacaaggccgucaacgcccucaucaacgaccagcucaucaugaagaaccaccuccgcgacaucaugugcauccccuacugcaacuacuccaaguacugguaccucaaccacaccaccaccggcaagaccucccuccccaagugcuggcucgucuccaacggcuccuaccucaacgagacccacuucuccgacgacaucgagcagcaggccgacaacaugaucaccgagaugcuccagaaggaguacauggagcgccagggcaagaccccccucggccucgucgaccucuucgucuucuccaccuccuucuaccucaucuccaucuuccuccaccucgucaagauccccacccaccgccacaucgucggcaaguccugccccaagccccaccgccucaaccacaugggcaucugcuccugcggccucuacaagcagcccggcguccccguccgcuggaagcgcugaggacuagucccuguucccagagcccacuuuuuuuucuuuuuuugaaauaaaauagccugucuuucagaucuaaaaaaaaaaaaaaaaaaaaaaaaaaaaaaaaaaaaaaaaaaaaaaaaaaaaaaaaaaaaaaaaugcaucccccccccccccccccccccccccccccccaaaggcucuuuucagagccaccagaauu

SEQ ID NO: 6521 - RNA, 1771 nt, Artificial Sequence
  mRNA product Design a-2 comprising derived and/or modified sequence from LASV(Mad39;Clade IV)__ANH09722__GPCstabilized (opt2)
gggagaguccgcucagccagguugcagaagcggcuuagcguguguccuaaucuucucucugcguguagguaggccugugccgcaaacaagcuuaccaugggccagaucgucaccuucuuccaggaggucccccacgucaucgaggaggucaugaacaucguccucaucgcccucuccauccucgccguccucaagggccucuacaacgucgccaccugcggccucaucggccucgucaccuuccuccuccucugcggccgcuccugcaccaccacccucuacaagggcgucuacgagcuccaggcccucgagcucaacauggagacccucaacaugaccaugccccucuccugcaccaagaacaacucccaccacuacauccgcgucggcaacgagaccggccucgagcucacccucaccaacaccucccucaucaaccacaaguucugcaaccucuccgacgcccacaagaagaaccucuacgaccacgcccucauguccaucaucuccaccuuccaccucuccauccccaacuucaaccaguacgaggccauguccugcgacuucaacgacggcaagaucuccguccaguacaaccucucccacaccuacgccggcgacaccgccaaccacugcggcaccgucgccaacggcguccuccagaccuucaugcgcauggccuggggcggcuccuacaucgcccucgacuccggcugcggcggcugggacugcaucaugaccuccuaccaguaccucaucauccagaacaccaccugggaggaccacugccaguucucccgccccucccccaucggcuaccucggccuccucucccagcgcacccgcgacaucuacaucucccgccgccgccggggcaccuucaccuggacccucuccgacuccgagggcaaggacacccccggcggcuacugccucacccgcuggaugcucaucgaggccgagcucaagugcuucggcaacaccgccgucgccaagugcaacgagaagcacgacgaggaguucugcgacaugcuccgccucuucgacuucaacaagcaggccauccagcgccucaaggcccccgcccagauguccauccagcucaucaacaaggccgucaacgcccucaucaacgaccagcucaucaugaagaaccaccuccgcgacaucaugugcauccccuacugcaacuacuccaaguacugguaccucaaccacaccgucaccggcaagaccucccuccccaagugcuggcucgucuccaacggcuccuaccucaacgagacccacuucuccgacgacaucgagcagcaggccgacaacaugaucaccgagaugcuccagaaggaguacauggagcgccagggcaagaccccccucggccucgucgaccucuucgucuucuccaccuccuucuaccucaucuccaucuuccuccaccucgucaagauccccacccaccgccacgucgucggcaagcccugccccaagccccaccgccucaaccacaugggcaucugcuccugcggcuucuacaagcagcccggcguccccguccgcuggaagcgcugaggacuagucccuguucccagagcccacuuuuuuuucuuuuuuugaaauaaaauagccugucuuucagaucuaaaaaaaaaaaaaaaaaaaaaaaaaaaaaaaaaaaaaaaaaaaaaaaaaaaaaaaaaaaaaaaaugcaucccccccccccccccccccccccccccccccaaaggcucuuuucagagccaccagaauu

SEQ ID NO: 6522 - RNA, 1771 nt, Artificial Sequence
  mRNA product Design a-2 comprising derived and/or modified sequence from LASV(Z0947-SLE-2011;Clade IV)__AIT17840__GPCstabilized (opt2)
gggagaguccgcucagccagguugcagaagcggcuuagcguguguccuaaucuucucucugcguguagguaggccugugccgcaaacaagcuuaccaugggccagaucgucaccuucuuccaggaggucccccacgucaucgaggaggucaugaacaucguccucaucgcccucuccauccucgccguccucaagggccucuacaacuucgccaccugcggccucgucggccucgucaccuuccuccuccucugcggccgcuccugcaccaucucccucuacaagggcgucuacgagcuccagacccucgagcucaacauggagacccucaacaugaccaugccccucuccugcaccaagaacaacucccaccacuacaucauggucggcaacgagaccggccucgagcucacccucaccaacaccuccaucaucaaccacaaguucugcaaccucuccgacgcccacaagaagaaccucuacgaccacgcccucauguccaucaucuccaccuuccaccucuccauccccaacuucaaccaguacgaggccauguccugcgacuucaacggcggcaagaucuccguccaguacaaccucucccacuccuacgccggcgacgccgccaaccacugcggcaccgucgccaacggcguccuccagaccuucaugcgcauggccuggggcggcuccuacaucgcccucgacuccggcugcgaccgcugggacugcaucaugaccuccuaccaguaccucaucauccagaacaccaccugggaggaccacugccaguucucccgccccucccccaucggcuaccucggccuccucucccagcgcacccgcgacaucuacaucucccgccgccgccggggcaccuucaccuggacccucuccgacuccgagggcaaggacacccccggcggcuacugccucacccgcuggaugcucaucgaggccgagcucaagugcuucggcaacaccgccgucgccaagugcaacgagaagcacgacgaggaguucugcgacaugcuccgccucuucgacuucaacaagcaggccauccagcgccucaaggcccccgcccagauguccauccagcucaucaacaaggccgucaacgcccucaucaacgaccagcucaucaugaagaaccaccuccgcgacaucaugugcauccccuacugcaacuacuccaaguacugguaccucaaccacaccaccaccggcaagaccucccuccccaagugcuggcucgucuccaacggcuccuaccucaacgagacccacuucuccgacgacaucgagcagcaggccgacaacaugaucaccgagaugcuccagaaggaguacauggagcgccagggcaagaccccccucggccucgucgaccucuucgucuucuccaccuccuucuaccucaucuccaucuuccuccaccucgucaagauccccacccaccgccacaucgucggcaagcccugccccaagccccaccgccucaaccacaugggcaucugcuccugcggccucuacaagcagcccggcguccccgucaaguggaagcgcugaggacuagucccuguucccagagcccacuuuuuuuucuuuuuuugaaauaaaauagccugucuuucagaucuaaaaaaaaaaaaaaaaaaaaaaaaaaaaaaaaaaaaaaaaaaaaaaaaaaaaaaaaaaaaaaaaugcaucccccccccccccccccccccccccccccccaaaggcucuuuucagagccaccagaauu

SEQ ID NO: 6523 - RNA, 1771 nt, Artificial Sequence
  mRNA product Design a-2 comprising derived and/or modified sequence from LASV(Josiah;Clade IV)__NP_694870__GPCstabilized (opt3)
gggagaguccgcucagccagguugcagaagcggcuuagcguguguccuaaucuucucucugcguguagguaggccugugccgcaaacaagcuuaccaugggccagaucgugaccuucuuucaagaggucccccacguuauugaagaggugaugaacauaguacugaucgcccucagcgugcuugcuguccugaagggguuguacaauuucgcaacaugcggauuagugggucugguuacuuuucuacuccuguguggcagauccugcacgaccucucuuuauaaagggguguacgaacugcagacauuggagcucaacauggaaacucugaauaugaccaugccucugucauguacaaagaacaauagucaucacuauauuauggucggaaacgagaccggccucgaguuaacucugacaaauaccagcaucauuaaccauaaauucugcaaucuuuccgacgcccacaagaaaaacuuguacgaucaugcgcugaugucuaucauaucgacguuucaccuaucaaucccaaauuucaaccaguaugaagcuaugagcugugacuuuaauggugggaagauuagugugcaguacaaccucucccacucuuaugccggagaugcagccaaucauugcggcacuguagcuaacggcguucugcaaaccuucaugaggauggcauggggagggagcuacaucgcccuugacuccgguugcggcaacugggauuguauuaugacaucauaccaguaucugaucauacagaauacuaccugggaggaccacugccaguuuagucgcccgagccccauuggguacuugggacuccugucucaacgaacacgugauaucuauauuuccagaaggcgccggggcaccuucacguggacucucucagacagcgaagguaaggauacaccugggggauacugucuuacccgguggaugcugaucgaggcugaguugaaaugcuuuggcaacacugccguggcgaaguguaaugaaaaacaugacgaggaguucugcgauaugcuacgccuguuugacuucaacaagcaggcaauccagagacucaaagcccccgcucagaugaguauucaacugauaaauaaggccgucaacgcacuuaucaaugaucagcugauuaugaagaaccacuugagggacaucaugugcauaccauauugcaauuacucuaaauauugguaccucaaccacacaaccacggggcggaccucccugcccaaguguugguuagugagcaauggaucguaccugaacgaaacacauuucucugacgauauugagcagcaagcugacaauaugaucacugagaugcuacagaaagaauauauggagcgccaggguaagaccccucucggccugguggaucuuuuugucuucuccacaucauuuuacuugaucaguauuuuccugcaccucguuaaaaucccaacucaucgacacauugugggaaagagcugccccaaaccucauagacugaaccacauggggauauguuccugcggccuuuauaagcagccagguguaccggugaaguggaaaaggugaggacuagucccuguucccagagcccacuuuuuuuucuuuuuuugaaauaaaauagccugucuuucagaucuaaaaaaaaaaaaaaaaaaaaaaaaaaaaaaaaaaaaaaaaaaaaaaaaaaaaaaaaaaaaaaaaugcaucccccccccccccccccccccccccccccccaaaggcucuuuucagagccaccagaauu

SEQ ID NO: 6524 - RNA, 1768 nt, Artificial Sequence
  mRNA product Design a-2 comprising derived and/or modified sequence from LASV(LP;Clade I)__AAF86701__GPCstabilized (opt3)
gggagaguccgcucagccagguugcagaagcggcuuagcguguguccuaaucuucucucugcguguagguaggccugugccgcaaacaagcuuaccaugggccagaucauuaccuucuuucaagaggugccccacgucauagaagagguuaugaacaucgugcugauugcccucagccuucuggcuaucuugaagggguuauacaauauugcaacaugcggaaucauaggucugguagccuuccuauuucucuguggcaaauccugcucucugacucuuaaagggggauaugaacugcagacguuggagcucaacauggaaacccugaauaugacaaugccucugucauguacuaagaacaguagccaucacuacaucagagugggcaaugagaccggucucgaguuaacacugaccaacacuuccauuaucaaucauaaguucugcaaccuuucugacgcgcacaaaaagaauuuguaugaucaugcucugaugucgauuaucucaacauuucaccuaagcauaccaaacuucaaucaguacgaagccaugaguugugacuuuaacgggggaaagauuuccguccaguauaaucucucucacagcuacgcaggcgaugccgcugagcauugcggcaccguggcaaacgggguucugcaaacguucaugaggauggccuggggaggucgguauaucgcucuugacuccggcugcgggaauugggauuguauuaugacuucauaccaguaccugaucauccagaacaccacaugggaagaccacugccaguuuagucgcccgagccccauuggauauuugggccuccugucucaacgaacucgugauauauacaucuccagaaggcgccgggguaccuucacauggacccucucagacagcgaggggaacgagacgccuggaggcuauugucuuacucgguggaugcugauugaagccgaguugaagugcuuuggcaauacagcgguggcaaaauguaacgaaaagcaugaugaggaguucugcgacaugcuacgccuguuugauuucaauaaacaggccaucagaaggcucaaggcucccgcccagaugaguauacagcugauuaacaaggcagucaaugcucuuaucaacgaccaacugaucaugaaaaaucacuugcgggauauuaugugcaucccauacugcaacuauucuaaguacugguaucucaaucacaccuccagcggacgcacuucgcugcccaaauguugguuaauuucuaacgguuccuaccugaaugagacacaguucucagacgacauagaacagcaagccgauaacaugaucaccgagaugcuacagaaggaauacauugagcgacagggcaaaacgccucucgggcugguggacaucuuuaucuucaguaccagcuuuuaucuuauuuccauauucuugcaucugaucaagauuccaacacacagacauaucguaggaaaacccugcccuaagccacacaggcucaaucauaugggcguuuguucuugcggucuguacaagcacccgggggugcccacuaaauggaagcggugaggacuagucccuguucccagagcccacuuuuuuuucuuuuuuugaaauaaaauagccugucuuucagaucuaaaaaaaaaaaaaaaaaaaaaaaaaaaaaaaaaaaaaaaaaaaaaaaaaaaaaaaaaaaaaaaaugcaucccccccccccccccccccccccccccccccaaaggcucuuuucagagccaccagaauu

SEQ ID NO: 6525 - RNA, 1768 nt, Artificial Sequence
  mRNA product Design a-2 comprising derived and/or modified sequence from LASV(803213;Clade II)__AAF86703__GPCstabilized (opt3)
gggagaguccgcucagccagguugcagaagcggcuuagcguguguccuaaucuucucucugcguguagguaggccugugccgcaaacaagcuuaccaugggccagaucauuaccuucuuucaagaggugccccacgucauagaagagguuaugaacaucgugcugauugcccucagccuucuggcuaucuugaaggggauuuacaauguagcaacaugcggauuauucggucugaucuccuuucuacuccuguguggcagaucuugcucagugacuuauaaaggggucuacgaacuucagacgcuggaguugaacauggccaaucucaacaugaccaugccucugaguuguacaaagaauaacagccaucacuauauaauggugggaaaugaaacuggccuggagcucaccuuaacaaacaccuccaucauuaaucauaaauucugcaaccugucugacgcgcacaagaaaaaucuuuacgaucaugcuuugaugucgaucauuucaacuuuucaccugagcaucccaaacuucaaucaguaugaggccaugaguugugacuuuaacggugggaagauauccguucaguacaaucuaucucacagcuucgcaguggaugccgcuaaccauugcggaacaauugcaaacggcguccuccaaaccuuuaugaggauggccuggggcggguccuauaucgcucuggacucaggaugcgguaauugggauuguauuaugacgaguuaccaguaccuuaucauccagaacacuaccugggaagaccacugccaguucagccggccgucucccauuggcuaucugggguugcucucccaacgcacacgagauauauacaucucacguagacgccggggaacuuuuaccuggacacugagcgacagugagggcaaugaagccccugguggguauugucucaccagguggaugcuuauugaggcggagcugaaaugcuucggaaacacggcaguggccaaguguaaugaaaaacaugaugaggaauuuugcgacauguugcggcuauucgauuucaacaagcaggcuaucaaacgccugaagacucccgcccagaugucuauacagcucauuaauaaggcaguaaacgcucugaucaaugaccaacuuaucaugaaaaaccaccugagagauauuaugugcaucccauacugcaauuauuccagguacugguauuugaaccacacaguuaccggcaagacuagccucccccgguguuggcuggugucgaaugggucuuacuuaaacgaaacacauuuuuccgacgacauugagcagcaggccgauaauaugauaaccgagaugcugcaaaaagaauacauggaccgccagggaaagacgccucuaggucucgucgaucuguucguguuuucaaccaguuucuaucuuaucagcaucuuuuugcaccuggugaaaauuccaacacaucgacacaucgucggcaagcccugcccuaaaccacauagacucaaccacauggggauuuguuccugcggacuguacaagcacccgggcguucccgugaaguggaaaaggugaggacuagucccuguucccagagcccacuuuuuuuucuuuuuuugaaauaaaauagccugucuuucagaucuaaaaaaaaaaaaaaaaaaaaaaaaaaaaaaaaaaaaaaaaaaaaaaaaaaaaaaaaaaaaaaaaugcaucccccccccccccccccccccccccccccccaaaggcucuuuucagagccaccagaauu

SEQ ID NO: 6526 - RNA, 1768 nt, Artificial Sequence
  mRNA product Design a-2 comprising derived and/or modified sequence from LASV(GA391;Clade III)__CAA36645__GPCstabilized (opt3)
gggagaguccgcucagccagguugcagaagcggcuuagcguguguccuaaucuucucucugcguguagguaggccugugccgcaaacaagcuuaccaugggccagaucgugaccuucuuucaagaggucccccacguuauugaagaggugaugaacauaguacugaucgcccucagcauucuugcuauccugaagggguuguacaauguggcaacaugcggauuaauuggucuggucacuuuccuacuccuguccggcagaucuuguucacuuaucuauaaagggacguacgaacugcagaccuuggagcucaacauggaaacacugaauaugacuaugccucugaguugcaccaagaacaauagccaucacuauauaagggugggaaacgagacaggccucgaguuaacccugacuaauacauccauccuuaaccauaaauuuuguaauuugucugacgcccacaagcggaaccuguacgaucauucgcuaaugucaauuaucagcaccuuccaccucaguauuccaaauuuuaaccaguaugaagcgauguccugcgacuucaauggugggaaaaucacgguucaguacaaccugucucacagcuuugcuguggaugccgcaggacauuguggcacucuugccaauggcguccugcaaaccuucaugcgcauggcuuggggaggguccuauauagcauuggacucagguugcggcaacugggauugcauuaugacaaguuaccaguaccucaucauucagaacacuaccugggacgaucacugucaguuuagccguccgucucccaucggguaucugggauuacugucccaaagaacaagggacaucuacauuucacggcgccgccggggcaccuucacguggacucugagcgauagugaggguaaugaaacaccugggggauauugcuugaccagauggaugcuaauagaggccgagcugaaguguuuuggcaacacugcuguggccaagugcaaugaaaaacaugacgaggaguucugugauaugcucaggcuguuugacuucaacaagcaggcgauccggcgccuuaaaacacccgcacagaugucuauucagcugaucaauaaggccguaaacgcuuugauaaaugaucaacucauuaugaaaaaccaucugcgagacaucaugugcaucccauacugcaauuauuccagauacugguauuuaaaccacaccagcacggggaagaccucgcugcccaggugcuggcuaauuucuaauggauccuaccucaacgaaacaaaguucucagacgauaucgagcagcaggccgacaauaugauuacugagaugcugcaaaaagaauacauagaucggcaggguaagaccccucuuggcuugguugaccuguuuguguucaguacuagcuuuuaucucaucuccauuuuccugcaccuugucaaaaucccaacacaccgucauaucguggggaagcccuguccuaaaccacaccgccugaaccauaugggaauuugcucuuguggcuuguacaagcagccgggugugcccgucagauggaaaaggugaggacuagucccuguucccagagcccacuuuuuuuucuuuuuuugaaauaaaauagccugucuuucagaucuaaaaaaaaaaaaaaaaaaaaaaaaaaaaaaaaaaaaaaaaaaaaaaaaaaaaaaaaaaaaaaaaugcaucccccccccccccccccccccccccccccccaaaggcucuuuucagagccaccagaauu

SEQ ID NO: 6527 - RNA, 1771 nt, Artificial Sequence
  mRNA product Design a-2 comprising derived and/or modified sequence from LASV(AV;Clade V)__CCA30314__GPCstabilized (opt3)
gggagaguccgcucagccagguugcagaagcggcuuagcguguguccuaaucuucucucugcguguagguaggccugugccgcaaacaagcuuaccaugggccagaucgugaccuucuuucaagaggucccccacguuauugaagaggugaugaacauaguacugaucgcccucagcauucuugcugugcugaagggguuguacaauaucgcaacaugcggauuaauuggucugaucacuuuccuacuccuguguggcagauccugcagcucaaaccuuuauaaaggggucuacgaacugcagaguuuggaccucaauauggagacgcugaacaugaccaugccucugagcuguacaaagaauaacucccaucacuauauaagggugggaaaugauacuggccucgaauuaacccugacaaacaccucuauccuuaaucauaaauuuugcaacuugucggacgcccacaagaaagaucuguacgaccaugcgcuaaugucaauuaucagcacuuuccaccucaguauuccaaauuuuaaccaguaugaggcuauguccugugauuucaauggugggaagaucucuguucaguacaaccugagccacuccuaugccauagacgcagccaaucauugcggaacaguggcuaacggcauucuucaaaccuuuaugcggauggcauggggcgggucauacaucgcccuggauaguggaugcgguaacugggacuguauuaugacgagcuaccaguauuugaucauccagaauacuaccugggagaaccacugccaguucucucgaccgucccccauuggcuaccucgggcuguuaucacaacguacaagagauauauauaucagcaggcggcgccggggaacuuuuaccuggacacuuagugacucugaaggcaaugcuaccccugguggguacugucugacgcgcuggauguugauugaggccgaacuaaagugcuucggaaacacugcggucgcaaaauguaaugagaagcaugaugaggaauuuugcgacaugcugagacucuucgauuuuaacaaacaggccaucuccaggcugaagucucccgcucagaugucgauacagcuuauuaauaaagccgugaacgcacugaucaaugaccaauugaucaugaagaaccaccuccgggacauuaugugcaucccauauugcaauuacucuaaguauugguaccugaaccacacaauuaccggcaaaacuuccuuacccaaguguuggcugguaucaaaugggaguuaccuaaacgaaacacauuucagcgaugacauagagcagcaggcugauaauaugaucaccgaaaugcuccaaaaagaguauauggagcgccagggaaagacgccucugggucuuguugacuuguucguguuuuccaccucuuucuaccugauuagcaucuuucuccgacuggucaaaaucccaacacacagacauauugugggcaagcccugcccuaaaccacacaggcuuaaccauauggggauauguucaugcggacuguauaagcagccgggcgugcccguccgguggaagcguugaggacuagucccuguucccagagcccacuuuuuuuucuuuuuuugaaauaaaauagccugucuuucagaucuaaaaaaaaaaaaaaaaaaaaaaaaaaaaaaaaaaaaaaaaaaaaaaaaaaaaaaaaaaaaaaaaugcaucccccccccccccccccccccccccccccccaaaggcucuuuucagagccaccagaauu

SEQ ID NO: 6528 - RNA, 1768 nt, Artificial Sequence
  mRNA product Design a-2 comprising derived and/or modified sequence from LASV(Togo/2016/7082;Clade VI)__AMR44577__GPCstabilized (opt3)
gggagaguccgcucagccagguugcagaagcggcuuagcguguguccuaaucuucucucugcguguagguaggccugugccgcaaacaagcuuaccaugggccagaucauuaccuucuuucaagaggugccccacgucauagaagagguuaugaacaucgugcugauugcccucagccuucuggcuaucuugaaggggguauacaauguggcaacaugcggaauuaucgguuuagucacuuuccuguuucuauguggcagauccugcucucucauauauaaagggucauacgaacugcagacgcuugagcugaacauggaaaccuugaauaugacaaugccucucaguuguacuaagaacagcucccaucacuauaucagggugggaaaugagaccggccuggagcugacacucaccaacacuucuauuaucaaucauaaauucugcaacuuaucggacgcccacaagcggaaucuguacgaucaugcgcuuaugucaauuuugagcacauuucaccugaguaucccaaacuucaaucaguaugaagcuauguccugugacuuuaacggugggaaaauaucuguucaguacaaucuaagccacgccuaugcaguggaugccgcugagcauugcggaaccgucgcaaacggcgugcuccaaacguucaugcgcauggccuggggcggguccuacauugcucuggacucaggaugcgguaauugggauuguaucaugaccaguuaccaguaucuuauuauccagaacacuacaugggaagaccacugccaguuuagccguccgucucccaucggcuaccugggguugcucucccaaagaacuagggauauuuauauaucacggcgccgccggggaaccuucacauggacccugagcgacagugagggcaacgagacgccugguggguacugucucacuagauggaugcuuaucgaagccgagcugaagugcuuuggaaauacagcgguagcaaaguguaacgaaaaacaugaugaggaguucugcgacauguugaggcuauuugauuucaauaagcaggccauucagcggcugaaaucucccgcucagauguccauccaacucauaaacaaggccguuaaugcacugauuaacgaccagcuuaucaugaaaaaucaucugcgcgauaugaugugcaucccauauugcaacuacagcaaguauugguacuugaaucacaccucgucuggccgaacuucccuccccaaguguuggcuggugucaaacgggaguuacuuaaaugagacacacuucagcgacgacauugaacagcaagcugauaacaugaucaccgagaugcugcagaaagaauauauugacagacagggaaagacgccucuaggucucgucgaucuguuuguguucuccaccucuuuuuaccuuauaagcaucuucuugcaccugauuaaaaucccaacacauaggcacaucgugggcaagcccugcccuaaaccacaucggcucaaucacauggggauuuguucaugcggacuguauaagcagccgggcguccccacucguuggaaacgcugaggacuagucccuguucccagagcccacuuuuuuuucuuuuuuugaaauaaaauagccugucuuucagaucuaaaaaaaaaaaaaaaaaaaaaaaaaaaaaaaaaaaaaaaaaaaaaaaaaaaaaaaaaaaaaaaaugcaucccccccccccccccccccccccccccccccaaaggcucuuuucagagccaccagaauu

SEQ ID NO: 6529 - RNA, 1768 nt, Artificial Sequence
  mRNA product Design a-2 comprising derived and/or modified sequence from LASV(KAK-428;Clade n.d. (VII))__ANH09740__GPCstabilized (opt3)
gggagaguccgcucagccagguugcagaagcggcuuagcguguguccuaaucuucucucugcguguagguaggccugugccgcaaacaagcuuaccaugggccagaucgugaccuucuuucaagaggucccccacguuauugaagaggugaugaacauaguacugaucgcccucagccuucuggcuauuuugaagggguuauacaauuucgcaacaugcggagugaucggucugauuacuuuucuacuccuguguggcagauccugcucugccacguauaaagggcaguacgaacuucagacccuggaguugaacauggaaucacucaauaugacaaugccucugaguuguacuaagaacaauagccaucacuauaucagggcgggaaacaauaccggccuggagcucacauuaaccaacacuuccauaaucucucauaaauucugcaaucugucggacgcucacaagaaaaaccuuuacgaucauacauugaugucaauuaucaccacguuucaccugagcauuccaaauuucaaccaguaugaggccaugaguugugacuuuaauggugggaagaucuccauacaauacaaccuaucucacagcuaugcaggagaugccgcucagcauugcggcacugucgcaaauggcgugcuccagaccuucaugcggauggccuggggaggguccuaccuggcucuugacucagguugccgaggcugggauuguauuaucaguagcuaccaguaucugauuauccaaaacacaacuugggacgaucacugccaguuuucucguccgucccccaucggguacuugggauucguuucacagaagaccagagacauuuauauaagcaggcggcgccggggcacauuuaccuggacguuaagugauucugaaggucaugacaugccugggggauacugucugacucgcuggaugcucaucgaggccgaucuuaaaugcuucggcaacacagcgguggcaaaguguaaugaaaaacacgacgaggaguuuugcgauauguggagacuguucgacuucaacaagcaggccauucaaagguugaaagcucccgcccagaugaauauccagcuaauaaacaaggcagucaaugcucugauuaacgaccaacucaugaugaagaaucaucugcgggauaucaugugcaucccauauugcaacuacuccaaauuuugguaucuuaauaacaccacuacagggcgcaccagccugccccgauguugguugauuucgaauggaucuuaccucaacgagacgcacuucuccgacgauaucgaacagcaggccgacaauaugauuaccgagaugcugcagaaggaauacauggauagacaagguaaaacaccuuuaggccugguggaccuauuuguauucucaaccaguuuuuaucucauaacuaucuuccugcaccuuguuaagauuccaacacauaggcacaucguggggaaacccugcccuaagccacaucgguugaaccacaugggaaucuguagcugcggccuguacaaacagccggguguccccgugcguuggaagcgcugaggacuagucccuguucccagagcccacuuuuuuuucuuuuuuugaaauaaaauagccugucuuucagaucuaaaaaaaaaaaaaaaaaaaaaaaaaaaaaaaaaaaaaaaaaaaaaaaaaaaaaaaaaaaaaaaaugcaucccccccccccccccccccccccccccccccaaaggcucuuuucagagccaccagaauu

SEQ ID NO: 6530 - RNA, 1768 nt, Artificial Sequence; identical to SEQ ID NO: 6524
  mRNA product Design a-2 comprising derived and/or modified sequence from LASV(Pinneo-NIG-1969;Clade I)__AIT17836__GPCstabilized (opt3)

SEQ ID NO: 6531 - RNA, 1768 nt, Artificial Sequence
  mRNA product Design a-2 comprising derived and/or modified sequence from LASV(ISTH0009-NIG-2011;Clade II)__AIT17404__GPCstabilized (opt3)
gggagaguccgcucagccagguugcagaagcggcuuagcguguguccuaaucuucucucugcguguagguaggccugugccgcaaacaagcuuaccaugggccagaucauuaccuucuuucaagaggugccccacgucauagaagagguuaugaacaucgugcugauugcccucagccuucuggcuaucuugaaggggauuuacaauguagcaacaugcggauuauucggucugguguccuuucuacuccuguguggcagaucuugcucaacuacguauaaaggggucuacgaacuucagacccuggaguuggacauggccagucucaacaugacaaugccucugagcuguacuaagaauaacucccaucacuauaucauggugggaaaugaaaccggccuggagcucacauuaaccaacacuucuauaaucaaucauaaauucugcaaccugucggaugcgcacaagaaaaaucuuuacgaccaugcuuugaugucaauuaucagcacauuucaccugaguauuccaaacuucaaucaguaugaggccauguccugugauuuuaacggugggaagaucucuguucaguacaaucuaagccacgcauaugccguggacgcugcaaaccauugcggaaccauagccaauggcguccuccaaacguucaugaggauggcuuggggcggguccuacauugcccuggauucaggaugcgguaguugggacuguaucaugacuagcuaccaguaucuuauuauccagaacaccacaugggaagaucacugccaguuuucucggccgucccccaucggcuaccugggguugcucucacaacgcacucgagacauuuauauaagccguagacgccggggaaccuucacauggacccugagugauucugagggcaacgaaacgccugguggguacugucucacuagguggaugcuuaucgaggcggagcugaaaugcuuuggaaauacagcaguggccaaguguaacgaaaaacaugacgaggaguucugcgauauguugcggcuauuugacuucaauaagcaggcuauucgcagacugaaaacccccgcccagauguccauccagcucauaaacaaggcaguaaaugcucugauuaacgaucaacuuaucaugaagaaucaccugagggacaucaugugcauuccauauugcaacuacagcaaauauugguacuugaaucacacuguuacaggcaagaccucgcucccccgguguuggcuggugucuaacggguccuacuuaaaugaaacgcauuucucagacgauaucgagcagcaggccgacaacaugauuaccgagcugcuacaaaaagaauauauggaucgccagggaaagacaccucucggucuggucgaccuuuuuguguucaguacuagcuuuuacuugauauccaucuuccugcaccucauuaaaaucccaacccaucgacacaucacaggcaagcccugcccuaaaccacauagacugaaucacauggggauuuguucuugcggacuuuauaagcacccgggcgugcccgucaaguggaaaaggugaggacuagucccuguucccagagcccacuuuuuuuucuuuuuuugaaauaaaauagccugucuuucagaucuaaaaaaaaaaaaaaaaaaaaaaaaaaaaaaaaaaaaaaaaaaaaaaaaaaaaaaaaaaaaaaaaugcaucccccccccccccccccccccccccccccccaaaggcucuuuucagagccaccagaauu

SEQ ID NO: 6532 - RNA, 1768 nt, Artificial Sequence
  mRNA product Design a-2 comprising derived and/or modified sequence from LASV(ISTH2010-NIG-2012;Clade II)__AIT17482__GPCstabilized (opt3)
gggagaguccgcucagccagguugcagaagcggcuuagcguguguccuaaucuucucucugcguguagguaggccugugccgcaaacaagcuuaccaugggccagaucauuaccuucuuucaagaggugccccacgucauagaagagguuaugaacaucgugcugauugcccucagccuucuggcuaucuugaaggggauuuacaauguagcaacaugcggauuauucggucugguguccuuucuacuccuguguggcagaucuugcucaacuacguauaaaggggucuacgaacuucagacccuggaguuggacauggccagucucaacaugacaaugccucugagcuguacuaagaauaacucccaucacuauaucauggugggaaaugaaaccggccuggagcucacauuaaccaacacuucuauaaucaaucauaaauucugcaaccugucggaugcgcacaagaaaaaucuuuacgaccaugcuuugaugucaauuaucagcacauuucaccugaguauuccaaacuucaaucaguaugaggccauguccugugauuuuaacggugggaagaucucuguucaguacaaucuaagccacgcauaugccguggacgcugcaaaccauugcggaaccauagccaauggcguccuccaaacguucaugaggauggcuuggggcggguccuacauugcccuggauucaggaugcgguaguugggacuguaucaugacuagcuaccaguaucuuauuauccagaacaucaccugggaagaucacugccaguuuucucggccgucccccauuggcuaccugggguugcucucacaacgcacacgagacauauauaucagccguagacgccggggaacuuucaccuggacacugagugauucugagggcaacgaaaccccugguggguacugucucacgagguggaugcuuauugaggcggagcugaaaugcuuuggaaauacugcaguggccaaguguaacgaaaaacaugacgaggaguucugcgauauguugcggcuauuugacuucaauaagcaggcuauccgcagacugaaaacacccgcccagauguccauacagcucauuaacaaggcaguaaaugcucugaucaacgaucaacuuaucaugaagaaucaccugagggacauuaugugcaucccauauugcaacuacagcaaauauugguacuugaaucacaccguuacuggcaagacaucgcucccccgguguuggcuggugucuaacggguccuacuuaaaugaaacccauuucucagacgauauugagcagcaggccgacaacaugauaacggagcugcuacaaaaagaauauaucgaucgccagggaaagaccccucucggucuggucgaccuuuuuguguucaguacuagcuuuuacuugauuuccaucuuccugcaccucgugaaaaucccaacacaucgacacgucguuggcaagcccugcccuaaaccacauagacugaaucacauggggauuuguucuugcggacuuuauaagcacccgggcgugcccguaaaguggaaaaggugaggacuagucccuguucccagagcccacuuuuuuuucuuuuuuugaaauaaaauagccugucuuucagaucuaaaaaaaaaaaaaaaaaaaaaaaaaaaaaaaaaaaaaaaaaaaaaaaaaaaaaaaaaaaaaaaaugcaucccccccccccccccccccccccccccccccaaaggcucuuuucagagccaccagaauu

SEQ ID NO: 6533 - RNA, 1768 nt, Artificial Sequence
  mRNA product Design a-2 comprising derived and/or modified sequence from LASV(Lassa virus/H.sapiens-wt/NGA/2015/ISTH_0543;Clade II)__AVO03639__GPCstabilized (opt3)
gggagaguccgcucagccagguugcagaagcggcuuagcguguguccuaaucuucucucugcguguagguaggccugugccgcaaacaagcuuaccaugggccagaucauuaccuucuuucaagaggugccccacgucauagaagagguuaugaacaucgugcugauugcccucagccuucuggcuaucuugaaggggauuuacaauguagcaacaugcggauuauucggucugguguccuuucuacuccuguguggcagaucuugcucaacuacguauaaaggggucuacgaacuucagacccuggaguuggacauggccaaccucaauaugacaaugccucugaguuguacuaagaacaauagccaucacuauaucauggugggaaacgaaaccggccuggagcucacauuaaccaauacuuccauaaucaaccauaaauucugcaaucugucugaugcgcacaagaaaaaccuuuacgaccaugcuuugaugucgauuaucucaacauuucaccugagcauuccaaauuucaaccaguaugaggccaugaguugugauuuuaauggugggaagaucuccguucaguacaaccuaucucacaccuaugcaguggacgccgcuaaucauugcggaacgauagcaaacggcguccuccaaacuuucaugaggauggccuggggcgggagcuacauugcucuggauuccggaugcgguucaugggacuguaucaugaccaguuaccaguaucuugugauucagaacacaacuugggaagaucacugccaguuuagccggccgucucccaucggcuaccugggguugcucucccaacgcacccgagacaucuauauuucacguagacgccggggaacauucaccuggacgcugagcgauagugagggcaaugaaacuccugguggguacugucucacaagguggaugcuuauagaggccgagcugaaaugcuuuggaaacaccgcgguagcaaaguguaaugaaaaacaugacgaggaguucugcgauauguugcggcuauuugacuucaacaagcaggccauccgcagacugaaaacucccgcucagaugucuauucagcucaucaauaaggccguuaacgcacugauaaaugaucaacuuauuaugaagaaccaccugagggacaucaugugcaucccauauugcaauuacuccaaauauugguacuugaaccacacagugaccggcaagacgagccucccccgguguuggcuggucucgaaugggucuuacuuaaacgaaacccauuucuccgacgauauugagcagcaggcugacaauaugaucacagagcugcuacaaaaagaauauauugaucgccagggaaagacuccucucggucugguggaccuuuuuguguucucaaccaguuuuuacuugauaagcaucuuccugcaccucgucaaaauuccaacacaucgacacaucacuggcaagcccugcccuaaaccacauagacugaaccacauggggaucuguuccugcggacuuuauaagcacccgggcguucccgugaaguggaaaaggugaggacuagucccuguucccagagcccacuuuuuuuucuuuuuuugaaauaaaauagccugucuuucagaucuaaaaaaaaaaaaaaaaaaaaaaaaaaaaaaaaaaaaaaaaaaaaaaaaaaaaaaaaaaaaaaaaugcaucccccccccccccccccccccccccccccccaaaggcucuuuucagagccaccagaauu

SEQ ID NO: 6534 - RNA, 1768 nt, Artificial Sequence
  mRNA product Design a-2 comprising derived and/or modified sequence from LASV(Lassa virus/H.sapiens-wt/NGA/2016/ISTH_0009;Clade II)__AVO03571__GPCstabilized (opt3)
gggagaguccgcucagccagguugcagaagcggcuuagcguguguccuaaucuucucucugcguguagguaggccugugccgcaaacaagcuuaccaugggccagaucauuaccuucuuucaagaggugccccacgucauagaagagguuaugaacaucgugcugauugcccucagccuucuggcuaucuugaaggggauuuacaauguagcaacaugcggauuacugggucuaguguccuuccuccugcuuuguggcagaucuugcucaacuacguauaaaggggucuacgaacugcagaccuuggagcucgacauggccagucugaacaugacaaugccucugagcuguacuaagaauaacucccaucacuauaucauggugggaaaugaaaccggccucgaguuaacacugaccaacacuucuauaaucaaucauaaauuuugcaaccuuucggaugcgcacaagaaaaauuuguacgaccaugcucugaugucaauuaucagcacauuccaccuaaguauuccaaacuuuaaucaguaugaggccauguccugugauuucaacggugggaggaucucuguucaguacaaucucagccacuccuaugcaguggacgccgcuaaccauugcggaaccauagcaaauggcguccugcaaacguuuaugcggauggccuggggcgggucauacauugcucuugauaguggaugcgguagcugggacuguaucaugacuucuuaccaguaucugauuauccagaacaccacaugggaagaucacugccaguucucccgcccgucacccaucggcuacuuggggcuccugagccaacgaacucgugacauuuauauaaguagaaggcgccggggaaccuuuacauggacccucucugauuccgagggcaacgaaacgccugguggguacugucuuacucgguggaugcugaucgaggccgaguugaagugcuucggaaauacagcgguggcaaaauguaacgaaaagcaugacgaggaauuuugcgauaugcuacgccuguucgacuuuaauaaacaggccauuagaaggcucaagacccccgcucagaugagcauccagcugauaaacaaagccguaaaugcacuuauuaacgaucaacugaucaugaagaaucacuugcgggacaucaugugcauuccauauugcaacuacucgaaguauugguaccucaaucacacuguuacaggcaaaaccucucugccccgcuguugguuaguguccaacgggucauaccugaaugaaacgcauuucagugacgauaucgagcagcaggcugacaacaugauuaccgagcuacuccaaaaggaauauauagaucgacagggaaaaacaccucugggucuugucgacuuguucguguuuagcacuuccuucuaccugaucucuauuuuucuccaccuggugaagaucccaacccauagacacaucacaggcaaacccugcccuaagccacauaggcuuaaucacauggggauuuguagcugcggacuguauaaccacccgggcguccccguuaaauggaagcggugaggacuagucccuguucccagagcccacuuuuuuuucuuuuuuugaaauaaaauagccugucuuucagaucuaaaaaaaaaaaaaaaaaaaaaaaaaaaaaaaaaaaaaaaaaaaaaaaaaaaaaaaaaaaaaaaaugcaucccccccccccccccccccccccccccccccaaaggcucuuuucagagccaccagaauu

SEQ ID NO: 6535 - RNA, 1768 nt, Artificial Sequence
  mRNA product Design a-2 comprising derived and/or modified sequence from LASV(Lassa virus/H.sapiens-wt/NGA/2016/ISTH_0017;Clade II)__AVO03567__GPCstabilized (opt3)
gggagaguccgcucagccagguugcagaagcggcuuagcguguguccuaaucuucucucugcguguagguaggccugugccgcaaacaagcuuaccaugggccagaucauuaccuucuuucaagaggugccccacgucauagaagagguuaugaacaucgugcugauugcccucagccuucuggcuaucuugaaggggauuuacaauguagcaacaugcggauuauucggucugguguccuuucuacuccuguguggcagaucuugcucaacuacguauaaaggggucuacgaacuucagacccuggaguuggacauggccagucucaacaugacaaugccucugagcuguacuaagaauaacucccaucacuauaucauggugggaaaugaaaccggccuggagcucacauuaaccaacacuucuauaaucaaucauaaauucugcaaccugucggaugcgcacaagaaaaaucuuuacgaccaugcuuugaugucaauuaucagcacauuucaccugaguauuccaaacuucaaucaguaugaggccauguccugugauuuuaacggugggaagaucucuguucaguacaaucuaagccacaccuaugcaauagacgccgcuaaccauugcggaacgauugcaaauggcgugcuccaaacuuucaugaggauggccuggggcggguccuacaucgcucuggauucaggaugcgguaguugggacuguauuaugaccagcuaccaguaucuuaucauccagaacacaacuugggaagaucacugccaguuuucucggccgucccccauuggcuaccugggguugcucucacaacgcacccgagacauauauaucagccguagacgccggggaacauucaccuggacgcugagugauucugagggcaacgaaacuccugguggguacugucucacaagguggaugcuuauugaggccgagcugaaaugcuuuggaaauaccgcggucgcaaaguguaacgaaaaacaugacgaggaguucugcgauauguugcggcuauuugacuucaauaagcaggccauccgcagacugaaaacucccgcucagauguccauacagcucauuaacaaggccgugaaugcacugaucaacgaucaacuuaucaugaagaaucaccugagggacauuaugugcaucccauauugcaacuacagcaaauauugguacuugaaucacacaguaaccggcaagacgucgcucccccgguguuggcugguuucuaacggguccuacuuaaaugaaacccauuucucagacgauauugagcagcaggcugacaacaugauaacagagcugcuacaaaaagaauauauggaucgccagggaaagacuccucucggucugguggaccuuuuugucuucaguaccagcuuuuacuugaucuccauuuuccugcaccucgugcgaaucccaacacauagacacgugaucggcaaacccugcccuaagccacauaggcugaaucacauggggauuuguucuugcggacuuuauaaacacccgggcguccccguuaaguggaagcggugaggacuagucccuguucccagagcccacuuuuuuuucuuuuuuugaaauaaaauagccugucuuucagaucuaaaaaaaaaaaaaaaaaaaaaaaaaaaaaaaaaaaaaaaaaaaaaaaaaaaaaaaaaaaaaaaaugcaucccccccccccccccccccccccccccccccaaaggcucuuuucagagccaccagaauu

SEQ ID NO: 6536 - RNA, 1768 nt, Artificial Sequence
  mRNA product Design a-2 comprising derived and/or modified sequence from LASV(Lassa virus/H.sapiens-wt/NGA/2018/ISTH_0959;Clade II)__AVV65099__GPCstabilized (opt3)
gggagaguccgcucagccagguugcagaagcggcuuagcguguguccuaaucuucucucugcguguagguaggccugugccgcaaacaagcuuaccaugggccagaucauuaccuucuuucaagaggugccccacgucauagaagagguuaugaacaucgugcugauugcccucagccuucuggcuaucuugaaggggauuuacaauguagugacaugcggauuauucggucuggucuccuuucuacuccuguguggcagaucuugcucaacuacguauaaagggguguacgaacuucagacccuggaguuggacauggcaagucucaacaugacaaugccucugagcuguacuaagaauaacucccaucacuauaucaugguuggaaaugaaaccggccuggagcucacauuaaccaacacuucuauaaucaaucauaaauucugcaaccugucggaugcccacaagaaaaaucuuuacgaccaugcguugaugucaauuaucagcacauuucaccugaguauuccaaacuucaaucaguaugaggcuauguccugugauuuuaacggugggaagaucucugugcaguacaaucuaagccacgccuaugcaauagacgccgcuaaccauugcggaaccauugcaaauggcguccuccaaacguucaugaggauggccuggggcggguccuacaucgcucuggauucaggaugcgguaguugggacuguauuaugacuagcuaccaguaucuuaucauccagaacaccacaugggaagaucacugccaguuuucucggccgucccccauuggcuaccugggguugcucucacaacgcacucgagacauauauaucagccguagacgccggggaaccuucacauggacccugagugauucugagggcaacgaaacgccugguggguacugucucacuagguggaugcuuauugaggccgagcugaaaugcuuuggaaauacagcgguggcaaaguguaacgaaaaacaugacgaggaguucugcgauauguugcggcuauuugacuucaauaagcaggccauccgcagacugaaaacccccgcucagauguccauacagcucauuaacaaggccguaaaugcacugaucaacgaucaacuuaucaugaagaaucaccugagggacauuaugugcaucccauauugcaacuacagcaaauauugguacuugaaucacacuguuacaggcaagaccucgcucccccgguguuggcuggugucuaacggguccuacuuaaaugaaacgcauuucucagacgauauugagcagcaggcugacaacaugauaaccgagcugcuacaaaaagaauauaucgaucgccagggaaagacaccucucggucuggucgaccuuuuuguguucaguacuagcuuuuacuugauuuccaucuuccugcaccucgugaaaaucccaacccaucgacacgucauuggcaagcccugcccuaaaccacauagacugaaucacauggggauauguucuugcggacuuuauaagcacccgggcguucccgugaaguggaaaaggugaggacuagucccuguucccagagcccacuuuuuuuucuuuuuuugaaauaaaauagccugucuuucagaucuaaaaaaaaaaaaaaaaaaaaaaaaaaaaaaaaaaaaaaaaaaaaaaaaaaaaaaaaaaaaaaaaugcaucccccccccccccccccccccccccccccccaaaggcucuuuucagagccaccagaauu

SEQ ID NO: 6537 - RNA, 1768 nt, Artificial Sequence
  mRNA product Design a-2 comprising derived and/or modified sequence from LASV(LASV003-NIG-2008;Clade II)__AIT17580__GPCstabilized (opt3)
gggagaguccgcucagccagguugcagaagcggcuuagcguguguccuaaucuucucucugcguguagguaggccugugccgcaaacaagcuuaccaugggccagaucauuaccuucuuucaagaggugccccacgucauagaagagguuaugaacaucgugcugauugcccucagccuucuggcuaucuugaaggggauuuacaauguagcaacaugcggauuauucggucugguguccuuucuacuccuguguggcagaucuugcucaacuacguauaaaggggucuacgaacuucagacccuggaguuggacauggccagucucaacaugacaaugccucugagcuguacuaagaauaacucccaucacuauaucauggugggaaaugaaaccggccuggagcucacauuaaccaacacuucuauaaucaaucauaaauucugcaaccugucggaugcgcacaagaaaaaucuuuacgaccaugcuuugaugucaauuaucagcacauuucaccugaguauuccaaacuucaaucaguaugaggccauguccugugauuuuaacggugggaagaucucuguucaguacaaucuaagccacaccuaugcaguggacgccgcuaaccauugcggaacgauagcaaauggcguccuccaaacuuucaugaggauggccuggggcggguccuacauugcucuggauucaggaugcgguaguugggacuguaucaugaccagcuaccaguaucuuauuauccagaacacaacuugggaagaucacugccaguuuucucggccgucccccaucggcuaccugggguugcucucacaacgcacccgagacauuuauauaagccguagacgccggggaacauucaccuggacgcugagugauucugaguccaacgaaacuccuggcgguuacugucucacaagguggaugcuuaucgaggccgagcugaaaugcuuugggaauaccgcgguggcaaaguguaacgaaaaacaugacgaggaguucugcgauauguugcggcuauuugacuucaauaagcaggccauucgcagacugaaagcucccgcccagaugagcauccagcucauaaacaaggcaguaaaugcucugauuaacgaucaacuuaucaugaagaaucaccugagggacaucaugugcauuccauauugcaacuacucgaaauauugguacuugaaucacacuguuacaggacggaccucucucccccgcuguuggcugguguccaacggcucauacuuaaaugaaacgcauuucagugacgauaucgagcagcaggccgacaacaugauuaccgagcugcuacaaaaggaauauauggaucgacaggggaaaacaccucucggacuggucgaccuuuuuguguucagcacuuccuuuuacuugauaucuaucuuccugcaccucgugaagauuccaacccauagacacgucaucgguaaacccugcccuaagccacauaggcugaaucacaugggcaucuguagcugcgggcuuuauaaacacccgggaguucccgugaaguggaagcggugaggacuagucccuguucccagagcccacuuuuuuuucuuuuuuugaaauaaaauagccugucuuucagaucuaaaaaaaaaaaaaaaaaaaaaaaaaaaaaaaaaaaaaaaaaaaaaaaaaaaaaaaaaaaaaaaaugcaucccccccccccccccccccccccccccccccaaaggcucuuuucagagccaccagaauu

SEQ ID NO: 6538 - RNA, 1768 nt, Artificial Sequence
  mRNA product Design a-2 comprising derived and/or modified sequence from LASV(LASV035-NIG-2009;Clade II)__AIT17588__GPCstabilized (opt3)
gggagaguccgcucagccagguugcagaagcggcuuagcguguguccuaaucuucucucugcguguagguaggccugugccgcaaacaagcuuaccaugggccagaucauuaccuucuuucaagaggugccccacgucauagaagagguuaugaacaucgugcugauugcccucagccuucuggcuaucuugaaggggauuuacaauguagcaacaugcggauuauucggucugguguccuuucuacuccuguguggcagaucuugcucaacuacguauaaaggggucuacgaacuucagacccuggaguuggacauggccagucucaacaugacaaugccucugagcuguacuaagaauaacucccaucacuauaucauggugggaaaugaaaccggccuggagcucacauuaaccaacacuucuauaaucaaucauaaauucugcaaccugucggaugcgcacaagaaaaaucuuuacgaccaugcuuugaugucaauuaucagcacauuucaccugaguauuccaaacuucaaucaguaugaggccauguccugugauuuuaacggugggaagaucucuguucaguacaaucuaagccacgcauaugccguggacgcugcaaaccauugcggaaccauagccaauggcguccuccaaacguucaugaggauggcuuggggcggguccuacauugcccuggauucaggaugcgguaguugggacuguaucaugacuagcuaccaguaucuuauuauccagaacaccacaugggaagaucacugccaguuuucucggccgucccccaucggcuaccugggguugcucucacaacgcacucgagacauuuauauaagccguagacgccggggaaccuucacauggacccugagugauucugagggcaacgaaacgccugguggguacugucucacuagguggaugcuuaucgaggcggagcugaaaugcuuuggaaauacagcaguggccaaguguaacgaaaaacaugacgaggaguucugcgauauguugcggcuauuugacuucaauaagcaggcuauucgcagacugaaagcccccgcacagauguccauccagcucauaaacaaggcuguaaaugcccugauuaacgaucaacuuaucaugaagaaucaccugagggacaucaugugcauuccauauugcaacuacagcaaauauugguacuugaaucacaccguuacuggcaagacaucgcucccccgguguuggcuggugucuaacggguccuacuuaaaugaaacccauuucucagacgauaucgagcagcaggcggacaacaugauuacggagcugcuacaaaaagaauauauagaucgccagggaaagaccccucucggucuggucgaccuuuuuguguucaguacuagcuuuuacuugaucuccauuuuccugcaccucgugaaaaucccaacacaucgacacgucaucggcaagcccugcccuaaaccacauagacugaaucacauggggauuuguucuugcggacuuuauaagcacccgggcguucccgugaaguggaaaaggugaggacuagucccuguucccagagcccacuuuuuuuucuuuuuuugaaauaaaauagccugucuuucagaucuaaaaaaaaaaaaaaaaaaaaaaaaaaaaaaaaaaaaaaaaaaaaaaaaaaaaaaaaaaaaaaaaugcaucccccccccccccccccccccccccccccccaaaggcucuuuucagagccaccagaauu

SEQ ID NO: 6539 - RNA, 1768 nt, Artificial Sequence
  mRNA product Design a-2 comprising derived and/or modified sequence from LASV(LASV1000-NIG-2009;Clade II)__AIT17782__GPCstabilized (opt3)
gggagaguccgcucagccagguugcagaagcggcuuagcguguguccuaaucuucucucugcguguagguaggccugugccgcaaacaagcuuaccaugggccagaucauuaccuucuuucaagaggugccccacgucauagaagagguuaugaacaucgugcugauugcccucagccuucuggcuaucuugaaggggauuuacaauguagcaacaugcggauuauucggucugguguccuuucuacuccuguguggcagaucuugcucaacuacguauaaaggggucuacgaacuucagacccuggaguuggacauggccagucucaacaugacaaugccucugagcuguacuaagaauaacucccaucacuauaucauggugggaaaugaaaccggccuggagcucacauuaaccaacacuucuauaaucaaucauaaauucugcaaccugucggaugcgcacaagaaaaaucuuuacgaccaugcuuugaugucaauuaucagcacauuucaccugaguauuccaaacuucaaucaguaugaggccauguccugugauuuuaacggugggaagaucucuguucaguacaaucuaagccacaccuaugcaguggacgccgcuaaccauugcggaacgauagcaaauggcguccuccaaacuuucaugaggauggccuggggcggguccuacauugcucuggauucaggaugcgguaguugggacuguaucaugaccagcuaccaguaucuuauuauccagaacacaacuugggaagaucacugccaguuuucucggccgucccccaucggcuaccugggguugcucucacaacgcacccgagacauuuauauaagccguagacgccggggaacauucaccuggacgcugagugauucugagggcaacgaaacuccugguggguacugucucacaagguggaugcuuaucgaggccgagcugaaaugcuuuggaaauaccgcgguggcaaaguguaacgaaaaacaugacgaggaguucugcgauauguugcggcuauuugacuucaauaagcaggccauuaaacgccugaagacucccgcucagauguccauccagcucauaaacaaggccguaaaugcacugauuaacgaucaacuuaucaugaaaaaucaccugagagacaucaugugcauuccauauugcaacuacagcaaguauugguacuugaaucacacaguuaccggcaaaacgucgcuccccagguguuggcuggugucuaacggguccuacuuaaaugaaacccauuucucagacgauaucgagcagcaggcugacaacaugauuacagagcugcuacaaaaggaauauauagaucggcagggaaaaacuccucucggucuggucgaccuuuuuguguucaguaccagcuuuuacuugaucuccauuuuccugcaccucgugaagaucccaacacaucgccacgucguuggcaaacccugcccuaagccacaucgacugaaucacauggggaucuguucuugcggacuuuauaagcacccgggcgugcccguaaaauggaagagaugaggacuagucccuguucccagagcccacuuuuuuuucuuuuuuugaaauaaaauagccugucuuucagaucuaaaaaaaaaaaaaaaaaaaaaaaaaaaaaaaaaaaaaaaaaaaaaaaaaaaaaaaaaaaaaaaaugcaucccccccccccccccccccccccccccccccaaaggcucuuuucagagccaccagaauu

SEQ ID NO: 6540 - RNA, 1768 nt, Artificial Sequence
  mRNA product Design a-2 comprising derived and/or modified sequence from LASV(LASV221-NIG-2010;Clade II)__AIT17624__GPCstabilized (opt3)
gggagaguccgcucagccagguugcagaagcggcuuagcguguguccuaaucuucucucugcguguagguaggccugugccgcaaacaagcuuaccaugggccagaucauuaccuucuuucaagaggugccccacgucauagaagagguuaugaacaucgugcugauugcccucagccuucuggcuaucuugaaggggauuuacaauguagcaacaugcggauuauucggucugguguccuuucuacuccuguguggcagaucuugcucaacuacguauaaaggggucuacgaacuucagacccuggaguuggacauggccagucucaacaugacaaugccucugagcuguacuaagaauaacucccaucacuauaucauggugggaaaugaaaccggccuggagcucacauuaaccaacacuucuauaaucaaucauaaauucugcaaccugucggaugcgcacaagaaaaaucuuuacgaccaugcuuugaugucaauuaucagcacauuucaccugaguauuccaaacuucaaucaguaugaggccauguccugugauuuuaacggugggaagaucucuguucaguacaaucuaagccacaccuaugcaauagacgccgcuaaccauugcggaacgauugcaaauggcgugcuccaaacuuucaugaggauggccuggggcggguccuacaucgcucuggauucaggaugcgguaguugggacuguauuaugaccagcuaccaguaucuuaucauccagaacacaacuugggaagaucacugccaguuuucucggccgucccccauuggcuaccugggguugcucucacaacgcacccgagacauauauaucagccguagacgccggggaacauucaccuggacgcugagugauucugagggcaacgaaacuccugguggguacugucucacaagguggaugcuuauugaggccgagcugaaaugcuuuggaaauaccgcggucgcaaaguguaacgaaaaacaugacgaggaguucugcgauauguugcggcuauuugacuucaauaagcaggccauccgcagacugaaaacucccgcucagauguccauacagcucauuaacaaggccgugaaugcacugaucaacgaucaacuuaucaugaagaaucaccugagggacauuaugugcaucccauauugcaacuacagcaaauauugguacuugaaucacacaguaaccggcaagacgucgcucccccgguguuggcugguuucuaacggguccuacuuaaaugaaacccauuucucagacgauauugagcagcaggcugacaacaugauaacagagaugcugcaaaaagaauauauggaucgccagggaaagacuccucuaggucucguggaccuguuugucuucaguaccagcuuuuaccuuaucuccauuuucuugcaccuggugaaaaucccaacacaucgacacgugaucggcaagcccugcccuaaaccacauagacucaaucacauggggauuuguucuugcggacuguauaagcacccgggcguccccguuaaguggaaaaggugaggacuagucccuguucccagagcccacuuuuuuuucuuuuuuugaaauaaaauagccugucuuucagaucuaaaaaaaaaaaaaaaaaaaaaaaaaaaaaaaaaaaaaaaaaaaaaaaaaaaaaaaaaaaaaaaaugcaucccccccccccccccccccccccccccccccaaaggcucuuuucagagccaccagaauu

SEQ ID NO: 6541 - RNA, 1768 nt, Artificial Sequence
  mRNA product Design a-2 comprising derived and/or modified sequence from LASV(LASV237-NIG-2010;Clade II)__AIT17638__GPCstabilized (opt3)
gggagaguccgcucagccagguugcagaagcggcuuagcguguguccuaaucuucucucugcguguagguaggccugugccgcaaacaagcuuaccaugggccagaucauuaccuucuuucaagaggugccccacgucauagaagagguuaugaacaucgugcugauugcccucagccuucuggcuaucuugaaggggauuuacaauguagcaacaugcggauuauucggucugguguccuuucuacuccuguguggcagaucuugcucaacuacguauaaaggggucuacgaacuucagacccuggaguuggacauggccagucucaacaugacaaugccucugagcuguacuaagaauaacucccaucacuauaucauggugggaaaugaaaccggccuggagcucacauuaaccaacacuucuauaaucaaucauaaauucugcaaccugucggaugcgcacaagaaagaccuuuacgaucaugcuuugaugucaauuaucagcacauuucaccugaguauuccaaauuucaaccaguaugaggccauguccugugacuuuaauggugggaagaucucuguucaguacaaccuaagccacaccuaugcaguggaugccgcuaaucauugcggaacgauagcaaacggcguccuccaaacuuucaugaggauggccuggggcggguccuacauugcucuggacucaggaugcgguaguugggauuguaucaugaccagcuaccaguaucuuauuauccagaauacaacuugggaagaccacugccaguuuucucggccgucccccaucggcuaccugggguugcucucacaacgcacccgagauauuuauauaagccguagacgccggggaacauucaccuggacgcugagugacucugagggcaacgaaacuccugguggguacugucucacaagguggaugcuuaucgaggccgagcugaaaugcuuuggaaacaccgcgguggcaaaguguaaugaaaaacaugaugaggaguucugcgacauguugcggcuauuugauuucaacaagcaggccauucgcagacugaaaacucccgcucagauguccauccagcucauaaauaaggccguaaacgcacugauuaaugaccaacuuaucaugaagaaccaccugagggacaucaugugcauuccauauugcaauuacagcaaauauugguacuugaaccacacaguuaccggcaagacgucgcucccccgguguuggcuggugucuaauggguccuacuuaaacgaaacccauuucucagaugacaucgagcagcaggcugauaauaugauuacagagcugcuacaaaaagaauauauggaccgccagggaaagacuccucucggucuggucgaucuuuuuguguucaguaccagcuuuuacuugauauccaucuuccugcaccucauuaaaaucccaacacaucgacacaucacuggcaagcccugcccuaaaccacauagacugaaccacauggggauuuguucuugcggacuuuauaagcacccgggcgugcccgucaaguggaaaaggugaggacuagucccuguucccagagcccacuuuuuuuucuuuuuuugaaauaaaauagccugucuuucagaucuaaaaaaaaaaaaaaaaaaaaaaaaaaaaaaaaaaaaaaaaaaaaaaaaaaaaaaaaaaaaaaaaugcaucccccccccccccccccccccccccccccccaaaggcucuuuucagagccaccagaauu

SEQ ID NO: 6542 - RNA, 1768 nt, Artificial Sequence
  mRNA product Design a-2 comprising derived and/or modified sequence from LASV(LASV253-NIG-2011;Clade II)__AIT17670__GPCstabilized (opt3)
gggagaguccgcucagccagguugcagaagcggcuuagcguguguccuaaucuucucucugcguguagguaggccugugccgcaaacaagcuuaccaugggccagaucauuaccuucuuucaagaggugccccacgucauagaagagguuaugaacaucgugcugauugcccucagccuucuggcuaucuugaaggggauuuacaauguagcaacaugcggauuauucggucugguguccuuucuacuccuguguggcagaucuugcucaacuacguauaaaggggucuacgaacuucagacccuggaguuggacauggccagucucaacaugacaaugccucugagcuguacuaagaauaacucccaucacuauaucauggugggaaaugaaaccggccuggagcucacauuaaccaacacuucuauaaucaaucauaaauucugcaaccugucggaugcgcacaagaaaaaucuuuacgaccaugcuuugaugucaauuaucagcacauuucaccugaguauuccaaacuucaaucaguaugaggccauguccugugauuuuaacggugggaagaucucuguucaguacaaucuaagccacaccuaugcaguggacgccgcuaaccauugcggaacgauagcaaauggcguccuccaaacuuucaugaggauggccuggggcggguccuacauugcucuggauucaggaugcgguaguugggacuguaucaugaccagcuaccaguaucuuauuauccagaacacaacuugggaagaucacugccaguuuucucggccgucccccaucggcuaccugggguugcucucacaacgcacccgagacauuuauauaagccguagacgccggggaacauucaccuggacgcugagugauucugagggcaacgaaacuccugguggguacugucucacaagguggaugcuuaucgaggccgagcugaaaugcuuuggaaauaccgcgguggcaaaguguaacgaaaaacaugacgaggaguucugcgauauguugcggcuauuugacuucaauaagcaggccauucgcagacugaaagcucccgcccagauguccauccagcucauaaacaaggcaguaaaugcucugauuaacgaucaacuuaucaugaagaaucaccugagggacaucaugugcauuccauauugcaacuacagcaaauauugguacuugaaucacacuguuacaggccggaccucgcucccccgcuguuggcuggugucuaacggguccuacuuaaaugaaacgcauuucucagacgauaucgagcagcaggccgacaacaugauuaccgagcugcuacaaaaggaauauauagaucgacagggaaaaacaccucucggucuggucgaccuuuuuguguucaguacuagcuuuuacuugaucuccauuuuccugcaccucgugaagaucccaacccauagacacaucauuggcaaacccugcccuaagccacauaggcugaaucacauggggauauguucuugcggacuuuauaaacacccgggcguccccguuaaguggaagcggugaggacuagucccuguucccagagcccacuuuuuuuucuuuuuuugaaauaaaauagccugucuuucagaucuaaaaaaaaaaaaaaaaaaaaaaaaaaaaaaaaaaaaaaaaaaaaaaaaaaaaaaaaaaaaaaaaugcaucccccccccccccccccccccccccccccccaaaggcucuuuucagagccaccagaauu

SEQ ID NO: 6543 - RNA, 1768 nt, Artificial Sequence
  mRNA product Design a-2 comprising derived and/or modified sequence from LASV(LASV254-NIG-2011;Clade II)__AIT17674__GPCstabilized (opt3)
gggagaguccgcucagccagguugcagaagcggcuuagcguguguccuaaucuucucucugcguguagguaggccugugccgcaaacaagcuuaccaugggccagaucauuaccuucuuucaagaggugccccacgucauagaagagguuaugaacaucgugcugauugcccucagccuucuggcuaucuugaaggggauuuacaauguagcaacaugcggauuauucggucugguguccuuucuacuccuguguggcagaucuugcucaacuacguauaaaggggucuacgaacuucagacccuggaguuggacaugacaaaccucaauaugacuaugccucugaguuguaccaagaacaauagccaucacuauaucauggugggaaacgaaacaggccuggagcucaccuuaacuaauacauccauaaucaaccauaaauucugcaaucugucugaugcccacaagaaaaaccuuuacaaucaugcguugaugucgauuaucucaaccuuucaccugagcauuccaaacuucaaucaguaugaggcuaugaguugugacuuuaacggugggaagaucuccguucaguacaaucuaucucacagcuaugccguggaugcagccaaccauugcggaacgauagcuaacggcguccuccaaacuuucaugaggauggcauggggcggguccuacauugcccuggacucaggaugcgguaauugggauuguaucaugaccaguuaccaguaucuuauuauccagaacacaacuugggaagaccacugccaguuuagccggccgucucccaucggcuaccugggguugcucucccaacgcacccgagauauuuauauaucacguagacgccggggaacauucaccuggacgcugagcgacagugagggcaaugaaacuccugguggguacugucucacaagguggaugcuuaucgaggcugagcugaaaugcuuuggaaacaccgccguggcgaaguguaaugaaaaacaugaugaggaguucugcgacauguugcggcuauuugauuucaacaagcaggcaauucgcagacugaaaacucccgcccaggcuaauauccagcucauaaacaaggccguaaaugcacugauuaacgaccaacuuaucaugaagaaucaccugagggauaucaugugcauuccauauugcaacuacucuaaauauugguacuugaaucacacaguuaccggcaagacgucccucccccgguguuggcuggugagcaacgggucguacuuaaaugaaacccauuucucugacgacaucgagcagcaggcugauaacaugauuacagagcugcuacaaaaagaauauauggaccgccagggaaagacuccucucggucuggucgaucuuuuuguguucuccaccucauuuuacuugauaaguaucuuccugcaccucgugaaaauuccaacacaucgacacgucaucggcaagcccugcccuaaaccacauagacugaaccacauggggaucuguagcugcggacuuuauaagcacccgggcguucccgugaaguggaaaaggugaggacuagucccuguucccagagcccacuuuuuuuucuuuuuuugaaauaaaauagccugucuuucagaucuaaaaaaaaaaaaaaaaaaaaaaaaaaaaaaaaaaaaaaaaaaaaaaaaaaaaaaaaaaaaaaaaugcaucccccccccccccccccccccccccccccccaaaggcucuuuucagagccaccagaauu

SEQ ID NO: 6544 - RNA, 1768 nt, Artificial Sequence
  mRNA product Design a-2 comprising derived and/or modified sequence from LASV(Nig08-A19;Clade III)__ADU56618__GPCstabilized (opt3)
gggagaguccgcucagccagguugcagaagcggcuuagcguguguccuaaucuucucucugcguguagguaggccugugccgcaaacaagcuuaccaugggccagaucgugaccuucuuucaagaggucccccacguuauugaagaggugaugaacauaguacugaucgcccucagcauucuugcuauccugaagggguuguacaauauugcaacaugcggauuaaucggucuggugacuuuccuacuccuguccggcagaucuuguucaaugacguauaaaggggucuacgaacuucagacccuggaguugaacaugaauacacucaacaugacuaugccucugaguugcaccaagaauaacagccaucacuauauaauggugggaaaugaaacaggccuggagcucaccuuaacuaacacaucccugcuucaucacaaauuuuguaauuugucugacgcccauaagaaaaaccuguacgaucacacccuaaugucgaucauuucaacguuccaccucagcaucccaaauuuuaaccaguaugaggcgaugaguugcgacuucaauggugggaagauuacuguucaguacaaccugucccauucuuaugcuaucgaugccgcaaaucacuguggaaccguggccaacggcguccuucaaacauuuaugaggauggcuuggggcgggagcuacauagcacuggacuccggaugcgguaagugggauugcauuaugacuucauaccaguauuugaucauucagaacaccacaugggaagaccauugucaguucagucgcccgagccccaucggcuaccucgggcuguuaucucaacgaacccgugauaucuauauuuccagaaggcgccggggaacguuuacuuggacacuuucagacagcgagggcaaugaaaccccugguggguacugccugacucgguggauguugauagaggccgagcuaaaauguuucggaaacacagcuguggccaagugcaaugaaaaacacgaugaggaauuuugugacaugcugcgccucuucgauuuuaacaagcaggcgaucagaaggcugaaagcacccgcccagaugaguauucagcuuaucaauaaggcuguaaacgcccugauaaaugaccaauugauuaugaagaaccaccuccgggauaucaugugcaucccauauugcaauuacucuaaauauugguaccugaaccauaccuccacgggccgcaccagcuuaccccgaugcuggcugguuucgaaugggucuuaccuaaacgaaacacacuucuccgacgacauugagcagcaggcagauaauaugaucacugagaugcuccaaaaggaauaucuggacagacagggaaaaaccccucuugguuugguggaucuguucgucuuuucaacaaguuucuaccucauuagcauauuucugcaucuugugaagaucccaacucacaggcauauugugggcaaacccuguccuaagccacaccggcugaaccacauggggaucugcuccuguggauuguauaaacagccgggcguccccguucguuggaagcgcugaggacuagucccuguucccagagcccacuuuuuuuucuuuuuuugaaauaaaauagccugucuuucagaucuaaaaaaaaaaaaaaaaaaaaaaaaaaaaaaaaaaaaaaaaaaaaaaaaaaaaaaaaaaaaaaaaugcaucccccccccccccccccccccccccccccccaaaggcucuuuucagagccaccagaauu

SEQ ID NO: 6545 - RNA, 1771 nt, Artificial Sequence
  mRNA product Design a-2 comprising derived and/or modified sequence from LASV(G1180-SLE-2010;Clade IV)__AIT17168__GPCstabilized (opt3)
gggagaguccgcucagccagguugcagaagcggcuuagcguguguccuaaucuucucucugcguguagguaggccugugccgcaaacaagcuuaccaugggccagaucgugaccuucuuucaagaggucccccacguuauugaagaggugaugaacauaguacugaucgcccucagcauucuugcugugcugaagggguuguacaauuucgcaacaugcggauuagucggucugcuaacuuuucuccugcuuuguggcagauccugcacggccucuagguauaaagggguguacgaacugcagaccuuggagcucaacauggaaacacugaauaugacuaugccucugucauguaccaagaacaauagucaucacuauaucaugguuggaaacgagacaggccucgaguuaacccugacuaauacaagcauuaucaaccauaaauucugcaaucuuuccgacgcgcacaagaaaaacuuguacgaucaugcucugaugucuauaaucucgaccuuucaccuaucaauuccaaauuucaaccaguaugaagccaugagcugugacuuuaauggugggaagaucagugugcaguacaaccucucccacucuuaugcaggagaugccgcuaaucauugcggcacggucgcaaacggcgugcugcaaacuuucaugcggauggccuggggagggagcuacauugcucuugacuccgguugcggcucaugggauuguaucaugaccaguuaccaguaucugauaauucagaacacaacuugggaggaccauugccaguuuagccgcccgucucccaucggguacuugggacuccugucccaacgaacccgugauauuuauaucucaagaaggcgccggggcacauucaccuggacgcucagcgacagugaagguaaggauacuccugggggauacugucuuacacgguggaugcugaucgaggccgaguugaaaugcuuuggcaauaccgcgguagcaaaguguaacgaaaaacacgacgaggaguucugcgauaugcuacgccuguuugacuucaauaagcaggccauucagagacucaaagcucccgcccagaugucuauacaacugaucaacaaggcaguuaaugcucuuauuaacgaucagcugaucaugaagaaucacuugagggacauaaugugcauuccauauugcaacuacuccaaauauugguaccucaaucauacuacaaccgggaagacgagccugcccaaauguugguuagugucgaacggaucuuaccugaaugaaacccacuucuccgacgauaucgagcagcaagccgacaacaugaucacagagaugcuacagaaggaauauauggagcggcaggguaaaacuccucucggccuggucgaucuuuuuguguucucaaccaguuuuuacuugauuagcaucuuccugcaucucgugaagauuccaacacaccgccauauagucgggaaauccugccccaagccucaccgacugaaucacaugggaaucuguucuugcggccuuuauaagcagccagguguuccggugaaauggaagagaugaggacuagucccuguucccagagcccacuuuuuuuucuuuuuuugaaauaaaauagccugucuuucagaucuaaaaaaaaaaaaaaaaaaaaaaaaaaaaaaaaaaaaaaaaaaaaaaaaaaaaaaaaaaaaaaaaugcaucccccccccccccccccccccccccccccccaaaggcucuuuucagagccaccagaauu

SEQ ID NO: 6546 - RNA, 1771 nt, Artificial Sequence
  mRNA product Design a-2 comprising derived and/or modified sequence from LASV(G1442-SLE-2011;Clade IV)__AIT17180__GPCstabilized (opt3)
gggagaguccgcucagccagguugcagaagcggcuuagcguguguccuaaucuucucucugcguguagguaggccugugccgcaaacaagcuuaccaugggccagaucgugaccuucuuucaagaggucccccacguuauugaagaggugaugaacauaguacugaucgcccucagcauucuugcugugcugaagggguuguacaaugucgcaacaugcggauuaaucggucuggugacuuuccuacuccuguguggcagauccugcacgaccacacuuuauaaagggguuuacgaacugcagacuuuggagcucaacauggaaacccugaauaugacaaugccucugucuuguaccaagaacaauucacaucacuauauuagggugggaaacgagacuggccucgaguuaacacugaccaauacgaguaucauaaaccauaaauuuugcaaucuuagcgacgcccacaagaaaaacuuguacgaucaugcgcugauguccaucauuucuacuuuccaccuaucgaucccaaauuuuaaccaguaugaagcuaugucaugugacuucaauggugggaagauuagcguccaguacaaccucagucacuccuaugccggagaugcagccaaucauugcggcaccguggcuaacggcguacugcaaacauuuaugcggauggcauggggagggucuuacaucgcccuugacagcgguugcggcaacugggauuguauaaugacuuccuaccaguaucugauuauccagaauaccacaugggacgaucacugccaguucucacgaccgagucccauuggguacuugggacuccugagccaacguaccagagacguuuauaucucuaggcggcgccggggcacguuuacuuggacacucuccgauucagaggguaaggacaccccugggggauacugucuuacucgcuggaugcugaucgaagcugaguugaaaugcuucggcaacacagccguggcgaaguguaaugagaaacaugaugaagaguuuugcgacaugcuaagacuguucgauuuuaacaagcaggcaauucagaggcucaaagcccccgcucagaugagcauacaacugaucaauaaggccgucaacgcacuuauuaaugaccagcugaucaugaagaaccacuugcgggacauaaugugcauuccauauugcaauuacaguaaauauugguaccucaacaauaccgcuacggggaagaccucucugcccaaauguugguuaaucuccaacggaagcuaccugaaugagacacacuucucggaugacaucgaacaggaggccgauaacaugauuacugagaugcuacaaaaggaauauauggagcgccaggguaaaaccccucucggccugguggaccuuuucguguuuucuacauccuucuacuugaucucaauuuuucugcaucucgucaagauaccaacucaccgacauaucguugggaaaaguugccccaagccucacagacugaaucauaugggaauuuguagcugcggccuuuauaagcagccaggugugccgguaagguggaaacggugaggacuagucccuguucccagagcccacuuuuuuuucuuuuuuugaaauaaaauagccugucuuucagaucuaaaaaaaaaaaaaaaaaaaaaaaaaaaaaaaaaaaaaaaaaaaaaaaaaaaaaaaaaaaaaaaaugcaucccccccccccccccccccccccccccccccaaaggcucuuuucagagccaccagaauu

SEQ ID NO: 6547 - RNA, 1771 nt, Artificial Sequence
  mRNA product Design a-2 comprising derived and/or modified sequence from LASV(G3010-SLE-2013;Clade IV)__AIT17344__GPCstabilized (opt3)
gggagaguccgcucagccagguugcagaagcggcuuagcguguguccuaaucuucucucugcguguagguaggccugugccgcaaacaagcuuaccaugggccagaucgugaccuucuuucaagaggucccccacguuauugaagaggugaugaacauaguacugaucgcccucagcauucuugcugugcugaagggguuguacaauuucgcaacaugcggauuagucggucuggugacuuuucuacuccuguguggcagauccugcacgaccucucuuuauaaagggguuuacgaacugcagacauuggagcucaacauggaaacucugaauaugaccaugccucugucauguacaaagaacaauagucaucacuauaucauggugggaaacgagaccggccucgaguuaacucugacaaauaccagcauuaucaaccauaaauucugcaaucuuuccgacgcccacaagaaaaacuuguacaaucaugcgcugaugucuauaaucucgacguuucaccuaucaauuccaaacuucaaucaguaugaagcuaugagcugugauuuuaacggugggaagaucaguguccaguacaaucucucccacucuuaugccggagacgcagccagccauugcggcacuguggcuaacggcguacugcaaaccuucaugaggauggcauggggaggguccuacauugcccuugauucagguugcggcaagugggacuguaucaugacaaguuaucaguaccugauaauucagaacacuaccugggaggaucacugccaguuuagccggccgucucccaucggguauuugggacuccugucccaacgcacacgagacauuuacaucucacguagacgccggggcaccuucacguggacucucagcgauagugaagguaaagacacaccugggggauauugucuuaccagguggaugcugaucgaggcugaguugaagugcuuuggcaauacugccguugcgaaauguaacgaaaagcaugaugaggaguucugcgacaugcuacggcuguuugauuucaauaaacaggcaauucagcgccucaagacacccgcccagaugucuauacaacugaucaacaaggcugugaaugcccuuauuaacgaccagcugaucaugaaaaaucacuugagagauauaaugugcauuccauacugcaacuauuccaaguacugguaccucaaucacaccacgaccgggaaaacaagccugcccaaguguugguuagucucgaacggaucuuaucugaaugaaacucauuucuccgacgacaucgagcagcaagcagauaacaugaucaccgagaugcuacagaaagaauacauggagaggcaggguaagacaccucucggccugguggaccuuuuuguguucucaaccaguuuuuauuugauuagcaucuuccugcaccucgucaaaauuccaacucaucggcacauaguugggaaguccugccccaagccucaucgccugaaucacaugggaaucuguucuugcggccuuuacaaacagccaggugugccgguacgauggaagagaugaggacuagucccuguucccagagcccacuuuuuuuucuuuuuuugaaauaaaauagccugucuuucagaucuaaaaaaaaaaaaaaaaaaaaaaaaaaaaaaaaaaaaaaaaaaaaaaaaaaaaaaaaaaaaaaaaugcaucccccccccccccccccccccccccccccccaaaggcucuuuucagagccaccagaauu

SEQ ID NO: 6548 - RNA, 1771 nt, Artificial Sequence
  mRNA product Design a-2 comprising derived and/or modified sequence from LASV(G502-SLE-2009;Clade IV)__AIT17126__GPCstabilized (opt3)
gggagaguccgcucagccagguugcagaagcggcuuagcguguguccuaaucuucucucugcguguagguaggccugugccgcaaacaagcuuaccaugggccagaucgugaccuucuuucaagaggucccccacguuauugaagaggugaugaacauaguacugaucgcccucagcauucuugcugugcugaagggguuguacaauuucgcaacaugcggauuagucggucugcuaacuuuucuccugcuuuguggcagauccugcacgaccgggcuguauaaaggaguguacgaauugcagacacucgagcugaacauggaaacucugaauaugaccaugccucucucuuguacaaagaacaauucacaucacuauaucaugguuggcaacgagaccgguuuagagcugacucuuacaaauaccaguauuaucaaccauaaauucugcaauuugagcgacgcccacaagaaaaaccuguacgaucaugcgcuaauguccauaaucucuacguuucaccucucgauuccaaauuucaaccaguaugaagcuaugucaugugacuuuaaugggggaaagaucagcgugcaguacaaccugagucacuccuaugccggcgaugcagccgaccauugcggcacugucgcuaauggggugcuucaaaccuucaugaggauggcauggggagguucuuacauugcccuggauagcggcugcgggcgcugggacuguaucaugacauccuaccaguauuugauaauucagaacacuaccugggaggaucacugccaguuuucacgaccgagucccaucggauaccucggccuguuaagccaacguacaagagacauuuauaucucuaggcggcgccgggguaccuucacguggacucuuuccgauucagaagggaaggacacaccuggaggcuacugucugacccgcuggauguugaucgaggcugagcuaaaaugcuuuggcaacacugccguagcgaaguguaaugaaaaacaugaugaggaguucugcgacaugcugagacucuuugauuucaacaagcaggcaauucagaggcugaaagcccccgcucagaugagcauacaacuuaucaauaaggccguuaacgcacugauuaaugaccaguuggugaugaagaaccaccuccgggacaucaugugcauaccauauugcaauuacagucgcuauugguaccugaaccacacaaccacgggacgaaccucuuuacccaaauguuggcuggucuccaaugguagcuaccuaaacgaaacacauuucucggaugacauugagcagcaagcugauaauaugaucacugagaugcuccagaaggaauauauggagagacagggcaaaaccccucuggggcuuguggacuuguuuguguucucuacauccuuuuaccugaucucaauuuuccuccaccuggucaagaucccaacucauaggcacauuguuggaaaaaguugccccaagccucaucggcuuaaccacaugggcauauguagcugcggucuguauaaacagccaggggugccgguaaaguggaagcguugaggacuagucccuguucccagagcccacuuuuuuuucuuuuuuugaaauaaaauagccugucuuucagaucuaaaaaaaaaaaaaaaaaaaaaaaaaaaaaaaaaaaaaaaaaaaaaaaaaaaaaaaaaaaaaaaaugcaucccccccccccccccccccccccccccccccaaaggcucuuuucagagccaccagaauu

SEQ ID NO: 6549 - RNA, 1771 nt, Artificial Sequence
  mRNA product Design a-2 comprising derived and/or modified sequence from LASV(G733-SLE-2010;Clade IV)__AIT17154__GPCstabilized (opt3)
gggagaguccgcucagccagguugcagaagcggcuuagcguguguccuaaucuucucucugcguguagguaggccugugccgcaaacaagcuuaccaugggccagaucgugaccuucuuucaagaggucccccacguuauugaagaggugaugaacauaguacugaucgcccucagcauucuugcugugcugaagggguuguacaauuucgcaacaugcggaaucgucgguuuaguguccuuucugcuacucuguggcagaucuugcacuacgucacuguauaaagggguuuacgaacuucagacccuggaguugaacauggaaacacucaauaugacuaugccucugaguuguaccaagaacaauagccaucacuauauuauggugggaaacgagacaggccuggagcucaccuuaacuaauacauccaucauaaaccauaaauucugcaaucugucugacgcccacaagaaaaaccuuuacgaucaugcguugaugucgaucauuucaaccuuucaccugagcaucccaaauuucaaccaguaugaagcuaugaguugugacuuuaauggugggaagauuuccguccaguacaaccuaucucacagcuaugccggagaugcagccaaucauugcggcacgaucgcuaacggcgugcuccaaacuuucaugaggauggcauggggaggguccuacauagcccuggacucagguugcgaucgcugggacuguauuaugaccaguuaccaguaucuuaucauucagaacacaacuugggaggaucacugccaguuuagccgaccgucucccaucggcuaccugggguugcucucccaacguaccagagacaucuauauuucaaggcggcgccggggaacauucaccuggacgcugagcgauagugaaggcaaggacacuccugguggguacugucucacacgcuggaugcuuauagaggcugagcugaaaugcuuuggaaauaccgccguagcgaaguguaacgaaaaacaugaugaggaguucugcgacauguugagacuauuugauuucaauaagcaggcaauccagaggcugaaagcccccgcucagaugucuauucaacucaucaacaaggccguuaaugcacugauaaacgaccagcuuauuaugaagaaucaucugcgggacaucaugugcaucccauauugcaacuacuccaaauauugguacuugaaucacacuacaaccggcaagacgagccuccccaaauguuggcuggugucgaacgggucuuacuuaaaugaaacccacuucuccgaugacauugagcagcaagcugauaacaugaucacagagaugcugcagaaggaauauauggagcgccagggaaaaacuccucuaggucucgucgaccuguuuguguucucaaccaguuuuuaccuuauuagcauauucuugcaccuggugaagaucccaacacaucgacacgucguuggcaaauccugccccaagccucauagacucaaucacauggggauuuguucuugcggacuguauggccagccaggugugccgguaaaguggaaaaggugaggacuagucccuguucccagagcccacuuuuuuuucuuuuuuugaaauaaaauagccugucuuucagaucuaaaaaaaaaaaaaaaaaaaaaaaaaaaaaaaaaaaaaaaaaaaaaaaaaaaaaaaaaaaaaaaaugcaucccccccccccccccccccccccccccccccaaaggcucuuuucagagccaccagaauu

SEQ ID NO: 6550 - RNA, 1771 nt, Artificial Sequence
  mRNA product Design a-2 comprising derived and/or modified sequence from MOPV/LASV reassortant(IGS-1;Clade IV)__AFY05576__GPCstabilized (opt3)
gggagaguccgcucagccagguugcagaagcggcuuagcguguguccuaaucuucucucugcguguagguaggccugugccgcaaacaagcuuaccaugggccagaucgugaccuucuuucaagaggucccccacguuauugaagaggugaugaacauaguacugaucgcccucagcgugcuugcuguccugaagggguuguacaauuucgcaacaugcggauuagugggucugguuacuuuucuacuccuguguggcagauccugcacgaccucucuuuauaaagggguguacgaacugcagacauuggagcucaacauggaaacucugaauaugaccaugccucugucauguacaaagaacaauagucaucacuauauuauggucggaaacgagaccggccucgaguuaacucugacaaauaccagcaucauuaaccauaaauucugcaaucuuuccgacgcccacaagaaaaacuuguacgaucaugcgcugaugucuaucauaucgacguuucaccuaucaaucccaaauuucaaccaguaugaagcuaugagcugugacuuuaauggugggaagauuagugugcaguacaaccucucccacucuuaugccggagaugcagccaaucauugcggcacuguagcuaacggcguucugcaaaccuucaugaggauggcauggggagggagcuacaucgcccuugacuccgguugcggcaacugggauuguauuaugacaucauaccaguaucugaucauacagaauacuaccugggaggaccacugccaguuuagucgcccgagccccauuggguacuugggacuccugucucaacgaacacgugauaucuauauuuccagaaggcgccggggcaccuucacguggacucucucagacagcgaaggugaggauacaccugggggauacugucuuacccgguggaugcugaucgaggcugaauugaagugcuuuggcaacacugccguggcgaaauguaaugagaagcaugacgaagaguucugcgauaugcuacgccuguuugacuucaacaaacaggcaauccagagacucaaggcccccgcucagaugaguauucaacugauaaauaaagccgucaacgcacuuaucaaugaucagcugauuaugaagaaccacuugagggacaucaugugcauaccauauugcaauuacucuaaguauugguaccucaaccacacaaccacggggcggaccucccugcccaaauguugguuagugagcaauggaucguaccugaacgagacacauuucucugacgauauugagcagcaagcugacaauaugaucacugaaaugcuacagaaggaguauauggaacgccaggguaaaaccccucucggccugguggaucuuuuugucuucuccacaucauuuuacuugaucaguauuuuccugcaccucguuaagaucccaacucaucgacacauuguggggaaaagcugccccaagccucauagacugaaccacaugggaauauguuccugcggccuuuauaaacagccagguguaccggugaaguggaagaggugaggacuagucccuguucccagagcccacuuuuuuuucuuuuuuugaaauaaaauagccugucuuucagaucuaaaaaaaaaaaaaaaaaaaaaaaaaaaaaaaaaaaaaaaaaaaaaaaaaaaaaaaaaaaaaaaaugcaucccccccccccccccccccccccccccccccaaaggcucuuuucagagccaccagaauu

SEQ ID NO: 6551 - RNA, 1771 nt, Artificial Sequence
  mRNA product Design a-2 comprising derived and/or modified sequence from LASV(LM765-SLE-2012;Clade IV)__AIT17814__GPCstabilized (opt3)
gggagaguccgcucagccagguugcagaagcggcuuagcguguguccuaaucuucucucugcguguagguaggccugugccgcaaacaagcuuaccaugggccagaucgugaccuucuuucaagaggucccccacguuauugaagaggugaugaacauaguacugaucgcccucagcauucuugcugugcugaagggguuguacaauuucgcaacaugcggauuagucggucuggugacuuuucuacuccuguguggcagauccugcacgaccucucuuuauaaagggguuuacgaacugcagacauuggagcucaacauggaaacucugaauaugaccaugccucugucauguacaaagaacaauagucaucacuauaucauggugggaaacgagaccggccucgaguuaacucugacaaauaccagcauuaucgaccauaaauucugcaaccuuuccgaugcccacaggaagaauuuguacgaccaugcgcugaugucuauaaucucgacguuucaccuaucaauuccaaacuucaaucaguaugaagcuaugagcugugauuuuaacggugggaaaaucaguguccaguacaaucucucccacucuuaugccaaggacgcagccgaucauugcggaacuguggcuaacggcguacugcaaaccuucaugcggauggcauggggcgggagcuacauugcccuugacuccggaugcggucgaugggauuguaucaugacaucauaccaguaucugauaauucagaauacuaccugggaggaccacugccaguuuagucguccgagccccaucggcuacuuggggcuccugucucaaagaacaagggauauuuauaucucccggcgccgccggggaaccuucacguggacucucucagacagcgaaggcaaggauacaccugguggguacugucuuaccagauggaugcugaucgaggcugaguugaaaugcuuuggaaacacugccguugcgaaguguaacgaaaaacaugacgaggaguucugcgauaugcuaaggcuguuugacuucaauaagcaggcaauucagcggcucaaagcccccgcucagaugaguauacaacugaucaacaaggccgugaaugcacuuauuaacgaccagcugaucaugaagaaucacuugcgcgauauaaugugcauuccauauugcaacuacucuaaauauugguaccucaaucacacaaccacgggcaagaccucccugcccaaauguugguuagucagcaacgggucguaccugaaugaaacacauuucucugacgauaucgagcagcaagcugacaacaugaucacugagaugcuacagaaggaauauauggagcgacagggaaaaaccccucucggucugguggaucuuuuuguguucuccacaucauuuuacuugauuaguaucuuccugcaccucgucaagauuccaacucauagacacauaguuggcaaacccugcccuaagccacauaggcugaaucacauggggaucuguagcugcggacuuuauaagcagccgggcgugcccguaaaauggaagcggugaggacuagucccuguucccagagcccacuuuuuuuucuuuuuuugaaauaaaauagccugucuuucagaucuaaaaaaaaaaaaaaaaaaaaaaaaaaaaaaaaaaaaaaaaaaaaaaaaaaaaaaaaaaaaaaaaugcaucccccccccccccccccccccccccccccccaaaggcucuuuucagagccaccagaauu

SEQ ID NO: 6552 - RNA, 1771 nt, Artificial Sequence
  mRNA product Design a-2 comprising derived and/or modified sequence from LASV(LM776-SLE-2012;Clade IV)__AIT17824__GPCstabilized (opt3)
gggagaguccgcucagccagguugcagaagcggcuuagcguguguccuaaucuucucucugcguguagguaggccugugccgcaaacaagcuuaccaugggccagaucgugaccuucuuucaagaggucccccacguuauugaagaggugaugaacauaguacugaucgcccucagcauucuugcugugcugaagggguuguacaauuucgcaacaugcggauuagucggucuggugacuuuucuacuccuguguggcagauccugcacgaccucuguuuauaaagggguguacgaacuucagacacuggaguugaacauggaaacucucaauaugaccaugccucugucauguacaaagaacaauagucaucacuauaucauggucggaaacgagaccggccuggagcucacuuuaacaaauaccagcauuaucaaccauaaauucugcaaucuguccgacgcccacaagaaaaaccuuuacgaucaugcguugaugucuauaaucucgacguuucaccugucaauuccaaauuucaaccaguaugaagcuaugagcugugacuuuaauggugggaagaucagugugcaguacaaccuaucccacucuuaugccggagaugcagccaaucauugcggcacuguagcuaacggcguucuccaaaccuucaugaggauggcauggggagggagcuacauugcccuggacuccgguugcggcaagugggauuguaucaugacaucauaccaguaucuuauaauucagaacacuaccugggaggaccauugccaguuuagucggccgagccccaucggguaccugggauugcucucucaacgcacacgagauauuuauaucucccguagacgccggggcaccuucacguggacucugucagacagcgaagguaaagauacaccugggggauacugucucaccagguggaugcuuaucgaggcugagcugaagugcuuuggcaauacugccguggcgaaauguaacgaaaagcacgacgaggaguucugcgauauguugcggcuauuugacuucaauaaacaggcaauucagcgccugaaggcccccgcucagaugaguauacaacucaucaacaaggccgucaaugcacugauuaacgaucagcuuaucaugaaaaaucaccugagagacauaaugugcauuccauauugcaacuacucuaaguauugguacuugaaucauacaaccacggggaaaaccucccuccccaaguguuggcuggugagcaacggaucguacuuaaaugaaacacacuucucugacgauaucgagcagcaagcugacaacaugaucacugagaugcugcagaaagaauauauggagaggcaggguaagaccccucuaggccucguggaucuguuugucuucuccacaucauuuuaccuuauuaguaucuucuugcaucugguuaaaauuccaacucaccggcauauagugggaaagagcugccccaagccucaccgccucaaucacauggggaucuguuccugcggccuguauaaacagccagguguaccggugcgauggaagagaugaggacuagucccuguucccagagcccacuuuuuuuucuuuuuuugaaauaaaauagccugucuuucagaucuaaaaaaaaaaaaaaaaaaaaaaaaaaaaaaaaaaaaaaaaaaaaaaaaaaaaaaaaaaaaaaaaugcaucccccccccccccccccccccccccccccccaaaggcucuuuucagagccaccagaauu

SEQ ID NO: 6553 - RNA, 1771 nt, Artificial Sequence
  mRNA product Design a-2 comprising derived and/or modified sequence from LASV(Mad39;Clade IV)__ANH09722__GPCstabilized (opt3)
gggagaguccgcucagccagguugcagaagcggcuuagcguguguccuaaucuucucucugcguguagguaggccugugccgcaaacaagcuuaccaugggccagaucgugaccuucuuucaagaggucccccacguuauugaagaggugaugaacauaguacugaucgcccucagcauucuugcugugcugaagggguuguacaaugucgcaacaugcggauuaaucggucuggugacuuuccuacuccuguguggcagauccugcacgaccacacuuuauaaagggguuuacgaacugcaggccuuggagcucaacauggaaacucugaauaugaccaugccucugucuuguacaaagaacaauucacaucacuauauuagggugggaaacgagaccggccucgaguuaacucugacaaauaccagucuuaucaaccauaaauuuugcaauuugagcgacgcgcacaagaaaaaccuguacgaucaugcucuaauguccauaaucucuacguuccaccucucgauuccaaauuuuaaccaguaugaagccaugucaugugacuucaaugaugguaagaucagcguccaguacaaccugagucacacuuaugcaggggacaccgccaaucauugcggaacaguggcuaacggcguacuucaaacuuuuaugcggauggcauggggcggguccuacauugcccuggauucuggaugcgguggcugggacuguaucaugaccagcuaccaguauuugauaauucagaacacaaccugggaggaucacugccaguucucccgaccgucacccaucggguaccucggacuguuaagucaacguacgagagacauuuauaucagcaggcggcgccggggcacuuuuacauggacccuuucugauuccgaagguaaggacacuccugggggauacugucugacacgcuggauguugaucgaggcugagcuaaaaugcuucggcaauaccgccguugcgaaguguaacgaaaaacaugaugaggaauuuugcgacaugcugagacucuucgauuuuaauaagcaggcaauucagaggcugaaagcccccgcucagaugucaauacaacuuaucaacaaggccgugaaugcacugauuaacgaccaguugaucaugaagaaucaccuccgggacauaaugugcauuccauauugcaacuacagcaaauauugguaccugaaucacacggucaccgggaagacaaguuuacccaaauguuggcuggugucuaacggauccuaccuaaaugaaacucauuucagcgaugacaucgagcagcaagcugauaacaugaucaccgagaugcuccagaaggaauauauggagcgccaggguaaaacaccucugggccuuguggacuuguucgucuuuucgacuucuuucuaccugauuuccaucuuucuccaccugguuaagauuccaacccaucgacacgugguagggaaacccugcccuaagccacauagacuuaaucacaugggaauauguucaugcggcuucuauaagcagccgggugugcccgucagguggaaacggugaggacuagucccuguucccagagcccacuuuuuuuucuuuuuuugaaauaaaauagccugucuuucagaucuaaaaaaaaaaaaaaaaaaaaaaaaaaaaaaaaaaaaaaaaaaaaaaaaaaaaaaaaaaaaaaaaugcaucccccccccccccccccccccccccccccccaaaggcucuuuucagagccaccagaauu

SEQ ID NO: 6554 - RNA, 1771 nt, Artificial Sequence
  mRNA product Design a-2 comprising derived and/or modified sequence from LASV(Z0947-SLE-2011;Clade IV)__AIT17840__GPCstabilized (opt3)
gggagaguccgcucagccagguugcagaagcggcuuagcguguguccuaaucuucucucugcguguagguaggccugugccgcaaacaagcuuaccaugggccagaucgugaccuucuuucaagaggucccccacguuauugaagaggugaugaacauaguacugaucgcccucagcauucuugcugugcugaagggguuguacaauuucgcaacaugcggauuagucggucuggugacuuuucuacuccuguguggcagauccugcacgaucucucuuuauaaagggguuuacgaacugcagaccuuggagcucaacauggaaacacugaauaugacuaugccucugucauguaccaagaacaauagucaucacuauauuauggugggaaacgagacaggccucgaguuaacccugacuaauacaagcaucauaaaccauaaauucugcaaucuuuccgacgcccacaagaaaaacuuguacgaucaugcgcugaugucuaucauuucgaccuuucaccuaucaaucccaaauuucaaccaguaugaagcuaugagcugugacuuuaauggugggaagauuaguguccaguacaaccucucccacucuuaugccggagaugcagccaaucauugcggcacgguggcuaacggcguacugcaaacuuucaugaggauggcauggggagggagcuacaucgcccuugacuccgguugcgaucgcugggacuguauaaugaccucauaccaguaucugauuauccagaacacaacuugggaggaucacugccaguuuagucgaccgagccccauuggcuacuuggggcuccugucucaacguaccagagacaucuauaucuccaggcggcgccggggaacauucaccuggacgcucucagauagcgaaggcaaggacacuccugguggguacugucuuacacgcuggaugcugauugaggcugaguugaaaugcuuuggaaauaccgccguugcgaaguguaacgaaaaacaugaugaggaguucugcgacaugcuaagacuguuugauuucaauaagcaggcaauacagaggcucaaagcccccgcucagaugaguauccaacugauuaacaaggccgugaaugcacuuaucaacgaccagcugauaaugaagaaucacuugcgggacauuaugugcaucccauauugcaacuacucuaaauauugguaccucaaucacacuacaaccggcaagacgucccugcccaaauguugguuagucagcaacgggucguaccugaaugaaacccauuucucugaugacaucgagcagcaagcugauaacaugauuacagagaugcuacagaaggaauauauggagcgccagggaaaaacuccucucggucugguggaccuuuuuguguucuccaccucauuuuacuugaucaguauuuuccugcaccucgucaagauaccaacacaucgacacaucguuggcaaacccugcccuaagccacauagacugaaucacauggggauuuguagcugcggacuuuauaagcagccgggcgugcccguaaaauggaagaggugaggacuagucccuguucccagagcccacuuuuuuuucuuuuuuugaaauaaaauagccugucuuucagaucuaaaaaaaaaaaaaaaaaaaaaaaaaaaaaaaaaaaaaaaaaaaaaaaaaaaaaaaaaaaaaaaaugcaucccccccccccccccccccccccccccccccaaaggcucuuuucagagccaccagaauu

SEQ ID NO: 6555 - RNA, 1771 nt, Artificial Sequence
  mRNA product Design a-2 comprising derived and/or modified sequence from LASV(Josiah;Clade IV)__NP_694870__GPCstabilized (opt4)
gggagaguccgcucagccagguugcagaagcggcuuagcguguguccuaaucuucucucugcguguagguaggccugugccgcaaacaagcuuaccaugggccagaucgugaccuucuuccaggaggugccccacgugaucgaggaggugaugaacaucgugcugaucgcccugagcgugcuggccgugcugaagggccuguacaacuucgccaccugcggccuggugggccuggugaccuuccugcugcugugcggcagaagcugcaccaccagccuguacaagggcguguacgagcugcagacccuggagcugaacauggagacccugaacaugaccaugccccugagcugcaccaagaacaacagccaccacuacaucauggugggcaacgagaccggccuggagcugacccugaccaacaccagcaucaucaaccacaaguucugcaaccugagcgacgcccacaagaagaaccuguacgaccacgcccugaugagcaucaucagcaccuuccaccugagcauccccaacuucaaccaguacgaggccaugagcugcgacuucaacggcggcaagaucagcgugcaguacaaccugagccacagcuacgccggcgacgccgccaaccacugcggcaccguggccaacggcgugcugcagaccuucaugagaauggccuggggcggcagcuacaucgcccuggacagcggcugcggcaacugggacugcaucaugaccagcuaccaguaccugaucauccagaacaccaccugggaggaccacugccaguucagcagacccagccccaucggcuaccugggccugcugagccagagaaccagagacaucuacaucagcagaagacgccggggcaccuucaccuggacccugagcgacagcgagggcaaggacacccccggcggcuacugccugaccagauggaugcugaucgaggccgagcugaagugcuucggcaacaccgccguggccaagugcaacgagaagcacgacgaggaguucugcgacaugcugagacuguucgacuucaacaagcaggccauccagagacugaaggcccccgcccagaugagcauccagcugaucaacaaggccgugaacgcccugaucaacgaccagcugaucaugaagaaccaccugagagacaucaugugcauccccuacugcaacuacagcaaguacugguaccugaaccacaccaccaccggcagaaccagccugcccaagugcuggcuggugagcaacggcagcuaccugaacgagacccacuucagcgacgacaucgagcagcaggccgacaacaugaucaccgagaugcugcagaaggaguacauggagagacagggcaagaccccccugggccugguggaccuguucguguucagcaccagcuucuaccugaucagcaucuuccugcaccuggugaagauccccacccacagacacaucgugggcaagagcugccccaagccccacagacugaaccacaugggcaucugcagcugcggccuguacaagcagcccggcgugcccgugaaguggaagagaugaggacuagucccuguucccagagcccacuuuuuuuucuuuuuuugaaauaaaauagccugucuuucagaucuaaaaaaaaaaaaaaaaaaaaaaaaaaaaaaaaaaaaaaaaaaaaaaaaaaaaaaaaaaaaaaaaugcaucccccccccccccccccccccccccccccccaaaggcucuuuucagagccaccagaauu

SEQ ID NO: 6556 - RNA, 1768 nt, Artificial Sequence
  mRNA product Design a-2 comprising derived and/or modified sequence from LASV(LP;Clade I)__AAF86701__GPCstabilized (opt4)
gggagaguccgcucagccagguugcagaagcggcuuagcguguguccuaaucuucucucugcguguagguaggccugugccgcaaacaagcuuaccaugggccagaucaucaccuucuuccaggaggugccccacgugaucgaggaggugaugaacaucgugcugaucgcccugagccugcuggccauccugaagggccuguacaacaucgccaccugcggcaucaucggccugguggccuuccuguuccugugcggcaagagcugcagccugacccugaagggcggcuacgagcugcagacccuggagcugaacauggagacccugaacaugaccaugccccugagcugcaccaagaacagcagccaccacuacaucagagugggcaacgagaccggccuggagcugacccugaccaacaccagcaucaucaaccacaaguucugcaaccugagcgacgcccacaagaagaaccuguacgaccacgcccugaugagcaucaucagcaccuuccaccugagcauccccaacuucaaccaguacgaggccaugagcugcgacuucaacggcggcaagaucagcgugcaguacaaccugagccacagcuacgccggcgacgccgccgagcacugcggcaccguggccaacggcgugcugcagaccuucaugagaauggccuggggcggcagauacaucgcccuggacagcggcugcggcaacugggacugcaucaugaccagcuaccaguaccugaucauccagaacaccaccugggaggaccacugccaguucagcagacccagccccaucggcuaccugggccugcugagccagagaaccagagacaucuacaucagcagaagacgccggggcaccuucaccuggacccugagcgacagcgagggcaacgagacccccggcggcuacugccugaccagauggaugcugaucgaggccgagcugaagugcuucggcaacaccgccguggccaagugcaacgagaagcacgacgaggaguucugcgacaugcugagacuguucgacuucaacaagcaggccaucagaagacugaaggcccccgcccagaugagcauccagcugaucaacaaggccgugaacgcccugaucaacgaccagcugaucaugaagaaccaccugagagacaucaugugcauccccuacugcaacuacagcaaguacugguaccugaaccacaccagcagcggcagaaccagccugcccaagugcuggcugaucagcaacggcagcuaccugaacgagacccaguucagcgacgacaucgagcagcaggccgacaacaugaucaccgagaugcugcagaaggaguacaucgagagacagggcaagaccccccugggccugguggacaucuucaucuucagcaccagcuucuaccugaucagcaucuuccugcaccugaucaagauccccacccacagacacaucgugggcaagcccugccccaagccccacagacugaaccacaugggcgugugcagcugcggccuguacaagcaccccggcgugcccaccaaguggaagagaugaggacuagucccuguucccagagcccacuuuuuuuucuuuuuuugaaauaaaauagccugucuuucagaucuaaaaaaaaaaaaaaaaaaaaaaaaaaaaaaaaaaaaaaaaaaaaaaaaaaaaaaaaaaaaaaaaugcaucccccccccccccccccccccccccccccccaaaggcucuuuucagagccaccagaauu

SEQ ID NO: 6557 - RNA, 1768 nt, Artificial Sequence
  mRNA product Design a-2 comprising derived and/or modified sequence from LASV(803213;Clade II)__AAF86703__GPCstabilized (opt4)
gggagaguccgcucagccagguugcagaagcggcuuagcguguguccuaaucuucucucugcguguagguaggccugugccgcaaacaagcuuaccaugggccagaucaucaccuucuuccaggaggugccccacgugaucgaggaggugaugaacaucgugcugaucgcccugagccugcuggccauccugaagggcaucuacaacguggccaccugcggccuguucggccugaucagcuuccugcugcugugcggcagaagcugcagcgugaccuacaagggcguguacgagcugcagacccuggagcugaacauggccaaccugaacaugaccaugccccugagcugcaccaagaacaacagccaccacuacaucauggugggcaacgagaccggccuggagcugacccugaccaacaccagcaucaucaaccacaaguucugcaaccugagcgacgcccacaagaagaaccuguacgaccacgcccugaugagcaucaucagcaccuuccaccugagcauccccaacuucaaccaguacgaggccaugagcugcgacuucaacggcggcaagaucagcgugcaguacaaccugagccacagcuucgccguggacgccgccaaccacugcggcaccaucgccaacggcgugcugcagaccuucaugagaauggccuggggcggcagcuacaucgcccuggacagcggcugcggcaacugggacugcaucaugaccagcuaccaguaccugaucauccagaacaccaccugggaggaccacugccaguucagcagacccagccccaucggcuaccugggccugcugagccagagaaccagagacaucuacaucagcagaagacgccggggcaccuucaccuggacccugagcgacagcgagggcaacgaggcccccggcggcuacugccugaccagauggaugcugaucgaggccgagcugaagugcuucggcaacaccgccguggccaagugcaacgagaagcacgacgaggaguucugcgacaugcugagacuguucgacuucaacaagcaggccaucaagagacugaagacccccgcccagaugagcauccagcugaucaacaaggccgugaacgcccugaucaacgaccagcugaucaugaagaaccaccugagagacaucaugugcauccccuacugcaacuacagcagauacugguaccugaaccacaccgugaccggcaagaccagccugcccagaugcuggcuggugagcaacggcagcuaccugaacgagacccacuucagcgacgacaucgagcagcaggccgacaacaugaucaccgagaugcugcagaaggaguacauggacagacagggcaagaccccccugggccugguggaccuguucguguucagcaccagcuucuaccugaucagcaucuuccugcaccuggugaagauccccacccacagacacaucgugggcaagcccugccccaagccccacagacugaaccacaugggcaucugcagcugcggccuguacaagcaccccggcgugcccgugaaguggaagagaugaggacuagucccuguucccagagcccacuuuuuuuucuuuuuuugaaauaaaauagccugucuuucagaucuaaaaaaaaaaaaaaaaaaaaaaaaaaaaaaaaaaaaaaaaaaaaaaaaaaaaaaaaaaaaaaaaugcaucccccccccccccccccccccccccccccccaaaggcucuuuucagagccaccagaauu

SEQ ID NO: 6558 - RNA, 1768 nt, Artificial Sequence
  mRNA product Design a-2 comprising derived and/or modified sequence from LASV(GA391;Clade III)__CAA36645__GPCstabilized (opt4)
gggagaguccgcucagccagguugcagaagcggcuuagcguguguccuaaucuucucucugcguguagguaggccugugccgcaaacaagcuuaccaugggccagaucgugaccuucuuccaggaggugccccacgugaucgaggaggugaugaacaucgugcugaucgcccugagcauccuggccauccugaagggccuguacaacguggccaccugcggccugaucggccuggugaccuuccugcugcugagcggcagaagcugcagccugaucuacaagggcaccuacgagcugcagacccuggagcugaacauggagacccugaacaugaccaugccccugagcugcaccaagaacaacagccaccacuacaucagagugggcaacgagaccggccuggagcugacccugaccaacaccagcauccugaaccacaaguucugcaaccugagcgacgcccacaagagaaaccuguacgaccacagccugaugagcaucaucagcaccuuccaccugagcauccccaacuucaaccaguacgaggccaugagcugcgacuucaacggcggcaagaucaccgugcaguacaaccugagccacagcuucgccguggacgccgccggccacugcggcacccuggccaacggcgugcugcagaccuucaugagaauggccuggggcggcagcuacaucgcccuggacagcggcugcggcaacugggacugcaucaugaccagcuaccaguaccugaucauccagaacaccaccugggacgaccacugccaguucagcagacccagccccaucggcuaccugggccugcugagccagagaaccagagacaucuacaucagcagaagacgccggggcaccuucaccuggacccugagcgacagcgagggcaacgagacccccggcggcuacugccugaccagauggaugcugaucgaggccgagcugaagugcuucggcaacaccgccguggccaagugcaacgagaagcacgacgaggaguucugcgacaugcugagacuguucgacuucaacaagcaggccaucagaagacugaagacccccgcccagaugagcauccagcugaucaacaaggccgugaacgcccugaucaacgaccagcugaucaugaagaaccaccugagagacaucaugugcauccccuacugcaacuacagcagauacugguaccugaaccacaccagcaccggcaagaccagccugcccagaugcuggcugaucagcaacggcagcuaccugaacgagaccaaguucagcgacgacaucgagcagcaggccgacaacaugaucaccgagaugcugcagaaggaguacaucgacagacagggcaagaccccccugggccugguggaccuguucguguucagcaccagcuucuaccugaucagcaucuuccugcaccuggugaagauccccacccacagacacaucgugggcaagcccugccccaagccccacagacugaaccacaugggcaucugcagcugcggccuguacaagcagcccggcgugcccgugagauggaagagaugaggacuagucccuguucccagagcccacuuuuuuuucuuuuuuugaaauaaaauagccugucuuucagaucuaaaaaaaaaaaaaaaaaaaaaaaaaaaaaaaaaaaaaaaaaaaaaaaaaaaaaaaaaaaaaaaaugcaucccccccccccccccccccccccccccccccaaaggcucuuuucagagccaccagaauu

SEQ ID NO: 6559 - RNA, 1771 nt, Artificial Sequence
  mRNA product Design a-2 comprising derived and/or modified sequence from LASV(AV;Clade V)__CCA30314__GPCstabilized (opt4)
gggagaguccgcucagccagguugcagaagcggcuuagcguguguccuaaucuucucucugcguguagguaggccugugccgcaaacaagcuuaccaugggccagaucgugaccuucuuccaggaggugccccacgugaucgaggaggugaugaacaucgugcugaucgcccugagcauccuggccgugcugaagggccuguacaacaucgccaccugcggccugaucggccugaucaccuuccugcugcugugcggcagaagcugcagcagcaaccuguacaagggcguguacgagcugcagagccuggaccugaacauggagacccugaacaugaccaugccccugagcugcaccaagaacaacagccaccacuacaucagagugggcaacgacaccggccuggagcugacccugaccaacaccagcauccugaaccacaaguucugcaaccugagcgacgcccacaagaaggaccuguacgaccacgcccugaugagcaucaucagcaccuuccaccugagcauccccaacuucaaccaguacgaggccaugagcugcgacuucaacggcggcaagaucagcgugcaguacaaccugagccacagcuacgccaucgacgccgccaaccacugcggcaccguggccaacggcauccugcagaccuucaugagaauggccuggggcggcagcuacaucgcccuggacagcggcugcggcaacugggacugcaucaugaccagcuaccaguaccugaucauccagaacaccaccugggagaaccacugccaguucagcagacccagccccaucggcuaccugggccugcugagccagagaaccagagacaucuacaucagcagaagacgccggggcaccuucaccuggacccugagcgacagcgagggcaacgccacccccggcggcuacugccugaccagauggaugcugaucgaggccgagcugaagugcuucggcaacaccgccguggccaagugcaacgagaagcacgacgaggaguucugcgacaugcugagacuguucgacuucaacaagcaggccaucagcagacugaagagccccgcccagaugagcauccagcugaucaacaaggccgugaacgcccugaucaacgaccagcugaucaugaagaaccaccugagagacaucaugugcauccccuacugcaacuacagcaaguacugguaccugaaccacaccaucaccggcaagaccagccugcccaagugcuggcuggugagcaacggcagcuaccugaacgagacccacuucagcgacgacaucgagcagcaggccgacaacaugaucaccgagaugcugcagaaggaguacauggagagacagggcaagaccccccugggccugguggaccuguucguguucagcaccagcuucuaccugaucagcaucuuccugagacuggugaagauccccacccacagacacaucgugggcaagcccugccccaagccccacagacugaaccacaugggcaucugcagcugcggccuguacaagcagcccggcgugcccgugagauggaagagaugaggacuagucccuguucccagagcccacuuuuuuuucuuuuuuugaaauaaaauagccugucuuucagaucuaaaaaaaaaaaaaaaaaaaaaaaaaaaaaaaaaaaaaaaaaaaaaaaaaaaaaaaaaaaaaaaaugcaucccccccccccccccccccccccccccccccaaaggcucuuuucagagccaccagaauu

SEQ ID NO: 6560 - RNA, 1768 nt, Artificial Sequence
  mRNA product Design a-2 comprising derived and/or modified sequence from LASV(Togo/2016/7082;Clade VI)__AMR44577__GPCstabilized (opt4)
gggagaguccgcucagccagguugcagaagcggcuuagcguguguccuaaucuucucucugcguguagguaggccugugccgcaaacaagcuuaccaugggccagaucaucaccuucuuccaggaggugccccacgugaucgaggaggugaugaacaucgugcugaucgcccugagccugcuggccauccugaagggcguguacaacguggccaccugcggcaucaucggccuggugaccuuccuguuccugugcggcagaagcugcagccugaucuacaagggcagcuacgagcugcagacccuggagcugaacauggagacccugaacaugaccaugccccugagcugcaccaagaacagcagccaccacuacaucagagugggcaacgagaccggccuggagcugacccugaccaacaccagcaucaucaaccacaaguucugcaaccugagcgacgcccacaagagaaaccuguacgaccacgcccugaugagcauccugagcaccuuccaccugagcauccccaacuucaaccaguacgaggccaugagcugcgacuucaacggcggcaagaucagcgugcaguacaaccugagccacgccuacgccguggacgccgccgagcacugcggcaccguggccaacggcgugcugcagaccuucaugagaauggccuggggcggcagcuacaucgcccuggacagcggcugcggcaacugggacugcaucaugaccagcuaccaguaccugaucauccagaacaccaccugggaggaccacugccaguucagcagacccagccccaucggcuaccugggccugcugagccagagaaccagagacaucuacaucagcagaagacgccggggcaccuucaccuggacccugagcgacagcgagggcaacgagacccccggcggcuacugccugaccagauggaugcugaucgaggccgagcugaagugcuucggcaacaccgccguggccaagugcaacgagaagcacgacgaggaguucugcgacaugcugagacuguucgacuucaacaagcaggccauccagagacugaagagccccgcccagaugagcauccagcugaucaacaaggccgugaacgcccugaucaacgaccagcugaucaugaagaaccaccugagagacaugaugugcauccccuacugcaacuacagcaaguacugguaccugaaccacaccagcagcggcagaaccagccugcccaagugcuggcuggugagcaacggcagcuaccugaacgagacccacuucagcgacgacaucgagcagcaggccgacaacaugaucaccgagaugcugcagaaggaguacaucgacagacagggcaagaccccccugggccugguggaccuguucguguucagcaccagcuucuaccugaucagcaucuuccugcaccugaucaagauccccacccacagacacaucgugggcaagcccugccccaagccccacagacugaaccacaugggcaucugcagcugcggccuguacaagcagcccggcgugcccaccagauggaagagaugaggacuagucccuguucccagagcccacuuuuuuuucuuuuuuugaaauaaaauagccugucuuucagaucuaaaaaaaaaaaaaaaaaaaaaaaaaaaaaaaaaaaaaaaaaaaaaaaaaaaaaaaaaaaaaaaaugcaucccccccccccccccccccccccccccccccaaaggcucuuuucagagccaccagaauu

SEQ ID NO: 6561 - RNA, 1768 nt, Artificial Sequence
  mRNA product Design a-2 comprising derived and/or modified sequence from LASV(KAK-428;Clade n.d. (VII))__ANH09740__GPCstabilized (opt4)
gggagaguccgcucagccagguugcagaagcggcuuagcguguguccuaaucuucucucugcguguagguaggccugugccgcaaacaagcuuaccaugggccagaucgugaccuucuuccaggaggugccccacgugaucgaggaggugaugaacaucgugcugaucgcccugagccugcuggccauccugaagggccuguacaacuucgccaccugcggcgugaucggccugaucaccuuccugcugcugugcggcagaagcugcagcgccaccuacaagggccaguacgagcugcagacccuggagcugaacauggagagccugaacaugaccaugccccugagcugcaccaagaacaacagccaccacuacaucagagccggcaacaacaccggccuggagcugacccugaccaacaccagcaucaucagccacaaguucugcaaccugagcgacgcccacaagaagaaccuguacgaccacacccugaugagcaucaucaccaccuuccaccugagcauccccaacuucaaccaguacgaggccaugagcugcgacuucaacggcggcaagaucagcauccaguacaaccugagccacagcuacgccggcgacgccgcccagcacugcggcaccguggccaacggcgugcugcagaccuucaugagaauggccuggggcggcagcuaccuggcccuggacagcggcugcagaggcugggacugcaucaucagcagcuaccaguaccugaucauccagaacaccaccugggacgaccacugccaguucagcagacccagccccaucggcuaccugggcuucgugagccagaagaccagagacaucuacaucagcagaagacgccggggcaccuucaccuggacccugagcgacagcgagggccacgacaugcccggcggcuacugccugaccagauggaugcugaucgaggccgaccugaagugcuucggcaacaccgccguggccaagugcaacgagaagcacgacgaggaguucugcgacauguggagacuguucgacuucaacaagcaggccauccagagacugaaggcccccgcccagaugaacauccagcugaucaacaaggccgugaacgcccugaucaacgaccagcugaugaugaagaaccaccugagagacaucaugugcauccccuacugcaacuacagcaaguucugguaccugaacaacaccaccaccggcagaaccagccugcccagaugcuggcugaucagcaacggcagcuaccugaacgagacccacuucagcgacgacaucgagcagcaggccgacaacaugaucaccgagaugcugcagaaggaguacauggacagacagggcaagaccccccugggccugguggaccuguucguguucagcaccagcuucuaccugaucaccaucuuccugcaccuggugaagauccccacccacagacacaucgugggcaagcccugccccaagccccacagacugaaccacaugggcaucugcagcugcggccuguacaagcagcccggcgugcccgugagauggaagagaugaggacuagucccuguucccagagcccacuuuuuuuucuuuuuuugaaauaaaauagccugucuuucagaucuaaaaaaaaaaaaaaaaaaaaaaaaaaaaaaaaaaaaaaaaaaaaaaaaaaaaaaaaaaaaaaaaugcaucccccccccccccccccccccccccccccccaaaggcucuuuucagagccaccagaauu

SEQ ID NO: 6562 - RNA, 1768 nt, Artificial Sequence; identical to SEQ ID NO: 6556
  mRNA product Design a-2 comprising derived and/or modified sequence from LASV(Pinneo-NIG-1969;Clade I)__AIT17836__GPCstabilized (opt4)

SEQ ID NO: 6563 - RNA, 1768 nt, Artificial Sequence
  mRNA product Design a-2 comprising derived and/or modified sequence from LASV(ISTH0009-NIG-2011;Clade II)__AIT17404__GPCstabilized (opt4)
gggagaguccgcucagccagguugcagaagcggcuuagcguguguccuaaucuucucucugcguguagguaggccugugccgcaaacaagcuuaccaugggccagaucaucaccuucuuccaggaggugccccacgugaucgaggaggugaugaacaucgugcugaucgcccugagccugcuggccauccugaagggcaucuacaacguggccaccugcggccuguucggccuggugagcuuccugcugcugugcggcagaagcugcagcaccaccuacaagggcguguacgagcugcagacccuggagcuggacauggccagccugaacaugaccaugccccugagcugcaccaagaacaacagccaccacuacaucauggugggcaacgagaccggccuggagcugacccugaccaacaccagcaucaucaaccacaaguucugcaaccugagcgacgcccacaagaagaaccuguacgaccacgcccugaugagcaucaucagcaccuuccaccugagcauccccaacuucaaccaguacgaggccaugagcugcgacuucaacggcggcaagaucagcgugcaguacaaccugagccacgccuacgccguggacgccgccaaccacugcggcaccaucgccaacggcgugcugcagaccuucaugagaauggccuggggcggcagcuacaucgcccuggacagcggcugcggcagcugggacugcaucaugaccagcuaccaguaccugaucauccagaacaccaccugggaggaccacugccaguucagcagacccagccccaucggcuaccugggccugcugagccagagaaccagagacaucuacaucagcagaagacgccggggcaccuucaccuggacccugagcgacagcgagggcaacgagacccccggcggcuacugccugaccagauggaugcugaucgaggccgagcugaagugcuucggcaacaccgccguggccaagugcaacgagaagcacgacgaggaguucugcgacaugcugagacuguucgacuucaacaagcaggccaucagaagacugaagacccccgcccagaugagcauccagcugaucaacaaggccgugaacgcccugaucaacgaccagcugaucaugaagaaccaccugagagacaucaugugcauccccuacugcaacuacagcaaguacugguaccugaaccacaccgugaccggcaagaccagccugcccagaugcuggcuggugagcaacggcagcuaccugaacgagacccacuucagcgacgacaucgagcagcaggccgacaacaugaucaccgagcugcugcagaaggaguacauggacagacagggcaagaccccccugggccugguggaccuguucguguucagcaccagcuucuaccugaucagcaucuuccugcaccugaucaagauccccacccacagacacaucaccggcaagcccugccccaagccccacagacugaaccacaugggcaucugcagcugcggccuguacaagcaccccggcgugcccgugaaguggaagagaugaggacuagucccuguucccagagcccacuuuuuuuucuuuuuuugaaauaaaauagccugucuuucagaucuaaaaaaaaaaaaaaaaaaaaaaaaaaaaaaaaaaaaaaaaaaaaaaaaaaaaaaaaaaaaaaaaugcaucccccccccccccccccccccccccccccccaaaggcucuuuucagagccaccagaauu

SEQ ID NO: 6564 - RNA, 1768 nt, Artificial Sequence
  mRNA product Design a-2 comprising derived and/or modified sequence from LASV(ISTH2010-NIG-2012;Clade II)__AIT17482__GPCstabilized (opt4)
gggagaguccgcucagccagguugcagaagcggcuuagcguguguccuaaucuucucucugcguguagguaggccugugccgcaaacaagcuuaccaugggccagaucaucaccuucuuccaggaggugccccacgugaucgaggaggugaugaacaucgugcugaucgcccugagccugcuggccauccugaagggcaucuacaacguggccaccugcggccuguucggccuggugagcuuccugcugcugugcggcagaagcugcagcaccaccuacaagggcguguacgagcugcagacccuggagcuggacauggccagccugaacaugaccaugccccugagcugcaccaagaacaacagccaccacuacaucauggugggcaacgagaccggccuggagcugacccugaccaacaccagcaucaucaaccacaaguucugcaaccugagcgacgcccacaagaagaaccuguacgaccacgcccugaugagcaucaucagcaccuuccaccugagcauccccaacuucaaccaguacgaggccaugagcugcgacuucaacggcggcaagaucagcgugcaguacaaccugagccacgccuacgccguggacgccgccaaccacugcggcaccaucgccaacggcgugcugcagaccuucaugagaauggccuggggcggcagcuacaucgcccuggacagcggcugcggcagcugggacugcaucaugaccagcuaccaguaccugaucauccagaacaucaccugggaggaccacugccaguucagcagacccagccccaucggcuaccugggccugcugagccagagaaccagagacaucuacaucagcagaagacgccggggcaccuucaccuggacccugagcgacagcgagggcaacgagacccccggcggcuacugccugaccagauggaugcugaucgaggccgagcugaagugcuucggcaacaccgccguggccaagugcaacgagaagcacgacgaggaguucugcgacaugcugagacuguucgacuucaacaagcaggccaucagaagacugaagacccccgcccagaugagcauccagcugaucaacaaggccgugaacgcccugaucaacgaccagcugaucaugaagaaccaccugagagacaucaugugcauccccuacugcaacuacagcaaguacugguaccugaaccacaccgugaccggcaagaccagccugcccagaugcuggcuggugagcaacggcagcuaccugaacgagacccacuucagcgacgacaucgagcagcaggccgacaacaugaucaccgagcugcugcagaaggaguacaucgacagacagggcaagaccccccugggccugguggaccuguucguguucagcaccagcuucuaccugaucagcaucuuccugcaccuggugaagauccccacccacagacacguggugggcaagcccugccccaagccccacagacugaaccacaugggcaucugcagcugcggccuguacaagcaccccggcgugcccgugaaguggaagagaugaggacuagucccuguucccagagcccacuuuuuuuucuuuuuuugaaauaaaauagccugucuuucagaucuaaaaaaaaaaaaaaaaaaaaaaaaaaaaaaaaaaaaaaaaaaaaaaaaaaaaaaaaaaaaaaaaugcaucccccccccccccccccccccccccccccccaaaggcucuuuucagagccaccagaauu

SEQ ID NO: 6565 - RNA, 1768 nt, Artificial Sequence
  mRNA product Design a-2 comprising derived and/or modified sequence from LASV(Lassa virus/H.sapiens-wt/NGA/2015/ISTH_0543;Clade II)__AVO03639__GPCstabilized (opt4)
gggagaguccgcucagccagguugcagaagcggcuuagcguguguccuaaucuucucucugcguguagguaggccugugccgcaaacaagcuuaccaugggccagaucaucaccuucuuccaggaggugccccacgugaucgaggaggugaugaacaucgugcugaucgcccugagccugcuggccauccugaagggcaucuacaacguggccaccugcggccuguucggccuggugagcuuccugcugcugugcggcagaagcugcagcaccaccuacaagggcguguacgagcugcagacccuggagcuggacauggccaaccugaacaugaccaugccccugagcugcaccaagaacaacagccaccacuacaucauggugggcaacgagaccggccuggagcugacccugaccaacaccagcaucaucaaccacaaguucugcaaccugagcgacgcccacaagaagaaccuguacgaccacgcccugaugagcaucaucagcaccuuccaccugagcauccccaacuucaaccaguacgaggccaugagcugcgacuucaacggcggcaagaucagcgugcaguacaaccugagccacaccuacgccguggacgccgccaaccacugcggcaccaucgccaacggcgugcugcagaccuucaugagaauggccuggggcggcagcuacaucgcccuggacagcggcugcggcagcugggacugcaucaugaccagcuaccaguaccuggugauccagaacaccaccugggaggaccacugccaguucagcagacccagccccaucggcuaccugggccugcugagccagagaaccagagacaucuacaucagcagaagacgccggggcaccuucaccuggacccugagcgacagcgagggcaacgagacccccggcggcuacugccugaccagauggaugcugaucgaggccgagcugaagugcuucggcaacaccgccguggccaagugcaacgagaagcacgacgaggaguucugcgacaugcugagacuguucgacuucaacaagcaggccaucagaagacugaagacccccgcccagaugagcauccagcugaucaacaaggccgugaacgcccugaucaacgaccagcugaucaugaagaaccaccugagagacaucaugugcauccccuacugcaacuacagcaaguacugguaccugaaccacaccgugaccggcaagaccagccugcccagaugcuggcuggugagcaacggcagcuaccugaacgagacccacuucagcgacgacaucgagcagcaggccgacaacaugaucaccgagcugcugcagaaggaguacaucgacagacagggcaagaccccccugggccugguggaccuguucguguucagcaccagcuucuaccugaucagcaucuuccugcaccuggugaagauccccacccacagacacaucaccggcaagcccugccccaagccccacagacugaaccacaugggcaucugcagcugcggccuguacaagcaccccggcgugcccgugaaguggaagagaugaggacuagucccuguucccagagcccacuuuuuuuucuuuuuuugaaauaaaauagccugucuuucagaucuaaaaaaaaaaaaaaaaaaaaaaaaaaaaaaaaaaaaaaaaaaaaaaaaaaaaaaaaaaaaaaaaugcaucccccccccccccccccccccccccccccccaaaggcucuuuucagagccaccagaauu

SEQ ID NO: 6566 - RNA, 1768 nt, Artificial Sequence
  mRNA product Design a-2 comprising derived and/or modified sequence from LASV(Lassa virus/H.sapiens-wt/NGA/2016/ISTH_0009;Clade II)__AVO03571__GPCstabilized (opt4)
gggagaguccgcucagccagguugcagaagcggcuuagcguguguccuaaucuucucucugcguguagguaggccugugccgcaaacaagcuuaccaugggccagaucaucaccuucuuccaggaggugccccacgugaucgaggaggugaugaacaucgugcugaucgcccugagccugcuggccauccugaagggcaucuacaacguggccaccugcggccugcugggccuggugagcuuccugcugcugugcggcagaagcugcagcaccaccuacaagggcguguacgagcugcagacccuggagcuggacauggccagccugaacaugaccaugccccugagcugcaccaagaacaacagccaccacuacaucauggugggcaacgagaccggccuggagcugacccugaccaacaccagcaucaucaaccacaaguucugcaaccugagcgacgcccacaagaagaaccuguacgaccacgcccugaugagcaucaucagcaccuuccaccugagcauccccaacuucaaccaguacgaggccaugagcugcgacuucaacggcggcagaaucagcgugcaguacaaccugagccacagcuacgccguggacgccgccaaccacugcggcaccaucgccaacggcgugcugcagaccuucaugagaauggccuggggcggcagcuacaucgcccuggacagcggcugcggcagcugggacugcaucaugaccagcuaccaguaccugaucauccagaacaccaccugggaggaccacugccaguucagcagacccagccccaucggcuaccugggccugcugagccagagaaccagagacaucuacaucagcagaagacgccggggcaccuucaccuggacccugagcgacagcgagggcaacgagacccccggcggcuacugccugaccagauggaugcugaucgaggccgagcugaagugcuucggcaacaccgccguggccaagugcaacgagaagcacgacgaggaguucugcgacaugcugagacuguucgacuucaacaagcaggccaucagaagacugaagacccccgcccagaugagcauccagcugaucaacaaggccgugaacgcccugaucaacgaccagcugaucaugaagaaccaccugagagacaucaugugcauccccuacugcaacuacagcaaguacugguaccugaaccacaccgugaccggcaagaccagccugcccagaugcuggcuggugagcaacggcagcuaccugaacgagacccacuucagcgacgacaucgagcagcaggccgacaacaugaucaccgagcugcugcagaaggaguacaucgacagacagggcaagaccccccugggccugguggaccuguucguguucagcaccagcuucuaccugaucagcaucuuccugcaccuggugaagauccccacccacagacacaucaccggcaagcccugccccaagccccacagacugaaccacaugggcaucugcagcugcggccuguacaaccaccccggcgugcccgugaaguggaagagaugaggacuagucccuguucccagagcccacuuuuuuuucuuuuuuugaaauaaaauagccugucuuucagaucuaaaaaaaaaaaaaaaaaaaaaaaaaaaaaaaaaaaaaaaaaaaaaaaaaaaaaaaaaaaaaaaaugcaucccccccccccccccccccccccccccccccaaaggcucuuuucagagccaccagaauu

SEQ ID NO: 6567 - RNA, 1768 nt, Artificial Sequence
  mRNA product Design a-2 comprising derived and/or modified sequence from LASV(Lassa virus/H.sapiens-wt/NGA/2016/ISTH_0017;Clade II)__AVO03567__GPCstabilized (opt4)
gggagaguccgcucagccagguugcagaagcggcuuagcguguguccuaaucuucucucugcguguagguaggccugugccgcaaacaagcuuaccaugggccagaucaucaccuucuuccaggaggugccccacgugaucgaggaggugaugaacaucgugcugaucgcccugagccugcuggccauccugaagggcaucuacaacguggccaccugcggccuguucggccuggugagcuuccugcugcugugcggcagaagcugcagcaccaccuacaagggcguguacgagcugcagacccuggagcuggacauggccagccugaacaugaccaugccccugagcugcaccaagaacaacagccaccacuacaucauggugggcaacgagaccggccuggagcugacccugaccaacaccagcaucaucaaccacaaguucugcaaccugagcgacgcccacaagaagaaccuguacgaccacgcccugaugagcaucaucagcaccuuccaccugagcauccccaacuucaaccaguacgaggccaugagcugcgacuucaacggcggcaagaucagcgugcaguacaaccugagccacaccuacgccaucgacgccgccaaccacugcggcaccaucgccaacggcgugcugcagaccuucaugagaauggccuggggcggcagcuacaucgcccuggacagcggcugcggcagcugggacugcaucaugaccagcuaccaguaccugaucauccagaacaccaccugggaggaccacugccaguucagcagacccagccccaucggcuaccugggccugcugagccagagaaccagagacaucuacaucagcagaagacgccggggcaccuucaccuggacccugagcgacagcgagggcaacgagacccccggcggcuacugccugaccagauggaugcugaucgaggccgagcugaagugcuucggcaacaccgccguggccaagugcaacgagaagcacgacgaggaguucugcgacaugcugagacuguucgacuucaacaagcaggccaucagaagacugaagacccccgcccagaugagcauccagcugaucaacaaggccgugaacgcccugaucaacgaccagcugaucaugaagaaccaccugagagacaucaugugcauccccuacugcaacuacagcaaguacugguaccugaaccacaccgugaccggcaagaccagccugcccagaugcuggcuggugagcaacggcagcuaccugaacgagacccacuucagcgacgacaucgagcagcaggccgacaacaugaucaccgagcugcugcagaaggaguacauggacagacagggcaagaccccccugggccugguggaccuguucguguucagcaccagcuucuaccugaucagcaucuuccugcaccuggugagaauccccacccacagacacgugaucggcaagcccugccccaagccccacagacugaaccacaugggcaucugcagcugcggccuguacaagcaccccggcgugcccgugaaguggaagagaugaggacuagucccuguucccagagcccacuuuuuuuucuuuuuuugaaauaaaauagccugucuuucagaucuaaaaaaaaaaaaaaaaaaaaaaaaaaaaaaaaaaaaaaaaaaaaaaaaaaaaaaaaaaaaaaaaugcaucccccccccccccccccccccccccccccccaaaggcucuuuucagagccaccagaauu

SEQ ID NO: 6568 - RNA, 1768 nt, Artificial Sequence
  mRNA product Design a-2 comprising derived and/or modified sequence from LASV(Lassa virus/H.sapiens-wt/NGA/2018/ISTH_0959;Clade II)__AVV65099__GPCstabilized (opt4)
gggagaguccgcucagccagguugcagaagcggcuuagcguguguccuaaucuucucucugcguguagguaggccugugccgcaaacaagcuuaccaugggccagaucaucaccuucuuccaggaggugccccacgugaucgaggaggugaugaacaucgugcugaucgcccugagccugcuggccauccugaagggcaucuacaacguggugaccugcggccuguucggccuggugagcuuccugcugcugugcggcagaagcugcagcaccaccuacaagggcguguacgagcugcagacccuggagcuggacauggccagccugaacaugaccaugccccugagcugcaccaagaacaacagccaccacuacaucauggugggcaacgagaccggccuggagcugacccugaccaacaccagcaucaucaaccacaaguucugcaaccugagcgacgcccacaagaagaaccuguacgaccacgcccugaugagcaucaucagcaccuuccaccugagcauccccaacuucaaccaguacgaggccaugagcugcgacuucaacggcggcaagaucagcgugcaguacaaccugagccacgccuacgccaucgacgccgccaaccacugcggcaccaucgccaacggcgugcugcagaccuucaugagaauggccuggggcggcagcuacaucgcccuggacagcggcugcggcagcugggacugcaucaugaccagcuaccaguaccugaucauccagaacaccaccugggaggaccacugccaguucagcagacccagccccaucggcuaccugggccugcugagccagagaaccagagacaucuacaucagcagaagacgccggggcaccuucaccuggacccugagcgacagcgagggcaacgagacccccggcggcuacugccugaccagauggaugcugaucgaggccgagcugaagugcuucggcaacaccgccguggccaagugcaacgagaagcacgacgaggaguucugcgacaugcugagacuguucgacuucaacaagcaggccaucagaagacugaagacccccgcccagaugagcauccagcugaucaacaaggccgugaacgcccugaucaacgaccagcugaucaugaagaaccaccugagagacaucaugugcauccccuacugcaacuacagcaaguacugguaccugaaccacaccgugaccggcaagaccagccugcccagaugcuggcuggugagcaacggcagcuaccugaacgagacccacuucagcgacgacaucgagcagcaggccgacaacaugaucaccgagcugcugcagaaggaguacaucgacagacagggcaagaccccccugggccugguggaccuguucguguucagcaccagcuucuaccugaucagcaucuuccugcaccuggugaagauccccacccacagacacgugaucggcaagcccugccccaagccccacagacugaaccacaugggcaucugcagcugcggccuguacaagcaccccggcgugcccgugaaguggaagagaugaggacuagucccuguucccagagcccacuuuuuuuucuuuuuuugaaauaaaauagccugucuuucagaucuaaaaaaaaaaaaaaaaaaaaaaaaaaaaaaaaaaaaaaaaaaaaaaaaaaaaaaaaaaaaaaaaugcaucccccccccccccccccccccccccccccccaaaggcucuuuucagagccaccagaauu

SEQ ID NO: 6569 - RNA, 1768 nt, Artificial Sequence
  mRNA product Design a-2 comprising derived and/or modified sequence from LASV(LASV003-NIG-2008;Clade II)__AIT17580__GPCstabilized (opt4)
gggagaguccgcucagccagguugcagaagcggcuuagcguguguccuaaucuucucucugcguguagguaggccugugccgcaaacaagcuuaccaugggccagaucaucaccuucuuccaggaggugccccacgugaucgaggaggugaugaacaucgugcugaucgcccugagccugcuggccauccugaagggcaucuacaacguggccaccugcggccuguucggccuggugagcuuccugcugcugugcggcagaagcugcagcaccaccuacaagggcguguacgagcugcagacccuggagcuggacauggccagccugaacaugaccaugccccugagcugcaccaagaacaacagccaccacuacaucauggugggcaacgagaccggccuggagcugacccugaccaacaccagcaucaucaaccacaaguucugcaaccugagcgacgcccacaagaagaaccuguacgaccacgcccugaugagcaucaucagcaccuuccaccugagcauccccaacuucaaccaguacgaggccaugagcugcgacuucaacggcggcaagaucagcgugcaguacaaccugagccacaccuacgccguggacgccgccaaccacugcggcaccaucgccaacggcgugcugcagaccuucaugagaauggccuggggcggcagcuacaucgcccuggacagcggcugcggcagcugggacugcaucaugaccagcuaccaguaccugaucauccagaacaccaccugggaggaccacugccaguucagcagacccagccccaucggcuaccugggccugcugagccagagaaccagagacaucuacaucagcagaagacgccggggcaccuucaccuggacccugagcgacagcgagagcaacgagacccccggcggcuacugccugaccagauggaugcugaucgaggccgagcugaagugcuucggcaacaccgccguggccaagugcaacgagaagcacgacgaggaguucugcgacaugcugagacuguucgacuucaacaagcaggccaucagaagacugaaggcccccgcccagaugagcauccagcugaucaacaaggccgugaacgcccugaucaacgaccagcugaucaugaagaaccaccugagagacaucaugugcauccccuacugcaacuacagcaaguacugguaccugaaccacaccgugaccggcagaaccagccugcccagaugcuggcuggugagcaacggcagcuaccugaacgagacccacuucagcgacgacaucgagcagcaggccgacaacaugaucaccgagcugcugcagaaggaguacauggacagacagggcaagaccccccugggccugguggaccuguucguguucagcaccagcuucuaccugaucagcaucuuccugcaccuggugaagauccccacccacagacacgugaucggcaagcccugccccaagccccacagacugaaccacaugggcaucugcagcugcggccuguacaagcaccccggcgugcccgugaaguggaagagaugaggacuagucccuguucccagagcccacuuuuuuuucuuuuuuugaaauaaaauagccugucuuucagaucuaaaaaaaaaaaaaaaaaaaaaaaaaaaaaaaaaaaaaaaaaaaaaaaaaaaaaaaaaaaaaaaaugcaucccccccccccccccccccccccccccccccaaaggcucuuuucagagccaccagaauu

SEQ ID NO: 6570 - RNA, 1768 nt, Artificial Sequence
  mRNA product Design a-2 comprising derived and/or modified sequence from LASV(LASV035-NIG-2009;Clade II)__AIT17588__GPCstabilized (opt4)
gggagaguccgcucagccagguugcagaagcggcuuagcguguguccuaaucuucucucugcguguagguaggccugugccgcaaacaagcuuaccaugggccagaucaucaccuucuuccaggaggugccccacgugaucgaggaggugaugaacaucgugcugaucgcccugagccugcuggccauccugaagggcaucuacaacguggccaccugcggccuguucggccuggugagcuuccugcugcugugcggcagaagcugcagcaccaccuacaagggcguguacgagcugcagacccuggagcuggacauggccagccugaacaugaccaugccccugagcugcaccaagaacaacagccaccacuacaucauggugggcaacgagaccggccuggagcugacccugaccaacaccagcaucaucaaccacaaguucugcaaccugagcgacgcccacaagaagaaccuguacgaccacgcccugaugagcaucaucagcaccuuccaccugagcauccccaacuucaaccaguacgaggccaugagcugcgacuucaacggcggcaagaucagcgugcaguacaaccugagccacgccuacgccguggacgccgccaaccacugcggcaccaucgccaacggcgugcugcagaccuucaugagaauggccuggggcggcagcuacaucgcccuggacagcggcugcggcagcugggacugcaucaugaccagcuaccaguaccugaucauccagaacaccaccugggaggaccacugccaguucagcagacccagccccaucggcuaccugggccugcugagccagagaaccagagacaucuacaucagcagaagacgccggggcaccuucaccuggacccugagcgacagcgagggcaacgagacccccggcggcuacugccugaccagauggaugcugaucgaggccgagcugaagugcuucggcaacaccgccguggccaagugcaacgagaagcacgacgaggaguucugcgacaugcugagacuguucgacuucaacaagcaggccaucagaagacugaaggcccccgcccagaugagcauccagcugaucaacaaggccgugaacgcccugaucaacgaccagcugaucaugaagaaccaccugagagacaucaugugcauccccuacugcaacuacagcaaguacugguaccugaaccacaccgugaccggcaagaccagccugcccagaugcuggcuggugagcaacggcagcuaccugaacgagacccacuucagcgacgacaucgagcagcaggccgacaacaugaucaccgagcugcugcagaaggaguacaucgacagacagggcaagaccccccugggccugguggaccuguucguguucagcaccagcuucuaccugaucagcaucuuccugcaccuggugaagauccccacccacagacacgugaucggcaagcccugccccaagccccacagacugaaccacaugggcaucugcagcugcggccuguacaagcaccccggcgugcccgugaaguggaagagaugaggacuagucccuguucccagagcccacuuuuuuuucuuuuuuugaaauaaaauagccugucuuucagaucuaaaaaaaaaaaaaaaaaaaaaaaaaaaaaaaaaaaaaaaaaaaaaaaaaaaaaaaaaaaaaaaaugcaucccccccccccccccccccccccccccccccaaaggcucuuuucagagccaccagaauu

SEQ ID NO: 6571 - RNA, 1768 nt, Artificial Sequence
  mRNA product Design a-2 comprising derived and/or modified sequence from LASV(LASV1000-NIG-2009;Clade II)__AIT17782__GPCstabilized (opt4)
gggagaguccgcucagccagguugcagaagcggcuuagcguguguccuaaucuucucucugcguguagguaggccugugccgcaaacaagcuuaccaugggccagaucaucaccuucuuccaggaggugccccacgugaucgaggaggugaugaacaucgugcugaucgcccugagccugcuggccauccugaagggcaucuacaacguggccaccugcggccuguucggccuggugagcuuccugcugcugugcggcagaagcugcagcaccaccuacaagggcguguacgagcugcagacccuggagcuggacauggccagccugaacaugaccaugccccugagcugcaccaagaacaacagccaccacuacaucauggugggcaacgagaccggccuggagcugacccugaccaacaccagcaucaucaaccacaaguucugcaaccugagcgacgcccacaagaagaaccuguacgaccacgcccugaugagcaucaucagcaccuuccaccugagcauccccaacuucaaccaguacgaggccaugagcugcgacuucaacggcggcaagaucagcgugcaguacaaccugagccacaccuacgccguggacgccgccaaccacugcggcaccaucgccaacggcgugcugcagaccuucaugagaauggccuggggcggcagcuacaucgcccuggacagcggcugcggcagcugggacugcaucaugaccagcuaccaguaccugaucauccagaacaccaccugggaggaccacugccaguucagcagacccagccccaucggcuaccugggccugcugagccagagaaccagagacaucuacaucagcagaagacgccggggcaccuucaccuggacccugagcgacagcgagggcaacgagacccccggcggcuacugccugaccagauggaugcugaucgaggccgagcugaagugcuucggcaacaccgccguggccaagugcaacgagaagcacgacgaggaguucugcgacaugcugagacuguucgacuucaacaagcaggccaucaagagacugaagacccccgcccagaugagcauccagcugaucaacaaggccgugaacgcccugaucaacgaccagcugaucaugaagaaccaccugagagacaucaugugcauccccuacugcaacuacagcaaguacugguaccugaaccacaccgugaccggcaagaccagccugcccagaugcuggcuggugagcaacggcagcuaccugaacgagacccacuucagcgacgacaucgagcagcaggccgacaacaugaucaccgagcugcugcagaaggaguacaucgacagacagggcaagaccccccugggccugguggaccuguucguguucagcaccagcuucuaccugaucagcaucuuccugcaccuggugaagauccccacccacagacacguggugggcaagcccugccccaagccccacagacugaaccacaugggcaucugcagcugcggccuguacaagcaccccggcgugcccgugaaguggaagagaugaggacuagucccuguucccagagcccacuuuuuuuucuuuuuuugaaauaaaauagccugucuuucagaucuaaaaaaaaaaaaaaaaaaaaaaaaaaaaaaaaaaaaaaaaaaaaaaaaaaaaaaaaaaaaaaaaugcaucccccccccccccccccccccccccccccccaaaggcucuuuucagagccaccagaauu

SEQ ID NO: 6572 - RNA, 1768 nt, Artificial Sequence
  mRNA product Design a-2 comprising derived and/or modified sequence from LASV(LASV221-NIG-2010;Clade II)__AIT17624__GPCstabilized (opt4)
gggagaguccgcucagccagguugcagaagcggcuuagcguguguccuaaucuucucucugcguguagguaggccugugccgcaaacaagcuuaccaugggccagaucaucaccuucuuccaggaggugccccacgugaucgaggaggugaugaacaucgugcugaucgcccugagccugcuggccauccugaagggcaucuacaacguggccaccugcggccuguucggccuggugagcuuccugcugcugugcggcagaagcugcagcaccaccuacaagggcguguacgagcugcagacccuggagcuggacauggccagccugaacaugaccaugccccugagcugcaccaagaacaacagccaccacuacaucauggugggcaacgagaccggccuggagcugacccugaccaacaccagcaucaucaaccacaaguucugcaaccugagcgacgcccacaagaagaaccuguacgaccacgcccugaugagcaucaucagcaccuuccaccugagcauccccaacuucaaccaguacgaggccaugagcugcgacuucaacggcggcaagaucagcgugcaguacaaccugagccacaccuacgccaucgacgccgccaaccacugcggcaccaucgccaacggcgugcugcagaccuucaugagaauggccuggggcggcagcuacaucgcccuggacagcggcugcggcagcugggacugcaucaugaccagcuaccaguaccugaucauccagaacaccaccugggaggaccacugccaguucagcagacccagccccaucggcuaccugggccugcugagccagagaaccagagacaucuacaucagcagaagacgccggggcaccuucaccuggacccugagcgacagcgagggcaacgagacccccggcggcuacugccugaccagauggaugcugaucgaggccgagcugaagugcuucggcaacaccgccguggccaagugcaacgagaagcacgacgaggaguucugcgacaugcugagacuguucgacuucaacaagcaggccaucagaagacugaagacccccgcccagaugagcauccagcugaucaacaaggccgugaacgcccugaucaacgaccagcugaucaugaagaaccaccugagagacaucaugugcauccccuacugcaacuacagcaaguacugguaccugaaccacaccgugaccggcaagaccagccugcccagaugcuggcuggugagcaacggcagcuaccugaacgagacccacuucagcgacgacaucgagcagcaggccgacaacaugaucaccgagaugcugcagaaggaguacauggacagacagggcaagaccccccugggccugguggaccuguucguguucagcaccagcuucuaccugaucagcaucuuccugcaccuggugaagauccccacccacagacacgugaucggcaagcccugccccaagccccacagacugaaccacaugggcaucugcagcugcggccuguacaagcaccccggcgugcccgugaaguggaagagaugaggacuagucccuguucccagagcccacuuuuuuuucuuuuuuugaaauaaaauagccugucuuucagaucuaaaaaaaaaaaaaaaaaaaaaaaaaaaaaaaaaaaaaaaaaaaaaaaaaaaaaaaaaaaaaaaaugcaucccccccccccccccccccccccccccccccaaaggcucuuuucagagccaccagaauu

SEQ ID NO: 6573 - RNA, 1768 nt, Artificial Sequence
  mRNA product Design a-2 comprising derived and/or modified sequence from LASV(LASV237-NIG-2010;Clade II)__AIT17638__GPCstabilized (opt4)
gggagaguccgcucagccagguugcagaagcggcuuagcguguguccuaaucuucucucugcguguagguaggccugugccgcaaacaagcuuaccaugggccagaucaucaccuucuuccaggaggugccccacgugaucgaggaggugaugaacaucgugcugaucgcccugagccugcuggccauccugaagggcaucuacaacguggccaccugcggccuguucggccuggugagcuuccugcugcugugcggcagaagcugcagcaccaccuacaagggcguguacgagcugcagacccuggagcuggacauggccagccugaacaugaccaugccccugagcugcaccaagaacaacagccaccacuacaucauggugggcaacgagaccggccuggagcugacccugaccaacaccagcaucaucaaccacaaguucugcaaccugagcgacgcccacaagaaggaccuguacgaccacgcccugaugagcaucaucagcaccuuccaccugagcauccccaacuucaaccaguacgaggccaugagcugcgacuucaacggcggcaagaucagcgugcaguacaaccugagccacaccuacgccguggacgccgccaaccacugcggcaccaucgccaacggcgugcugcagaccuucaugagaauggccuggggcggcagcuacaucgcccuggacagcggcugcggcagcugggacugcaucaugaccagcuaccaguaccugaucauccagaacaccaccugggaggaccacugccaguucagcagacccagccccaucggcuaccugggccugcugagccagagaaccagagacaucuacaucagcagaagacgccggggcaccuucaccuggacccugagcgacagcgagggcaacgagacccccggcggcuacugccugaccagauggaugcugaucgaggccgagcugaagugcuucggcaacaccgccguggccaagugcaacgagaagcacgacgaggaguucugcgacaugcugagacuguucgacuucaacaagcaggccaucagaagacugaagacccccgcccagaugagcauccagcugaucaacaaggccgugaacgcccugaucaacgaccagcugaucaugaagaaccaccugagagacaucaugugcauccccuacugcaacuacagcaaguacugguaccugaaccacaccgugaccggcaagaccagccugcccagaugcuggcuggugagcaacggcagcuaccugaacgagacccacuucagcgacgacaucgagcagcaggccgacaacaugaucaccgagcugcugcagaaggaguacauggacagacagggcaagaccccccugggccugguggaccuguucguguucagcaccagcuucuaccugaucagcaucuuccugcaccugaucaagauccccacccacagacacaucaccggcaagcccugccccaagccccacagacugaaccacaugggcaucugcagcugcggccuguacaagcaccccggcgugcccgugaaguggaagagaugaggacuagucccuguucccagagcccacuuuuuuuucuuuuuuugaaauaaaauagccugucuuucagaucuaaaaaaaaaaaaaaaaaaaaaaaaaaaaaaaaaaaaaaaaaaaaaaaaaaaaaaaaaaaaaaaaugcaucccccccccccccccccccccccccccccccaaaggcucuuuucagagccaccagaauu

SEQ ID NO: 6574 - RNA, 1768 nt, Artificial Sequence
  mRNA product Design a-2 comprising derived and/or modified sequence from LASV(LASV253-NIG-2011;Clade II)__AIT17670__GPCstabilized (opt4)
gggagaguccgcucagccagguugcagaagcggcuuagcguguguccuaaucuucucucugcguguagguaggccugugccgcaaacaagcuuaccaugggccagaucaucaccuucuuccaggaggugccccacgugaucgaggaggugaugaacaucgugcugaucgcccugagccugcuggccauccugaagggcaucuacaacguggccaccugcggccuguucggccuggugagcuuccugcugcugugcggcagaagcugcagcaccaccuacaagggcguguacgagcugcagacccuggagcuggacauggccagccugaacaugaccaugccccugagcugcaccaagaacaacagccaccacuacaucauggugggcaacgagaccggccuggagcugacccugaccaacaccagcaucaucaaccacaaguucugcaaccugagcgacgcccacaagaagaaccuguacgaccacgcccugaugagcaucaucagcaccuuccaccugagcauccccaacuucaaccaguacgaggccaugagcugcgacuucaacggcggcaagaucagcgugcaguacaaccugagccacaccuacgccguggacgccgccaaccacugcggcaccaucgccaacggcgugcugcagaccuucaugagaauggccuggggcggcagcuacaucgcccuggacagcggcugcggcagcugggacugcaucaugaccagcuaccaguaccugaucauccagaacaccaccugggaggaccacugccaguucagcagacccagccccaucggcuaccugggccugcugagccagagaaccagagacaucuacaucagcagaagacgccggggcaccuucaccuggacccugagcgacagcgagggcaacgagacccccggcggcuacugccugaccagauggaugcugaucgaggccgagcugaagugcuucggcaacaccgccguggccaagugcaacgagaagcacgacgaggaguucugcgacaugcugagacuguucgacuucaacaagcaggccaucagaagacugaaggcccccgcccagaugagcauccagcugaucaacaaggccgugaacgcccugaucaacgaccagcugaucaugaagaaccaccugagagacaucaugugcauccccuacugcaacuacagcaaguacugguaccugaaccacaccgugaccggcagaaccagccugcccagaugcuggcuggugagcaacggcagcuaccugaacgagacccacuucagcgacgacaucgagcagcaggccgacaacaugaucaccgagcugcugcagaaggaguacaucgacagacagggcaagaccccccugggccugguggaccuguucguguucagcaccagcuucuaccugaucagcaucuuccugcaccuggugaagauccccacccacagacacaucaucggcaagcccugccccaagccccacagacugaaccacaugggcaucugcagcugcggccuguacaagcaccccggcgugcccgugaaguggaagagaugaggacuagucccuguucccagagcccacuuuuuuuucuuuuuuugaaauaaaauagccugucuuucagaucuaaaaaaaaaaaaaaaaaaaaaaaaaaaaaaaaaaaaaaaaaaaaaaaaaaaaaaaaaaaaaaaaugcaucccccccccccccccccccccccccccccccaaaggcucuuuucagagccaccagaauu

SEQ ID NO: 6575 - RNA, 1768 nt, Artificial Sequence
  mRNA product Design a-2 comprising derived and/or modified sequence from LASV(LASV254-NIG-2011;Clade II)__AIT17674__GPCstabilized (opt4)
gggagaguccgcucagccagguugcagaagcggcuuagcguguguccuaaucuucucucugcguguagguaggccugugccgcaaacaagcuuaccaugggccagaucaucaccuucuuccaggaggugccccacgugaucgaggaggugaugaacaucgugcugaucgcccugagccugcuggccauccugaagggcaucuacaacguggccaccugcggccuguucggccuggugagcuuccugcugcugugcggcagaagcugcagcaccaccuacaagggcguguacgagcugcagacccuggagcuggacaugaccaaccugaacaugaccaugccccugagcugcaccaagaacaacagccaccacuacaucauggugggcaacgagaccggccuggagcugacccugaccaacaccagcaucaucaaccacaaguucugcaaccugagcgacgcccacaagaagaaccuguacaaccacgcccugaugagcaucaucagcaccuuccaccugagcauccccaacuucaaccaguacgaggccaugagcugcgacuucaacggcggcaagaucagcgugcaguacaaccugagccacagcuacgccguggacgccgccaaccacugcggcaccaucgccaacggcgugcugcagaccuucaugagaauggccuggggcggcagcuacaucgcccuggacagcggcugcggcaacugggacugcaucaugaccagcuaccaguaccugaucauccagaacaccaccugggaggaccacugccaguucagcagacccagccccaucggcuaccugggccugcugagccagagaaccagagacaucuacaucagcagaagacgccggggcaccuucaccuggacccugagcgacagcgagggcaacgagacccccggcggcuacugccugaccagauggaugcugaucgaggccgagcugaagugcuucggcaacaccgccguggccaagugcaacgagaagcacgacgaggaguucugcgacaugcugagacuguucgacuucaacaagcaggccaucagaagacugaagacccccgcccaggccaacauccagcugaucaacaaggccgugaacgcccugaucaacgaccagcugaucaugaagaaccaccugagagacaucaugugcauccccuacugcaacuacagcaaguacugguaccugaaccacaccgugaccggcaagaccagccugcccagaugcuggcuggugagcaacggcagcuaccugaacgagacccacuucagcgacgacaucgagcagcaggccgacaacaugaucaccgagcugcugcagaaggaguacauggacagacagggcaagaccccccugggccugguggaccuguucguguucagcaccagcuucuaccugaucagcaucuuccugcaccuggugaagauccccacccacagacacgugaucggcaagcccugccccaagccccacagacugaaccacaugggcaucugcagcugcggccuguacaagcaccccggcgugcccgugaaguggaagagaugaggacuagucccuguucccagagcccacuuuuuuuucuuuuuuugaaauaaaauagccugucuuucagaucuaaaaaaaaaaaaaaaaaaaaaaaaaaaaaaaaaaaaaaaaaaaaaaaaaaaaaaaaaaaaaaaaugcaucccccccccccccccccccccccccccccccaaaggcucuuuucagagccaccagaauu

SEQ ID NO: 6576 - RNA, 1768 nt, Artificial Sequence
  mRNA product Design a-2 comprising derived and/or modified sequence from LASV(Nig08-A19;Clade III)__ADU56618__GPCstabilized (opt4)
gggagaguccgcucagccagguugcagaagcggcuuagcguguguccuaaucuucucucugcguguagguaggccugugccgcaaacaagcuuaccaugggccagaucgugaccuucuuccaggaggugccccacgugaucgaggaggugaugaacaucgugcugaucgcccugagcauccuggccauccugaagggccuguacaacaucgccaccugcggccugaucggccuggugaccuuccugcugcugagcggcagaagcugcagcaugaccuacaagggcguguacgagcugcagacccuggagcugaacaugaacacccugaacaugaccaugccccugagcugcaccaagaacaacagccaccacuacaucauggugggcaacgagaccggccuggagcugacccugaccaacaccagccugcugcaccacaaguucugcaaccugagcgacgcccacaagaagaaccuguacgaccacacccugaugagcaucaucagcaccuuccaccugagcauccccaacuucaaccaguacgaggccaugagcugcgacuucaacggcggcaagaucaccgugcaguacaaccugagccacagcuacgccaucgacgccgccaaccacugcggcaccguggccaacggcgugcugcagaccuucaugagaauggccuggggcggcagcuacaucgcccuggacagcggcugcggcaagugggacugcaucaugaccagcuaccaguaccugaucauccagaacaccaccugggaggaccacugccaguucagcagacccagccccaucggcuaccugggccugcugagccagagaaccagagacaucuacaucagcagaagacgccggggcaccuucaccuggacccugagcgacagcgagggcaacgagacccccggcggcuacugccugaccagauggaugcugaucgaggccgagcugaagugcuucggcaacaccgccguggccaagugcaacgagaagcacgacgaggaguucugcgacaugcugagacuguucgacuucaacaagcaggccaucagaagacugaaggcccccgcccagaugagcauccagcugaucaacaaggccgugaacgcccugaucaacgaccagcugaucaugaagaaccaccugagagacaucaugugcauccccuacugcaacuacagcaaguacugguaccugaaccacaccagcaccggcagaaccagccugcccagaugcuggcuggugagcaacggcagcuaccugaacgagacccacuucagcgacgacaucgagcagcaggccgacaacaugaucaccgagaugcugcagaaggaguaccuggacagacagggcaagaccccccugggccugguggaccuguucguguucagcaccagcuucuaccugaucagcaucuuccugcaccuggugaagauccccacccacagacacaucgugggcaagcccugccccaagccccacagacugaaccacaugggcaucugcagcugcggccuguacaagcagcccggcgugcccgugagauggaagagaugaggacuagucccuguucccagagcccacuuuuuuuucuuuuuuugaaauaaaauagccugucuuucagaucuaaaaaaaaaaaaaaaaaaaaaaaaaaaaaaaaaaaaaaaaaaaaaaaaaaaaaaaaaaaaaaaaugcaucccccccccccccccccccccccccccccccaaaggcucuuuucagagccaccagaauu

SEQ ID NO: 6577 - RNA, 1771 nt, Artificial Sequence
  mRNA product Design a-2 comprising derived and/or modified sequence from LASV(G1180-SLE-2010;Clade IV)__AIT17168__GPCstabilized (opt4)
gggagaguccgcucagccagguugcagaagcggcuuagcguguguccuaaucuucucucugcguguagguaggccugugccgcaaacaagcuuaccaugggccagaucgugaccuucuuccaggaggugccccacgugaucgaggaggugaugaacaucgugcugaucgcccugagcauccuggccgugcugaagggccuguacaacuucgccaccugcggccuggugggccugcugaccuuccugcugcugugcggcagaagcugcaccgccagcagauacaagggcguguacgagcugcagacccuggagcugaacauggagacccugaacaugaccaugccccugagcugcaccaagaacaacagccaccacuacaucauggugggcaacgagaccggccuggagcugacccugaccaacaccagcaucaucaaccacaaguucugcaaccugagcgacgcccacaagaagaaccuguacgaccacgcccugaugagcaucaucagcaccuuccaccugagcauccccaacuucaaccaguacgaggccaugagcugcgacuucaacggcggcaagaucagcgugcaguacaaccugagccacagcuacgccggcgacgccgccaaccacugcggcaccguggccaacggcgugcugcagaccuucaugagaauggccuggggcggcagcuacaucgcccuggacagcggcugcggcagcugggacugcaucaugaccagcuaccaguaccugaucauccagaacaccaccugggaggaccacugccaguucagcagacccagccccaucggcuaccugggccugcugagccagagaaccagagacaucuacaucagcagaagacgccggggcaccuucaccuggacccugagcgacagcgagggcaaggacacccccggcggcuacugccugaccagauggaugcugaucgaggccgagcugaagugcuucggcaacaccgccguggccaagugcaacgagaagcacgacgaggaguucugcgacaugcugagacuguucgacuucaacaagcaggccauccagagacugaaggcccccgcccagaugagcauccagcugaucaacaaggccgugaacgcccugaucaacgaccagcugaucaugaagaaccaccugagagacaucaugugcauccccuacugcaacuacagcaaguacugguaccugaaccacaccaccaccggcaagaccagccugcccaagugcuggcuggugagcaacggcagcuaccugaacgagacccacuucagcgacgacaucgagcagcaggccgacaacaugaucaccgagaugcugcagaaggaguacauggagagacagggcaagaccccccugggccugguggaccuguucguguucagcaccagcuucuaccugaucagcaucuuccugcaccuggugaagauccccacccacagacacaucgugggcaagagcugccccaagccccacagacugaaccacaugggcaucugcagcugcggccuguacaagcagcccggcgugcccgugaaguggaagagaugaggacuagucccuguucccagagcccacuuuuuuuucuuuuuuugaaauaaaauagccugucuuucagaucuaaaaaaaaaaaaaaaaaaaaaaaaaaaaaaaaaaaaaaaaaaaaaaaaaaaaaaaaaaaaaaaaugcaucccccccccccccccccccccccccccccccaaaggcucuuuucagagccaccagaauu

SEQ ID NO: 6578 - RNA, 1771 nt, Artificial Sequence
  mRNA product Design a-2 comprising derived and/or modified sequence from LASV(G1442-SLE-2011;Clade IV)__AIT17180__GPCstabilized (opt4)
gggagaguccgcucagccagguugcagaagcggcuuagcguguguccuaaucuucucucugcguguagguaggccugugccgcaaacaagcuuaccaugggccagaucgugaccuucuuccaggaggugccccacgugaucgaggaggugaugaacaucgugcugaucgcccugagcauccuggccgugcugaagggccuguacaacguggccaccugcggccugaucggccuggugaccuuccugcugcugugcggcagaagcugcaccaccacccuguacaagggcguguacgagcugcagacccuggagcugaacauggagacccugaacaugaccaugccccugagcugcaccaagaacaacagccaccacuacaucagagugggcaacgagaccggccuggagcugacccugaccaacaccagcaucaucaaccacaaguucugcaaccugagcgacgcccacaagaagaaccuguacgaccacgcccugaugagcaucaucagcaccuuccaccugagcauccccaacuucaaccaguacgaggccaugagcugcgacuucaacggcggcaagaucagcgugcaguacaaccugagccacagcuacgccggcgacgccgccaaccacugcggcaccguggccaacggcgugcugcagaccuucaugagaauggccuggggcggcagcuacaucgcccuggacagcggcugcggcaacugggacugcaucaugaccagcuaccaguaccugaucauccagaacaccaccugggacgaccacugccaguucagcagacccagccccaucggcuaccugggccugcugagccagagaaccagagacguguacaucagcagaagacgccggggcaccuucaccuggacccugagcgacagcgagggcaaggacacccccggcggcuacugccugaccagauggaugcugaucgaggccgagcugaagugcuucggcaacaccgccguggccaagugcaacgagaagcacgacgaggaguucugcgacaugcugagacuguucgacuucaacaagcaggccauccagagacugaaggcccccgcccagaugagcauccagcugaucaacaaggccgugaacgcccugaucaacgaccagcugaucaugaagaaccaccugagagacaucaugugcauccccuacugcaacuacagcaaguacugguaccugaacaacaccgccaccggcaagaccagccugcccaagugcuggcugaucagcaacggcagcuaccugaacgagacccacuucagcgacgacaucgagcaggaggccgacaacaugaucaccgagaugcugcagaaggaguacauggagagacagggcaagaccccccugggccugguggaccuguucguguucagcaccagcuucuaccugaucagcaucuuccugcaccuggugaagauccccacccacagacacaucgugggcaagagcugccccaagccccacagacugaaccacaugggcaucugcagcugcggccuguacaagcagcccggcgugcccgugagauggaagagaugaggacuagucccuguucccagagcccacuuuuuuuucuuuuuuugaaauaaaauagccugucuuucagaucuaaaaaaaaaaaaaaaaaaaaaaaaaaaaaaaaaaaaaaaaaaaaaaaaaaaaaaaaaaaaaaaaugcaucccccccccccccccccccccccccccccccaaaggcucuuuucagagccaccagaauu

SEQ ID NO: 6579 - RNA, 1771 nt, Artificial Sequence
  mRNA product Design a-2 comprising derived and/or modified sequence from LASV(G3010-SLE-2013;Clade IV)__AIT17344__GPCstabilized (opt4)
gggagaguccgcucagccagguugcagaagcggcuuagcguguguccuaaucuucucucugcguguagguaggccugugccgcaaacaagcuuaccaugggccagaucgugaccuucuuccaggaggugccccacgugaucgaggaggugaugaacaucgugcugaucgcccugagcauccuggccgugcugaagggccuguacaacuucgccaccugcggccuggugggccuggugaccuuccugcugcugugcggcagaagcugcaccaccagccuguacaagggcguguacgagcugcagacccuggagcugaacauggagacccugaacaugaccaugccccugagcugcaccaagaacaacagccaccacuacaucauggugggcaacgagaccggccuggagcugacccugaccaacaccagcaucaucaaccacaaguucugcaaccugagcgacgcccacaagaagaaccuguacaaccacgcccugaugagcaucaucagcaccuuccaccugagcauccccaacuucaaccaguacgaggccaugagcugcgacuucaacggcggcaagaucagcgugcaguacaaccugagccacagcuacgccggcgacgccgccagccacugcggcaccguggccaacggcgugcugcagaccuucaugagaauggccuggggcggcagcuacaucgcccuggacagcggcugcggcaagugggacugcaucaugaccagcuaccaguaccugaucauccagaacaccaccugggaggaccacugccaguucagcagacccagccccaucggcuaccugggccugcugagccagagaaccagagacaucuacaucagcagaagacgccggggcaccuucaccuggacccugagcgacagcgagggcaaggacacccccggcggcuacugccugaccagauggaugcugaucgaggccgagcugaagugcuucggcaacaccgccguggccaagugcaacgagaagcacgacgaggaguucugcgacaugcugagacuguucgacuucaacaagcaggccauccagagacugaagacccccgcccagaugagcauccagcugaucaacaaggccgugaacgcccugaucaacgaccagcugaucaugaagaaccaccugagagacaucaugugcauccccuacugcaacuacagcaaguacugguaccugaaccacaccaccaccggcaagaccagccugcccaagugcuggcuggugagcaacggcagcuaccugaacgagacccacuucagcgacgacaucgagcagcaggccgacaacaugaucaccgagaugcugcagaaggaguacauggagagacagggcaagaccccccugggccugguggaccuguucguguucagcaccagcuucuaccugaucagcaucuuccugcaccuggugaagauccccacccacagacacaucgugggcaagagcugccccaagccccacagacugaaccacaugggcaucugcagcugcggccuguacaagcagcccggcgugcccgugagauggaagagaugaggacuagucccuguucccagagcccacuuuuuuuucuuuuuuugaaauaaaauagccugucuuucagaucuaaaaaaaaaaaaaaaaaaaaaaaaaaaaaaaaaaaaaaaaaaaaaaaaaaaaaaaaaaaaaaaaugcaucccccccccccccccccccccccccccccccaaaggcucuuuucagagccaccagaauu

SEQ ID NO: 6580 - RNA, 1771 nt, Artificial Sequence
  mRNA product Design a-2 comprising derived and/or modified sequence from LASV(G502-SLE-2009;Clade IV)__AIT17126__GPCstabilized (opt4)
gggagaguccgcucagccagguugcagaagcggcuuagcguguguccuaaucuucucucugcguguagguaggccugugccgcaaacaagcuuaccaugggccagaucgugaccuucuuccaggaggugccccacgugaucgaggaggugaugaacaucgugcugaucgcccugagcauccuggccgugcugaagggccuguacaacuucgccaccugcggccuggugggccugcugaccuuccugcugcugugcggcagaagcugcaccaccggccuguacaagggcguguacgagcugcagacccuggagcugaacauggagacccugaacaugaccaugccccugagcugcaccaagaacaacagccaccacuacaucauggugggcaacgagaccggccuggagcugacccugaccaacaccagcaucaucaaccacaaguucugcaaccugagcgacgcccacaagaagaaccuguacgaccacgcccugaugagcaucaucagcaccuuccaccugagcauccccaacuucaaccaguacgaggccaugagcugcgacuucaacggcggcaagaucagcgugcaguacaaccugagccacagcuacgccggcgacgccgccgaccacugcggcaccguggccaacggcgugcugcagaccuucaugagaauggccuggggcggcagcuacaucgcccuggacagcggcugcggcagaugggacugcaucaugaccagcuaccaguaccugaucauccagaacaccaccugggaggaccacugccaguucagcagacccagccccaucggcuaccugggccugcugagccagagaaccagagacaucuacaucagcagaagacgccggggcaccuucaccuggacccugagcgacagcgagggcaaggacacccccggcggcuacugccugaccagauggaugcugaucgaggccgagcugaagugcuucggcaacaccgccguggccaagugcaacgagaagcacgacgaggaguucugcgacaugcugagacuguucgacuucaacaagcaggccauccagagacugaaggcccccgcccagaugagcauccagcugaucaacaaggccgugaacgcccugaucaacgaccagcuggugaugaagaaccaccugagagacaucaugugcauccccuacugcaacuacagcagauacugguaccugaaccacaccaccaccggcagaaccagccugcccaagugcuggcuggugagcaacggcagcuaccugaacgagacccacuucagcgacgacaucgagcagcaggccgacaacaugaucaccgagaugcugcagaaggaguacauggagagacagggcaagaccccccugggccugguggaccuguucguguucagcaccagcuucuaccugaucagcaucuuccugcaccuggugaagauccccacccacagacacaucgugggcaagagcugccccaagccccacagacugaaccacaugggcaucugcagcugcggccuguacaagcagcccggcgugcccgugaaguggaagagaugaggacuagucccuguucccagagcccacuuuuuuuucuuuuuuugaaauaaaauagccugucuuucagaucuaaaaaaaaaaaaaaaaaaaaaaaaaaaaaaaaaaaaaaaaaaaaaaaaaaaaaaaaaaaaaaaaugcaucccccccccccccccccccccccccccccccaaaggcucuuuucagagccaccagaauu

SEQ ID NO: 6581 - RNA, 1771 nt, Artificial Sequence
  mRNA product Design a-2 comprising derived and/or modified sequence from LASV(G733-SLE-2010;Clade IV)__AIT17154__GPCstabilized (opt4)
gggagaguccgcucagccagguugcagaagcggcuuagcguguguccuaaucuucucucugcguguagguaggccugugccgcaaacaagcuuaccaugggccagaucgugaccuucuuccaggaggugccccacgugaucgaggaggugaugaacaucgugcugaucgcccugagcauccuggccgugcugaagggccuguacaacuucgccaccugcggcaucgugggccuggugagcuuccugcugcugugcggcagaagcugcaccaccagccuguacaagggcguguacgagcugcagacccuggagcugaacauggagacccugaacaugaccaugccccugagcugcaccaagaacaacagccaccacuacaucauggugggcaacgagaccggccuggagcugacccugaccaacaccagcaucaucaaccacaaguucugcaaccugagcgacgcccacaagaagaaccuguacgaccacgcccugaugagcaucaucagcaccuuccaccugagcauccccaacuucaaccaguacgaggccaugagcugcgacuucaacggcggcaagaucagcgugcaguacaaccugagccacagcuacgccggcgacgccgccaaccacugcggcaccaucgccaacggcgugcugcagaccuucaugagaauggccuggggcggcagcuacaucgcccuggacagcggcugcgacagaugggacugcaucaugaccagcuaccaguaccugaucauccagaacaccaccugggaggaccacugccaguucagcagacccagccccaucggcuaccugggccugcugagccagagaaccagagacaucuacaucagcagaagacgccggggcaccuucaccuggacccugagcgacagcgagggcaaggacacccccggcggcuacugccugaccagauggaugcugaucgaggccgagcugaagugcuucggcaacaccgccguggccaagugcaacgagaagcacgacgaggaguucugcgacaugcugagacuguucgacuucaacaagcaggccauccagagacugaaggcccccgcccagaugagcauccagcugaucaacaaggccgugaacgcccugaucaacgaccagcugaucaugaagaaccaccugagagacaucaugugcauccccuacugcaacuacagcaaguacugguaccugaaccacaccaccaccggcaagaccagccugcccaagugcuggcuggugagcaacggcagcuaccugaacgagacccacuucagcgacgacaucgagcagcaggccgacaacaugaucaccgagaugcugcagaaggaguacauggagagacagggcaagaccccccugggccugguggaccuguucguguucagcaccagcuucuaccugaucagcaucuuccugcaccuggugaagauccccacccacagacacguggugggcaagagcugccccaagccccacagacugaaccacaugggcaucugcagcugcggccuguacggccagcccggcgugcccgugaaguggaagagaugaggacuagucccuguucccagagcccacuuuuuuuucuuuuuuugaaauaaaauagccugucuuucagaucuaaaaaaaaaaaaaaaaaaaaaaaaaaaaaaaaaaaaaaaaaaaaaaaaaaaaaaaaaaaaaaaaugcaucccccccccccccccccccccccccccccccaaaggcucuuuucagagccaccagaauu

SEQ ID NO: 6582 - RNA, 1771 nt, Artificial Sequence
  mRNA product Design a-2 comprising derived and/or modified sequence from MOPV/LASV reassortant(IGS-1;Clade IV)__AFY05576__GPCstabilized (opt4)
gggagaguccgcucagccagguugcagaagcggcuuagcguguguccuaaucuucucucugcguguagguaggccugugccgcaaacaagcuuaccaugggccagaucgugaccuucuuccaggaggugccccacgugaucgaggaggugaugaacaucgugcugaucgcccugagcgugcuggccgugcugaagggccuguacaacuucgccaccugcggccuggugggccuggugaccuuccugcugcugugcggcagaagcugcaccaccagccuguacaagggcguguacgagcugcagacccuggagcugaacauggagacccugaacaugaccaugccccugagcugcaccaagaacaacagccaccacuacaucauggugggcaacgagaccggccuggagcugacccugaccaacaccagcaucaucaaccacaaguucugcaaccugagcgacgcccacaagaagaaccuguacgaccacgcccugaugagcaucaucagcaccuuccaccugagcauccccaacuucaaccaguacgaggccaugagcugcgacuucaacggcggcaagaucagcgugcaguacaaccugagccacagcuacgccggcgacgccgccaaccacugcggcaccguggccaacggcgugcugcagaccuucaugagaauggccuggggcggcagcuacaucgcccuggacagcggcugcggcaacugggacugcaucaugaccagcuaccaguaccugaucauccagaacaccaccugggaggaccacugccaguucagcagacccagccccaucggcuaccugggccugcugagccagagaaccagagacaucuacaucagcagaagacgccggggcaccuucaccuggacccugagcgacagcgagggcgaggacacccccggcggcuacugccugaccagauggaugcugaucgaggccgagcugaagugcuucggcaacaccgccguggccaagugcaacgagaagcacgacgaggaguucugcgacaugcugagacuguucgacuucaacaagcaggccauccagagacugaaggcccccgcccagaugagcauccagcugaucaacaaggccgugaacgcccugaucaacgaccagcugaucaugaagaaccaccugagagacaucaugugcauccccuacugcaacuacagcaaguacugguaccugaaccacaccaccaccggcagaaccagccugcccaagugcuggcuggugagcaacggcagcuaccugaacgagacccacuucagcgacgacaucgagcagcaggccgacaacaugaucaccgagaugcugcagaaggaguacauggagagacagggcaagaccccccugggccugguggaccuguucguguucagcaccagcuucuaccugaucagcaucuuccugcaccuggugaagauccccacccacagacacaucgugggcaagagcugccccaagccccacagacugaaccacaugggcaucugcagcugcggccuguacaagcagcccggcgugcccgugaaguggaagagaugaggacuagucccuguucccagagcccacuuuuuuuucuuuuuuugaaauaaaauagccugucuuucagaucuaaaaaaaaaaaaaaaaaaaaaaaaaaaaaaaaaaaaaaaaaaaaaaaaaaaaaaaaaaaaaaaaugcaucccccccccccccccccccccccccccccccaaaggcucuuuucagagccaccagaauu

SEQ ID NO: 6583 - RNA, 1771 nt, Artificial Sequence
  mRNA product Design a-2 comprising derived and/or modified sequence from LASV(LM765-SLE-2012;Clade IV)__AIT17814__GPCstabilized (opt4)
gggagaguccgcucagccagguugcagaagcggcuuagcguguguccuaaucuucucucugcguguagguaggccugugccgcaaacaagcuuaccaugggccagaucgugaccuucuuccaggaggugccccacgugaucgaggaggugaugaacaucgugcugaucgcccugagcauccuggccgugcugaagggccuguacaacuucgccaccugcggccuggugggccuggugaccuuccugcugcugugcggcagaagcugcaccaccagccuguacaagggcguguacgagcugcagacccuggagcugaacauggagacccugaacaugaccaugccccugagcugcaccaagaacaacagccaccacuacaucauggugggcaacgagaccggccuggagcugacccugaccaacaccagcaucaucgaccacaaguucugcaaccugagcgacgcccacagaaagaaccuguacgaccacgcccugaugagcaucaucagcaccuuccaccugagcauccccaacuucaaccaguacgaggccaugagcugcgacuucaacggcggcaagaucagcgugcaguacaaccugagccacagcuacgccaaggacgccgccgaccacugcggcaccguggccaacggcgugcugcagaccuucaugagaauggccuggggcggcagcuacaucgcccuggacagcggcugcggcagaugggacugcaucaugaccagcuaccaguaccugaucauccagaacaccaccugggaggaccacugccaguucagcagacccagccccaucggcuaccugggccugcugagccagagaaccagagacaucuacaucagcagaagacgccggggcaccuucaccuggacccugagcgacagcgagggcaaggacacccccggcggcuacugccugaccagauggaugcugaucgaggccgagcugaagugcuucggcaacaccgccguggccaagugcaacgagaagcacgacgaggaguucugcgacaugcugagacuguucgacuucaacaagcaggccauccagagacugaaggcccccgcccagaugagcauccagcugaucaacaaggccgugaacgcccugaucaacgaccagcugaucaugaagaaccaccugagagacaucaugugcauccccuacugcaacuacagcaaguacugguaccugaaccacaccaccaccggcaagaccagccugcccaagugcuggcuggugagcaacggcagcuaccugaacgagacccacuucagcgacgacaucgagcagcaggccgacaacaugaucaccgagaugcugcagaaggaguacauggagagacagggcaagaccccccugggccugguggaccuguucguguucagcaccagcuucuaccugaucagcaucuuccugcaccuggugaagauccccacccacagacacaucgugggcaagcccugccccaagccccacagacugaaccacaugggcaucugcagcugcggccuguacaagcagcccggcgugcccgugaaguggaagagaugaggacuagucccuguucccagagcccacuuuuuuuucuuuuuuugaaauaaaauagccugucuuucagaucuaaaaaaaaaaaaaaaaaaaaaaaaaaaaaaaaaaaaaaaaaaaaaaaaaaaaaaaaaaaaaaaaugcaucccccccccccccccccccccccccccccccaaaggcucuuuucagagccaccagaauu

SEQ ID NO: 6584 - RNA, 1771 nt, Artificial Sequence
  mRNA product Design a-2 comprising derived and/or modified sequence from LASV(LM776-SLE-2012;Clade IV)__AIT17824__GPCstabilized (opt4)
gggagaguccgcucagccagguugcagaagcggcuuagcguguguccuaaucuucucucugcguguagguaggccugugccgcaaacaagcuuaccaugggccagaucgugaccuucuuccaggaggugccccacgugaucgaggaggugaugaacaucgugcugaucgcccugagcauccuggccgugcugaagggccuguacaacuucgccaccugcggccuggugggccuggugaccuuccugcugcugugcggcagaagcugcaccaccagcguguacaagggcguguacgagcugcagacccuggagcugaacauggagacccugaacaugaccaugccccugagcugcaccaagaacaacagccaccacuacaucauggugggcaacgagaccggccuggagcugacccugaccaacaccagcaucaucaaccacaaguucugcaaccugagcgacgcccacaagaagaaccuguacgaccacgcccugaugagcaucaucagcaccuuccaccugagcauccccaacuucaaccaguacgaggccaugagcugcgacuucaacggcggcaagaucagcgugcaguacaaccugagccacagcuacgccggcgacgccgccaaccacugcggcaccguggccaacggcgugcugcagaccuucaugagaauggccuggggcggcagcuacaucgcccuggacagcggcugcggcaagugggacugcaucaugaccagcuaccaguaccugaucauccagaacaccaccugggaggaccacugccaguucagcagacccagccccaucggcuaccugggccugcugagccagagaaccagagacaucuacaucagcagaagacgccggggcaccuucaccuggacccugagcgacagcgagggcaaggacacccccggcggcuacugccugaccagauggaugcugaucgaggccgagcugaagugcuucggcaacaccgccguggccaagugcaacgagaagcacgacgaggaguucugcgacaugcugagacuguucgacuucaacaagcaggccauccagagacugaaggcccccgcccagaugagcauccagcugaucaacaaggccgugaacgcccugaucaacgaccagcugaucaugaagaaccaccugagagacaucaugugcauccccuacugcaacuacagcaaguacugguaccugaaccacaccaccaccggcaagaccagccugcccaagugcuggcuggugagcaacggcagcuaccugaacgagacccacuucagcgacgacaucgagcagcaggccgacaacaugaucaccgagaugcugcagaaggaguacauggagagacagggcaagaccccccugggccugguggaccuguucguguucagcaccagcuucuaccugaucagcaucuuccugcaccuggugaagauccccacccacagacacaucgugggcaagagcugccccaagccccacagacugaaccacaugggcaucugcagcugcggccuguacaagcagcccggcgugcccgugagauggaagagaugaggacuagucccuguucccagagcccacuuuuuuuucuuuuuuugaaauaaaauagccugucuuucagaucuaaaaaaaaaaaaaaaaaaaaaaaaaaaaaaaaaaaaaaaaaaaaaaaaaaaaaaaaaaaaaaaaugcaucccccccccccccccccccccccccccccccaaaggcucuuuucagagccaccagaauu

SEQ ID NO: 6585 - RNA, 1771 nt, Artificial Sequence
  mRNA product Design a-2 comprising derived and/or modified sequence from LASV(Mad39;Clade IV)__ANH09722__GPCstabilized (opt4)
gggagaguccgcucagccagguugcagaagcggcuuagcguguguccuaaucuucucucugcguguagguaggccugugccgcaaacaagcuuaccaugggccagaucgugaccuucuuccaggaggugccccacgugaucgaggaggugaugaacaucgugcugaucgcccugagcauccuggccgugcugaagggccuguacaacguggccaccugcggccugaucggccuggugaccuuccugcugcugugcggcagaagcugcaccaccacccuguacaagggcguguacgagcugcaggcccuggagcugaacauggagacccugaacaugaccaugccccugagcugcaccaagaacaacagccaccacuacaucagagugggcaacgagaccggccuggagcugacccugaccaacaccagccugaucaaccacaaguucugcaaccugagcgacgcccacaagaagaaccuguacgaccacgcccugaugagcaucaucagcaccuuccaccugagcauccccaacuucaaccaguacgaggccaugagcugcgacuucaacgacggcaagaucagcgugcaguacaaccugagccacaccuacgccggcgacaccgccaaccacugcggcaccguggccaacggcgugcugcagaccuucaugagaauggccuggggcggcagcuacaucgcccuggacagcggcugcggcggcugggacugcaucaugaccagcuaccaguaccugaucauccagaacaccaccugggaggaccacugccaguucagcagacccagccccaucggcuaccugggccugcugagccagagaaccagagacaucuacaucagcagaagacgccggggcaccuucaccuggacccugagcgacagcgagggcaaggacacccccggcggcuacugccugaccagauggaugcugaucgaggccgagcugaagugcuucggcaacaccgccguggccaagugcaacgagaagcacgacgaggaguucugcgacaugcugagacuguucgacuucaacaagcaggccauccagagacugaaggcccccgcccagaugagcauccagcugaucaacaaggccgugaacgcccugaucaacgaccagcugaucaugaagaaccaccugagagacaucaugugcauccccuacugcaacuacagcaaguacugguaccugaaccacaccgugaccggcaagaccagccugcccaagugcuggcuggugagcaacggcagcuaccugaacgagacccacuucagcgacgacaucgagcagcaggccgacaacaugaucaccgagaugcugcagaaggaguacauggagagacagggcaagaccccccugggccugguggaccuguucguguucagcaccagcuucuaccugaucagcaucuuccugcaccuggugaagauccccacccacagacacguggugggcaagcccugccccaagccccacagacugaaccacaugggcaucugcagcugcggcuucuacaagcagcccggcgugcccgugagauggaagagaugaggacuagucccuguucccagagcccacuuuuuuuucuuuuuuugaaauaaaauagccugucuuucagaucuaaaaaaaaaaaaaaaaaaaaaaaaaaaaaaaaaaaaaaaaaaaaaaaaaaaaaaaaaaaaaaaaugcaucccccccccccccccccccccccccccccccaaaggcucuuuucagagccaccagaauu

SEQ ID NO: 6586 - RNA, 1771 nt, Artificial Sequence
  mRNA product Design a-2 comprising derived and/or modified sequence from LASV(Z0947-SLE-2011;Clade IV)__AIT17840__GPCstabilized (opt4)
gggagaguccgcucagccagguugcagaagcggcuuagcguguguccuaaucuucucucugcguguagguaggccugugccgcaaacaagcuuaccaugggccagaucgugaccuucuuccaggaggugccccacgugaucgaggaggugaugaacaucgugcugaucgcccugagcauccuggccgugcugaagggccuguacaacuucgccaccugcggccuggugggccuggugaccuuccugcugcugugcggcagaagcugcaccaucagccuguacaagggcguguacgagcugcagacccuggagcugaacauggagacccugaacaugaccaugccccugagcugcaccaagaacaacagccaccacuacaucauggugggcaacgagaccggccuggagcugacccugaccaacaccagcaucaucaaccacaaguucugcaaccugagcgacgcccacaagaagaaccuguacgaccacgcccugaugagcaucaucagcaccuuccaccugagcauccccaacuucaaccaguacgaggccaugagcugcgacuucaacggcggcaagaucagcgugcaguacaaccugagccacagcuacgccggcgacgccgccaaccacugcggcaccguggccaacggcgugcugcagaccuucaugagaauggccuggggcggcagcuacaucgcccuggacagcggcugcgacagaugggacugcaucaugaccagcuaccaguaccugaucauccagaacaccaccugggaggaccacugccaguucagcagacccagccccaucggcuaccugggccugcugagccagagaaccagagacaucuacaucagcagaagacgccggggcaccuucaccuggacccugagcgacagcgagggcaaggacacccccggcggcuacugccugaccagauggaugcugaucgaggccgagcugaagugcuucggcaacaccgccguggccaagugcaacgagaagcacgacgaggaguucugcgacaugcugagacuguucgacuucaacaagcaggccauccagagacugaaggcccccgcccagaugagcauccagcugaucaacaaggccgugaacgcccugaucaacgaccagcugaucaugaagaaccaccugagagacaucaugugcauccccuacugcaacuacagcaaguacugguaccugaaccacaccaccaccggcaagaccagccugcccaagugcuggcuggugagcaacggcagcuaccugaacgagacccacuucagcgacgacaucgagcagcaggccgacaacaugaucaccgagaugcugcagaaggaguacauggagagacagggcaagaccccccugggccugguggaccuguucguguucagcaccagcuucuaccugaucagcaucuuccugcaccuggugaagauccccacccacagacacaucgugggcaagcccugccccaagccccacagacugaaccacaugggcaucugcagcugcggccuguacaagcagcccggcgugcccgugaaguggaagagaugaggacuagucccuguucccagagcccacuuuuuuuucuuuuuuugaaauaaaauagccugucuuucagaucuaaaaaaaaaaaaaaaaaaaaaaaaaaaaaaaaaaaaaaaaaaaaaaaaaaaaaaaaaaaaaaaaugcaucccccccccccccccccccccccccccccccaaaggcucuuuucagagccaccagaauu

SEQ ID NO: 6587 - RNA, 1771 nt, Artificial Sequence
  mRNA product Design a-2 comprising derived and/or modified sequence from LASV(Josiah;Clade IV)__NP_694870__GPCstabilized (opt5)
gggagaguccgcucagccagguugcagaagcggcuuagcguguguccuaaucuucucucugcguguagguaggccugugccgcaaacaagcuuaccaugggccagaucgugaccuucuuucaagaggucccccacguuauugaagaggugaugaacaucgugcugauugcccucagcguccuggcugugcuuaaggggcuguacaauuucgccacaugcggacucguuggccuggugacguuucuucugcucugugggagauccugcaccacaucucuguauaaaggagucuacgaacugcagacccucgagcugaacauggaaacacuuaauaugaccaugccucugagcuguacaaagaacaauucccaucacuauaucauggugggcaacgagaccgggcucgagcugacgcuuaccaauacaucuauuaucaaccauaaauucugcaaucugagcgacgcgcacaagaaaaaccucuacgaucaugcucugauguccaucauuucuaccuuucaccugagcaucccgaauuucaaccaguaugaagccauguccugugacuuuaauggaggcaagauuagcguucaguacaaccucucucacuccuaugccggcgaugcugccaaucauugcgggacaguggcuaacggaguccugcaaaccuucaugcggauggccuggggcgggagcuacaucgcgcuugacucuggaugcggcaacugggauuguauuaugacguccuaccaguaucugaucauucagaauacaaccugggaggaccacugccaguuuagcagacccucuccuaucggguaccucggacugcuuucccaacggacacgcgauaucuauauuagcagacggcgccggggcaccuucaccuggacacuguccgacucugaaggcaaggauacgcccgggggauacugucugacccgcuggaugcucaucgaggccgagcugaaaugcuuuggcaacacagcuguggccaaguguaaugaaaaacaugacgaggaguucugcgauaugcuuagacuguuugacuucaacaagcaggcuauucagcggcucaaagcccccgcgcagaugagcauccaacugauuaauaaggccgugaacgcucuuaucaaugaucagcugaucaugaagaaccaccuccgcgacauuaugugcaucccuuauugcaauuacuccaaauauugguaccugaaccacaccacaaccggaagaacgagccugcccaaguguuggcucgucucuaauggcuccuaccugaacgaaacacauuucagcgacgauauugagcagcaagccgacaauaugaucaccgagaugcuucagaaagaauauauggagcggcaggggaagaccccucugggacucguugaucuguuuguguucucuaccagcuuuuaccugauuuccaucuuccuucaccucgugaaaaucccgacacaucgccacauugucggcaagucuugccccaaaccucauagacugaaccacaugggcaucuguagcugcgggcuguauaagcagcccggagugccuguuaaguggaaacggugaggacuagucccuguucccagagcccacuuuuuuuucuuuuuuugaaauaaaauagccugucuuucagaucuaaaaaaaaaaaaaaaaaaaaaaaaaaaaaaaaaaaaaaaaaaaaaaaaaaaaaaaaaaaaaaaaugcaucccccccccccccccccccccccccccccccaaaggcucuuuucagagccaccagaauu

SEQ ID NO: 6588 - RNA, 1768 nt, Artificial Sequence
  mRNA product Design a-2 comprising derived and/or modified sequence from LASV(LP;Clade I)__AAF86701__GPCstabilized (opt5)
gggagaguccgcucagccagguugcagaagcggcuuagcguguguccuaaucuucucucugcguguagguaggccugugccgcaaacaagcuuaccaugggccagaucauuaccuucuuucaagaggugccccacgucaucgaagagguuaugaacauugugcugaucgcccucagccugcuugcuauucugaaggggcucuacaauaucgccacaugcggaaucauuggccugguggcguuccuuuuucugugugggaaauccugcucucucacgcugaagggaggcuaugaacugcagacccucgagcugaacauggaaacacuuaauaugaccaugccucugagcuguaccaaaaacuccucucaucacuacaucagagucgggaaugagacaggacucgagcugacacuuaccaacacgagcauuaucaaucauaaguucugcaaccuguccgacgcucacaaaaagaaucucuaugaucaugcccugaugucuauuaucagcaccuuucaccuguccauuccgaacuucaaucaguacgaagccaugagcugugacuuuaacggcggcaagaucucugugcaguauaaucucucccacagcuacgcuggggaugccgcugagcauugcggaacaguugccaacggcgugcugcaaaccuucaugcggauggcguggggagggcgcuauaucgcccuugacucuggcugcgggaauugggauuguauuaugacauccuaccaguaccugaucauucagaacaccacgugggaagaccacugccaguuuagcagacccucuccuaucggauaucucggccugcuuucccaacggacacgcgauauuuacaucagcagacggcgccggggcaccuucacauggacccuguccgacucugaggggaacgagacccccggaggcuauugucugacacgcuggaugcucaucgaagcugagcugaagugcuuugggaauacggccgucgcuaaauguaacgaaaagcaugaugaggaguucugcgacaugcuuagacuguuugauuucaauaaacaggccauucggcgccucaaggcgcccgcccagaugagcauccagcugauuaacaaggcugugaaugcccuuaucaacgaccaacugauuaugaaaaaucaccucagagauaucaugugcaucccuuacugcaacuauuccaaguacugguaucugaaucacaccagcucuggccggacaucccugcccaaauguuggcucauuagcaacgggucuuaccugaaugagacccaguucagcgacgacaucgaacagcaagcugauaacaugauuacagagaugcuucagaaggaauacaucgagcgccagggaaaaaccccucugggccucguugacauuuuuaucuucuccacgucuuuuuaucugauuagcaucuuccugcaucuuaucaagauuccgacacacagacauaucgugggcaaacccugcccuaagccccaccggcucaaucauaugggggucuguuccugcggacuguacaagcacccuggcgugcccaccaaauggaagcgcugaggacuagucccuguucccagagcccacuuuuuuuucuuuuuuugaaauaaaauagccugucuuucagaucuaaaaaaaaaaaaaaaaaaaaaaaaaaaaaaaaaaaaaaaaaaaaaaaaaaaaaaaaaaaaaaaaugcaucccccccccccccccccccccccccccccccaaaggcucuuuucagagccaccagaauu

SEQ ID NO: 6589 - RNA, 1768 nt, Artificial Sequence
  mRNA product Design a-2 comprising derived and/or modified sequence from LASV(803213;Clade II)__AAF86703__GPCstabilized (opt5)
gggagaguccgcucagccagguugcagaagcggcuuagcguguguccuaaucuucucucugcguguagguaggccugugccgcaaacaagcuuaccaugggccagaucauuaccuucuuucaagaggugccccacgucaucgaagagguuaugaacauugugcugaucgcccucagccugcuugcuauucugaaggggaucuacaauguggccacaugcggacucuucggccugaucuccuuucuucugcucugugggagaucuugcagcgucacguauaaaggaguguacgaacugcagacccuggagcucaacauggcgaaucugaacaugacaaugccucuuuccuguaccaagaauaacucucaucacuauauuaugguuggcaaugaaacagggcuggagcucacccugacaaacaccagcaucauuaaucauaaauucugcaaccuuuccgacgcucacaagaaaaaucuguacgaucaugcccucaugucuaucauuagcacguuucaccuguccaucccgaacuucaaucaguaugaggccaugagcugugacuuuaacggaggcaagauuucugugcaguacaaucugucccacagcuucgcugucgaugccgcuaaccauugcggcaccaucgccaacggggugcuccaaacauuuaugcggauggcguggggaggcucuuauaucgcccuggacuccgggugcggaaauugggauuguauuaugaccagcuaccaguaccuuaucauucagaacacaaccugggaagaccacugccaguucucucgccccuccccuaucggcuaucuggggcuccugagccaaagaacgcgggauauuuacaucucccgcagacgccggggaacauuuaccuggacacucucugacagcgagggcaaugaagcucccggcggguauugucugacccgguggaugcugaucgaggccgagcucaaaugcuucggaaacaccgcuguugccaaguguaaugaaaaacaugaugaggaauuuugcgacaugcugcgccuuuucgauuucaacaagcaggcgauuaaaagacugaagacacccgcccagauguccauccagcucauuaauaaggcugugaacgcccugaucaaugaccaacuuauuaugaaaaaccaucugcgggauaucaugugcaucccuuacugcaauuauagccgcuacugguaucucaaccacacggucaccgggaagacaucucugcccagauguuggcugguguccaauggaagcuaccucaacgaaacccacuuuucugacgacauugagcagcaggcugauaauaugaucacagagaugcugcaaaaagaauacauggaccggcagggcaagaccccucuugggcugguggaucucuucgucuuuagcacguccuucuaucugauuucuaucuuucugcaccuuguuaaaauuccgacacaucgccacaucgugggaaagcccugcccuaaaccccauagacucaaccacaugggcauuuguagcugcggccuguacaagcacccuggggugcccgucaaguggaaacggugaggacuagucccuguucccagagcccacuuuuuuuucuuuuuuugaaauaaaauagccugucuuucagaucuaaaaaaaaaaaaaaaaaaaaaaaaaaaaaaaaaaaaaaaaaaaaaaaaaaaaaaaaaaaaaaaaugcaucccccccccccccccccccccccccccccccaaaggcucuuuucagagccaccagaauu

SEQ ID NO: 6590 - RNA, 1768 nt, Artificial Sequence
  mRNA product Design a-2 comprising derived and/or modified sequence from LASV(GA391;Clade III)__CAA36645__GPCstabilized (opt5)
gggagaguccgcucagccagguugcagaagcggcuuagcguguguccuaaucuucucucugcguguagguaggccugugccgcaaacaagcuuaccaugggccagaucgugaccuucuuucaagaggucccccacguuauugaagaggugaugaacaucgugcugauugcccucagcauccuggcuauucuuaaggggcuguacaaugucgccacaugcggacucaucggccuggugacguuccuucugcucuccgggagaucuuguagccugaucuauaaaggaaccuacgaacugcagacacucgagcugaacauggaaacccuuaauaugacaaugccucuguccugcaccaagaacaauucucaucacuauauucggguuggcaacgagacagggcucgagcugacccuuacgaauaccagcauccugaaccauaaauuuuguaaucucuccgacgcgcacaagcgcaaccuguacgaucauucucugaugagcauuaucuccacauuccaccucagcauuccgaauuuuaaccaguaugaagcuaugucuugcgacuucaauggaggcaaaaucaccgugcaguacaaccugucccacagcuuugccgucgaugccgcuggccauugugggacacuugccaauggagugcugcaaaccuucaugagaauggcuuggggcgggucuuauauugcccucgacuccggaugcggcaacugggauugcaucaugacgagcuaccaguaccugaucauucagaacacaaccugggacgaucacugucaguuuucucgccccuccccuaucggguaucuuggacugcucagccaaagaacacgggacauuuacaucucccgcagacgccggggcaccuucaccuggacacucucugauagcgagggcaaugaaacgcccgggggauauugccugacccgguggaugcuuauugaggcggagcugaaguguuuuggcaacacagccguugcuaagugcaaugaaaaacaugacgaggaguucugugauaugcuccgccuguuugacuucaacaagcaggccaucagacggcuuaaaacccccgcucagauguccauccagcugauuaauaaggccgugaacgcgcucaucaaugaucaacugauuaugaaaaaccaucugcgcgacaucaugugcauuccuuacugcaauuauagcagauacugguaucucaaccacacaucuaccggaaagacgucccugccccggugcuggcuuaucagcaauggcucuuaccugaacgaaacaaaguucagcgacgauaucgagcagcaggccgacaauaugauuaccgagaugcuccaaaaagaauacaucgaucgccaggggaagaccccucugggacuggucgaccuuuuuguguucuccacaucuuuuuaucucauuagcaucuuccugcaccuggugaaaauuccgacccacagacauaucgucggcaagcccuguccuaaaccccaccggcucaaccauaugggcauuugcuccugugggcuguacaagcagccuggaguucccgugagauggaaacgcugaggacuagucccuguucccagagcccacuuuuuuuucuuuuuuugaaauaaaauagccugucuuucagaucuaaaaaaaaaaaaaaaaaaaaaaaaaaaaaaaaaaaaaaaaaaaaaaaaaaaaaaaaaaaaaaaaugcaucccccccccccccccccccccccccccccccaaaggcucuuuucagagccaccagaauu

SEQ ID NO: 6591 - RNA, 1771 nt, Artificial Sequence
  mRNA product Design a-2 comprising derived and/or modified sequence from LASV(AV;Clade V)__CCA30314__GPCstabilized (opt5)
gggagaguccgcucagccagguugcagaagcggcuuagcguguguccuaaucuucucucugcguguagguaggccugugccgcaaacaagcuuaccaugggccagaucgugaccuucuuucaagaggucccccacguuauugaagaggugaugaacaucgugcugauugcccucagcauccuggcuguccuuaaggggcuguacaauauugccacaugcggacucaucggccugaucacguuccuucugcucugugggagauccugcucuagcaaccuguauaaaggaguguacgaacugcagucccucgaccugaauauggagacccuuaacaugacaaugccucugucuuguaccaagaauaacagccaucacuauauucggguuggcaaugauacagggcucgaacugacccuuacaaacaccuccauccugaaucauaaauuuugcaaccucucugacgcgcacaagaaagaucuguacgaccaugcucugaugagcauuaucuccacguuccaccucagcauuccgaauuuuaaccaguaugaggccaugucuugugauuucaauggaggcaagaucuccgugcaguacaaccugagccacucuuaugccauugacgcugccaaucauugcggcaccgucgcuaacgggauccuucaaacauuuaugcgcauggccuggggaggcuccuacaucgcgcuggauagcgggugcggaaacugggacuguauuaugaccucuuaccaguaucucaucauucagaauacaaccugggagaaccacugccaguucucccggcccagcccuaucggcuaccuggggcuucugucccaacgcacgagagauauuuauaucucucggcgccgccggggaacauuuaccuggacacugagcgacuccgaaggcaaugccacccccggcggguacugucucaccagauggaugcugaucgaggcugaacuuaagugcuucggaaacacagccguggcuaaauguaaugagaagcaugaugaggaauuuugcgacaugcugcgccucuucgauuuuaacaaacaggccauuagccggcugaagucucccgcgcagauguccauccagcuuauuaauaaagccguuaacgcucugaucaaugaccaacucauuaugaagaaccaccugagagacaucaugugcaucccuuauugcaauuacagcaaguauugguaccugaaccacacgauuaccgggaaaacaucucuccccaaguguuggcuggugagcaauggauccuaccuuaacgaaacccauuucucugaugacaucgagcagcaggccgauaauaugauuacagaaaugcugcaaaaagaguauauggagcggcagggcaagaccccucucgggcuggucgaccuguucguguuuagcacguccuucuaccuuaucagcauuuuucuccgccuggugaaaaucccgacacacagacauauugucggaaagcccugcccuaaaccccaccggcugaaccauaugggcaucuguucuugcggccucuauaagcagccugggguucccgugcgcuggaagagaugaggacuagucccuguucccagagcccacuuuuuuuucuuuuuuugaaauaaaauagccugucuuucagaucuaaaaaaaaaaaaaaaaaaaaaaaaaaaaaaaaaaaaaaaaaaaaaaaaaaaaaaaaaaaaaaaaugcaucccccccccccccccccccccccccccccccaaaggcucuuuucagagccaccagaauu

SEQ ID NO: 6592 - RNA, 1768 nt, Artificial Sequence
  mRNA product Design a-2 comprising derived and/or modified sequence from LASV(Togo/2016/7082;Clade VI)__AMR44577__GPCstabilized (opt5)
gggagaguccgcucagccagguugcagaagcggcuuagcguguguccuaaucuucucucugcguguagguaggccugugccgcaaacaagcuuaccaugggccagaucauuaccuucuuucaagaggugccccacgucaucgaagagguuaugaacauugugcugaucgcccucagccugcuugcuauucugaaggggguguacaaugucgccacaugcggaaucaucggccucgugacguuccuguuucuuugugggagauccugcucucugauuuauaaaggaagcuacgaacuccagacccuggagcugaacauggaaacacucaauaugaccaugccucuguccuguacaaagaacucuagccaucacuauauccggguuggcaaugagaccgggcuugagcugacacucaccaacacguccauuaucaaucauaaauucugcaaccugucugacgcgcacaagcgcaaucuuuacgaucaugcucugaugagcauucucuccaccuuucaccugagcaucccgaacuucaaucaguaugaagccaugucuugugacuuuaacggaggcaaaauuuccgugcaguacaaucugagccacgccuaugcugucgaugccgcugagcauugcggcacaguggccaacgggguucuccaaaccuucaugagaauggcguggggaggcucuuacaucgcccuggacuccgggugcggaaauugggauuguaucaugacaagcuaccaguaucuuauuauccagaacaccacgugggaagaccacugccaguuuucucgccccuccccuauuggcuaccuggggcuccugagccaaagaacacgggauaucuauauuucccgcagacgccggggaaccuucacauggacccucucugacagcgagggcaacgagacccccggcggguacugucugacacgguggaugcugaucgaagcugagcucaagugcuuuggaaauacggccguggcuaaguguaacgaaaaacaugaugaggaguucugcgacaugcugcgccuuuuugauuucaauaagcaggccauccagagacugaaaucccccgcgcagaugagcauucaacucaucaacaaggccgucaaugcucugauuaacgaccagcuuaucaugaaaaaucaucugcgggauaugaugugcauuccuuauugcaacuacucuaaguauugguaccucaaucacaccuccagcgggcgcacaucucugcccaaguguuggcuggugagcaacggauccuaccucaaugagacccacuucucugacgacaucgaacagcaagccgauaacaugaucacagagaugcugcagaaagaauauauugacagacagggcaagaccccucuugggcugguggaucucuuugucuucagcacguccuuuuaccugaucagcauuuuccugcaccuuaucaaaauuccgacacaucggcacaucguuggaaagcccugcccuaaaccccaucgccucaaucacaugggcauuuguucuugcggccuguauaagcagccuggggugcccaccagauggaaacggugaggacuagucccuguucccagagcccacuuuuuuuucuuuuuuugaaauaaaauagccugucuuucagaucuaaaaaaaaaaaaaaaaaaaaaaaaaaaaaaaaaaaaaaaaaaaaaaaaaaaaaaaaaaaaaaaaugcaucccccccccccccccccccccccccccccccaaaggcucuuuucagagccaccagaauu

SEQ ID NO: 6593 - RNA, 1768 nt, Artificial Sequence
  mRNA product Design a-2 comprising derived and/or modified sequence from LASV(KAK-428;Clade n.d. (VII))__ANH09740__GPCstabilized (opt5)
gggagaguccgcucagccagguugcagaagcggcuuagcguguguccuaaucuucucucugcguguagguaggccugugccgcaaacaagcuuaccaugggccagaucgugaccuucuuucaagaggucccccacguuauugaagaggugaugaacaucgugcugauugcccucagccugcuugcuauccugaaggggcucuacaauuucgccacaugcggagucauuggccugaucacguuucuucugcucugugggagauccugcucugcgaccuauaaaggacaguacgaacugcagacacuggagcucaacauggaaagccugaauaugaccaugccucuuuccuguacaaagaacaauucucaucacuauauccgggcuggcaacaauaccgggcuggagcucacacugaccaacacgagcauuaucucccauaaauucugcaaucuuucugacgcccacaagaaaaaccuguacgaucauacccucaugagcauuaucacaaccuuucaccuguccauuccgaauuucaaccaguaugaggccaugagcugugacuuuaauggaggcaagaucucuauucaauacaaccugucccacagcuaugcuggcgaugccgcucagcauugcgggacaguggccaauggaguucuccagaccuucaugcgcauggcguggggcgggucuuaccuggcccuugacuccggaugccggggcugggauuguaucaucagcucuuaccaguaucugauuauccaaaacacgacaugggacgaucacugccaguuuucccgccccagcccuauuggguaccucggauucgugucccagaagaccagagacaucuauauuucucggcgccgccggggcacauuuaccuggacccugagcgauuccgaaggccaugacaugcccgggggauacugucucacaagauggaugcugaucgaggcugaucugaaaugcuucggcaacacggccgucgcuaaguguaaugaaaaacacgacgaggaguuuugcgauauguggcgccucuucgacuucaacaagcaggccauccaacggcugaaagcgcccgcccagaugaauauucagcuuaucaacaaggcugugaaugcccugauuaacgaccaacucaugaugaagaaucaccugagagauaucaugugcauuccuuauugcaacuacagcaaauuuugguaucuuaauaacaccacaaccggacggacaucucugccccgcuguuggcucaucuccaauggcagcuaccugaacgagacccauuucucugacgauaucgaacagcaggcugacaauaugauuacggagaugcugcagaaggaauacauggauagacaagggaaaacaccucucggacugguugaccuuuuuguguucagcaccuccuuuuaucugaucaccauuuuccuccaccuggucaagaucccgacacaucggcacauugugggcaaacccugcccuaagccccaucgccugaaccacaugggcaucuguucuugcgggcuuuacaaacagccuggagugcccgucagauggaagcggugaggacuagucccuguucccagagcccacuuuuuuuucuuuuuuugaaauaaaauagccugucuuucagaucuaaaaaaaaaaaaaaaaaaaaaaaaaaaaaaaaaaaaaaaaaaaaaaaaaaaaaaaaaaaaaaaaugcaucccccccccccccccccccccccccccccccaaaggcucuuuucagagccaccagaauu

SEQ ID NO: 6594 - RNA, 1768 nt, Artificial Sequence; identical to SEQ ID NO: 6588
  mRNA product Design a-2 comprising derived and/or modified sequence from LASV(Pinneo-NIG-1969;Clade I)__AIT17836__GPCstabilized (opt5)

SEQ ID NO: 6595 - RNA, 1768 nt, Artificial Sequence
  mRNA product Design a-2 comprising derived and/or modified sequence from LASV(ISTH0009-NIG-2011;Clade II)__AIT17404__GPCstabilized (opt5)
gggagaguccgcucagccagguugcagaagcggcuuagcguguguccuaaucuucucucugcguguagguaggccugugccgcaaacaagcuuaccaugggccagaucauuaccuucuuucaagaggugccccacgucaucgaagagguuaugaacauugugcugaucgcccucagccugcuugcuauucugaaggggaucuacaauguggccacaugcggacucuucggccuggucuccuuucuucugcucugugggagaucuugcagcacgaccuauaaaggaguguacgaacugcagacacuggagcucgacauggcgucccugaacaugaccaugccucuuucuuguacaaagaauaacagccaucacuauaucaugguuggcaaugaaaccgggcuggagcucacacugaccaacacguccauuaucaaucauaaauucugcaaccuuucugaugcucacaagaaaaaucuguacgaccaugcccucaugagcauuaucuccaccuuucaccugagcauuccgaacuucaaucaguaugaggccaugucuugugauuuuaacggaggcaagaucuccgugcaguacaaucugagccacgcuuaugccgucgacgcugccaaccauugcggcacaauugcgaauggggugcuccaaaccuucaugcggauggccuggggaggcucuuacaucgcucuggauuccgggugcggaagcugggacuguaucaugacaucuuaccaguaucuuauuauccagaacaccacgugggaagaucacugccaguuuucccgccccagcccuauuggcuaccuggggcuccugucccaaagaacacgggacaucuauauuucucgcagacgccggggaaccuucacauggacccucagcgauuccgagggcaacgaaacccccggcggguacugucugacacgguggaugcugaucgaggccgagcucaaaugcuuuggaaauacggcuguugccaaguguaacgaaaaacaugacgaggaguucugcgauaugcugcgccuuuuugacuucaauaagcaggcgaucagacggcugaaaacccccgcccagaugagcauucagcucaucaacaaggcugugaaugcccugauuaacgaucaacuuaucaugaagaaucaucugcgcgacauuaugugcaucccuuauugcaacuacucuaaauauugguaccucaaucacacagucaccgggaagacaucccugcccagauguuggcuggugagcaacggaucuuaccucaaugaaacccacuucagcgacgauaucgagcagcaggcugacaacaugauuacggagcugcuucaaaaagaauauauggaucggcagggcaagacaccucuggggcucguggaccuguuugucuucuccaccucuuuuuaccugaucagcauuuuccuucaccucaucaaaauuccgacccaucgccacaucacaggaaagcccugcccuaaaccccauagacugaaucacaugggcauuuguuccugcggccuguauaagcacccugggguucccgugaaguggaaacggugaggacuagucccuguucccagagcccacuuuuuuuucuuuuuuugaaauaaaauagccugucuuucagaucuaaaaaaaaaaaaaaaaaaaaaaaaaaaaaaaaaaaaaaaaaaaaaaaaaaaaaaaaaaaaaaaaugcaucccccccccccccccccccccccccccccccaaaggcucuuuucagagccaccagaauu

SEQ ID NO: 6596 - RNA, 1768 nt, Artificial Sequence
  mRNA product Design a-2 comprising derived and/or modified sequence from LASV(ISTH2010-NIG-2012;Clade II)__AIT17482__GPCstabilized (opt5)
gggagaguccgcucagccagguugcagaagcggcuuagcguguguccuaaucuucucucugcguguagguaggccugugccgcaaacaagcuuaccaugggccagaucauuaccuucuuucaagaggugccccacgucaucgaagagguuaugaacauugugcugaucgcccucagccugcuugcuauucugaaggggaucuacaauguggccacaugcggacucuucggccuggucuccuuucuucugcucugugggagaucuugcagcacgaccuauaaaggaguguacgaacugcagacacuggagcucgacauggcgucccugaacaugaccaugccucuuucuuguacaaagaauaacagccaucacuauaucaugguuggcaaugaaaccgggcuggagcucacacugaccaacacguccauuaucaaucauaaauucugcaaccuuucugaugcucacaagaaaaaucuguacgaccaugcccucaugagcauuaucuccaccuuucaccugagcauuccgaacuucaaucaguaugaggccaugucuugugauuuuaacggaggcaagaucuccgugcaguacaaucugagccacgcuuaugccgucgacgcugccaaccauugcggcacaauugcgaauggggugcuccaaaccuucaugcggauggccuggggaggcucuuacaucgcucuggauuccgggugcggaagcugggacuguaucaugacaucuuaccaguaucuuauuauccagaacauuaccugggaagaucacugccaguuuucccgccccagcccuaucggcuaccuggggcuccugucccaaagaacgcgggacauuuauaucucucgcagacgccggggaacauucaccuggacacucagcgauuccgagggcaacgaaacccccggcggguacugucugacccgguggaugcugaucgaggccgagcucaaaugcuuuggaaauacagcuguugccaaguguaacgaaaaacaugacgaggaguucugcgauaugcugcgccuuuuugacuucaauaagcaggcgauuagacggcugaaaacgcccgcccagaugagcauccagcucauuaacaaggcugugaaugcccugaucaacgaucaacuuauuaugaagaaucaucugcgcgacaucaugugcaucccuuauugcaacuacucuaaauauugguaccucaaucacaccgucacagggaagaccucccugcccagauguuggcuggugagcaacggaucuuaccucaaugaaacacacuucagcgacgauauugagcagcaggcugacaacaugaucaccgagcugcuucaaaaagaauauauugaucggcagggcaagacgccucuggggcucguggaccuguuugucuucuccacaucuuuuuaccugaucagcauuuuccuucaccucguuaaaaucccgacccaucgccacguggugggaaagcccugcccuaaaccccauagacugaaucacaugggcauuuguuccugcggccuguauaagcacccugggguccccgugaaguggaaacggugaggacuagucccuguucccagagcccacuuuuuuuucuuuuuuugaaauaaaauagccugucuuucagaucuaaaaaaaaaaaaaaaaaaaaaaaaaaaaaaaaaaaaaaaaaaaaaaaaaaaaaaaaaaaaaaaaugcaucccccccccccccccccccccccccccccccaaaggcucuuuucagagccaccagaauu

SEQ ID NO: 6597 - RNA, 1768 nt, Artificial Sequence
  mRNA product Design a-2 comprising derived and/or modified sequence from LASV(Lassa virus/H.sapiens-wt/NGA/2015/ISTH_0543;Clade II)__AVO03639__GPCstabilized (opt5)
gggagaguccgcucagccagguugcagaagcggcuuagcguguguccuaaucuucucucugcguguagguaggccugugccgcaaacaagcuuaccaugggccagaucauuaccuucuuucaagaggugccccacgucaucgaagagguuaugaacauugugcugaucgcccucagccugcuugcuauucugaaggggaucuacaauguggccacaugcggacucuucggccuggucuccuuucuucugcucugugggagaucuugcagcacgaccuauaaaggaguguacgaacugcagacacuggagcucgacauggcgaaccugaauaugaccaugccucuuuccuguacaaagaacaauucucaucacuauaucaugguuggcaacgaaaccgggcuggagcucacacugaccaauacgagcauuaucaaccauaaauucugcaaucuuuccgaugcucacaagaaaaaccuguacgaccaugcccucaugucuauuaucagcaccuuucaccuguccauuccgaauuucaaccaguaugaggccaugagcugugauuuuaauggaggcaagaucucugugcaguacaaccugucccacacauaugcugucgacgccgcuaaucauugcggcaccauugccaacggggugcuccaaacauucaugcggauggcguggggaggcagcuacaucgcccuggauucugggugcggauccugggacuguaucaugaccagcuaccaguaucuuguuauucagaacacgacaugggaagaucacugccaguuuucucgccccuccccuaucggcuaccuggggcuccugagccaaagaacccgggacauuuauaucucccgcagacgccggggaacauucaccuggacccucucugauagcgagggcaaugaaacacccggcggguacugucugacgcgguggaugcugauugaggcugagcucaaaugcuuuggaaacaccgccguggcuaaguguaaugaaaaacaugacgaggaguucugcgauaugcugcgccuuuuugacuucaacaagcaggccaucagacggcugaaaacacccgcgcagauguccauccagcucauuaauaaggccgucaacgcucugaucaaugaucaacuuauuaugaagaaccaucugcgcgacaucaugugcauuccuuauugcaauuacagcaaauauugguaccucaaccacaccgugacagggaagaccucucugcccagauguuggcugguguccaauggaagcuaccucaacgaaacgcacuucucugacgauaucgagcagcaggccgacaauaugaucacagagcugcuucaaaaagaauauauugaucggcagggcaagaccccucuggggcucgucgaccuguuuguuuucagcaccuccuuuuaccugaucucuauuuuccuucaccucgugaaaaucccgacacaucgccacauuaccggaaagcccugcccuaaaccccauagacugaaccacaugggcaucuguagcugcggccuguauaagcacccuggggugcccgucaaguggaaacggugaggacuagucccuguucccagagcccacuuuuuuuucuuuuuuugaaauaaaauagccugucuuucagaucuaaaaaaaaaaaaaaaaaaaaaaaaaaaaaaaaaaaaaaaaaaaaaaaaaaaaaaaaaaaaaaaaugcaucccccccccccccccccccccccccccccccaaaggcucuuuucagagccaccagaauu

SEQ ID NO: 6598 - RNA, 1768 nt, Artificial Sequence
  mRNA product Design a-2 comprising derived and/or modified sequence from LASV(Lassa virus/H.sapiens-wt/NGA/2016/ISTH_0009;Clade II)__AVO03571__GPCstabilized (opt5)
gggagaguccgcucagccagguugcagaagcggcuuagcguguguccuaaucuucucucugcguguagguaggccugugccgcaaacaagcuuaccaugggccagaucauuaccuucuuucaagaggugccccacgucaucgaagagguuaugaacauugugcugaucgcccucagccugcuugcuauucugaaggggaucuacaauguggccacaugcggacuccugggccuugucuccuuccugcuccugugugggagaucuugcagcacgaccuauaaaggaguguacgaacugcagacacucgagcuggacauggcgucccuuaacaugaccaugccucugucuuguacaaagaauaacagccaucacuauaucaugguuggcaaugaaaccgggcucgagcugacacuuaccaacacguccauuaucaaucauaaauuuugcaaccugucugaugcucacaagaaaaaucucuacgaccaugcccugaugagcauuaucuccaccuuccaccugagcauuccgaacuuuaaucaguaugaggccaugucuugugauuucaacggaggccggaucuccgugcaguacaaucucagccacucuuaugcugucgacgccgcuaaccauugcggcacaauugccaauggggugcugcaaaccuuuaugcgcauggcguggggaggcuccuacaucgcccuugauagcgggugcggaucuugggacuguaucaugacauccuaccaguaucugauuauccagaacaccacgugggaagaucacugccaguucagcagacccuccccuauuggcuaccucgggcugcuuucucaacggacacgcgacaucuauauuagcagacggcgccggggaaccuuuacauggacccuguccgauagcgagggcaacgaaacccccggcggguacugucugacacgcuggaugcucaucgaggcugagcugaagugcuucggaaauacggccguugcuaaauguaacgaaaagcaugacgaggaauuuugcgauaugcuuagacuguucgacuuuaauaaacaggccauccggcgccucaagacccccgcgcagaugucuauucagcugaucaacaaagccgugaaugcucuuauuaacgaucaacugaucaugaagaaucaccucagagacauuaugugcaucccuuauugcaacuacuccaaguauugguaccugaaucacacagucaccgggaaaacaagccugccccgguguuggcucgugucuaacggaagcuaccugaaugaaacccauuucuccgacgauaucgagcagcaggccgacaacaugauuacggagcuucugcaaaaggaauauaucgaucgccagggcaaaacaccucucgggcugguggaccuguucgucuuuucuaccagcuucuaccuuauuuccaucuuucuccaccugguuaagauuccgacccauagacacaucacaggaaaacccugcccuaagccccaucggcugaaucacaugggcauuuguagcugcggccucuauaaccacccuggggugcccgugaaauggaagcgcugaggacuagucccuguucccagagcccacuuuuuuuucuuuuuuugaaauaaaauagccugucuuucagaucuaaaaaaaaaaaaaaaaaaaaaaaaaaaaaaaaaaaaaaaaaaaaaaaaaaaaaaaaaaaaaaaaugcaucccccccccccccccccccccccccccccccaaaggcucuuuucagagccaccagaauu

SEQ ID NO: 6599 - RNA, 1768 nt, Artificial Sequence
  mRNA product Design a-2 comprising derived and/or modified sequence from LASV(Lassa virus/H.sapiens-wt/NGA/2016/ISTH_0017;Clade II)__AVO03567__GPCstabilized (opt5)
gggagaguccgcucagccagguugcagaagcggcuuagcguguguccuaaucuucucucugcguguagguaggccugugccgcaaacaagcuuaccaugggccagaucauuaccuucuuucaagaggugccccacgucaucgaagagguuaugaacauugugcugaucgcccucagccugcuugcuauucugaaggggaucuacaauguggccacaugcggacucuucggccuggucuccuuucuucugcucugugggagaucuugcagcacgaccuauaaaggaguguacgaacugcagacacuggagcucgacauggcgucccugaacaugaccaugccucuuucuuguacaaagaauaacagccaucacuauaucaugguuggcaaugaaaccgggcuggagcucacacugaccaacacguccauuaucaaucauaaauucugcaaccuuucugaugcucacaagaaaaaucuguacgaccaugcccucaugagcauuaucuccaccuuucaccugagcauuccgaacuucaaucaguaugaggccaugucuugugauuuuaacggaggcaagaucuccgugcaguacaaucugagccacacauaugcuauugacgccgcuaaccauugcggcaccaucgccaaugggguccuccaaacauucaugcggauggcguggggaggcucuuacaucgcccuggauuccgggugcggaagcugggacuguauuaugaccucuuaccaguaucuuaucauucagaacacgacaugggaagaucacugccaguuuucccgccccagcccuaucggcuaccuggggcuccugucccaaagaacccgggacauuuauaucucucgcagacgccggggaacauucaccuggacccucagcgauuccgagggcaacgaaacacccggcggguacugucugacgcgguggaugcugaucgaggcugagcucaaaugcuuuggaaauaccgccguggcuaaguguaacgaaaaacaugacgaggaguucugcgauaugcugcgccuuuuugacuucaauaagcaggccauuagacggcugaaaacacccgcgcagaugagcauccagcucauuaacaaggccguuaaugcucugaucaacgaucaacuuauuaugaagaaucaucugcgcgacaucaugugcaucccuuauugcaacuacucuaaauauugguaccucaaucacaccgugacagggaagaccucccugcccagauguuggcuggucagcaacggaucuuaccucaaugaaacgcacuucagcgacgauauugagcagcaggccgacaacaugaucacagagcugcuucaaaaagaauauauggaucggcagggcaagaccccucuggggcucguggaccuguuuguguucuccaccucuuuuuaccugauuagcaucuuccuucaccucguccgcauuccgacacauagacacguuaucggaaaacccugcccuaagccccaucggcugaaucacaugggcauuuguuccugcggccuguauaaacacccuggggugcccgugaaguggaagcgcugaggacuagucccuguucccagagcccacuuuuuuuucuuuuuuugaaauaaaauagccugucuuucagaucuaaaaaaaaaaaaaaaaaaaaaaaaaaaaaaaaaaaaaaaaaaaaaaaaaaaaaaaaaaaaaaaaugcaucccccccccccccccccccccccccccccccaaaggcucuuuucagagccaccagaauu

SEQ ID NO: 6600 - RNA, 1768 nt, Artificial Sequence
  mRNA product Design a-2 comprising derived and/or modified sequence from LASV(Lassa virus/H.sapiens-wt/NGA/2018/ISTH_0959;Clade II)__AVV65099__GPCstabilized (opt5)
gggagaguccgcucagccagguugcagaagcggcuuagcguguguccuaaucuucucucugcguguagguaggccugugccgcaaacaagcuuaccaugggccagaucauuaccuucuuucaagaggugccccacgucaucgaagagguuaugaacauugugcugaucgcccucagccugcuugcuauucugaaggggaucuacaauguggucacaugcggacucuucggccugguguccuuucuucugcucugugggagaucuugcagcacgaccuauaaaggaguuuacgaacugcagacacuggagcucgacauggccucccugaacaugaccaugccucuuucuuguacaaagaauaacagccaucacuauaucauggugggcaaugaaaccgggcuggagcucacacugaccaacacguccauuaucaaucauaaauucugcaaccuuucugaugcgcacaagaaaaaucuguacgaccaugcucucaugagcauuaucuccaccuuucaccugagcauuccgaacuucaaucaguaugaggccaugucuugugauuuuaacggaggcaagaucuccguccaguacaaucugagccacgccuaugcuauugacgccgcuaaccauugcggcacaaucgccaauggggugcuccaaaccuucaugcggauggcguggggaggcucuuacaucgcccuggauuccgggugcggaagcugggacuguauuaugacaucuuaccaguaucuuaucauucagaacaccacgugggaagaucacugccaguuuucccgccccagcccuaucggcuaccuggggcuccugucccaaagaacacgggacauuuauaucucucgcagacgccggggaaccuucacauggacccucagcgauuccgagggcaacgaaacccccggcggguacugucugacacgguggaugcugaucgaggcugagcucaaaugcuuuggaaauacggccguugcuaaguguaacgaaaaacaugacgaggaguucugcgauaugcugcgccuuuuugacuucaauaagcaggccauuagacggcugaaaacccccgcgcagaugagcauccagcucauuaacaaggccgugaaugcucugaucaacgaucaacuuauuaugaagaaucaucugcgcgacaucaugugcaucccuuauugcaacuacucuaaauauugguaccucaaucacacagucaccgggaagacaucccugcccagauguuggcuggugagcaacggaucuuaccucaaugaaacccacuucagcgacgauauugagcagcaggccgacaacaugaucacggagcugcuucaaaaagaauauauugaucggcagggcaagacaccucuggggcucguggaccuguuugucuucuccaccucuuuuuaccugaucagcauuuuccuucaccucguuaaaaucccgacccaucgccacgugauuggaaagcccugcccuaaaccccauagacugaaucacaugggcaucuguuccugcggccuguauaagcacccuggggugcccgucaaguggaaacggugaggacuagucccuguucccagagcccacuuuuuuuucuuuuuuugaaauaaaauagccugucuuucagaucuaaaaaaaaaaaaaaaaaaaaaaaaaaaaaaaaaaaaaaaaaaaaaaaaaaaaaaaaaaaaaaaaugcaucccccccccccccccccccccccccccccccaaaggcucuuuucagagccaccagaauu

SEQ ID NO: 6601 - RNA, 1768 nt, Artificial Sequence
  mRNA product Design a-2 comprising derived and/or modified sequence from LASV(LASV003-NIG-2008;Clade II)__AIT17580__GPCstabilized (opt5)
gggagaguccgcucagccagguugcagaagcggcuuagcguguguccuaaucuucucucugcguguagguaggccugugccgcaaacaagcuuaccaugggccagaucauuaccuucuuucaagaggugccccacgucaucgaagagguuaugaacauugugcugaucgcccucagccugcuugcuauucugaaggggaucuacaauguggccacaugcggacucuucggccuggucuccuuucuucugcucugugggagaucuugcagcacgaccuauaaaggaguguacgaacugcagacacuggagcucgacauggcgucccugaacaugaccaugccucuuucuuguacaaagaauaacagccaucacuauaucaugguuggcaaugaaaccgggcuggagcucacacugaccaacacguccauuaucaaucauaaauucugcaaccuuucugaugcucacaagaaaaaucuguacgaccaugcccucaugagcauuaucuccaccuuucaccugagcauuccgaacuucaaucaguaugaggccaugucuugugauuuuaacggaggcaagaucuccgugcaguacaaucugagccacacauaugcugucgacgccgcuaaccauugcggcaccauugccaauggggugcuccaaacauucaugcggauggcguggggaggcucuuacaucgcccuggauuccgggugcggaagcugggacuguaucaugaccucuuaccaguaucuuauuauccagaacacgacaugggaagaucacugccaguuuucccgccccagcccuauuggcuaccuggggcuccugucccaaagaacccgggacaucuauauuucucgcagacgccggggaacauucaccuggacccucagcgauuccgagagcaacgaaacacccggcggcuacugucugacgcgguggaugcugaucgaggcugagcucaaaugcuuugggaauaccgccguugcuaaguguaacgaaaaacaugacgaggaguucugcgauaugcugcgccuuuuugacuucaauaagcaggccaucagacggcugaaagcgcccgcccagaugucuauucagcucaucaacaaggcugugaaugcccugauuaacgaucaacuuaucaugaagaaucaucugcgcgacauuaugugcaucccuuauugcaacuacuccaaauauugguaccucaaucacacagucaccggcagaacaagccugccccgguguuggcuggugucuaacgggagcuaccucaaugaaacccacuucuccgacgauaucgagcagcaggcugacaacaugauuacggagcugcuucaaaaggaauauauggaucgccagggaaaaacaccucugggccucguggaccuguuugucuucucuaccagcuuuuaccugaucuccauuuuccuucaccucguuaagaucccgacccauagacacgugauugggaaacccugcccuaagccccaucggcugaaucacaugggaaucuguagcugcggccuguauaaacacccuggcgugcccgucaaguggaagcgcugaggacuagucccuguucccagagcccacuuuuuuuucuuuuuuugaaauaaaauagccugucuuucagaucuaaaaaaaaaaaaaaaaaaaaaaaaaaaaaaaaaaaaaaaaaaaaaaaaaaaaaaaaaaaaaaaaugcaucccccccccccccccccccccccccccccccaaaggcucuuuucagagccaccagaauu

SEQ ID NO: 6602 - RNA, 1768 nt, Artificial Sequence
  mRNA product Design a-2 comprising derived and/or modified sequence from LASV(LASV035-NIG-2009;Clade II)__AIT17588__GPCstabilized (opt5)
gggagaguccgcucagccagguugcagaagcggcuuagcguguguccuaaucuucucucugcguguagguaggccugugccgcaaacaagcuuaccaugggccagaucauuaccuucuuucaagaggugccccacgucaucgaagagguuaugaacauugugcugaucgcccucagccugcuugcuauucugaaggggaucuacaauguggccacaugcggacucuucggccuggucuccuuucuucugcucugugggagaucuugcagcacgaccuauaaaggaguguacgaacugcagacacuggagcucgacauggcgucccugaacaugaccaugccucuuucuuguacaaagaauaacagccaucacuauaucaugguuggcaaugaaaccgggcuggagcucacacugaccaacacguccauuaucaaucauaaauucugcaaccuuucugaugcucacaagaaaaaucuguacgaccaugcccucaugagcauuaucuccaccuuucaccugagcauuccgaacuucaaucaguaugaggccaugucuugugauuuuaacggaggcaagaucuccgugcaguacaaucugagccacgcuuaugccgucgacgcugccaaccauugcggcacaauugcgaauggggugcuccaaaccuucaugcggauggccuggggaggcucuuacaucgcucuggauuccgggugcggaagcugggacuguaucaugacaucuuaccaguaucuuauuauccagaacaccacgugggaagaucacugccaguuuucccgccccagcccuauuggcuaccuggggcuccugucccaaagaacacgggacaucuauauuucucgcagacgccggggaaccuucacauggacccucagcgauuccgagggcaacgaaacccccggcggguacugucugacacgguggaugcugaucgaggccgagcucaaaugcuuuggaaauacggcuguugccaaguguaacgaaaaacaugacgaggaguucugcgauaugcugcgccuuuuugacuucaauaagcaggcgaucagacggcugaaagcccccgcucagaugagcauucagcucaucaacaaggccgugaaugcucugauuaacgaucaacuuaucaugaagaaucaucugcgcgacauuaugugcaucccuuauugcaacuacucuaaauauugguaccucaaucacaccgucacagggaagaccucccugcccagauguuggcuggugagcaacggaucuuaccucaaugaaacacacuucagcgacgauaucgagcagcaggccgacaacaugauuaccgagcugcuucaaaaagaauauaucgaucggcagggcaagacgccucuggggcucguggaccuguuugucuucuccacaucuuuuuaccugauuagcaucuuccuucaccucguuaaaauuccgacccaucgccacgugaucggaaagcccugcccuaaaccccauagacugaaucacaugggcauuuguuccugcggccuguauaagcacccuggggugcccgucaaguggaaacggugaggacuagucccuguucccagagcccacuuuuuuuucuuuuuuugaaauaaaauagccugucuuucagaucuaaaaaaaaaaaaaaaaaaaaaaaaaaaaaaaaaaaaaaaaaaaaaaaaaaaaaaaaaaaaaaaaugcaucccccccccccccccccccccccccccccccaaaggcucuuuucagagccaccagaauu

SEQ ID NO: 6603 - RNA, 1768 nt, Artificial Sequence
  mRNA product Design a-2 comprising derived and/or modified sequence from LASV(LASV1000-NIG-2009;Clade II)__AIT17782__GPCstabilized (opt5)
gggagaguccgcucagccagguugcagaagcggcuuagcguguguccuaaucuucucucugcguguagguaggccugugccgcaaacaagcuuaccaugggccagaucauuaccuucuuucaagaggugccccacgucaucgaagagguuaugaacauugugcugaucgcccucagccugcuugcuauucugaaggggaucuacaauguggccacaugcggacucuucggccuggucuccuuucuucugcucugugggagaucuugcagcacgaccuauaaaggaguguacgaacugcagacacuggagcucgacauggcgucccugaacaugaccaugccucuuucuuguacaaagaauaacagccaucacuauaucaugguuggcaaugaaaccgggcuggagcucacacugaccaacacguccauuaucaaucauaaauucugcaaccuuucugaugcucacaagaaaaaucuguacgaccaugcccucaugagcauuaucuccaccuuucaccugagcauuccgaacuucaaucaguaugaggccaugucuugugauuuuaacggaggcaagaucuccgugcaguacaaucugagccacacauaugcugucgacgccgcuaaccauugcggcaccauugccaauggggugcuccaaacauucaugcggauggcguggggaggcucuuacaucgcccuggauuccgggugcggaagcugggacuguaucaugaccucuuaccaguaucuuauuauccagaacacgacaugggaagaucacugccaguuuucccgccccagcccuauuggcuaccuggggcuccugucccaaagaacccgggacaucuauauuucucgcagacgccggggaacauucaccuggacccucagcgauuccgagggcaacgaaacacccggcggguacugucugacgcgguggaugcugaucgaggcugagcucaaaugcuuuggaaauaccgccguugcuaaguguaacgaaaaacaugacgaggaguucugcgauaugcugcgccuuuuugacuucaauaagcaggccaucaaaagacugaagacacccgcgcagaugagcauucagcucaucaacaaggccgugaaugcucugauuaacgaucaacuuaucaugaaaaaucaucugcgggacauuaugugcaucccuuauugcaacuacucuaaguauugguaccucaaucacaccgucacagggaaaaccucccugccccgcuguuggcuggugagcaacggaucuuaccucaaugaaacgcacuucagcgacgauaucgagcagcaggccgacaacaugauuacagagcugcuucaaaaggaauauaucgauagacagggcaaaaccccucuggggcucguggaccuguuugucuucuccaccucuuuuuaccugauuagcaucuuccuucaccucguuaagauuccgacacaucggcacguggugggaaaacccugcccuaagccccaucgccugaaucacaugggcaucuguuccugcggccuguauaagcacccugggguccccgugaaauggaagagaugaggacuagucccuguucccagagcccacuuuuuuuucuuuuuuugaaauaaaauagccugucuuucagaucuaaaaaaaaaaaaaaaaaaaaaaaaaaaaaaaaaaaaaaaaaaaaaaaaaaaaaaaaaaaaaaaaugcaucccccccccccccccccccccccccccccccaaaggcucuuuucagagccaccagaauu

SEQ ID NO: 6604 - RNA, 1768 nt, Artificial Sequence
  mRNA product Design a-2 comprising derived and/or modified sequence from LASV(LASV221-NIG-2010;Clade II)__AIT17624__GPCstabilized (opt5)
gggagaguccgcucagccagguugcagaagcggcuuagcguguguccuaaucuucucucugcguguagguaggccugugccgcaaacaagcuuaccaugggccagaucauuaccuucuuucaagaggugccccacgucaucgaagagguuaugaacauugugcugaucgcccucagccugcuugcuauucugaaggggaucuacaauguggccacaugcggacucuucggccuggucuccuuucuucugcucugugggagaucuugcagcacgaccuauaaaggaguguacgaacugcagacacuggagcucgacauggcgucccugaacaugaccaugccucuuucuuguacaaagaauaacagccaucacuauaucaugguuggcaaugaaaccgggcuggagcucacacugaccaacacguccauuaucaaucauaaauucugcaaccuuucugaugcucacaagaaaaaucuguacgaccaugcccucaugagcauuaucuccaccuuucaccugagcauuccgaacuucaaucaguaugaggccaugucuugugauuuuaacggaggcaagaucuccgugcaguacaaucugagccacacauaugcuauugacgccgcuaaccauugcggcaccaucgccaaugggguccuccaaacauucaugcggauggcguggggaggcucuuacaucgcccuggauuccgggugcggaagcugggacuguauuaugaccucuuaccaguaucuuaucauucagaacacgacaugggaagaucacugccaguuuucccgccccagcccuaucggcuaccuggggcuccugucccaaagaacccgggacauuuauaucucucgcagacgccggggaacauucaccuggacccucagcgauuccgagggcaacgaaacacccggcggguacugucugacgcgguggaugcugaucgaggcugagcucaaaugcuuuggaaauaccgccguggcuaaguguaacgaaaaacaugacgaggaguucugcgauaugcugcgccuuuuugacuucaauaagcaggccauuagacggcugaaaacacccgcgcagaugagcauccagcucauuaacaaggccguuaaugcucugaucaacgaucaacuuauuaugaagaaucaucugcgcgacaucaugugcaucccuuauugcaacuacucuaaauauugguaccucaaucacaccgugacagggaagaccucccugcccagauguuggcuggucagcaacggaucuuaccucaaugaaacgcacuucagcgacgauauugagcagcaggccgacaacaugaucacagagaugcugcaaaaagaauauauggaucggcagggcaagaccccucuugggcugguggaccucuuuguguucuccaccucuuuuuaccugauuagcaucuuccugcaccuugucaaaauuccgacacaucgccacguuaucggaaagcccugcccuaaaccccauagacucaaucacaugggcauuuguuccugcggccuguauaagcacccuggggugcccgugaaguggaaacggugaggacuagucccuguucccagagcccacuuuuuuuucuuuuuuugaaauaaaauagccugucuuucagaucuaaaaaaaaaaaaaaaaaaaaaaaaaaaaaaaaaaaaaaaaaaaaaaaaaaaaaaaaaaaaaaaaugcaucccccccccccccccccccccccccccccccaaaggcucuuuucagagccaccagaauu

SEQ ID NO: 6605 - RNA, 1768 nt, Artificial Sequence
  mRNA product Design a-2 comprising derived and/or modified sequence from LASV(LASV237-NIG-2010;Clade II)__AIT17638__GPCstabilized (opt5)
gggagaguccgcucagccagguugcagaagcggcuuagcguguguccuaaucuucucucugcguguagguaggccugugccgcaaacaagcuuaccaugggccagaucauuaccuucuuucaagaggugccccacgucaucgaagagguuaugaacauugugcugaucgcccucagccugcuugcuauucugaaggggaucuacaauguggccacaugcggacucuucggccuggucuccuuucuucugcucugugggagaucuugcagcacgaccuauaaaggaguguacgaacugcagacacuggagcucgacauggcgucccugaacaugaccaugccucuuucuuguacaaagaauaacagccaucacuauaucaugguuggcaaugaaaccgggcuggagcucacacugaccaacacguccauuaucaaucauaaauucugcaaccuuucugaugcucacaagaaagaccuguacgaucaugcccucaugagcauuaucuccaccuuucaccugagcauuccgaauuucaaccaguaugaggccaugucuugugacuuuaauggaggcaagaucuccgugcaguacaaccugagccacacauaugcugucgaugccgcuaaucauugcggcaccauugccaacggggugcuccaaacauucaugcggauggcguggggaggcucuuacaucgcccuggacuccgggugcggaagcugggauuguaucaugaccucuuaccaguaucuuauuauccagaauacgacaugggaagaccacugccaguuuucccgccccagcccuauuggcuaccuggggcuccugucccaaagaacccgggauaucuauauuucucgcagacgccggggaacauucaccuggacccucagcgacuccgagggcaacgaaacacccggcggguacugucugacgcgguggaugcugaucgaggcugagcucaaaugcuuuggaaacaccgccguugcuaaguguaaugaaaaacaugaugaggaguucugcgacaugcugcgccuuuuugauuucaacaagcaggccaucagacggcugaaaacacccgcgcagaugagcauucagcucaucaauaaggccgugaacgcucugauuaaugaccaacuuaucaugaagaaccaucugcgcgacauuaugugcaucccuuauugcaauuacucuaaauauugguaccucaaccacaccgucacagggaagaccucccugcccagauguuggcuggugagcaauggaucuuaccucaacgaaacgcacuucagcgaugacaucgagcagcaggccgauaauaugauuacagagcugcuucaaaaagaauauauggaccggcagggcaagaccccucuggggcucguggaucuguuugucuucuccaccucuuuuuaccugaucagcauuuuccuucaccucaucaaaauuccgacacaucgccacaucaccggaaagcccugcccuaaaccccauagacugaaccacaugggcauuuguuccugcggccuguauaagcacccugggguucccgugaaguggaaacggugaggacuagucccuguucccagagcccacuuuuuuuucuuuuuuugaaauaaaauagccugucuuucagaucuaaaaaaaaaaaaaaaaaaaaaaaaaaaaaaaaaaaaaaaaaaaaaaaaaaaaaaaaaaaaaaaaugcaucccccccccccccccccccccccccccccccaaaggcucuuuucagagccaccagaauu

SEQ ID NO: 6606 - RNA, 1768 nt, Artificial Sequence
  mRNA product Design a-2 comprising derived and/or modified sequence from LASV(LASV253-NIG-2011;Clade II)__AIT17670__GPCstabilized (opt5)
gggagaguccgcucagccagguugcagaagcggcuuagcguguguccuaaucuucucucugcguguagguaggccugugccgcaaacaagcuuaccaugggccagaucauuaccuucuuucaagaggugccccacgucaucgaagagguuaugaacauugugcugaucgcccucagccugcuugcuauucugaaggggaucuacaauguggccacaugcggacucuucggccuggucuccuuucuucugcucugugggagaucuugcagcacgaccuauaaaggaguguacgaacugcagacacuggagcucgacauggcgucccugaacaugaccaugccucuuucuuguacaaagaauaacagccaucacuauaucaugguuggcaaugaaaccgggcuggagcucacacugaccaacacguccauuaucaaucauaaauucugcaaccuuucugaugcucacaagaaaaaucuguacgaccaugcccucaugagcauuaucuccaccuuucaccugagcauuccgaacuucaaucaguaugaggccaugucuugugauuuuaacggaggcaagaucuccgugcaguacaaucugagccacacauaugcugucgacgccgcuaaccauugcggcaccauugccaauggggugcuccaaacauucaugcggauggcguggggaggcucuuacaucgcccuggauuccgggugcggaagcugggacuguaucaugaccucuuaccaguaucuuauuauccagaacacgacaugggaagaucacugccaguuuucccgccccagcccuauuggcuaccuggggcuccugucccaaagaacccgggacaucuauauuucucgcagacgccggggaacauucaccuggacccucagcgauuccgagggcaacgaaacacccggcggguacugucugacgcgguggaugcugaucgaggcugagcucaaaugcuuuggaaauaccgccguugcuaaguguaacgaaaaacaugacgaggaguucugcgauaugcugcgccuuuuugacuucaauaagcaggccaucagacggcugaaagcgcccgcccagaugagcauucagcucaucaacaaggcugugaaugcccugauuaacgaucaacuuaucaugaagaaucaucugcgcgacauuaugugcaucccuuauugcaacuacucuaaauauugguaccucaaucacacagucaccgggagaacaucccugccccgguguuggcuggugagcaacggaucuuaccucaaugaaacccacuucagcgacgauaucgagcagcaggcugacaacaugauuacggagcugcuucaaaaggaauauaucgaucgccagggcaaaacaccucuggggcucguggaccuguuugucuucuccaccucuuuuuaccugauuagcaucuuccuucaccucguuaagauuccgacccauagacacaucauuggaaaacccugcccuaagccccaucggcugaaucacaugggcaucuguuccugcggccuguauaaacacccuggggugcccgugaaguggaagcgcugaggacuagucccuguucccagagcccacuuuuuuuucuuuuuuugaaauaaaauagccugucuuucagaucuaaaaaaaaaaaaaaaaaaaaaaaaaaaaaaaaaaaaaaaaaaaaaaaaaaaaaaaaaaaaaaaaugcaucccccccccccccccccccccccccccccccaaaggcucuuuucagagccaccagaauu

SEQ ID NO: 6607 - RNA, 1768 nt, Artificial Sequence
  mRNA product Design a-2 comprising derived and/or modified sequence from LASV(LASV254-NIG-2011;Clade II)__AIT17674__GPCstabilized (opt5)
gggagaguccgcucagccagguugcagaagcggcuuagcguguguccuaaucuucucucugcguguagguaggccugugccgcaaacaagcuuaccaugggccagaucauuaccuucuuucaagaggugccccacgucaucgaagagguuaugaacauugugcugaucgcccucagccugcuugcuauucugaaggggaucuacaauguggccacaugcggacucuucggccuggucuccuuucuucugcucugugggagaucuugcagcacgaccuauaaaggaguguacgaacugcagacacuggagcucgacaugaccaaccugaauaugacaaugccucuuuccuguaccaagaacaauucucaucacuauaucaugguuggcaacgaaacagggcuggagcucacccugacgaauaccagcauuaucaaccauaaauucugcaaucuuuccgaugcgcacaagaaaaaccuguacaaucaugcucucaugucuauuaucagcacauuucaccuguccauuccgaacuucaaucaguaugaggccaugagcugugacuuuaacggaggcaagaucucugugcaguacaaucugucccacagcuaugccgucgaugcugccaaccauugcggcaccauugcuaacggggugcuccaaacauucaugcggauggccuggggaggcucuuacaucgcgcuggacuccgggugcggaaauugggauuguaucaugaccagcuaccaguaucuuauuauccagaacacgacaugggaagaccacugccaguuuucucgccccuccccuauuggcuaccuggggcuccugagccaaagaacccgggauaucuauauuucccgcagacgccggggaacauucaccuggacccucucugacagcgagggcaaugaaacacccggcggguacugucugacgcgguggaugcugaucgaggccgagcucaaaugcuuuggaaacaccgcuguugccaaguguaaugaaaaacaugaugaggaguucugcgacaugcugcgccuuuuugauuucaacaagcaggcuaucagacggcugaaaacacccgcccaggcgaauauucagcucaucaacaaggccgugaaugcucugauuaacgaccaacuuaucaugaagaaucaucugcgcgauauuaugugcaucccuuauugcaacuacuccaaauauugguaccucaaucacaccgucacagggaagaccagccugcccagauguuggcuggugucuaacggauccuaccucaaugaaacgcacuucagcgacgacaucgagcagcaggccgauaacaugauuacagagcugcuucaaaaagaauauauggaccggcagggcaagaccccucuggggcucguggaucuguuugucuucucuaccagcuuuuaccugaucuccauuuuccuucaccucguuaaaaucccgacacaucgccacgugauuggaaagcccugcccuaaaccccauagacugaaccacaugggcaucuguucuugcggccuguauaagcacccuggggugcccgucaaguggaaacggugaggacuagucccuguucccagagcccacuuuuuuuucuuuuuuugaaauaaaauagccugucuuucagaucuaaaaaaaaaaaaaaaaaaaaaaaaaaaaaaaaaaaaaaaaaaaaaaaaaaaaaaaaaaaaaaaaugcaucccccccccccccccccccccccccccccccaaaggcucuuuucagagccaccagaauu

SEQ ID NO: 6608 - RNA, 1768 nt, Artificial Sequence
  mRNA product Design a-2 comprising derived and/or modified sequence from LASV(Nig08-A19;Clade III)__ADU56618__GPCstabilized (opt5)
gggagaguccgcucagccagguugcagaagcggcuuagcguguguccuaaucuucucucugcguguagguaggccugugccgcaaacaagcuuaccaugggccagaucgugaccuucuuucaagaggucccccacguuauugaagaggugaugaacaucgugcugauugcccucagcauccuggcuauucuuaaggggcuguacaauaucgccacaugcggacucaucggccuggucacguuccuucugcucuccgggagaucuuguagcaugaccuauaaaggaguguacgaacugcagacacuggagcucaacaugaauacccugaacaugacaaugccucuuuccugcaccaagaauaacucucaucacuauauuaugguuggcaaugaaacagggcuggagcucacccugacgaacaccagccuucugcaucacaaauuuuguaaucucuccgacgcgcauaagaaaaaccuguacgaucacacacugaugucuaucauuagcaccuuccaccucuccaucccgaauuuuaaccaguaugaggcuaugagcugcgacuucaauggaggcaagauuacagugcaguacaaccugucucauuccuaugccaucgaugccgcuaaucacuguggcaccgucgccaacggggugcuucaaacguuuaugcggauggcuuggggaggcagcuacauugcccuggacucugggugcggaaagugggauugcaucaugacauccuaccaguaucucaucauucagaacaccacaugggaagaccauugucaguucagcagacccucuccuaucggcuaccuggggcuucugucccaacggacccgcgauauuuauaucagcagacggcgccggggaaccuuuacauggacgcuguccgacucugagggcaaugaaacccccggcggguacugccucacacgcuggaugcugauugaggcggagcuuaaauguuucggaaacaccgccguugcuaagugcaaugaaaaacacgaugaggaauuuugugacaugcugagacucuucgauuuuaacaagcaggccauccggcgccugaaagcucccgcccagaugagcauccagcuuauuaauaaggcggugaacgcccugaucaaugaccaacucauuaugaagaaccaccugagagauaucaugugcauuccuuauugcaauuacuccaaauauugguaccugaaccauacaagcaccgggcggacgucucucccccgcugcuggcuggucuccaauggaagcuaccuuaacgaaacacacuucucugacgacaucgagcagcaggcugauaauaugaucaccgagaugcugcaaaaggaauaucucgacagacagggcaaaaccccucuggggcugguggaucuuuucguguuuagcacauccuucuaccucauuucuaucuuucugcaucuggucaagauuccgacccaccggcauaucguuggaaaacccuguccuaagccccaccgccucaaccacaugggcauuugcagcuguggccuguauaaacagccuggggugcccgugagauggaagcggugaggacuagucccuguucccagagcccacuuuuuuuucuuuuuuugaaauaaaauagccugucuuucagaucuaaaaaaaaaaaaaaaaaaaaaaaaaaaaaaaaaaaaaaaaaaaaaaaaaaaaaaaaaaaaaaaaugcaucccccccccccccccccccccccccccccccaaaggcucuuuucagagccaccagaauu

SEQ ID NO: 6609 - RNA, 1771 nt, Artificial Sequence
  mRNA product Design a-2 comprising derived and/or modified sequence from LASV(G1180-SLE-2010;Clade IV)__AIT17168__GPCstabilized (opt5)
gggagaguccgcucagccagguugcagaagcggcuuagcguguguccuaaucuucucucugcguguagguaggccugugccgcaaacaagcuuaccaugggccagaucgugaccuucuuucaagaggucccccacguuauugaagaggugaugaacaucgugcugauugcccucagcauccuggcuguccuuaaggggcuguacaauuucgccacaugcggacucgugggccugcuuacguuucugcuccugugugggagauccugcaccgcgucucgguauaaaggaguuuacgaacugcagacacucgagcugaacauggaaacccuuaauaugacaaugccucugagcuguaccaagaacaauucccaucacuauauuauggugggcaacgagacagggcucgagcugacccuuacgaauaccucuaucaucaaccauaaauucugcaaucugagcgacgcucacaagaaaaaccucuacgaucaugcccugauguccauuaucucuacauuucaccugagcauuccgaauuucaaccaguaugaagccauguccugugacuuuaauggaggcaagaucagcguccaguacaaccucucucacuccuaugcuggcgaugccgcuaaucauugcgggaccguggccaacggaguucugcaaacauucaugcgcauggcguggggcgggagcuacauugcccuugacucuggaugcggcuccugggauuguaucaugaccagcuaccaguaucugauuauccagaacacgacaugggaggaccauugccaguuuucuagacccuccccuaucggguaccucggacugcuuagccaacggacccgcgauauuuauaucuccagacggcgccggggcacauucaccuggacccugucugacagcgaaggcaaggauacacccgggggauacugucugacgcgcuggaugcucauugaggcugagcugaaaugcuuuggcaauaccgccguggcuaaguguaacgaaaaacacgacgaggaguucugcgauaugcuuagacuguuugacuucaauaagcaggccauccagcggcucaaagcgcccgcccagauguccauucaacugaucaacaaggcugucaaugcccuuaucaacgaucagcugauuaugaagaaucaccuccgcgacaucaugugcauuccuuauugcaacuacagcaaauauugguaccugaaucauacaaccacaggaaagaccucucugcccaaauguuggcucguguccaacggcagcuaccugaaugaaacgcacuucucugacgauaucgagcagcaagcugacaacaugauuacagagaugcuucagaaggaauauauggagagacaggggaaaaccccucugggacucguggaucuguuugucuucagcaccuccuuuuaccugaucucuaucuuccuucaucucguuaagauuccgacacaccggcauaucgugggcaaaagcugccccaagccucaccgccugaaucacaugggcauuuguuccugcgggcuguauaagcagcccggagugccugucaaauggaagagaugaggacuagucccuguucccagagcccacuuuuuuuucuuuuuuugaaauaaaauagccugucuuucagaucuaaaaaaaaaaaaaaaaaaaaaaaaaaaaaaaaaaaaaaaaaaaaaaaaaaaaaaaaaaaaaaaaugcaucccccccccccccccccccccccccccccccaaaggcucuuuucagagccaccagaauu

SEQ ID NO: 6610 - RNA, 1771 nt, Artificial Sequence
  mRNA product Design a-2 comprising derived and/or modified sequence from LASV(G1442-SLE-2011;Clade IV)__AIT17180__GPCstabilized (opt5)
gggagaguccgcucagccagguugcagaagcggcuuagcguguguccuaaucuucucucugcguguagguaggccugugccgcaaacaagcuuaccaugggccagaucgugaccuucuuucaagaggucccccacguuauugaagaggugaugaacaucgugcugauugcccucagcauccuggcuguccuuaaggggcuguacaauguggccacaugcggacucauuggccugguuacguuccuucugcucugugggagauccugcaccacaacccuguauaaaggaguguacgaacugcagacacucgagcugaacauggaaacccuuaauaugacaaugccucugucuuguaccaagaacaauagccaucacuauauccgggucggcaacgagacggggcucgagcugacccuuacaaauaccuccaucauuaaccauaaauuuugcaaucugucugacgcgcacaagaaaaaccucuacgaucaugcucugaugagcaucauuuccacauuccaccugucuaucccgaauuuuaaccaguaugaagccaugagcugugacuucaauggaggcaagauuuccgugcaguacaaccucagccacucuuaugccggcgaugcugccaaucauugcgggaccguugcuaacggagugcugcaaacguuuaugcgcauggccuggggcggguccuacaucgcgcuugacagcggaugcggcaacugggauuguauuaugacaucuuaccaguaucugaucauccagaauaccacaugggacgaucacugccaguucucccggcccagcccuauuggguaccucggacugcuuucucaacgcaccagagacgucuauaucucccggcgccgccggggcaccuuuacauggacgcugagcgauuccgagggcaaggacacccccgggggauacugucugacaagauggaugcucauugaagccgagcugaaaugcuucggcaacaccgcuguggccaaguguaaugagaaacaugaugaagaguuuugcgacaugcuucggcuguucgauuuuaacaagcaggcuauccagcgccucaaagcccccgcgcagaugucuauucaacugaucaauaaggccgugaacgcucuuaucaaugaccagcugauuaugaagaaccaccucagagacaucaugugcauuccuuauugcaauuacagcaaauauugguaccugaacaauacagccaccggaaagacgucccugcccaaauguuggcucaucagcaacggcucuuaccugaaugagacacacuucuccgaugacauugaacaggaggcugauaacaugaucaccgagaugcuucaaaaggaauauauggagcggcaggggaaaaccccucugggacucgucgaccuguucguuuuuagcacaucuuucuaccugaucagcauuuuucuucaucucgugaagaucccgacccaccgccauauugugggcaaauccugccccaagccucacagacugaaucauaugggcaucuguucuugcgggcuguauaagcagcccggagucccugugcgguggaaacgcugaggacuagucccuguucccagagcccacuuuuuuuucuuuuuuugaaauaaaauagccugucuuucagaucuaaaaaaaaaaaaaaaaaaaaaaaaaaaaaaaaaaaaaaaaaaaaaaaaaaaaaaaaaaaaaaaaugcaucccccccccccccccccccccccccccccccaaaggcucuuuucagagccaccagaauu

SEQ ID NO: 6611 - RNA, 1771 nt, Artificial Sequence
  mRNA product Design a-2 comprising derived and/or modified sequence from LASV(G3010-SLE-2013;Clade IV)__AIT17344__GPCstabilized (opt5)
gggagaguccgcucagccagguugcagaagcggcuuagcguguguccuaaucuucucucugcguguagguaggccugugccgcaaacaagcuuaccaugggccagaucgugaccuucuuucaagaggucccccacguuauugaagaggugaugaacaucgugcugauugcccucagcauccuggcuguccuuaaggggcuguacaauuucgccacaugcggacucgugggccugguuacguuucuucugcucugugggagauccugcaccacaucucuguauaaaggaguguacgaacugcagacccucgagcugaacauggaaacacuuaauaugaccaugccucugagcuguacaaagaacaauucccaucacuauauuauggucggcaacgagaccgggcucgagcugacgcuuaccaauacaucuaucaucaaccauaaauucugcaaucugagcgacgcgcacaagaaaaaccucuacaaucaugcucugauguccauuaucucuaccuuucaccugagcauuccgaacuucaaucaguaugaagccauguccugugauuuuaacggaggcaagaucagcgugcaguacaaucucucucacuccuaugccggcgacgcugccagccauugcgggacaguugcuaacggagugcugcaaaccuucaugcggauggccuggggcgggucuuacauugcgcuugauuccggaugcggcaagugggacuguaucaugacgagcuaucaguaccugauuauccagaacacaaccugggaggaucacugccaguuuucucgccccuccccuaucggguaucucggacugcuuagccaaagaacacgggacauuuacaucucccgcagacgccggggcaccuucaccuggacacugucugauagcgaaggcaaagacacgcccgggggauauugucugacccgguggaugcucauugaggccgagcugaagugcuuuggcaauacagcugucgccaaauguaacgaaaagcaugaugaggaguucugcgacaugcuucgccuguuugauuucaauaaacaggcuauccagagacucaagacccccgcccagauguccauucaacugaucaacaaggcggugaaugcccuuaucaacgaccagcugauuaugaaaaaucaccuccgggauaucaugugcauuccuuacugcaacuauagcaaguacugguaccugaaucacacaaccacgggaaaaacaucucugcccaaguguuggcucguguccaacggcagcuaucugaaugaaacccauuucucugacgacaucgagcagcaagcugauaacaugauuaccgagaugcuucagaaagaauacauggagcgccaggggaagacaccucugggacucgucgaccuguuuguuuucagcaccuccuuuuaucugaucucuaucuuccuucaccucgugaaaauuccgacacauagacacaucgugggcaagagcugccccaagccucaucggcugaaucacaugggcauuuguuccugcgggcuguacaaacagcccggagucccugugcgcuggaagagaugaggacuagucccuguucccagagcccacuuuuuuuucuuuuuuugaaauaaaauagccugucuuucagaucuaaaaaaaaaaaaaaaaaaaaaaaaaaaaaaaaaaaaaaaaaaaaaaaaaaaaaaaaaaaaaaaaugcaucccccccccccccccccccccccccccccccaaaggcucuuuucagagccaccagaauu

SEQ ID NO: 6612 - RNA, 1771 nt, Artificial Sequence
  mRNA product Design a-2 comprising derived and/or modified sequence from LASV(G502-SLE-2009;Clade IV)__AIT17126__GPCstabilized (opt5)
gggagaguccgcucagccagguugcagaagcggcuuagcguguguccuaaucuucucucugcguguagguaggccugugccgcaaacaagcuuaccaugggccagaucgugaccuucuuucaagaggucccccacguuauugaagaggugaugaacaucgugcugauugcccucagcauccuggcuguccuuaaggggcuguacaauuucgccacaugcggacucgugggccugcuuacguuucugcuccugugugggagauccugcaccacaggacuguauaaaggcguuuacgaacuccagacccuggagcuuaacauggaaacacugaauaugaccaugccucucucuuguacaaagaacaauagccaucacuauauuaugguggggaacgagaccggacuggagcuuacgcugaccaauacauccaucaucaaccauaaauucugcaaucucucugacgcgcacaagaaaaaccuguacgaucaugcucugaugagcauuaucuccaccuuucaccucucuauuccgaauuucaaccaguaugaagccaugagcugugacuuuaauggcggcaagaucuccguccaguacaaccugagccacucuuaugccggggaugcugccgaccauugcggaacaguggcuaauggcguucuucaaaccuucaugcggauggccuggggaggguccuacauugcgcuggauagcggcugcgggagaugggacuguaucaugacgucuuaccaguaucucauuauccagaacacaaccugggaggaucacugccaguuuucccggcccagcccuaucggauaccugggccuucugucucaacgcacaagagacauuuauaucucccggcgccgccggggcaccuucaccuggacacugagcgauuccgaagggaaggacacgcccggaggcuacugucucaccagauggaugcugauugaggccgagcuuaaaugcuuugggaacacagcuguggccaaguguaaugaaaaacaugaugaggaguucugcgacaugcugcggcucuuugauuucaacaagcaggcuauccagcgccugaaagcccccgcgcagaugucuauucaacuuaucaauaaggccgucaacgcucugaucaaugaccagcucgugaugaagaaccaccugagagacauuaugugcaucccuuauugcaauuacagccgguauugguaccugaaccacaccacaaccggccgcacgucccuccccaaauguuggcuggugagcaaugggucuuaccuuaacgaaacacauuucuccgaugacauugagcagcaagccgauaauaugaucaccgagaugcugcagaaggaauauauggagagacagggaaaaaccccucucggccuggucgaccuguuuguuuucagcacaucuuuuuaccuuauuagcaucuuccuccaccuggugaagaucccgacccaucggcacauugugggcaaauccugccccaagccucaucgccugaaccacauggggaucuguucuugcggacucuauaaacagcccggcgucccugugaaguggaagagaugaggacuagucccuguucccagagcccacuuuuuuuucuuuuuuugaaauaaaauagccugucuuucagaucuaaaaaaaaaaaaaaaaaaaaaaaaaaaaaaaaaaaaaaaaaaaaaaaaaaaaaaaaaaaaaaaaugcaucccccccccccccccccccccccccccccccaaaggcucuuuucagagccaccagaauu

SEQ ID NO: 6613 - RNA, 1771 nt, Artificial Sequence
  mRNA product Design a-2 comprising derived and/or modified sequence from LASV(G733-SLE-2010;Clade IV)__AIT17154__GPCstabilized (opt5)
gggagaguccgcucagccagguugcagaagcggcuuagcguguguccuaaucuucucucugcguguagguaggccugugccgcaaacaagcuuaccaugggccagaucgugaccuucuuucaagaggucccccacguuauugaagaggugaugaacaucgugcugauugcccucagcauccuggcuguccuuaaggggcuguacaauuucgccacaugcggaauugugggccucguuuccuuucugcuucugugugggagaucuugcacgaccagccucuauaaaggaguguacgaacugcagacacuggagcucaacauggaaacccugaauaugacaaugccucuuuccuguaccaagaacaauucucaucacuauaucauggucggcaacgagacagggcuggagcucacccugacgaauaccagcaucauuaaccauaaauucugcaaucuuuccgacgcgcacaagaaaaaccuguacgaucaugcucucaugucuaucauuagcacauuucaccuguccaucccgaauuucaaccaguaugaagccaugagcugugacuuuaauggaggcaagauuucugugcaguacaaccugucccacagcuaugccggcgaugcugccaaucauugcgggaccaucgcuaacggaguucuccaaacauucaugcggauggccuggggcgggucuuacauugcgcuggacuccggaugcgauagaugggacuguaucaugaccagcuaccaguaucuuaucauucagaacacgacaugggaggaucacugccaguuuucucggcccuccccuaucggcuaccuggggcuccugagccaacgcaccagagacauuuauaucucccggcgccgccggggaacauucaccuggacccucucugauagcgaaggcaaggacacacccggcggguacugucugacgagauggaugcugauugaggccgagcucaaaugcuuuggaaauaccgcuguggccaaguguaacgaaaaacaugaugaggaguucugcgacaugcugcggcuuuuugauuucaauaagcaggcuauccagcgccugaaagcccccgcgcagauguccauccaacucauuaacaaggccgucaaugcucugaucaacgaccagcuuauuaugaagaaucaccugagagacaucaugugcauuccuuauugcaacuacagcaaauauugguaccucaaucacacaaccacagggaagaccucucugcccaaauguuggcugguguccaacggaagcuaccucaaugaaacgcauuucucugaugacaucgagcagcaagccgauaacaugaucacagagaugcugcagaaggaauauauggagcggcagggcaaaaccccucuugggcugguggaccucuuugucuucagcaccuccuuuuaccugauuucuaucuuccugcaccuuguuaagauuccgacacaucgccacguggugggaaaaagcugccccaagccucauagacucaaucacaugggcaucuguuccugcggccuguaugggcagcccggagucccugugaaguggaaacggugaggacuagucccuguucccagagcccacuuuuuuuucuuuuuuugaaauaaaauagccugucuuucagaucuaaaaaaaaaaaaaaaaaaaaaaaaaaaaaaaaaaaaaaaaaaaaaaaaaaaaaaaaaaaaaaaaugcaucccccccccccccccccccccccccccccccaaaggcucuuuucagagccaccagaauu

SEQ ID NO: 6614 - RNA, 1771 nt, Artificial Sequence
  mRNA product Design a-2 comprising derived and/or modified sequence from MOPV/LASV reassortant(IGS-1;Clade IV)__AFY05576__GPCstabilized (opt5)
gggagaguccgcucagccagguugcagaagcggcuuagcguguguccuaaucuucucucugcguguagguaggccugugccgcaaacaagcuuaccaugggccagaucgugaccuucuuucaagaggucccccacguuauugaagaggugaugaacaucgugcugauugcccucagcguccuggcugugcuuaaggggcuguacaauuucgccacaugcggacucguuggccuggugacguuucuucugcucugugggagauccugcaccacaucucuguauaaaggagucuacgaacugcagacccucgagcugaacauggaaacacuuaauaugaccaugccucugagcuguacaaagaacaauucccaucacuauaucauggugggcaacgagaccgggcucgagcugacgcuuaccaauacaucuauuaucaaccauaaauucugcaaucugagcgacgcgcacaagaaaaaccucuacgaucaugcucugauguccaucauuucuaccuuucaccugagcaucccgaauuucaaccaguaugaagccauguccugugacuuuaauggaggcaagauuagcguucaguacaaccucucucacuccuaugccggcgaugcugccaaucauugcgggacaguggcuaacggaguccugcaaaccuucaugcggauggccuggggcgggagcuacaucgcgcuugacucuggaugcggcaacugggauuguauuaugacguccuaccaguaucugaucauucagaauacaaccugggaggaccacugccaguuuagcagacccucuccuaucggguaccucggacugcuuucccaacggacacgcgauaucuauauuagcagacggcgccggggcaccuucaccuggacacuguccgacucugaaggcgaggauacgcccgggggauacugucugacccgcuggaugcucaucgaggccgaacugaagugcuuuggcaacacagcuguggccaaauguaaugagaagcaugacgaagaguucugcgauaugcuuagacuguuugacuucaacaaacaggcuauucagcggcucaaggcccccgcgcagaugagcauccaacugauuaauaaagccgugaacgcucuuaucaaugaucagcugaucaugaagaaccaccuccgcgacauuaugugcaucccuuauugcaauuacuccaaguauugguaccugaaccacaccacaaccggaagaacgagccugcccaaauguuggcucgucucuaauggcuccuaccugaacgagacacauuucagcgacgauauugagcagcaagccgacaauaugaucaccgaaaugcuucagaaggaguauauggaacggcaggggaaaaccccucugggacucguugaucuguuuguguucucuaccagcuuuuaccugauuuccaucuuccuucaccucgugaagaucccgacacaucgccacauugucggcaaaucuugccccaagccucauagacugaaccacaugggcaucuguagcugcgggcuguauaaacagcccggagugccuguuaaguggaagcggugaggacuagucccuguucccagagcccacuuuuuuuucuuuuuuugaaauaaaauagccugucuuucagaucuaaaaaaaaaaaaaaaaaaaaaaaaaaaaaaaaaaaaaaaaaaaaaaaaaaaaaaaaaaaaaaaaugcaucccccccccccccccccccccccccccccccaaaggcucuuuucagagccaccagaauu

SEQ ID NO: 6615 - RNA, 1771 nt, Artificial Sequence
  mRNA product Design a-2 comprising derived and/or modified sequence from LASV(LM765-SLE-2012;Clade IV)__AIT17814__GPCstabilized (opt5)
gggagaguccgcucagccagguugcagaagcggcuuagcguguguccuaaucuucucucugcguguagguaggccugugccgcaaacaagcuuaccaugggccagaucgugaccuucuuucaagaggucccccacguuauugaagaggugaugaacaucgugcugauugcccucagcauccuggcuguccuuaaggggcuguacaauuucgccacaugcggacucgugggccugguuacguuucuucugcucugugggagauccugcaccacaucucuguauaaaggaguguacgaacugcagacccucgagcugaacauggaaacacuuaauaugaccaugccucugagcuguacaaagaacaauucccaucacuauauuauggucggcaacgagaccgggcucgagcugacgcuuaccaauacaucuaucaucgaccauaaauucugcaaccugagcgaugcgcaccggaagaaucucuacgaccaugcucugauguccauuaucucuaccuuucaccugagcauuccgaacuucaaucaguaugaagccauguccugugauuuuaacggaggcaaaaucagcgugcaguacaaucucucucacuccuaugccaaggacgcugccgaucauugcggcacaguugcuaacggggugcugcaaaccuucaugcgcauggccuggggaggcagcuacauugcgcuugacucugggugcggacggugggauuguaucaugacguccuaccaguaucugauuauccagaauacaaccugggaggaccacugccaguuuagccgccccucuccuaucggcuaccucgggcugcuuucccaaagaacacgggauauuuauaucagccgcagacgccggggaaccuucaccuggacacuguccgacucugaaggcaaggauacgcccggcggguacugucugacccgguggaugcucauugaggccgagcugaaaugcuuuggaaacacagcugucgccaaguguaacgaaaaacaugacgaggaguucugcgauaugcuucgccuguuugacuucaauaagcaggcuauccagagacucaaagcccccgcgcagaugagcauucaacugaucaacaaggccgugaaugcucuuaucaacgaccagcugauuaugaagaaucaccuccgggauaucaugugcauuccuuauugcaacuacuccaaauauugguaccugaaucacaccacaaccgggaagacgagccugcccaaauguuggcucgugucuaacggauccuaccugaaugaaacacauuucagcgacgauaucgagcagcaagccgacaacaugauuaccgagaugcuucagaaggaauauauggagcgccagggcaaaaccccucuggggcucgucgaucuguuuguuuucucuaccagcuuuuaccugaucuccaucuuccuucaccucgugaagauuccgacacauagacacaucgugggaaaacccugcccuaagccccaucggcugaaucacaugggcauuuguucuugcggccuguauaagcagccugggguccccgugaaauggaagcgcugaggacuagucccuguucccagagcccacuuuuuuuucuuuuuuugaaauaaaauagccugucuuucagaucuaaaaaaaaaaaaaaaaaaaaaaaaaaaaaaaaaaaaaaaaaaaaaaaaaaaaaaaaaaaaaaaaugcaucccccccccccccccccccccccccccccccaaaggcucuuuucagagccaccagaauu

SEQ ID NO: 6616 - RNA, 1771 nt, Artificial Sequence
  mRNA product Design a-2 comprising derived and/or modified sequence from LASV(LM776-SLE-2012;Clade IV)__AIT17824__GPCstabilized (opt5)
gggagaguccgcucagccagguugcagaagcggcuuagcguguguccuaaucuucucucugcguguagguaggccugugccgcaaacaagcuuaccaugggccagaucgugaccuucuuucaagaggucccccacguuauugaagaggugaugaacaucgugcugauugcccucagcauccuggcuguccuuaaggggcuguacaauuucgccacaugcggacucgugggccugguuacguuucuucugcucugugggagauccugcaccacaucuguguauaaaggagucuacgaacugcagacccuggagcucaacauggaaacacugaauaugaccaugccucuuagcuguacaaagaacaauucccaucacuauauuauggugggcaacgagaccgggcuggagcucacgcugaccaauacaucuaucaucaaccauaaauucugcaaucuuagcgacgcgcacaagaaaaaccuguacgaucaugcucucauguccauuaucucuaccuuucaccugagcauuccgaauuucaaccaguaugaagccauguccugugacuuuaauggaggcaagaucagcguucaguacaaccugucucacuccuaugccggcgaugcugccaaucauugcgggacaguggcuaacggaguccuccaaaccuucaugcggauggccuggggcgggagcuacauugcgcuggacucuggaugcggcaagugggauuguaucaugacguccuaccaguaucuuauuauccagaacacaaccugggaggaccauugccaguuuagccgccccucuccuaucggguaccugggacuccugucccaaagaacacgggauauuuauaucagccgcagacgccggggcaccuucaccuggacacucuccgacucugaaggcaaagauacgcccgggggauacugucugacccgguggaugcugauugaggccgagcucaagugcuuuggcaauacagcuguggccaaauguaacgaaaagcacgacgaggaguucugcgauaugcugcgccuuuuugacuucaauaaacaggcuauccagagacugaaggcccccgcgcagaugagcauucaacucaucaacaaggccgugaaugcucugaucaacgaucagcuuauuaugaaaaaucaucugcgggacaucaugugcauuccuuauugcaacuacuccaaguauugguaccucaaucacaccacaaccggaaaaacgagccugcccaaguguuggcuggucucuaacggcuccuaccucaaugaaacacacuucagcgacgauaucgagcagcaagccgacaacaugauuaccgagaugcugcagaaagaauauauggagcgccaggggaagaccccucuuggacugguugaucucuuuguguucucuaccagcuuuuaccugaucuccaucuuccugcaucuugugaaaauuccgacacacagacauaucgucggcaagucuugccccaagccucaccggcucaaucacaugggcauuuguagcugcgggcuguauaaacagcccggagugccuguucgcuggaagagaugaggacuagucccuguucccagagcccacuuuuuuuucuuuuuuugaaauaaaauagccugucuuucagaucuaaaaaaaaaaaaaaaaaaaaaaaaaaaaaaaaaaaaaaaaaaaaaaaaaaaaaaaaaaaaaaaaugcaucccccccccccccccccccccccccccccccaaaggcucuuuucagagccaccagaauu

SEQ ID NO: 6617 - RNA, 1771 nt, Artificial Sequence
  mRNA product Design a-2 comprising derived and/or modified sequence from LASV(Mad39;Clade IV)__ANH09722__GPCstabilized (opt5)
gggagaguccgcucagccagguugcagaagcggcuuagcguguguccuaaucuucucucugcguguagguaggccugugccgcaaacaagcuuaccaugggccagaucgugaccuucuuucaagaggucccccacguuauugaagaggugaugaacaucgugcugauugcccucagcauccuggcuguccuuaaggggcuguacaauguggccacaugcggacucauuggccugguuacguuccuucugcucugugggagauccugcaccacaacccuguauaaaggaguguacgaacugcaggcgcucgagcugaacauggaaacacuuaauaugaccaugccucugucuuguacaaagaacaauagccaucacuauauccgggucggcaacgagaccgggcucgagcugacgcuuaccaauacaucccugaucaaccauaaauuuugcaaucucucugacgcucacaagaaaaaccuguacgaucaugcccugaugagcauuaucuccaccuuccaccucucuauuccgaauuuuaaccaguaugaagccaugagcugugacuucaaugauggaaagaucuccgugcaguacaaccugagccacacauaugcuggcgacaccgccaaucauugcggcacgguugcuaacggggugcuucaaacauuuaugcgcauggccuggggaggcucuuacauugcgcuggauuccgggugcggaggcugggacuguaucaugaccagcuaccaguaucucauuauccagaacacaaccugggaggaucacugccaguucucucggcccuccccuaucggguaccugggacuucugagccaacgcaccagagacauuuauaucucucggcgccgccggggcacauuuacguggacccuguccgauagcgaaggcaaggacacacccgggggauacugucucaccagauggaugcugauugaggccgagcuuaaaugcuucggcaauacagcugucgccaaguguaacgaaaaacaugaugaggaauuuugcgacaugcugcgccucuucgauuuuaauaagcaggcuauccagcggcugaaagcccccgcgcagauguccauucaacuuaucaacaaggccgugaaugcucugaucaacgaccagcucauuaugaagaaucaccugagagacaucaugugcauuccuuauugcaacuacucuaaauauugguaccugaaucacaccgugacgggaaagacaagccuccccaaauguuggcuggucuccaacggcagcuaccuuaaugaaacccauuucucugaugacaucgagcagcaagccgauaacaugauuaccgagaugcugcagaaggaauauauggagcggcaggggaaaacaccucucggacugguugaccuguucguguuuuccaccagcuucuaccuuaucucuaucuuucuccaccuggugaagauuccgacacaucgccacgucgugggcaaacccugcccuaagccccauagacugaaucacaugggcaucuguagcugcggguucuauaagcagccuggaguucccgugcgguggaaacgcugaggacuagucccuguucccagagcccacuuuuuuuucuuuuuuugaaauaaaauagccugucuuucagaucuaaaaaaaaaaaaaaaaaaaaaaaaaaaaaaaaaaaaaaaaaaaaaaaaaaaaaaaaaaaaaaaaugcaucccccccccccccccccccccccccccccccaaaggcucuuuucagagccaccagaauu

SEQ ID NO: 6618 - RNA, 1771 nt, Artificial Sequence
  mRNA product Design a-2 comprising derived and/or modified sequence from LASV(Z0947-SLE-2011;Clade IV)__AIT17840__GPCstabilized (opt5)
gggagaguccgcucagccagguugcagaagcggcuuagcguguguccuaaucuucucucugcguguagguaggccugugccgcaaacaagcuuaccaugggccagaucgugaccuucuuucaagaggucccccacguuauugaagaggugaugaacaucgugcugauugcccucagcauccuggcuguccuuaaggggcuguacaauuucgccacaugcggacucgugggccugguuacguuucuucugcucugugggagauccugcaccauuucucuguauaaaggaguguacgaacugcagacacucgagcugaacauggaaacccuuaauaugacaaugccucugagcuguaccaagaacaauucccaucacuauaucauggucggcaacgagacagggcucgagcugacccuuacgaauaccucuaucauuaaccauaaauucugcaaucugagcgacgcgcacaagaaaaaccucuacgaucaugcucugauguccaucauuucuacauuucaccugagcaucccgaauuucaaccaguaugaagccauguccugugacuuuaauggaggcaagauuagcgugcaguacaaccucucucacuccuaugccggcgaugcugccaaucauugcgggaccguugcuaacggagugcugcaaacauucaugcggauggccuggggcgggagcuacaucgcgcuugacucuggaugcgauagaugggacuguauuaugaccuccuaccaguaucugaucauccagaacacgacaugggaggaucacugccaguuuagccggcccucuccuauuggcuaccucgggcugcuuucccaacgcaccagagacaucuauauuagccggcgccgccggggaacauucaccuggacccuguccgauucugaaggcaaggacacacccggcggguacugucugacgagauggaugcucaucgaggccgagcugaaaugcuuuggaaauaccgcugucgccaaguguaacgaaaaacaugaugaggaguucugcgacaugcuucggcuguuugauuucaauaagcaggcuauucagcgccucaaagcccccgcgcagaugagcauccaacugaucaacaaggccgugaaugcucuuauuaacgaccagcugaucaugaagaaucaccucagagacauuaugugcaucccuuauugcaacuacuccaaauauugguaccugaaucacacaaccacagggaagaccagccugcccaaauguuggcucgugucuaacggauccuaccugaaugaaacgcauuucagcgaugacauugagcagcaagccgauaacaugaucacagagaugcuucagaaggaauauauggagcggcagggcaaaaccccucuggggcucgucgaccuguuuguuuucucuaccagcuuuuaccugaucuccauuuuccuucaccucgugaagaucccgacacaucgccacauugugggaaaacccugcccuaagccccauagacugaaucacaugggcaucuguucuugcggccuguauaagcagccugggguccccgugaaauggaagcggugaggacuagucccuguucccagagcccacuuuuuuuucuuuuuuugaaauaaaauagccugucuuucagaucuaaaaaaaaaaaaaaaaaaaaaaaaaaaaaaaaaaaaaaaaaaaaaaaaaaaaaaaaaaaaaaaaugcaucccccccccccccccccccccccccccccccaaaggcucuuuucagagccaccagaauu

SEQ ID NO: 6619 - RNA, 1771 nt, Artificial Sequence
  mRNA product Design a-2 comprising derived and/or modified sequence from LASV(Josiah;Clade IV)__NP_694870__GPCstabilized (opt6)
gggagaguccgcucagccagguugcagaagcggcuuagcguguguccuaaucuucucucugcguguagguaggccugugccgcaaacaagcuuaccaugggacaaaucguuacauucuuucaagaaguaccccacguaauagaagaagucaugaacauaguacuaauagcacuaucaguucucgcaguacuaaaaggucuauauaauuuugcuacauguggcuuagucggccuaguaaccuuccuacuccuaugcggaagaucaugcaccacuucacucuacaaaggaguauacgaauuacaaacccuagaacuaaacauggaaacacuaaauaugacaaugccacuuucauguaccaaaaacaacagccaccacuauauaaugguaggaaaugaaacaggacuugaauuaacauuaaccaacacaucuauaaucaaucauaaauucugcaaccuaucagaugcacauaagaaaaauuuauacgaucacgcauuaaugucaauaauauccacauuccaccuaucaauaccaaacuuuaaucaauacgaagcaaugucuugcgauuucaacggaggaaaaauaucaguacaauacaaccuuucacacucuuaugcuggagacgcagcaaaucacuguggaacagucgcaaacggagucuuacaaacauuuaugagaauggcauggggaggaucuuacauagcacuagauucaggaugcggaaacugggacugcauaaugacaucauaccaauauuuaaucauacaaaacacaacaugggaagaccacugccaauucucaagaccaucaccuauaggauaccuaggacuuuuaucacaaagaacacgcgacauuuacauauccagaagaagaagaggcacuuucaccuggacacuaucagacucagaaggcaaagacacaccaggaggauacugcuuaacgagauggaugcuaauagaagcagaacuaaaaugcuucggcaacacagcaguagcaaaauguaacgaaaaacaugaugaagaauuuugcgacaugcucagacuauucgauuucaacaaacaagccauacaaagacuaaaagcuccugcacaaaugucaauacaacuaauaaauaaagcaguaaacgcacuaauaaacgaucaacuaauaaugaaaaaccaccuaagagacauaauguguaucccauacugcaacuauucaaaauacugguaccuaaaccacaccacaacaggaagaacaagccuaccaaaaugcuggcuaguaucaaacggaucauauuuaaaugaaacccacuucuccgaugauauagaacaacaagcagauaacaugauaacagaaaugcuacaaaaagaauacauggaacgacaaggaaaaacaccucugggccuaguagaccuauucguauucuccacaucauucuaccuaauauccauauucuuacaccuagucaaaauaccaacacacagacacauaguaggaaaauccugcccaaaaccccauagacucaaucauaugggaauaugcuccuguggacuauacaaacaaccgggaguaccaguaaaauggaaaagauaaggacuagucccuguucccagagcccacuuuuuuuucuuuuuuugaaauaaaauagccugucuuucagaucuaaaaaaaaaaaaaaaaaaaaaaaaaaaaaaaaaaaaaaaaaaaaaaaaaaaaaaaaaaaaaaaaugcaucccccccccccccccccccccccccccccccaaaggcucuuuucagagccaccagaauu

SEQ ID NO: 6620 - RNA, 1768 nt, Artificial Sequence
  mRNA product Design a-2 comprising derived and/or modified sequence from LASV(LP;Clade I)__AAF86701__GPCstabilized (opt6)
gggagaguccgcucagccagguugcagaagcggcuuagcguguguccuaaucuucucucugcguguagguaggccugugccgcaaacaagcuuaccaugggacagauaauaacuuucuuccaagaaguaccucacguaauagaagaaguaaugaacauaguauuaauugcacucucacuacucgccauacuaaaaggacuauacaauauugcuaccugcgguauaauuggauuaguagcauucuuauuccuaugcggaaaaucaugcucacuaacauuaaaaggaggauacgaacuacaaacacuagaacuaaauauggaaacacuaaauaugacaaugccacuaucauguacuaaaaacucaucacaccacuacauuagaguaggcaacgaaacgggacuagaauuaacccuuacgaauacaucuauaauaaaucauaaauuuugcaacuuaucagacgcacacaagaaaaaucuauacgaccacgcccuaaugucaauuauuucaacguuccaccuauccauaccaaacuucaaccaauacgaagcaaugucaugugacuucaaugguggcaaaaucuccguacaauacaauuuaucacacuccuacgcaggagaugcagcagaacauugcggcacaguagccaacggaguacuacaaacauuuaugagaauggcauggggcggcagauacauagcauuagauucaggaugcggcaauugggacugcauaaugacuucauaccaauaccuaauaauacaaaacacaacaugggaagaccacugucaauucucaagaccauccccaauaggauaccuaggacugcuuucccaaagaacaagagauauauauauaucacgacgaagacguggaacauucacauggacauuaucagacucagaaggaaacgaaacaccaggaggcuacugucuaacaagauggaugcuuauagaagcagaacuaaaaugcuucggaaauacagccguagcuaaaugcaacgaaaaacacgaugaagaauuuugcgacauguuaagacuuuucgacuucaauaaacaggcuauccgaagacuaaaagcucccgcacaaaugucaauccaacuaauaaacaaagccguaaacgcacuaauaaacgaccaacuaaucaugaaaaaccacuuaagagauauaaugugcauaccauauugcaauuacucuaaauacugguaccucaaucacacaucaucaggacgaacaucauuaccaaaauguuggcuaaucaguaacggaucauaccuuaaugaaacccaauuuucagacgacauagaacaacaagccgauaacaugaucacagaaaugcuacaaaaagaauauauagaacgacaaggaaaaaccccacucggucuaguagacauauucaucuuuucaacaucauucuaccuaauuuccauuuuccuacaccuaaucaaaauaccuacacaccgacacauaguaggaaaaccauguccaaaaccacauagacuaaaccacaugggaguaugcucaugcggauuauacaaacacccuggaguaccaacaaaauggaaaagauaaggacuagucccuguucccagagcccacuuuuuuuucuuuuuuugaaauaaaauagccugucuuucagaucuaaaaaaaaaaaaaaaaaaaaaaaaaaaaaaaaaaaaaaaaaaaaaaaaaaaaaaaaaaaaaaaaugcaucccccccccccccccccccccccccccccccaaaggcucuuuucagagccaccagaauu

SEQ ID NO: 6621 - RNA, 1768 nt, Artificial Sequence
  mRNA product Design a-2 comprising derived and/or modified sequence from LASV(803213;Clade II)__AAF86703__GPCstabilized (opt6)
gggagaguccgcucagccagguugcagaagcggcuuagcguguguccuaaucuucucucugcguguagguaggccugugccgcaaacaagcuuaccaugggacaaauaauaacauucuuucaagaagucccacacguaauugaagaaguuaugaauauaguacuaaucgcacuaucgcuauuagcaauacuaaaaggaaucuacaacguagcaacaugcggacuauuuggacucauauccuuucugcuauuaugcggcagauccugcucagucaccuauaaaggaguauaugaacuacaaacacuagaacuaaauauggcuaaucuuaauaugacaaugccacuaucaugcacaaaaaacaacucucaccacuauauaaugguaggaaaugaaaccggacuagagcuuacacuaacaaauaccuccauaauaaaccacaaauuuuguaacuuaucagacgcacacaaaaaaaacuuauacgaccacgcacuaaugucuauaauuagcacauuucacuuauccauaccuaacuuuaaccaauaugaagcaaugucaugcgauuuuaacggcggcaaaaucagcguacaauacaacuuaucccauucauuugccguagaugcagcuaaccacugcggaacaaucgcaaauggcguacuacaaacauucaugagaauggcauggggaggaucuuacauugcacuugauucagguugcggaaauugggacuguaucaugacaucauaucaauaucuaauaauacaaaacaccacaugggaagaccacugccaauucucaagaccaucaccaaucggauaccuaggacuauuaucacaaagaacaagagauauauacauaucaagaagacgaagaggaaccuuuaccuggacauuaucagauucagaaggaaacgaagcccccggaggauacugucucacaagauggaugcuuauagaagcagaacuaaaaugcuuuggaaauaccgccguagcaaaaugcaacgaaaaacacgaugaagaauucugugacaugcuacgacuauucgacuucaacaaacaagcuauaaaaagacuaaaaacaccagcacaaaugucaauccaacuaaucaauaaagcaguaaacgcacuaauaaacgaucaacucauaaugaaaaaccaccuaagagauauaauguguaucccauacuguaacuacuccagauacugguaccuaaaucacacaguaacaggaaaaacaucacuaccacgaugcuggcuaguaucuaacggaaguuacuuaaacgaaacacacuucucugacgauauagaacaacaagcagacaacaugauuacugaaaugcuacaaaaagaauacauggacagacaaggaaaaacaccauuaggacuaguagacuuauucguauucuccaccuccuucuaucuaauauccauauuccuccacuuaguaaaaauacccacacauagacacaucgucggaaaaccauguccaaaaccucaccgccucaaccacaugggaauauguuccugcggauuauacaaacaucccggcguaccagucaaauggaaaagauaaggacuagucccuguucccagagcccacuuuuuuuucuuuuuuugaaauaaaauagccugucuuucagaucuaaaaaaaaaaaaaaaaaaaaaaaaaaaaaaaaaaaaaaaaaaaaaaaaaaaaaaaaaaaaaaaaugcaucccccccccccccccccccccccccccccccaaaggcucuuuucagagccaccagaauu

SEQ ID NO: 6622 - RNA, 1768 nt, Artificial Sequence
  mRNA product Design a-2 comprising derived and/or modified sequence from LASV(GA391;Clade III)__CAA36645__GPCstabilized (opt6)
gggagaguccgcucagccagguugcagaagcggcuuagcguguguccuaaucuucucucugcguguagguaggccugugccgcaaacaagcuuaccaugggccaaauaguaacauuuuuccaagaaguaccacacguaauagaagaaguaaugaauaucguccuaauagcacucagcauauuagcaauauuaaaaggacuauauaaugucgcaacauguggacuaauaggucuagucacauuucucuuacuaucaggaagauccugcucccucauauacaaaggaacuuacgaauuacaaacucuagaauuaaacauggaaacacuaaacaugacaaugccacuaucauguaccaaaaacaauucacaccacuacauacgaguaggcaacgaaacaggccuagaauuaacauuaacaaacacaucuauacuaaaccauaaauuuuguaaccuauccgacgcacacaaaaggaaucuauacgaccauucacuaaugagcauaauaucuaccuuccaucuuucuauuccaaacuucaaccaauacgaagccaugucaugcgacuucaacggcggaaaaauaacaguacaauacaacuuaucacacucauucgcaguagaugcagcaggacacugcggaacacuagccaacggaguauuacaaacauucaugagaauggcauggggaggaucuuacauagcacuagacucuggaugcgguaacugggacugcauuaugacaucauaucaauaucuaauaauacaaaauacaacuugggacgaucauugccaauucucacguccaucacccauaggcuauuuaggucuacuaucacaaagaacaagagacauauacauuucgagacgaagaagagguacauucacauggaccuuaucagacucagaagguaacgaaaccccuggaggauacugccuaacaagauggauguuaauagaagccgaacuaaaaugcuucggaaauacagcaguagcaaaauguaacgaaaaacaugacgaagaauuuugcgacaugcuacgacucuucgauuucaacaaacaagcaauaagaagacuaaaaacacccgcacaaauguccauacaacucauaaacaaagcaguaaacgcacucauaaacgaccaacuaauaaugaaaaaucaccuccgagacauaauguguauucccuacugcaacuacucaagauacugguaccuaaaucacacaucaacaggaaaaacuucacuaccaagaugcuggcuuauaucuaacggaucauaccuaaacgaaacaaaauuuagcgacgauauagaacaacaagcagacaacaugauaacagaaauguuacaaaaagaauacauagaucgacaaggaaaaacuccucuaggucuaguagaccuauucguauucucuacaucauucuauuuaauaagcauauuccuacauuuaguaaaaauacccacacaccgccauauaguaggaaaaccauguccaaaaccccacagauuaaaccacauggguauauguucauguggauuauauaaacaaccaggagucccagucagauggaaaagauaaggacuagucccuguucccagagcccacuuuuuuuucuuuuuuugaaauaaaauagccugucuuucagaucuaaaaaaaaaaaaaaaaaaaaaaaaaaaaaaaaaaaaaaaaaaaaaaaaaaaaaaaaaaaaaaaaugcaucccccccccccccccccccccccccccccccaaaggcucuuuucagagccaccagaauu

SEQ ID NO: 6623 - RNA, 1771 nt, Artificial Sequence
  mRNA product Design a-2 comprising derived and/or modified sequence from LASV(AV;Clade V)__CCA30314__GPCstabilized (opt6)
gggagaguccgcucagccagguugcagaagcggcuuagcguguguccuaaucuucucucugcguguagguaggccugugccgcaaacaagcuuaccauggggcaaaucguaacauucuuccaagaaguuccacacguaauagaagaaguaaugaauauaguauuaaucgcauuaucaauacuagcaguauuaaaaggacuauauaauauagcaacaugcggccucaucggacuaauaacauuccucuuacuaugcggaagaagcuguucaucaaaucuuuacaaaggaguuuacgaauuacaaucauuagacuuaaacauggaaacacuaaacaugacuaugccauuaucauguacaaaaaacaauucacaccauuauauaagaguaggcaaugacacaggacuagaauuaacacuaacaaacaccucaauacuaaaccacaaauucugcaacuuaucagacgcccacaaaaaagauuuauacgaccacgcacuaauguccauaauaucaaccuuccaccuaucaauaccuaacuucaaucaauaugaagcaaugucaugugacuucaauggaggaaaaauuucuguacaauacaacuuaucucacucauacgcaauagacgcagccaaccacugcggaacgguugcaaacggcauacuacaaacuuucaugagaauggcuugggguggaucauauaucgcucuagauucuggaugcggcaacugggacugcauaaugacauccuaccaauaccuaauuauacaaaacaccacaugggaaaaccacugccaauucagccgaccaucuccaauuggauaccuaggauuauuaucucaacgaacaagagauauauauaucucaagaagaagaagaggcacauucacuuggacacuaagcgacucugaaggaaacgcaaccccaggcgguuauuguuuaacacguuggaugcuaauagaagcagaauuaaaauguuucggaaacacagcaguagcaaaaugcaacgaaaaacacgacgaagaauuuugugacauguuaagauuauucgacuucaacaaacaagcaauaucacgauuaaaaagcccugcacaaauguccauccaauuaauaaauaaagcuguuaaugcacuaauaaacgaccaauuaauaaugaaaaaccacuuaagagacauaauguguauaccauacugcaacuacucaaaauauugguaucucaaccacacuauaacuggaaaaacaucucuaccaaaaugcuggcucguaucaaacggaucauacuuaaaugaaacccacuucucagacgauauagaacaacaagccgacaauaugaucaccgaaaugcuccaaaaagaauacauggaaagacaaggaaaaacaccacuuggauuagucgaccuauucgucuucucaacaucauucuaccuaauauccauauucuuaagacucguaaaaauacccacacauagacauauaguaggaaaaccaugccccaaaccccacagacuaaaccacaugggaauaugcagcuguggacuauacaaacaaccaggaguacccguaagauggaaacgguagggacuagucccuguucccagagcccacuuuuuuuucuuuuuuugaaauaaaauagccugucuuucagaucuaaaaaaaaaaaaaaaaaaaaaaaaaaaaaaaaaaaaaaaaaaaaaaaaaaaaaaaaaaaaaaaaugcaucccccccccccccccccccccccccccccccaaaggcucuuuucagagccaccagaauu

SEQ ID NO: 6624 - RNA, 1768 nt, Artificial Sequence
  mRNA product Design a-2 comprising derived and/or modified sequence from LASV(Togo/2016/7082;Clade VI)__AMR44577__GPCstabilized (opt6)
gggagaguccgcucagccagguugcagaagcggcuuagcguguguccuaaucuucucucugcguguagguaggccugugccgcaaacaagcuuaccaugggacaaauaaucacauuuuuccaagaaguaccacauguaauagaagaagucaugaacauaguacuaauagcacucucauuauuagcaauacucaaaggcguauacaauguagcaacuuguggaauaauaggucuagucacauuucuauuucuaugcggacgaucaugcucacuaauauauaaaggauccuacgaauuacaaacauuagaauuaaacauggaaacacucaauaugaccaugccacuauccuguaccaaaaacucaucacaccauuacauaagaguaggaaaugaaacaggauuagaauuaacauuaacaaauacaucuauaauaaaucauaaauucugcaaucucuccgacgcccauaaaagaaacuuauacgaccacgcacuaaugucaauacuaucaaccuuccaccuaucaauuccaaacuuuaaccaauaugaagccauguccugcgauuuuaacggaggaaaaauaagcguucaauacaaccuaucccacgcauacgcuguagacgcagcagaacacugcgguaccguagcaaacggaguacuacaaaccuuuaugagaauggccuggggaggaucauauauagcauuagauucaggaugcggcaacugggacugcauuaugaccucuuaccaauaucuaauaauacaaaacacaaccugggaagaucacugccaauucucaagaccaucaccaauaggcuauuuagguuuauuaucacaaagaacuagagauauauauaucucaagaagaagacgcggaacauuuacuuggacauuaucagacuccgaaggcaaugaaacaccaggaggcuacugucuaacacgauggaugcuaauagaagcagaauuaaaauguuuuggaaacacagccguagccaaaugcaacgaaaaacaugacgaagaauuuugcgacaugcuaagacuauucgacuucaacaaacaagcaauccaaagacuaaaaucaccagcacaaaugucuauacaacuaauuaacaaagcagugaaugccuuaauaaacgaucaacucaucaugaaaaaccaucuuagagauaugauguguauaccauauuguaacuauucuaaauacugguaccucaaucauacaucaucaggacgaacaucccuaccuaaauguuggcucguaucuaacggaucauaccuuaaugaaacccacuucagcgacgacauagaacaacaagccgauaacaugauaacagaaauguuacaaaaagaauauauagauagacaaggaaaaacaccacucggauuagucgaucucuucguauucuccacaucuuucuauuuaauuucuauauuuuuacaccuaauaaaaauacccacacacagacauauaguaggaaaaccauguccaaaaccacacagacuaaaucacaugggcauaugcucauguggauuauacaaacaaccuggagucccaacuagauggaaacgauaaggacuagucccuguucccagagcccacuuuuuuuucuuuuuuugaaauaaaauagccugucuuucagaucuaaaaaaaaaaaaaaaaaaaaaaaaaaaaaaaaaaaaaaaaaaaaaaaaaaaaaaaaaaaaaaaaugcaucccccccccccccccccccccccccccccccaaaggcucuuuucagagccaccagaauu

SEQ ID NO: 6625 - RNA, 1768 nt, Artificial Sequence
  mRNA product Design a-2 comprising derived and/or modified sequence from LASV(KAK-428;Clade n.d. (VII))__ANH09740__GPCstabilized (opt6)
gggagaguccgcucagccagguugcagaagcggcuuagcguguguccuaaucuucucucugcguguagguaggccugugccgcaaacaagcuuaccaugggacaaauaguuacauucuuccaagaaguaccacacguaauugaagaagucaugaauauaguauuaaucgcacuuucacuacuagccauacucaaaggauuauacaacuucgcaacaugcggaguuaucggauuaauaacauucuuacucuuaugcggacgaucauguucagcaacauacaaaggccaauacgaacuacaaacacuagaauuaaacauggaauccuuaaacaugacaaugcccuuaucauguaccaaaaacaacucacaucacuauauacgagcagguaauaauaccggacuugaacucacauuaacaaacacuucgaucauaucacacaaauucugcaacuuaucagacgcacacaaaaaaaauuuauacgaccauacuuuaaugucuauaauaaccacauuccacuuaucuauaccaaacuucaaucaauacgaagcaaugucuugcgauuucaacggaggaaaaauaaguauacaauauaaccuaucacacucauacgcaggagacgcagcacaacacuguggaacaguagcaaacggaguacuacaaaccuuuaugagaauggccuggggaggaucuuauuuagcuuuagauucaggaugccgaggaugggauugcauaauaucaucauaccaauacuuaauaauacaaaacaccaccugggacgaccacugccaauucuccagacccaguccuauaggauaccucggauuuguaucacaaaaaaccagagacaucuacauaucaagaagaagacgaggaacauucacauggacacuuucagauagugaaggacacgacaugccaggaggauauugccuaacaagauggauguuaauagaagcagacuuaaaauguuucggaaacacagcaguagcaaaaugcaacgaaaaacacgacgaagaauuuugcgacauguggcgauuauucgauuucaacaaacaagcaauacaaagauuaaaagcacccgcacaaaugaauauacaauuaaucaacaaagccguuaacgcacucauaaacgaccaacuaaugaugaaaaaccauuuacgagacauaaugugcauaccauacugcaacuacuccaaauucugguaccuaaauaacacaacaacaggaagaacaucccuaccucguugcuggcuaaucagcaauggauccuaccuaaaugaaacacacuucucagaugacauagaacaacaagcugauaacaugaucacagaaaugcuacaaaaagaauauauggaucgacaaggaaaaacaccuuuaggauuaguagaccuuuucgucuucucaacuucuuucuaccuaaucacaaucuucuuacauuuaguaaagaucccuacccacagacacauaguuggaaaacccugcccaaaaccacacagacuaaaucacaugggaaucugcucaugcggauuauacaaacaaccagguguaccuguaagauggaaacgauaaggacuagucccuguucccagagcccacuuuuuuuucuuuuuuugaaauaaaauagccugucuuucagaucuaaaaaaaaaaaaaaaaaaaaaaaaaaaaaaaaaaaaaaaaaaaaaaaaaaaaaaaaaaaaaaaaugcaucccccccccccccccccccccccccccccccaaaggcucuuuucagagccaccagaauu

SEQ ID NO: 6626 - RNA, 1768 nt, Artificial Sequence
  mRNA product Design a-2 comprising derived and/or modified sequence from LASV(Pinneo-NIG-1969;Clade I)__AIT17836__GPCstabilized (opt6)
gggagaguccgcucagccagguugcagaagcggcuuagcguguguccuaaucuucucucugcguguagguaggccugugccgcaaacaagcuuaccaugggacaaauuauuacauucuuccaagaaguaccucacguaauagaagaaguaaugaacaucguacuaauagcauuaucacuacuagccauacuaaaaggacuauacaacauagcaacauguggaauaauaggccuuguagccuuccuauuccuaugcggaaaauccugcucacuaacacuaaaagguggcuacgaauuacaaacauuagaacuaaacauggaaacuuuaaauaugacaaugccacucuccugcaccaaaaauucaagucaucacuacaucagaguaggaaacgaaacaggauuagaacuaacauuaaccaauacauccaucauaaaccauaaauucuguaaccuaucagaugcacacaaaaaaaacuuauaugaccacgcauuaaugagcauuauaagcaccuuucaccuaucaauaccaaacuucaaccaauaugaagcaaugucaugugacuuuaacgguggaaaaauaucaguacaauauaaccuaucacauucauacgccggugacgcagccgaacacugcggaacaguagcaaacggaguacuacaaacauuuaugcgcauggccuggggaggacgcuacauagcacuagauucaggaugcggaaauugggacuguaucaugacuuccuaccaauauuuaauaauacaaaacacaaccugggaagaucacugucaauuuucccgaccaucaccaauaggauauuuaggacuacuaagucaaagaacaagggauauauacaucucuagaagaaggagaggaacauuuacauggacccuaucugacuccgaaggaaacgaaacaccaggaggauacugcuuaacacgauggauguuaauagaagcagaacucaaaugcuucggaaacacagccguagcaaaauguaacgaaaaacacgaugaagaauucugugacaugcuacgauuauuugauuucaacaaacaagcaauaagacgacucaaagcaccagcacaaaugucaauacaacuaauaaacaaagcaguaaacgcauuaauaaaugaccaacucauaaugaaaaaucaccuaagagauauaaugugcauaccauauugcaauuacucaaaauacugguacuuaaaccacaccucauccggacgaacaucauuaccaaaaugcuggcuaauaucaaauggaaguuaccuaaacgaaacacaauucucagacgacauugagcaacaagccgauaacaugauuacagaaauguuacaaaaagaauacauagaaagacaaggcaaaacucccuuaggccuuguagacauauucauauuuucuacaucauuuuaccuaauaucaauauuucuacacuuaauuaaaauaccaacgcauagacauaucgucggaaaaccaugcccaaaaccacauagauuaaaucacaugggaguaugcucaugcggauuauacaaacacccuggaguaccaacaaaauggaaacgauaaggacuagucccuguucccagagcccacuuuuuuuucuuuuuuugaaauaaaauagccugucuuucagaucuaaaaaaaaaaaaaaaaaaaaaaaaaaaaaaaaaaaaaaaaaaaaaaaaaaaaaaaaaaaaaaaaugcaucccccccccccccccccccccccccccccccaaaggcucuuuucagagccaccagaauu

SEQ ID NO: 6627 - RNA, 1768 nt, Artificial Sequence
  mRNA product Design a-2 comprising derived and/or modified sequence from LASV(ISTH0009-NIG-2011;Clade II)__AIT17404__GPCstabilized (opt6)
gggagaguccgcucagccagguugcagaagcggcuuagcguguguccuaaucuucucucugcguguagguaggccugugccgcaaacaagcuuaccaugggacaaauaaucacauuuuuccaagaaguaccccacgucauagaagaaguuaugaacauaguacucauagcauuaagccuacuagcaauauuaaaaggcauauacaacguagcaaccugcggauuauucggacuuguaucuuuccuuuuacucuguggaagaucaugcucuacaacauacaagggcgucuacgaacuacaaacauuagaacuugacauggcaucacucaacaugacaaugccacuaucaugcaccaaaaauaacucacaucauuacauaaugguaggaaacgaaacuggacuugaacuaacacuaaccaacacuucaauaaucaaucauaaauucugcaaccuaucagaugcccacaagaaaaaucuauaugaccaugcauuaaugucuauaauaucuaccuuccaccucuccauaccaaauuuuaaccaauaugaagcaaugucaugugauuucaacggaggaaaaaucucuguacaauacaaccuaucucacgcauacgcaguagacgccgcaaaccauugcggaacaauagccaacggagucuuacaaacauucaugcgaauggcauggggaggaucuuauauagcacuggacucaggauguggaucaugggacugcauaaugacaucauaucaauacuuaaucauacaaaauacaacuugggaagaccacugccaauucucacgaccaucacccauaggauaccuaggacuucuaucacaaagaaccagagacauauacauaucuagacguagaagaggaacauucaccuggacacuaucagacucugaaggcaacgaaacacccggaggcuauugccuaacaagauggaugcuaauagaagcagaacuaaaaugcuuuggaaacaccgcaguagcaaaaugcaaugaaaaacacgacgaagaauuuugcgauaugcuaagauuauucgacuuuaacaaacaagcaauacgacgccuaaaaacucccgcccaaauguccauccaacuaauaaacaaagcaguaaacgcauuaauaaaugaccaacuaauaaugaaaaaucaccuaagagauauaaugugcauaccauacuguaauuacuccaaauacugguaccucaaucauaccguaaccggaaaaacaucauuaccccgaugcuggcuaguaucuaauggcucauaccuaaacgaaacacauuucucagacgacaucgaacaacaagcagacaauaugauaacagaacuauuacaaaaagaauacauggacagacaaggaaaaacuccacuaggcuuaguagacuuauucgucuuuucaaccucauucuacuuaauaucaauauuccuccaucuaauaaaaauacccacacaccgacacauaacaggaaaaccaugcccaaaaccacacagauuaaaccacaugggcauauguaguugugguuuauauaaacacccaggaguaccaguuaaauggaaacguuaaggacuagucccuguucccagagcccacuuuuuuuucuuuuuuugaaauaaaauagccugucuuucagaucuaaaaaaaaaaaaaaaaaaaaaaaaaaaaaaaaaaaaaaaaaaaaaaaaaaaaaaaaaaaaaaaaugcaucccccccccccccccccccccccccccccccaaaggcucuuuucagagccaccagaauu

SEQ ID NO: 6628 - RNA, 1768 nt, Artificial Sequence
  mRNA product Design a-2 comprising derived and/or modified sequence from LASV(ISTH2010-NIG-2012;Clade II)__AIT17482__GPCstabilized (opt6)
gggagaguccgcucagccagguugcagaagcggcuuagcguguguccuaaucuucucucugcguguagguaggccugugccgcaaacaagcuuaccaugggacaaauaaucacauucuuccaagaaguuccacacgucauagaagaaguaaugaacauaguucuaauugcccuaucacuacuugcaauacuaaaaggaauauacaacguagcaacaugcggucuuuucggccuaguaucauuccuauuauuaugcggaagaucaugcucaacaacauauaaaggaguauacgaauuacaaacgcucgaacuagauauggcaucauuaaauaugacaaugccacuaucuugcaccaaaaacaacucucaccacuacauaaugguaggaaacgaaaccggccuagaauuaacauuaacuaauacaucaaucauaaaccacaaauucugcaacuuauccgacgcucacaagaaaaaccuauaugaucaugcauuaaugagcauuauaucaacauuccaccuaucuauaccuaacuucaaucaguaugaagcaaugaguugcgacuucaacggaggcaaaauauccguccaauauaacuuaucccaugcauacgcagucgaugcagcaaaccacugcggaaccauagcaaacggaguauuacaaaccuucaugagaauggccuggggaggaucauacauagcacuagacucuggaugcggcuccugggauuguauaaugacauccuaccaauaccucauaauccaaaacauaacaugggaagaucauugccaauucucacgaccaucaccaauaggauaccucggacuauuaucccaaagaacuagagacauauacaucucccgcagaagacgagguacauuuacauggacccucucagacucagaaggaaacgaaacaccaggcggauacugcuuaacacgauggauguuaauagaagcagagcuaaaaugcuucggaaauacugcaguagccaaaugcaacgaaaaacacgacgaagaauuuugcgacauguuaagacuauucgauuucaacaaacaagcaauaagaagacucaaaacaccagcccaaaugucaauacaacuaauaaauaaagcaguaaaugccuuaauuaaugaccaacuaauaaugaaaaaccaucuaagagauauaaugugcauaccuuauugcaacuacaguaaauacugguaccuaaaccauacagucaccggaaaaacuucacuaccaagaugcuggcuaguauccaauggaucauaucuaaacgaaacacacuuuucagacgauaucgaacaacaagcagacaacaugaucacagaacucuuacaaaaagaauacauagauagacaaggcaaaacaccacuaggucuaguagaccuauuuguauucucaacaucauucuaccucauaucaauauuccuccaucuaguaaaaauaccaacucaucgacacguaguaggaaaaccaugucccaaaccccacagauuaaaucauaugggaauaugcucaugcggauuauacaaacauccaggcgucccaguaaaauggaaaagauaaggacuagucccuguucccagagcccacuuuuuuuucuuuuuuugaaauaaaauagccugucuuucagaucuaaaaaaaaaaaaaaaaaaaaaaaaaaaaaaaaaaaaaaaaaaaaaaaaaaaaaaaaaaaaaaaaugcaucccccccccccccccccccccccccccccccaaaggcucuuuucagagccaccagaauu

SEQ ID NO: 6629 - RNA, 1768 nt, Artificial Sequence
  mRNA product Design a-2 comprising derived and/or modified sequence from LASV(Lassa virus/H.sapiens-wt/NGA/2015/ISTH_0543;Clade II)__AVO03639__GPCstabilized (opt6)
gggagaguccgcucagccagguugcagaagcggcuuagcguguguccuaaucuucucucugcguguagguaggccugugccgcaaacaagcuuaccaugggacaaauaauaacauucuuccaagaagucccccaugucauagaagaaguaaugaacauaguauuaauugcauuaucauuacuagcuauacuaaaaggaauauacaacguagccaccugcggacuauucggcuuaguaucauuucuauuacuaugcggaagaucuugcucaacaaccuacaaaggcguauacgaacuucaaacauuagaacucgauauggcaaacuuaaacaugacaaugccauuaucauguacaaaaaacaauucucaccacuacauaaugguaggaaaugaaacagguuuagaacuaacauuaacaaauacaucaaucaucaaucauaaauuuuguaaccuaagcgaugcacacaaaaaaaaccuauaugaucacgcauuaaugucaauaauauccacuuuucacuuaucaauaccaaacuucaaccaauaugaagcaauguccugcgacuuuaauggaggcaaaauaucaguacaauacaacuuaucacacacauacgcaguagacgccgcaaaccacuguggaacaauagcaaacggaguacuacaaacguucaugcgcauggcuuggggaggaucauacauagcauuagacucaggaugcggaucuugggacuguauaaugacaucauaccaauauuuagucauucaaaauacaacaugggaagaccacugccaauucucaagaccuucaccaauaggcuacuuaggacucuuaucccaaagaaccagagacauauauauaucucgacggcgaagaggaacuuucacauggacacucagcgacucagaaggaaaugaaacaccaggaggcuauugccucacaagauggauguuaauagaagcagaacuaaaaugcuucggaaacacagcaguugccaaaugcaacgaaaaacacgaugaagaauucugcgacaugcuaagacuuuucgauuuuaacaaacaagcaauacgaagacucaaaacaccagcccaaaugucaauacaacuaauaaacaaagccguaaaugcccuaaucaaugaccaacuuaucaugaaaaaccaucuaagagacaucaugugcauucccuacugcaauuacucaaaauacugguaucucaaucacacagucacuggaaaaacaucacuaccaagaugcuggcuaguaucaaacgguucuuaucuaaacgaaacacacuucucagacgacauugaacaacaagccgacaacaugauaacugaacuucuacaaaaagaauauauagacagacaaggcaaaacaccacuugguuuaguagacuuauucguauucucaaccucauucuaccuaaucucaaucuuccuucacuuaguuaaaauaccaacacaccgacacauaacuggcaaaccauguccaaaaccacacagacucaaccauaugggaauaugcucuugcggauuauacaaacacccaggugucccaguaaaauggaaaagauaaggacuagucccuguucccagagcccacuuuuuuuucuuuuuuugaaauaaaauagccugucuuucagaucuaaaaaaaaaaaaaaaaaaaaaaaaaaaaaaaaaaaaaaaaaaaaaaaaaaaaaaaaaaaaaaaaugcaucccccccccccccccccccccccccccccccaaaggcucuuuucagagccaccagaauu

SEQ ID NO: 6630 - RNA, 1768 nt, Artificial Sequence
  mRNA product Design a-2 comprising derived and/or modified sequence from LASV(Lassa virus/H.sapiens-wt/NGA/2016/ISTH_0009;Clade II)__AVO03571__GPCstabilized (opt6)
gggagaguccgcucagccagguugcagaagcggcuuagcguguguccuaaucuucucucugcguguagguaggccugugccgcaaacaagcuuaccaugggccaaauaauaacauucuuccaagaaguaccucacguaauagaagaaguaaugaacaucgucuugauagcauuaucauuauuagccauauuaaaagguauauacaauguagcaacauguggacuacuuggauuaguaucuuucuuacuccuaugcggaagaucuugcucuaccacuuacaaagguguauacgaacuacaaacauuagaauuagacauggcaucacuaaacaugacaaugccauuaucaugcacuaaaaauaacagccaccacuacauaaugguaggaaacgaaacaggacuagaacuaacccuaaccaauacaucaauaauaaaucauaaauucuguaacuuaucugaugcacauaagaaaaaccuauaugaccacgcacuaaugagcauuauaucaaccuuccacuuaucuauaccaaauuucaaccaauaugaagccaugucaugcgauuucaacggaggaagaaucucuguacaauacaaccuaucacacuccuaugcaguagacgccgcaaaccauuguggaacaauagcuaacggaguacuacaaaccuucaugagaauggcuuggggagguucauacauagccuuagacaguggaugcgguucaugggacugcauaaugacaucauaucaauaccuaauaauacaaaauacaacuugggaagaccacugccaauuuucaagaccaucaccaauaggauauuuaggucuauuaucacaaagaacaagagacauauacauuucuagacgaagacgaggaacauucacauggacacuaucagacucagaaggaaacgaaacacccggaggcuacugucuuacacgauggaugcuaauagaagcagaacuaaaaugcuucgguaacacugcaguugcaaaauguaacgaaaaacaugaugaagaauuuugcgacaugcuccgauuauucgauuucaacaaacaagcaauacgucgacuuaaaacaccagcucaaauguccauacaauuaauaaacaaagcaguaaaugcauuaauaaaugaccaacuaauaaugaaaaaccaccuaagagauauaaugugcauaccauacugcaacuacucuaaauacugguacuuaaaccacaccguaaccggaaaaacaucacuaccccgcugcuggcuaguaucaaauggaaguuaccuaaacgaaacacacuuuucagacgacauagaacaacaagcagacaacaugauaacagaacuacuacaaaaagaauacaucgauagacaaggcaaaacaccacuuggccuagucgaucuauucguauucagcacaucauuuuaucucauaucaaucuucuuacacuuagucaaaauaccuacacacagacacauaaccggaaaaccaugucccaaaccacacagacuaaaccacaugggaauaugcuccugcggacuauauaaccacccaggaguaccaguaaaauggaaaagauaaggacuagucccuguucccagagcccacuuuuuuuucuuuuuuugaaauaaaauagccugucuuucagaucuaaaaaaaaaaaaaaaaaaaaaaaaaaaaaaaaaaaaaaaaaaaaaaaaaaaaaaaaaaaaaaaaugcaucccccccccccccccccccccccccccccccaaaggcucuuuucagagccaccagaauu

SEQ ID NO: 6631 - RNA, 1768 nt, Artificial Sequence
  mRNA product Design a-2 comprising derived and/or modified sequence from LASV(Lassa virus/H.sapiens-wt/NGA/2016/ISTH_0017;Clade II)__AVO03567__GPCstabilized (opt6)
gggagaguccgcucagccagguugcagaagcggcuuagcguguguccuaaucuucucucugcguguagguaggccugugccgcaaacaagcuuaccaugggacaaauaauaacauucuuccaagaaguaccacacgucauagaagaaguuaugaacauuguacuuauagcacuuucacucuuagcaauccuaaaagguauauacaauguagcuaccugcggacuauuuggacuaguaucauucuuauuacuauguggcagaucaugcucaacaacauacaaaggaguauacgaauuacaaacacuagaacuugacauggcaucacuaaacaugacuaugccuuuauccugcaccaaaaacaacucacaccacuacauaaugguaggaaacgaaacaggccuagaacuaacauuaacaaacacaucaaucauaaaccacaaauucuguaacuuaucagaugcacacaaaaaaaaccucuacgaccacgcucuaauguccauaauaucaacauuccacuuaucuauaccaaacuucaaccaauacgaagcaaugucaugcgacuuuaacggcggaaaaauaucaguacaguacaaccuaagccacacauaugccauagacgcagccaaccauuguggaacaauagcaaauggaguacuacaaacuuucaugagaauggcauggggaggaucauauauagcccuagacucaggauguggaucaugggacuguaucaugacaucauaccaauacuuaauaauacaaaauacaaccugggaagaccacugccaauuuucccgacccucaccuauaggauaucuagguuuacuaucccaaagaacacgagacauauacaucucaagaagaagaagagguaccuucaccuggacacucuccgacagcgaaggaaacgaaaccccuggcggauacugucuuacacgauggauguuaauagaagcagaauuaaaauguuuuggaaauacagcaguugcaaaaugcaaugaaaaacacgacgaagaauucugugacaugcuccgacuauuugauuuuaauaaacaagcaauaagacgacuaaaaaccccagcccaaaugucaauacaacuaauaaacaaagcaguuaacgcacuaauaaacgaccaauuaauaaugaaaaaccaccuaagagacauaaugugcauaccauacuguaacuacagcaaauacugguacuuaaaccacaccguaacaggaaaaacaucauuacccagauguuggcuaguauccaaugguucauacuuaaacgaaacacacuuuuccgacgauauagaacaacaagcagacaacaugauaaccgaacuauuacaaaaagaauacauggacagacaaggaaaaaccccacuaggccuaguagaucuauucguauucucaaccucauucuaccucauaaguauauuucuacaccuaguaagaauaccaacccauagacacguaauaggaaaaccaugcccaaaaccacauagacucaaccauaugggaauaugcagcugcggacuguacaaacauccuggaguaccaguuaaauggaaaagauaaggacuagucccuguucccagagcccacuuuuuuuucuuuuuuugaaauaaaauagccugucuuucagaucuaaaaaaaaaaaaaaaaaaaaaaaaaaaaaaaaaaaaaaaaaaaaaaaaaaaaaaaaaaaaaaaaugcaucccccccccccccccccccccccccccccccaaaggcucuuuucagagccaccagaauu

SEQ ID NO: 6632 - RNA, 1768 nt, Artificial Sequence
  mRNA product Design a-2 comprising derived and/or modified sequence from LASV(Lassa virus/H.sapiens-wt/NGA/2018/ISTH_0959;Clade II)__AVV65099__GPCstabilized (opt6)
gggagaguccgcucagccagguugcagaagcggcuuagcguguguccuaaucuucucucugcguguagguaggccugugccgcaaacaagcuuaccaugggacaaauaaucacauucuuccaagaaguaccacacguaauagaagaaguaaugaauauaguucucauagcauuaucacuccuugcaauauuaaaaggaauauauaacguaguaacuugcggacuauucggccuaguauccuuucuacuacuauguggaagaucaugcuccaccaccuauaaaggaguauacgaacuucaaacacuugaacuagacauggccucauuaaauaugaccaugccauuaaguugcacaaaaaacaacucacaccauuacauaaugguaggaaacgaaacaggacuagaauuaacacuuacaaacacaucuauaaucaaucacaaauucugcaaucuauccgacgcccacaaaaaaaaccuauacgaccaugcacuuaugucaauaauaucaaccuuccaccuuucaauuccaaacuucaaucaauacgaagcaaugucuugcgauuucaacggaggaaaaauaucaguacaauacaaucuaucccaugccuacgcaauagacgcugcaaaucacugcggaacaauagcaaacggcguccuccaaacauucaugagaauggcauggggaggcucauauaucgcauuagacucuggauguggaucaugggauuguaucaugacaaguuaccaauaccuaauuauacaaaauacaaccugggaagaccacugccaauucucaagacccuccccaauaggauaucuaggacuauuaucacaacgaacuagagacauauauauaucacgaagaagaagagguacauucacauggacacuaucagacucagaaggaaacgaaacaccaggcgguuauugcuuaacacgauggaugcuaauagaagcagaacuaaaaugcuuugguaauacagcuguagcaaaaugcaaugaaaaacaugacgaagaauucugugacaugcucagauuauuugauuuuaacaaacaagcaauaagaagguuaaaaacaccugcacaaaugucaauacaauuaauaaacaaagccguuaacgcacuaauaaacgaccaauuaauaaugaaaaaccaucuucgcgacauaaugugcauaccauacugcaacuacucuaaauacugguacuuaaaccacacaguaacaggcaaaacauccuuaccacgaugcuggcuaguaucaaacgguuccuacuuaaacgaaacccacuucucagaugacauagaacaacaagcagacaacaugaucacagaauuauuacaaaaagaauacauagauagacaaggaaaaacaccacuaggccucgucgauuuauucgucuuuucaacaucauuuuauuuaauuucaauauuccuacauuuaguaaaaauaccaacacaccgacacguaauaggaaaaccuuguccaaaaccccacagauuaaaccauaugggaauauguuccugcggccuauauaaacauccaggcguucccgucaaauggaaacguuaaggacuagucccuguucccagagcccacuuuuuuuucuuuuuuugaaauaaaauagccugucuuucagaucuaaaaaaaaaaaaaaaaaaaaaaaaaaaaaaaaaaaaaaaaaaaaaaaaaaaaaaaaaaaaaaaaugcaucccccccccccccccccccccccccccccccaaaggcucuuuucagagccaccagaauu

SEQ ID NO: 6633 - RNA, 1768 nt, Artificial Sequence
  mRNA product Design a-2 comprising derived and/or modified sequence from LASV(LASV003-NIG-2008;Clade II)__AIT17580__GPCstabilized (opt6)
gggagaguccgcucagccagguugcagaagcggcuuagcguguguccuaaucuucucucugcguguagguaggccugugccgcaaacaagcuuaccaugggacaaauaauaacauuuuuccaagaagucccacacguaauagaagaaguaaugaacaucguccuaauagcauuaucauuacuagcaauucuaaaaggaauauacaauguagcaacuuguggccuauucggccuaguaucauuccuauuauuauguggccgaagcugcucaacaaccuacaaagguguauacgaacuacaaacccuagaauuagacauggcaucacuaaauaugacaaugccacuauccugcaccaaaaacaacucccaucacuacauaaugguaggcaacgaaacaggcuuagaacuaacacuaacaaacacuucaauaauaaaccacaaauucugcaaccuauccgacgcccacaagaaaaauuuauaugaccacgcauuaaugucaauaauaucaacauuccacuuauccauacccaauuucaaccaauacgaagcaaugucaugugauuucaacggagguaaaaucagcguacaauacaauuuaucacauacauaugcaguagacgcagcaaaccauuguggcacaauagcaaacggaguauuacaaacauucaugagaauggcuuggggaggaucauacauugcacucgacucaggaugcggaucaugggauugcauaaugacaucauaccaauaccuaauaauacaaaacacaaccugggaagaucacugccaauucuccagaccaucaccaaucgguuauuuaggacuacuaucacaaagaacaagagacauauauauaucacgaagaagacgaggaacauuuaccuggacccuaucagauucagaaucaaaugaaacaccaggcggauacugccuaacaagauggauguuaauagaagcagaauuaaaaugcuuuggaaauacagcaguagcaaaauguaacgaaaaacacgaugaagaauuuugcgauaugcuacgacuauuugacuucaacaaacaagcaauaagacgacuaaaagccccugcacaaaugucaauacaauuaauuaauaaagcaguuaaugcauuaauaaaugaccaacuaauaaugaaaaaccacuuaagagacaucauguguauaccauauugcaacuauagcaaauacugguacuuaaaccacacaguuacaggaagaacaagccuaccccgauguuggcucguauccaacggaucauaccuuaacgaaacacacuuuucagaugacauagaacaacaagcagauaacaugauaacagaauuauuacaaaaagaauacauggaccgacaaggcaaaacaccacuaggccuaguagaccuauuuguauuuuccaccuccuucuaccuaauaucaauuuucuuacacuuaguaaaaaucccuacacaccgacacguaauaggaaaaccaugcccaaaaccacaccgauuaaaccacaugggaauauguucauguggauuauacaaacacccaggaguaccagucaaauggaaaagauaaggacuagucccuguucccagagcccacuuuuuuuucuuuuuuugaaauaaaauagccugucuuucagaucuaaaaaaaaaaaaaaaaaaaaaaaaaaaaaaaaaaaaaaaaaaaaaaaaaaaaaaaaaaaaaaaaugcaucccccccccccccccccccccccccccccccaaaggcucuuuucagagccaccagaauu

SEQ ID NO: 6634 - RNA, 1768 nt, Artificial Sequence
  mRNA product Design a-2 comprising derived and/or modified sequence from LASV(LASV035-NIG-2009;Clade II)__AIT17588__GPCstabilized (opt6)
gggagaguccgcucagccagguugcagaagcggcuuagcguguguccuaaucuucucucugcguguagguaggccugugccgcaaacaagcuuaccaugggacaaauaauaaccuuuuuccaagaaguaccacacguaauagaagaaguaaugaacauaguacuuauagcauuaagccuccuugcuauuuuaaaaggaauauacaauguagcaacauguggacuauucggacuaguaucauuucuuuuauuaugcggaagaucauguuccacaacauacaaaggaguuuacgaauuacaaacauuagaacuagacauggcaucauuaaacaugacaaugccacuauccugcacaaaaaacaacucacaucauuacaucaugguaggaaaugaaacaggauuagaacuuacacuaacaaacacaagcauaauaaaccacaaauucugcaaccuaucagacgcacacaaaaaaaaucuauaugaccacgcacuaaugucaauuauauccacauuucacuuaucaaucccaaacuucaaccaauacgaagcaaugucaugcgacuuuaauggaggaaaaauuucuguacaauauaaccuaucacaugccuacgcuguagaugcugcaaaccacugcgguacaaucgcaaauggaguauuacaaacauucaugagaauggcuuggggaggaucauacauagcauuagacucaggaugcggcucaugggacuguauaaugacaucuuaccaguaucuaauaauacaaaacacaaccugggaagaucacugccaauucucacgacccucaccaauuggauacuuagguuuacuaucacaaagaacccgcgauauauacaucuccagaagacgcagaggaacauuuaccuggacauuaagcgacuccgaaggaaaugaaacaccuggaggauacugcuuaacuagauggauguuaauagaagccgaacuuaaaugcuucggaaauacagcuguugcuaaaugcaacgaaaaacacgacgaagaauucugcgacaugcuaagauuauucgacuucaacaaacaagcuauaagaagacuaaaagcaccagcacaaaugucaauacaauuaauaaauaaagcaguuaacgcauuaauaaacgaucaacuuauuaugaaaaaccaccuaagagacauaaugugcauaccauacuguaacuacucaaaauauugguacuuaaaccacacaguaacaggaaaaacaucacucccaagauguugguuaguaagcaacggcuccuaccuaaacgaaacacauuucagugacgauaucgaacaacaagccgauaauaugaucacagaacuacuacaaaaagaauauaucgauagacaaggaaaaacacccuuaggacuaguagaccucuucguauucucaacauccuucuacuuaauauccauauucuuacaccuaguaaaaauaccaacacauagacacguaauaggaaaaccauguccaaaaccucacagacuaaaccacaugggaauuuguuccuguggacuauauaaacaccccggcguaccaguaaaauggaaacgauaaggacuagucccuguucccagagcccacuuuuuuuucuuuuuuugaaauaaaauagccugucuuucagaucuaaaaaaaaaaaaaaaaaaaaaaaaaaaaaaaaaaaaaaaaaaaaaaaaaaaaaaaaaaaaaaaaugcaucccccccccccccccccccccccccccccccaaaggcucuuuucagagccaccagaauu

SEQ ID NO: 6635 - RNA, 1768 nt, Artificial Sequence
  mRNA product Design a-2 comprising derived and/or modified sequence from LASV(LASV1000-NIG-2009;Clade II)__AIT17782__GPCstabilized (opt6)
gggagaguccgcucagccagguugcagaagcggcuuagcguguguccuaaucuucucucugcguguagguaggccugugccgcaaacaagcuuaccaugggacaaauaauaaccuucuuccaagaaguaccacacguaauugaagaaguaaugaauauaguucuaauagcacucucacuauuagccauacuuaaaggcauauauaauguagcaacaugcggauuauucggauuaguaucauuucuauuacuaugcggacgauccuguagcacaacauacaaaggaguauacgaacuacaaacauuagaauuagauauggcaucacuaaauaugacaaugcccuuaucuuguaccaaaaacaacucacaccacuacauaaugguuggaaacgaaacaggacuagaauuaacacuaacaaacacaucaauaauaaaucacaaauucugcaaccuaucagacgcucauaagaaaaaccuauacgaccacgcccuaauguccauaauaucaaccuuucaccuaucaauacccaauuuuaaccaauacgaagcuaugucaugcgauuucaacggcggaaaaauauccguacaauacaauuuaucacauacauaugcaguugaugccgcaaaucacugcggaacaauagcaaauggcguucuacaaacauuuaugagaauggcuuggggcggaucauacauagcacuugauucuggcugcggaucaugggauugcauaaugacauccuaccaauacuuaauaauacaaaacaccaccugggaagaccacugccaauucucaagaccaucaccuauaggcuacuuaggacuauuaucacaaagaacccgagacauauacauauccagaagacgaagaggcaccuucacauggacacuaucagauucagaaggaaacgaaacaccagguggcuauugcuuaaccagauggaugcuaauagaagccgaauuaaaaugcuuuggaaacacagcaguagcaaaaugcaacgaaaaacaugacgaagaauuuugcgauaugcuuagauuauucgauuuuaauaaacaagcaauaaaacgucuaaaaacaccagcacaaaugagcauucaauuaauaaacaaagccgucaacgcucuaauaaaugaccaacuaauaaugaaaaaccacuuaagagacauaaugugcauaccuuauuguaacuacucaaaauauugguaccuaaaccauacugucacaggaaaaacaucauuacccagaugcuggcuaguaucaaauggaucuuaucuaaaugaaacacacuucucagacgacauagaacaacaagcagacaacaugauaaccgaacuacuucaaaaagaauacauagacagacaaggaaaaacaccauuaggccuaguagaccuauucguauucucuacauccuuuuauuuaauaagcauauuucuacaucuaguaaaaauaccuacacauagacauguaguaggcaaaccaugcccaaaaccacacagacucaaccacaugggaauauguagcuguggauuauacaaacaucccggcguucccguuaaauggaaaagauaaggacuagucccuguucccagagcccacuuuuuuuucuuuuuuugaaauaaaauagccugucuuucagaucuaaaaaaaaaaaaaaaaaaaaaaaaaaaaaaaaaaaaaaaaaaaaaaaaaaaaaaaaaaaaaaaaugcaucccccccccccccccccccccccccccccccaaaggcucuuuucagagccaccagaauu

SEQ ID NO: 6636 - RNA, 1768 nt, Artificial Sequence
  mRNA product Design a-2 comprising derived and/or modified sequence from LASV(LASV221-NIG-2010;Clade II)__AIT17624__GPCstabilized (opt6)
gggagaguccgcucagccagguugcagaagcggcuuagcguguguccuaaucuucucucugcguguagguaggccugugccgcaaacaagcuuaccaugggccaaaucauaaccuuuuuccaagaaguaccucauguaauagaagaaguaaugaacauaguucucaucgcacuaucacuccuagcaauacuaaaaggaauauacaacguugcaaccuguggauuauuuggauuaguaucauuuuuauuacucugcggcagaucuuguucaacaacauauaaaggaguauacgaauuacaaacauuagaauuagacauggcaucacuuaacaugaccaugccacuaucuugcacuaaaaacaauucacaccacuauaucaugguaggaaaugaaacaggauuagaauuaacauuaacaaacacaucaauaauaaaccacaaauucugcaaucuauccgacgcacacaagaaaaacuuauaugaccaugcacuuaugagcauaauaucuacauuucaccuaucaauaccaaauuuuaaccaauacgaggcaaugucuugcgacuuuaacggaggcaaaauaucaguccaauacaaccuaucacacaccuacgcaauagacgcagcaaaccacugcggaacaaucgcuaauggaguauuacaaacauucaugagaauggccuggggcggaagcuacaucgcauuagacucaggaugcggaucaugggacuguaucaugacaucauaccaauaccuuauaauacaaaacacaacaugggaagaccacugccaauucucacgaccaucccccauaggauaccuaggacuacuaucucaaagaacaagagacauauacauaucacgaagacgucgcgguacuuuuacauggacacucucagauuccgaaggcaacgaaacaccaggagguuacugccuaacaagauggaugcuuauagaagcagaauuaaaaugcuuuggaaauacagcuguagcaaaaugcaacgaaaaacacgaugaagaauuuugcgacaugcuaagauuauucgacuuuaauaaacaagcaauaagaagacuaaaaacaccagcccaaaugucaauacaacuaauaaacaaagcuguaaacgcccucauaaacgaccaauuaauaaugaaaaaucacuuaagagacauaaugugcaucccauauuguaacuauucaaaauacugguaucuaaaccauacaguaacaggaaaaaccagcuuaccaagaugcuggcuaguauccaacggaucauacuuaaacgaaacacacuuuucagacgacauagaacaacaagcugacaauaugauaacagaaaugcuucaaaaagaauauauggaccgacaaggaaaaacaccauuaggauuaguagaucucuucguauucucaacaucauucuacuuaauaucaauauuccuacaccucgucaaaauacccacacauagacauguaauaggcaaaccauguccaaaaccacacagacucaaccauaugggaauauguucaugcggucuauauaaacacccaggagucccaguaaaauggaaaagauaaggacuagucccuguucccagagcccacuuuuuuuucuuuuuuugaaauaaaauagccugucuuucagaucuaaaaaaaaaaaaaaaaaaaaaaaaaaaaaaaaaaaaaaaaaaaaaaaaaaaaaaaaaaaaaaaaugcaucccccccccccccccccccccccccccccccaaaggcucuuuucagagccaccagaauu

SEQ ID NO: 6637 - RNA, 1768 nt, Artificial Sequence
  mRNA product Design a-2 comprising derived and/or modified sequence from LASV(LASV237-NIG-2010;Clade II)__AIT17638__GPCstabilized (opt6)
gggagaguccgcucagccagguugcagaagcggcuuagcguguguccuaaucuucucucugcguguagguaggccugugccgcaaacaagcuuaccaugggacaaauaauaacuuucuuccaagaaguaccacacguaauagaagaagucaugaauauaguccuaauagcacucucauuacuagcaauacuaaaaggaauauacaacguagccaccugcggacuauucggauuaguaucauuccuucuuuuaugcgguagaucuugcucaacaacauacaaaggaguuuacgaauuacaaacacuagaacuagauauggcuucacuaaauaugacuaugccacuauccugcacaaaaaacaacucacaucacuacauaauggucggaaacgaaaccggucuagaauuaacauuaacaaacacaucaauuaucaaccauaaauuuugcaaucucuccgacgcacauaaaaaagaccuauacgaucacgcacuaaugucaauuaucucaacuuuccaccuaucaauaccaaauuuuaaucaauacgaagcaaugucaugcgauuuuaauggaggaaaaauaucuguacaauauaacuuaucacacaccuacgcaguagacgcagcaaaccauugcggaacaauagcaaacggaguuuuacaaacuuucaugagaauggcauggggaggauccuacauagcauuagacucaggaugcggaaguugggauuguauaaugacuucauaccaauaccucauaauacaaaauaccacuugggaagaccacugccaauucucacgaccuucaccaaucggauacuuaggucuccuaucacaaagaaccagagacauauacauaucaagacgaagacgcggaacuuucacauggacacuaucagauucugaaggaaacgaaacuccaggaggauacugcuuaacaagauggauguuaauagaagccgaacuaaaaugcuucggaaacacagcaguagcaaaauguaacgaaaaacacgacgaagaauuuugcgacauguuaagacucuucgacuucaauaaacaagcaauaagaagacuaaaaacaccagcacaaaugucuauacaacuaauuaauaaagcaguaaacgcauuaauaaaugaccaacuaauuaugaaaaaccaucuacgcgacauaaugugcauaccauacugcaacuauucuaaauauugguauuuaaaccacacaguaacaggaaaaacaucccuacccagguguugguuaguaagcaauggaucauacuuaaaugaaacacauuucucugaugacaucgaacaacaagcagacaauaugauaacagaacuacuucaaaaagaauacauggacagacaaggaaaaacaccauuaggucuaguagauuuauucgucuucucuacaucauuuuaucuaauaucaaucuucuuacaucuaauaaaaauaccaacccacagacauauaacaggcaaaccaugcccaaaaccucauagacuaaaccacaugggaauaugcucauguggccuauacaaacacccaggcgucccagucaaauggaaaagauaaggacuagucccuguucccagagcccacuuuuuuuucuuuuuuugaaauaaaauagccugucuuucagaucuaaaaaaaaaaaaaaaaaaaaaaaaaaaaaaaaaaaaaaaaaaaaaaaaaaaaaaaaaaaaaaaaugcaucccccccccccccccccccccccccccccccaaaggcucuuuucagagccaccagaauu

SEQ ID NO: 6638 - RNA, 1768 nt, Artificial Sequence
  mRNA product Design a-2 comprising derived and/or modified sequence from LASV(LASV253-NIG-2011;Clade II)__AIT17670__GPCstabilized (opt6)
gggagaguccgcucagccagguugcagaagcggcuuagcguguguccuaaucuucucucugcguguagguaggccugugccgcaaacaagcuuaccaugggccaaauaauaacauucuuucaagaaguaccacacguaauagaagaaguaaugaauaucguacuaauagcucucucacuccuagcaauacuaaaaggaauauacaacguagcuaccugcggccuauuuggccuugucuccuuccuacuccuaugcggacgaucaugcucaacaacauauaaaggagucuacgaacuucaaacauuagaacuagacauggcaucacuaaacaugacaaugccccuaucauguacaaaaaauaauucucaccacuauaucaugguagguaacgaaacaggccuagaacuaacccucacaaacaccucaauaauuaaccacaaauucugcaauuuauccgacgcacauaaaaaaaaccucuaugaccacgcacuaauguccauaauauccacauuccaucucucaauacccaacuucaaccaauacgaagcaaugucaugugacuucaauggaggaaaaauuucaguacaauacaaccucucacauacauacgccguugacgcagcaaaccacugcggcacaauagcuaacggcguccuacaaacauucaugagaauggccuggggaggaucauauauugcuuuagauucaggauguggauccugggauugcauaaugacaucauaccaauaccuuauaauacaaaacacaacaugggaagaccauugccaauucucaagaccaucacccauaggauaccuaggacuauuaucacaacgcacacgagacaucuauauaucaagaagaagacgaggaacauucacauggacacucuccgacuccgaaggaaaugaaacaccaggaggauacugucuaaccagauggauguuaaucgaagcagaacuaaaaugcuucggaaacacagcaguagcaaaaugcaacgaaaaacaugaugaagaauucugcgacaugcuacgauuauucgauuucaauaaacaagccauaagacgacucaaagcaccagcacaaaugucaauacaacuaauaaauaaagcaguuaacgcacuaauuaacgaucaacuaauaaugaaaaaucacuuaagagauauaaugugcauaccauacuguaacuacuccaaauacugguacuuaaaccauacaguaaccggaagaacaagccuaccaagaugcuggcuagugucaaacggaucauaucucaacgaaacacauuucucagacgauaucgaacaacaagcagacaauaugauaacagaauuauuacaaaaagaauacaucgacagacaaggaaaaacuccauuaggauuaguagaucuauuuguauucucaacuucauucuauuuaauaucaauauucuuacacuuaguaaaaaucccaacacacagacacauaauaggcaaaccuugcccuaaaccacacagauuaaaccauaugggaaucugcucaugcggauuauauaaacacccaggagucccagucaaauggaaacgauaaggacuagucccuguucccagagcccacuuuuuuuucuuuuuuugaaauaaaauagccugucuuucagaucuaaaaaaaaaaaaaaaaaaaaaaaaaaaaaaaaaaaaaaaaaaaaaaaaaaaaaaaaaaaaaaaaugcaucccccccccccccccccccccccccccccccaaaggcucuuuucagagccaccagaauu

SEQ ID NO: 6639 - RNA, 1768 nt, Artificial Sequence
  mRNA product Design a-2 comprising derived and/or modified sequence from LASV(LASV254-NIG-2011;Clade II)__AIT17674__GPCstabilized (opt6)
gggagaguccgcucagccagguugcagaagcggcuuagcguguguccuaaucuucucucugcguguagguaggccugugccgcaaacaagcuuaccaugggacaaauaaucacauucuuucaagaaguaccacacguaauagaagaaguaaugaacauaguccuaauagccuuaagucuccuagcaauauuaaaaggaaucuauaauguugcaacaugcggcuuauucggucuaguaucauuucuauuacuaugcggaagaucauguuccacaaccuauaaaggaguauacgaauuacaaacccuggaacuagacaugacaaacuuaaauaugacaaugccacuuaguugcaccaaaaauaauucacaccacuacauaauggucggaaacgaaacaggauuagaauuaacacuaacaaacacaucuauaauaaaccacaaauucugcaauuuaucagaugcucacaagaaaaaccuauacaaucacgcauuaauguccauaauauccaccuuccaucuaucaaucccaaacuuuaaccaauacgaagcaauguccugcgacuuuaacggaggaaaaauaucaguacaauauaacuuaucccacucauaugcaguagaugccgccaaucacugcggaacaauagcaaacggaguacuacaaacauucaugagaauggcuuggggaggaagcuacauugcccuagacucaggauguggaaauugggauuguaucaugacauccuaucaauaccuaauaauacaaaauaccacaugggaagaucacugccaauucucacgaccaucaccaauaggauauuuaggacuccucucccaacgaacucgagacauuuauauuucacgaagacgaagaggaacuuucacauggacucuaucagauagcgaaggaaaugaaacacccggaggauauugccuaacaagauggaugcugauagaagcagaacuaaaauguuucggaaauacagcaguagcaaaaugcaaugaaaaacaugacgaagaauuuugcgauauguuaagauuauucgacuucaacaaacaagcaauacgcagacuuaaaacaccagcacaagcaaacauacaacuaauaaacaaagcaguaaaugcauuaauuaacgaccaacuaauaaugaaaaaccaucuaagagacaucaugugcauaccauauuguaacuauucaaaauauugguaccuaaaucacacaguaacaggaaaaaccucacuaccuagguguugguuaguaucaaacggaagcuaccuaaacgaaacacauuucuccgacgacauagaacaacaagcagacaacaugauaacugaacuauuacaaaaagaauauauggacagacaaggaaaaacgcccuuaggacuuguagacuuauucguauucucaaccucauuuuaccuaauaucaauauuccuacaccucguaaaaauaccaacacacagacaugucauaggaaaaccuugcccaaaaccucacagacuaaaccacaugggaauaugcuccugcggccuauacaaacauccaggaguaccuguaaaauggaaaagauaaggacuagucccuguucccagagcccacuuuuuuuucuuuuuuugaaauaaaauagccugucuuucagaucuaaaaaaaaaaaaaaaaaaaaaaaaaaaaaaaaaaaaaaaaaaaaaaaaaaaaaaaaaaaaaaaaugcaucccccccccccccccccccccccccccccccaaaggcucuuuucagagccaccagaauu

SEQ ID NO: 6640 - RNA, 1768 nt, Artificial Sequence
  mRNA product Design a-2 comprising derived and/or modified sequence from LASV(Nig08-A19;Clade III)__ADU56618__GPCstabilized (opt6)
gggagaguccgcucagccagguugcagaagcggcuuagcguguguccuaaucuucucucugcguguagguaggccugugccgcaaacaagcuuaccaugggucaaauaguaacauucuuccaagaagucccccacguuauagaagaaguaaugaacauagucuuaauagcauuaucaauacuagccauccuuaaaggacuauacaauauagcaaccugcggacuuauuggccuaguaacauuucuacucuuaucaggaagaucaugcuccaugacuuauaaaggaguauacgaacuucaaacacuagaacuuaacaugaauacuuuaaauaugacaaugccauuaucaugcaccaaaaacaacucacaccauuacaucaugguuggcaacgaaacaggauuagaacuaacuuuaacaaacacaucauuacuacaucacaaauucugcaaucuaagcgacgcacauaagaaaaaucuauacgaccacacacuaaugucaauaauaucaacauuucaucuaucaauaccaaacuucaaucaauacgaagcaaugagcugugauuucaacggaggaaaaauaacaguccaauacaaccuaucacacucuuacgcaauagacgcagcaaaccacugcggaacagucgcuaaugggguacuacaaaccuucaugagaauggcauggggcggcucauacaucgcacuugauagcggauguggcaaaugggauugcauuaugacaucauaccaauaccuaauaauccaaaauacaacgugggaagaccacugccaauucaguagaccuucaccaauaggauacuuaggauuacuaucacaacgaaccagagauaucuacauauccagaagaagacgcggcacauucacauggacccucucagacucagaagguaaugaaacaccaggaggauacugcuuaacaagauggaugcuuauagaagcagaauuaaaaugcuucggaaacaccgcuguagcaaaaugcaacgaaaaacacgacgaagaauuuugcgacaugcuaagacuauucgacuucaacaaacaagcaaucagacgauuaaaagcucccgcacaaauguccauacaacuaauaaauaaagcaguaaaugcuuuaauaaacgaccaacuaauaaugaaaaaccaccuaagagacauuaugugcauacccuauugcaacuacucaaaauacugguaucuaaaccauacaucaacugguagaacaucacuaccaagaugcugguuaguaucaaacggauccuacuuaaaugaaacacacuucucugaugacauagaacaacaagcagacaacaugauaacagaaaugcuucaaaaagaauacuuagacagacaagguaaaacaccucucgggcuaguagaccuauucguauucucaacaucauucuaccuuauaucaauauuccuacauuuaguaaaaaucccaacacaccgacauaucguaggaaaaccaugcccaaaaccacacagauuaaaucacaugggaauauguaguugcggauuauacaaacaacccggaguaccuguacgcuggaaaagauaaggacuagucccuguucccagagcccacuuuuuuuucuuuuuuugaaauaaaauagccugucuuucagaucuaaaaaaaaaaaaaaaaaaaaaaaaaaaaaaaaaaaaaaaaaaaaaaaaaaaaaaaaaaaaaaaaugcaucccccccccccccccccccccccccccccccaaaggcucuuuucagagccaccagaauu

SEQ ID NO: 6641 - RNA, 1771 nt, Artificial Sequence
  mRNA product Design a-2 comprising derived and/or modified sequence from LASV(G1180-SLE-2010;Clade IV)__AIT17168__GPCstabilized (opt6)
gggagaguccgcucagccagguugcagaagcggcuuagcguguguccuaaucuucucucugcguguagguaggccugugccgcaaacaagcuuaccaugggacaaauagucacuuuuuuccaagaaguaccacauguaaucgaagaaguaaugaacauaguacuaauagcacuuuccauacuagcuguccuaaaaggacucuacaacuucgccacaugcggacuaguaggccuauuaacauuccuauuauuaugcggccguuccugcacagcaucaagauacaaagguguauacgaacuccaaacacuagaauuaaauauggaaacauuaaacaugacaaugccucuaucaugcacaaaaaacaacucacaucauuacauaaugguaggaaacgaaacaggacuagaacuaacauuaacaaacacaucaauaaucaaucacaaauucugcaauuuaagcgacgcucacaaaaaaaacuuauacgaccacgcauuaaugucaauaauaucaacuuuccaccuuucaaucccaaacuucaaccaauacgaagcaaugucaugugacuucaacggcggaaaaauaucaguucaauacaacuuaucucacucauacgcuggagacgcagcaaaucacuguggaacaguagcaaacggaguucuacaaacauucaugagaauggcauggggaggaucauauauagcauuagacucaggaugcggaucaugggacugcauuaugaccucauaccaauaccuaauaauacaaaacacaacaugggaagaccacugccaauucucuagaccaaguccaauaggauacuuaggacuucuaucacaaagaacacgcgacauauacauaucccgcagacgaagagguacauuuacauggacacuaagcgauuccgaaggaaaagacacaccaggaggauauugccuaacacgcuggaugcucauagaagcugaacuaaaaugcuucggaaauacagcuguagcaaaauguaacgaaaaacacgacgaagaauuuugugacaugcuaaggcuauucgacuucaacaaacaagcaauccaaagauuaaaagcacccgcucaaaugucaauacaacuaauaaacaaagcaguaaacgcacuaauaaacgaccaacuaauaaugaaaaaccaucucagagauauaaugugcauuccauacugcaacuauucaaaauacugguaucuaaaucacacaacaaccgguaaaacaucacuaccaaaaugcugguuaguaagcaacggaucauauuuaaacgaaacacacuucucugacgauauagaacaacaagcagacaauaugauaacagaaauguuacaaaaagaauacauggaaaggcaaggaaaaaccccacuaggauuaguagaccuauuuguauucucaacaaguuuuuacuuaauaucaaucuuucuacaucuaguaaaaauaccaacccacagacacauaguaggaaaauccugccccaaaccucacagacuaaaccacaugggcauaugcuccugcggacuauacaaacaacccggaguaccagucaaauggaaaagauaaggacuagucccuguucccagagcccacuuuuuuuucuuuuuuugaaauaaaauagccugucuuucagaucuaaaaaaaaaaaaaaaaaaaaaaaaaaaaaaaaaaaaaaaaaaaaaaaaaaaaaaaaaaaaaaaaugcaucccccccccccccccccccccccccccccccaaaggcucuuuucagagccaccagaauu

SEQ ID NO: 6642 - RNA, 1771 nt, Artificial Sequence
  mRNA product Design a-2 comprising derived and/or modified sequence from LASV(G1442-SLE-2011;Clade IV)__AIT17180__GPCstabilized (opt6)
gggagaguccgcucagccagguugcagaagcggcuuagcguguguccuaaucuucucucugcguguagguaggccugugccgcaaacaagcuuaccaugggacaaauaguuaccuuuuuccaagaaguaccucauguaauagaagaagucaugaauauaguccuaauagcauuaucaauauuagcaguauuaaaaggacuuuacaacguagcaaccuguggacuaauaggucuaguaacauuucuacucuuaugcggaagaucauguacuacaacacuauacaaaggaguauacgaauuacaaacucuagaacuaaauauggaaacacuaaacaugacaaugccacucucauguaccaaaaacaacucacaucacuacauucgaguaggaaaugaaacaggucuagaauuaacauuaacaaacacaucaauaauaaaccauaaauucugcaaccucucagacgcacacaagaaaaacuuauacgaccaugcauuaaugucaauaauuuccacauuccauuuauccauaccaaauuuuaaucaauacgaagcaauguccugcgacuucaacggaggaaaaauauccguucaauauaauuuaagucacucuuaugcaggagacgcagcaaaucacuguggaacaguagccaacggagucuuacaaacauucaugagaauggcauggggagguucauacaucgcccuagacucaggcugcggaaauugggauugcauaaugacauccuaucaauaccuaauaauacaaaacacaaccugggaugaccacugucaauucucaagaccaucuccaauaggauauuuaggauuacuaucacaaagaacaagagacguauacauaagcagaagaagaagaggaacauuuacauggacuuuaucagauucagaaggaaaagacacacccggcggcuacugccugaccagauggaugcuaauagaagcagaauuaaaauguuucggcaacacagcaguagcaaaaugcaaugaaaaacacgacgaagaguucugcgauaugcuaagacuuuucgacuucaauaaacaagcaauucaacgauuaaaagcuccagcacaaauguccauacaacuuauaaacaaagccguaaacgcccuaauuaaugaucaauuaauaaugaaaaaccaccuaagagacauaauguguauaccuuacuguaauuacaguaaauacugguacuuaaauaauacugccacaggaaaaacaucauuaccaaaaugcugguuaauaucaaacggaucauacuuaaacgaaacacacuucucagaugacaucgaacaagaagcugacaacaugauuacagaaauguuacaaaaagaauacauggaaagacaaggaaaaacaccuuuaggucuaguagaucuauucgucuucuccacaucauucuaucucauaucuaucuuucuacaccuaguaaaaauaccaacacacagacacauagucggaaaauccugcccaaaaccacacagauuaaaccacaugggaauuugcucaugcggacuauacaaacaaccaggaguaccaguaagauggaaaagauaaggacuagucccuguucccagagcccacuuuuuuuucuuuuuuugaaauaaaauagccugucuuucagaucuaaaaaaaaaaaaaaaaaaaaaaaaaaaaaaaaaaaaaaaaaaaaaaaaaaaaaaaaaaaaaaaaugcaucccccccccccccccccccccccccccccccaaaggcucuuuucagagccaccagaauu

SEQ ID NO: 6643 - RNA, 1771 nt, Artificial Sequence
  mRNA product Design a-2 comprising derived and/or modified sequence from LASV(G3010-SLE-2013;Clade IV)__AIT17344__GPCstabilized (opt6)
gggagaguccgcucagccagguugcagaagcggcuuagcguguguccuaaucuucucucugcguguagguaggccugugccgcaaacaagcuuaccaugggucaaaucguaacauuuuuccaagaaguaccacacgugaucgaagaaguaaugaauauaguacucauagcauuaaguauauuagcuguacuaaaaggccuauauaacuucgccacaugcggucuaguaggucuaguaacauuucuacuauuaugcggaagauccugcacaacaucccuauacaaaggagucuacgaauuacaaacauuagaauuaaacauggaaacacugaacaugacaaugccauuaucaugcaccaaaaacaacucacaccacuacaucauggucggaaaugaaacaggacuagaacuaacacuaacaaacacauccauaauaaaccacaaguuuugcaacuuaucagacgcacauaagaaaaaccucuauaaucacgcacuuauguccauaauauccacauuccaccuauccauaccaaacuucaaccaauacgaagcaaugucaugcgacuucaacggaggaaaaauuucaguacaauacaacuuaucacacucauacgcgggagacgcagcaucucauugcggaacaguagcaaacggaguauuacaaacauuuaugcgaauggcuuggggaggcucauauauagcacuagacucaggaugcggaaaaugggacugcauaaugacauccuaccaauaccuaauaauccaaaauacaacaugggaagaucauugucaauucuccagacccucaccaauaggauaccuuggacuacuaucacaaagaacaagagacauauacauaucaagaagaagacgaggaacauuuaccuggacacuaucagacucugaaggaaaagacacaccaggaggcuauugccuaacaagauggauguuaauagaagcagaacuaaaauguuucggaaauacagccguagcaaaauguaacgaaaaacaugacgaagaauuuugugauauguuacgacuauucgacuucaauaaacaagcaauacaaagacuaaaaacaccagcacaaaugucaauacaauuaauaaacaaagcaguuaacgcacuaauuaaugaucaacuaauaaugaaaaaccauuuaagagacauaauguguauaccuuauugcaauuacucaaaauacugguauuuaaaccacacaacaaccggcaaaacuucuuuaccaaaaugcuggcuaguaucuaacggaucauaucuuaacgaaacacacuucucagaugacauagaacaacaagcagacaacaugauuacagaaauguuacaaaaagaauauauggaaagacaaggaaaaacaccauugggcuuaguugauuuauuuguauucucaaccagcuucuacuuaauaucaauauuccuacaccuaguaaaaauaccuacacaccgacacauaguaggaaaaucaugccccaaaccacacagacuaaaucacaugggaauauguuccuguggacuauauaaacaaccaggaguaccaguaagguggaaaagauaaggacuagucccuguucccagagcccacuuuuuuuucuuuuuuugaaauaaaauagccugucuuucagaucuaaaaaaaaaaaaaaaaaaaaaaaaaaaaaaaaaaaaaaaaaaaaaaaaaaaaaaaaaaaaaaaaugcaucccccccccccccccccccccccccccccccaaaggcucuuuucagagccaccagaauu

SEQ ID NO: 6644 - RNA, 1771 nt, Artificial Sequence
  mRNA product Design a-2 comprising derived and/or modified sequence from LASV(G502-SLE-2009;Clade IV)__AIT17126__GPCstabilized (opt6)
gggagaguccgcucagccagguugcagaagcggcuuagcguguguccuaaucuucucucugcguguagguaggccugugccgcaaacaagcuuaccaugggacaaauaguaaccuucuuccaagaaguaccacacguaaucgaagaagucaugaauauaguucuaauagcacucagcaucuuagcaguccuaaaaggacuauacaauuuugcaacaugcggucuaguaggacuacuuacauuccuucuauuauguggaagauccugcacaacaggacuauauaaaggaguauaugaauuacaaacacucgaauuaaacauggaaacacuaaacaugacaaugccacuaucaugcacuaaaaauaacucacaucauuauaucaugguuggaaaugaaacagguuuagaacuaacacuaacaaauacaagcauaaucaaucacaaauucugcaacuuaucugaugcucacaagaaaaacuuauaugaccacgcacuaaugagcaucauaucaacauuucacuuaucaaucccaaauuucaaccaauaugaagcaaugucaugcgauuucaacggaggaaaaauaucaguacaauacaaccucucacauucuuaugcuggagaugcagcagaucacugcggaacaguagcaaacggaguauuacaaacauucaugcgaauggcauggggaggaucauacauagcucucgacuccggaugcggaagaugggauugcauaaugacauccuaucaauaccuuauaauacaaaacacaacaugggaagaccacugccaauucucaagaccaaguccaauaggauaccuaggacuauuaucacaacgaacaagagacauuuacauaucucgacgcagaagaggaaccuucaccuggacauuauccgacucagaaggaaaagauacaccaggaggauacugcuuaacaagauggaugcuaauagaagccgaacucaaaugcuucggaaauacagcaguagccaaaugcaacgaaaaacacgaugaagaauuuugugacaugcuaagacuauucgacuucaacaaacaagcuauacaaagauuaaaagcacccgcccaaauguccauccaacuaauaaauaaagcuguaaacgcacuaaucaaugaccaacucguaaugaaaaaucaucuaagagacauaauguguauacccuacuguaacuacucacgauacugguaccuaaaccauacaacaacaggaagaacaucacuuccaaaaugcugguuagucucuaauggaucauaccuaaacgaaacacacuuuuccgacgauauagaacaacaagcagauaauaugauaacugaaauguuacaaaaagaauacauggaaagacaaggaaaaacuccccuaggucuaguagaccucuucguauuuucaacaucuuuuuaucuaaucucaauauucuuacaccuaguaaaaauaccaacacacaggcauauagucggaaaauccuguccaaaaccacacaggcuaaaccacaugggaauaugcucuuguggacuauacaaacaaccaggagucccaguaaaauggaaaagauaaggacuagucccuguucccagagcccacuuuuuuuucuuuuuuugaaauaaaauagccugucuuucagaucuaaaaaaaaaaaaaaaaaaaaaaaaaaaaaaaaaaaaaaaaaaaaaaaaaaaaaaaaaaaaaaaaugcaucccccccccccccccccccccccccccccccaaaggcucuuuucagagccaccagaauu

SEQ ID NO: 6645 - RNA, 1771 nt, Artificial Sequence
  mRNA product Design a-2 comprising derived and/or modified sequence from LASV(G733-SLE-2010;Clade IV)__AIT17154__GPCstabilized (opt6)
gggagaguccgcucagccagguugcagaagcggcuuagcguguguccuaaucuucucucugcguguagguaggccugugccgcaaacaagcuuaccaugggacaaauaguaaccuucuuccaagaaguaccucacguaauagaagaaguaaugaauauaguauuaauagcauuauccauccucgcaguacuuaaagguuuauacaacuuugcaaccugcggcauagucggucuaguauccuuucucuuauuaugcggaagaucauguacaacauccuuauacaaaggaguauacgaacuacaaacauuagaauuaaacauggaaacucucaacaugacaaugccauuaucauguaccaaaaacaauagccaucauuauauaaugguaggaaacgaaacaggacucgaacuaacacuaacaaacacaucaauaauaaaccacaaauucugcaaccuuucagacgcacacaagaaaaaccuauacgaucacgcacuaaugucuauaauaucaacauuccaccuaagcauaccaaauuucaaucaauacgaagccauguccugugacuucaauggaggaaaaauaucaguacaauacaaccuaucacauuccuacgcaggagacgcagcaaaccauugcggaacaauagcaaacggaguucuacaaacauucaugagaauggcauggggaggaagcuacauagcacuagacucaggcugcgaccgaugggauugcauaaugacauccuaccaauaccuaauaauacaaaacacaacaugggaagaccauugccaauucucccgcccaucaccaauaggauacuuaggacuacuaucacaaagaacaagagacauuuauauaucuagacgaagaagaggaacauuuacauggacacuaucagauuccgaaggaaaagacacaccuggcggcuauugucuaaccagauggauguuaauagaagcagaacucaaaugcuuuggaaacacagcaguagccaaaugcaacgaaaaacacgacgaagaauuuugcgacauguuaagacucuucgauuuuaacaaacaagcaauacaaagauuaaaagcacccgcacaaaugucaauacaauuaauaaauaaagcuguaaacgcacuaauaaacgaccaauuaaucaugaaaaaccaucucagagauauaauguguauaccauacuguaauuauucuaaauacugguauuuaaaccacacaaccaccggaaaaacaucauuaccuaaaugcuggcuaguaagcaacgguucuuaucuaaacgaaacacacuuuucagacgacauagaacaacaggcagauaauaugauaaccgaaauguuacaaaaagaauacauggaaagacaaggaaaaacaccauuaggucuaguagaucuauucguauucucaacuagcuucuaccuuauaucaauuuuccuacauuuaguaaaaauacccacacauagacauguaguaggaaaaucauguccaaaaccacacagauuaaaccauaugggaaucuguucuugcggacuauacggacaaccagguguuccaguaaaauggaaaagauaaggacuagucccuguucccagagcccacuuuuuuuucuuuuuuugaaauaaaauagccugucuuucagaucuaaaaaaaaaaaaaaaaaaaaaaaaaaaaaaaaaaaaaaaaaaaaaaaaaaaaaaaaaaaaaaaaugcaucccccccccccccccccccccccccccccccaaaggcucuuuucagagccaccagaauu

SEQ ID NO: 6646 - RNA, 1771 nt, Artificial Sequence
  mRNA product Design a-2 comprising derived and/or modified sequence from MOPV/LASV reassortant(IGS-1;Clade IV)__AFY05576__GPCstabilized (opt6)
gggagaguccgcucagccagguugcagaagcggcuuagcguguguccuaaucuucucucugcguguagguaggccugugccgcaaacaagcuuaccaugggccaaaucguaaccuucuuucaagaaguaccucauguaauugaagaaguaaugaauauaguucuuauagcacuaucaguauuagcaguucuaaaaggauuauauaacuucgccacauguggucuaguaggccuaguaaccuuuuuacuacuauguggaagaucaugcaccacaucauuauauaaaggaguauacgaacuucaaacccuagaacuaaauauggaaacacuaaacaugacaaugccauuaucaugcacgaaaaauaacucccaccacuacauuaugguaggaaacgaaacaggucuagaauuaacacucacaaauacaucaauuauaaaccacaaauuuugcaaucucuccgaugcgcacaagaaaaauuuauaugaccacgcacuaaugucaauaauaucaacauuucaccuaagcauaccaaacuucaaccaauaugaagccaugucaugcgauuucaacggaggaaaaaucucaguacaauacaaccuaucccauucauacgcaggagaugcagcaaaucacugcggcacaguagcaaacggcguacuacaaacauuuaugcgcauggccugggguggcucauacauagcucuagauucugguugugguaauugggauuguauaaugacaucuuaccaauaucuaauaauccaaaauacaacaugggaagaccacugccaauucucaagaccaucaccaauaggauauuuagguuuauuaucacaaagaacaagagacaucuauaucucacgaagaagacgaggaacauucacauggacacucucagacucugaaggugaagacacaccaggaggauacugccuaacacgauggauguuaauagaagcagaacuaaaaugcuucggaaauacagcaguugcaaaaugcaacgaaaaacacgaugaagaauuuugcgauauguuacgauuauuugacuuuaacaaacaagcaauacaacgacuaaaagcccccgcacaaaugucaauacaacuaauaaacaaagcaguaaaugcacugauaaaugaucaacuaauaaugaaaaaucacuuaagagacaucauguguaucccauauugcaacuacucaaaauauugguaucuaaaucacacuaccacaggaagaacaucccuaccaaaaugcuggcucguaucuaacggaaguuaccuaaacgaaacacacuuuucagaugauaucgaacaacaagcagacaacaugauaacagaaaugcuacaaaaagaauauauggaaagacaaggaaaaacaccacucggcuuagucgaccucuucgucuuuucaacaucauucuaccuaauaucaaucuuccuacaccucguaaaaauaccaacacacagacauauaguaggaaaaucgugcccaaaaccacauagacuuaaccauaugggaauauguucauguggucuuuacaaacaaccaggcgugccaguaaaauggaaacguuaaggacuagucccuguucccagagcccacuuuuuuuucuuuuuuugaaauaaaauagccugucuuucagaucuaaaaaaaaaaaaaaaaaaaaaaaaaaaaaaaaaaaaaaaaaaaaaaaaaaaaaaaaaaaaaaaaugcaucccccccccccccccccccccccccccccccaaaggcucuuuucagagccaccagaauu

SEQ ID NO: 6647 - RNA, 1771 nt, Artificial Sequence
  mRNA product Design a-2 comprising derived and/or modified sequence from LASV(LM765-SLE-2012;Clade IV)__AIT17814__GPCstabilized (opt6)
gggagaguccgcucagccagguugcagaagcggcuuagcguguguccuaaucuucucucugcguguagguaggccugugccgcaaacaagcuuaccaugggacaaauaguaacauucuuucaagaaguaccacauguaauagaagaaguaaugaacaucguauuaauagcauuaaguauacuagccguacuaaaaggacuauauaauuucgccacaugcggacucguaggccuagucaccuuccuacuucuaugcggaagaucuuguacaacaucauuauacaaaggagucuacgaacugcaaacauuagaauuaaacauggaaacacuaaacaugacaaugccacuaucaugcaccaaaaacaauucacaucacuacaucauggugggaaacgaaacaggauuagaacuaacacuuacaaauacaagcauaauagaccacaaauucugcaaccuaucagaugcacacagaaagaacuuauaugaucacgcacuaauguccauaauaucaacauuucaccuauccauaccaaacuucaaccaauaugaagcaaugucaugcgacuucaacggaggaaaaauaucaguacaauacaacuuaucacacaguuacgcaaaagacgcagcagaucauuguggaacaguagcaaacggaguacuacaaacauucaugcgaauggccuggggaggaagcuacauagcgcuagacucaggauguggacgaugggauugcauaaugacuucauaucaauacuuaaucauccaaaacacuacaugggaagaucacugucaauucuccagacccucccccauaggauaccuaggacuauuaucacagagaaccagagauauauauauaucaagaagaagaagaggaacauucacauggacccuaucagacucagaaggaaaagacaccccaggaggauacugcuuaacacgauggaugcucaucgaagcugaauuaaaaugcuucggaaauacagcagucgcaaaaugcaaugaaaaacacgacgaagaauuuugugacaugcuaagauuauucgacuucaacaaacaagccauacaacgacuaaaagcaccagcccaaaugucaauacaauuaauaaacaaagcaguaaacgcauuaauaaaugaccaacuaauaaugaaaaaucaccuuagagauauaauguguauuccauacugcaacuauagcaaauacugguacuuaaaucacaccacaacaggaaaaacaagccucccuaaauguuggcuaguauccaauggaucauaucuuaaugaaacacauuucucagaugauauagaacaacaagcagacaacaugauaaccgaaauguuacaaaaagaauauauggaaagacaaggaaaaacaccauuaggucuaguagauuuauucguauuuucaacaucauucuaucuaauaucaauuuuccuacaucuaguaaaaauacccacccacagacauauaguaggaaaaccaugcccaaaaccacacagacuaaaccacaugggaaucugcucauguggacucuauaaacaaccaggaguaccaguuaaauggaaaagauaaggacuagucccuguucccagagcccacuuuuuuuucuuuuuuugaaauaaaauagccugucuuucagaucuaaaaaaaaaaaaaaaaaaaaaaaaaaaaaaaaaaaaaaaaaaaaaaaaaaaaaaaaaaaaaaaaugcaucccccccccccccccccccccccccccccccaaaggcucuuuucagagccaccagaauu

SEQ ID NO: 6648 - RNA, 1771 nt, Artificial Sequence
  mRNA product Design a-2 comprising derived and/or modified sequence from LASV(LM776-SLE-2012;Clade IV)__AIT17824__GPCstabilized (opt6)
gggagaguccgcucagccagguugcagaagcggcuuagcguguguccuaaucuucucucugcguguagguaggccugugccgcaaacaagcuuaccaugggacaaauaguaacauucuuccaagaaguaccucacgucauagaagaagucaugaacauaguccuaauagcccuaucaauacucgcaguacuaaaaggauuauacaauuuugcuacuuguggauuaguaggauuaguaacauucuuacuacucugcggccgaucaugcacuacaucaguauacaaaggaguauacgaacuacaaaccuuagaauuaaauauggaaacauuaaacaugacaaugccacuaucaugcaccaaaaacaacucacaucauuacauaaugguuggaaaugaaacaggccuagaauuaacacuaacaaacacaucaaucauaaaccacaaauucugcaaucugucagacgcacacaagaaaaaccuauaugaccacgcauuaaugucuauaaucucuacauuccauuuaagcauaccaaacuuuaaccaauacgaagcaaugucaugcgacuucaacggaggaaaaauaucaguccaguacaaucuaucacacucauacgcaggagaugcagcaaaccauuguggaacugucgccaacggcguauuacaaacauucaugcgaauggcauggggcggaucauacauagcacuagacucuggaugcggaaaaugggacugcauaaugacaucauaccaauaccuaauaauucaaaacacaacaugggaagaucacugucaauuuucacgaccaucuccaaucggauaucuaggacuacuuucacaaagaaccagagacauauauauaucucgucgccgcagaggaacauuuaccuggacauuaagugacuccgaaggaaaagauaccccaggaggcuauugucuaaccagauggaugcuaauagaagcagaacuaaaaugcuucggaaauacagcuguagcaaaauguaacgaaaaacaugacgaagaauuuugcgauauguuaagacuauucgacuucaauaaacaagcaauacaacgauuaaaagcaccagcacaaaugucaauacaauuaauaaauaaagccgucaaugcucuaauaaacgaccaacuaauaaugaaaaaccauuuacgcgacauaaugugcauacccuacugcaauuacucaaaauauugguaccuaaaucacacaacaaccggaaaaacaucauuaccuaaauguuggcucguaucaaacggauccuaucuaaaugaaacacacuuuucagacgauauagaacaacaagcagauaacaugauuacagaaaugcuucaaaaagaauauauggaaagacaaggcaaaacaccacuaggucuaguagaccucuucguauuuucaaccucauucuacuuaauaucaauauuccuacaucuaguuaaaauaccaacacaccgucacauagucggaaaaucuugcccaaaaccacacagacuaaaccauaugggaauaugcucaugcgguuuauacaaacaaccaggaguaccaguaagauggaaacgauaaggacuagucccuguucccagagcccacuuuuuuuucuuuuuuugaaauaaaauagccugucuuucagaucuaaaaaaaaaaaaaaaaaaaaaaaaaaaaaaaaaaaaaaaaaaaaaaaaaaaaaaaaaaaaaaaaugcaucccccccccccccccccccccccccccccccaaaggcucuuuucagagccaccagaauu

SEQ ID NO: 6649 - RNA, 1771 nt, Artificial Sequence
  mRNA product Design a-2 comprising derived and/or modified sequence from LASV(Mad39;Clade IV)__ANH09722__GPCstabilized (opt6)
gggagaguccgcucagccagguugcagaagcggcuuagcguguguccuaaucuucucucugcguguagguaggccugugccgcaaacaagcuuaccaugggacaaauaguaaccuuuuuccaagaaguuccacauguaauagaagaaguaaugaacauaguccuaauagcacuauccauauuagccguacuaaaagguuuauacaauguagccacaugcggacucauaggccuuguaacauuucuacuccuaugcggacgcucaugcacaacaacacuauacaaaggaguauaugaacuacaagcacuagaacucaacauggaaacacuaaacaugacaaugccauuauccugcacaaaaaauaacucucaccacuauaucagaguuggaaacgaaacaggacuagaacuuacauuaacuaacacaucacuaauaaaccacaaauucugcaaucuaucugaugcacacaaaaaaaaccuuuacgaccacgcacuaaugucaauuauaucaacauuccaccuaucaauaccaaacuucaaucaauacgaagcaaugucuugcgacuucaacgauggaaaaauaucaguucaauacaaucuaucacacacauacgccggagacacagccaaccacuguggaacagucgcaaauggcguuuuacaaacauuuaugcgaauggcauggggaggaucuuacauagcacuagacucagguuguggaggaugggauugcauaaugacaucauaucaauaccuaauaauucaaaacacaacaugggaagaucacugccaauuuucaagaccauccccaauaggauaucuaggacuuuuaucacaaagaacgagagacauauacauaucacgaagaagaagaggaacuuucacauggacgcucuccgacuccgaagguaaagacacaccaggaggauacugcuuaacuagauggauguuaauagaagcagaauuaaaaugcuuuggaaauacagcaguagcaaaaugcaacgaaaaacaugaugaagaauucugugacaugcuucgacuauuugacuucaauaaacaagcaauacaaagacuaaaagcaccagcacaaaugucaauccaauuaauaaacaaagcaguaaaugcauugauaaaugaccaauuaauaaugaaaaaucaucuaagagacauaaugugcauaccauauugcaauuacucuaaauauugguaccuaaaccacacugucacuggaaaaaccucacuaccaaaauguugguuaguauccaacggcucauaccuaaacgaaacccauuucuccgaugacauagaacaacaagccgacaacaugauaacagaaaugcuccaaaaagaguacauggaaagacaagguaaaaccccuuuaggauuagucgaccuauucguauucucaacauccuucuaccuaauaucaaucuucuuacaucuuguaaaaauaccaacucaucgccacgucguuggaaaaccaugccccaaaccacaucgacucaaccauauggguauauguuccuguggcuucuacaaacaaccaggagucccaguacgauggaaaagauaaggacuagucccuguucccagagcccacuuuuuuuucuuuuuuugaaauaaaauagccugucuuucagaucuaaaaaaaaaaaaaaaaaaaaaaaaaaaaaaaaaaaaaaaaaaaaaaaaaaaaaaaaaaaaaaaaugcaucccccccccccccccccccccccccccccccaaaggcucuuuucagagccaccagaauu

SEQ ID NO: 6650 - RNA, 1771 nt, Artificial Sequence
  mRNA product Design a-2 comprising derived and/or modified sequence from LASV(Z0947-SLE-2011;Clade IV)__AIT17840__GPCstabilized (opt6)
gggagaguccgcucagccagguugcagaagcggcuuagcguguguccuaaucuucucucugcguguagguaggccugugccgcaaacaagcuuaccaugggacaaauaguaacauucuuccaagaaguaccacacguaauagaagaaguaaugaauaucguucucauagcucuuuccauccuagcuguacuaaaaggauuauauaauuucgccacaugcggccuaguaggcuuaguaacauucuuauuacucugcgguagauccugcacaauaucacuauacaaaggaguauacgaauuacaaacccuagaacuuaacauggaaacacuaaacaugacaaugccauuauccuguacaaaaaacaauucucaccacuacauaaugguaggaaacgaaacaggucucgaacuaacucucacaaauaccuccauaauaaaccacaaauucugcaaccucucugaugcucacaaaaaaaaccuauacgaccaugcucuaauguccauaauaucaacuuuucauuuaucaaucccaaacuucaaccaauacgaagcaauguccugugacuuuaacggaggcaaaauuucagugcaauacaacuuaucacacucauacgccggagacgcugcuaaucacugcgguacaguagcaaacggaguauuacaaacauuuaugcgaauggcauggggaggaagcuacaucgcacucgacuccggaugugacagaugggacuguauaaugacaucauaccaauaccuaauaauacaaaacacuacaugggaagaccacugccaauuuucacgcccaucaccaaucggauacuuaggacuacuaucacaaagaaccagagacauauacauuuccagaagaagaagaggaacauucaccuggacccuaucagauucagaaggcaaagauacucccgguggauacugccuaacaagauggaugcuaauagaagcugaauuaaaaugcuucggaaacacagcaguagcaaaaugcaaugaaaaacacgaugaagaauucugcgauaugcuccgccuuuuugacuucaauaaacaggcaauacaacgauuaaaagcacccgcacaaaugaguauacaacuaauaaacaaagcaguaaacgcacuaauaaacgaucaauuaauaaugaaaaaucaucucagagacaucaugugcauaccauauugcaacuauagcaaauacugguacuuaaaccacacaaccacaggcaaaacaucacuaccaaaaugcuggcuaguaucuaacggaucauacuuaaaugaaacacauuucagcgaugauauagaacaacaagcagacaacaugauaacagaaaugcuacaaaaagaauacauggaacgacaaggaaaaaccccauuaggacuaguagacuuauucguauucaguacaucauuuuaccucauaaguaucuuccuacaccuugucaaaauaccaacacaucgacacauaguaggaaaaccaugccccaaaccacauagacuaaaccacaugggaauuugcuccuguggacuauauaaacaacccggcguaccaguaaaauggaaacgauaaggacuagucccuguucccagagcccacuuuuuuuucuuuuuuugaaauaaaauagccugucuuucagaucuaaaaaaaaaaaaaaaaaaaaaaaaaaaaaaaaaaaaaaaaaaaaaaaaaaaaaaaaaaaaaaaaugcaucccccccccccccccccccccccccccccccaaaggcucuuuucagagccaccagaauu

SEQ ID NO: 6651 - RNA, 1771 nt, Artificial Sequence
  mRNA product Design a-2 comprising derived and/or modified sequence from LASV(Josiah;Clade IV)__NP_694870__GPCstabilized (opt11)
gggagaguccgcucagccagguugcagaagcggcuuagcguguguccuaaucuucucucugcguguagguaggccugugccgcaaacaagcuuaccaugggccaaaucguaaccuucuuccaagaagucccccacgucaucgaggaagucaugaacauaguccucauagcgcucucaguacucgccguccuaaaaggccucuacaacuucgcaaccugcggacucguaggacugguaacauuccuucuacuaugcggaagaucaugcacuaccucacuauacaaaggagucuacgaacuacaaacccuagaacugaacauggaaacccucaacaugaccaugccccuauccugcaccaaaaacaacagccaucacuacauaaugguaggcaacgaaaccggccuugaacuaacccuaacaaacacauccaucauaaaccacaaauucugcaaccucuccgacgcccacaagaaaaaccucuacgaccacgcucucaugaguaucauauccaccuuucaccuguccaucccaaauuuuaaccaguaugaagccauguccugcgacuucaacggcggaaaaaucuccguacaauacaaccucucccacuccuacgccggcgacgcagccaaccacugcggcaccgucgccaacggcguccuccagaccuucaugcgaauggccuggggaggcuccuacaucgcacucgacuccggaugcggcaauugggacugcaucaugaccuccuaccaauaccucaucauccaaaauaccaccugggaagaccacugccaauucucccgcccaucccccaucggauaccucggacuacuaucccaacggacccgcgacaucuacaucagccgacguaggcgcggaacauucaccuggacgcuaagcgacuccgaaggcaaagacacccccggaggcuacugccugacccgcuggaugcuaaucgaagcagaacuaaaaugcuucggcaacaccgccgucgccaaaugcaacgaaaaacacgacgaggaguucugugacaugcuacgccucuucgacuucaacaaacaagccauacagcgacucaaagcaccggcccaaaugagcauccagcuaaucaacaaagccgucaacgcacucauaaacgaccagcucauaaugaaaaaccaccuacgcgacaucaugugcauccccuacugcaacuacucaaaauacugguaccugaaccacacaacuaccggccgcacaucccucccaaaaugcugguuagucuccaacggcucauaccucaaugaaacccacuucagcgacgacaucgaacaacaagccgacaacaugaucacagaaaugcuccaaaaagaauacauggaacgacaaggaaaaacaccccucggccucgucgaccuauuugucuucuccacaucguucuaccuaauauccaucuuccuccaccucguaaaaauccccacccaucgccacaucgucggcaaauccugccccaaaccacaccgccucaaccauaugggcaucugcuccugcggucucuacaaacaacccggcguucccgucaaauggaaacgcuaaggacuagucccuguucccagagcccacuuuuuuuucuuuuuuugaaauaaaauagccugucuuucagaucuaaaaaaaaaaaaaaaaaaaaaaaaaaaaaaaaaaaaaaaaaaaaaaaaaaaaaaaaaaaaaaaaugcaucccccccccccccccccccccccccccccccaaaggcucuuuucagagccaccagaauu

SEQ ID NO: 6652 - RNA, 1768 nt, Artificial Sequence
  mRNA product Design a-2 comprising derived and/or modified sequence from LASV(LP;Clade I)__AAF86701__GPCstabilized (opt11)
gggagaguccgcucagccagguugcagaagcggcuuagcguguguccuaaucuucucucugcguguagguaggccugugccgcaaacaagcuuaccaugggccaaauaauaacauucuuccaagaagucccccacgucaucgaagaagucaugaauaucguacucaucgcccucucgcuccucgcuauccugaaaggccucuacaacaucgccacaugcggcaucauaggccucgucgccuuccuauuucucugcggcaaaucuugcucccucacccuaaaaggaggcuacgaacuccaaacacuagaacucaacauggaaacccucaauaugaccaugccccuuuccugcaccaaaaacuccucccaccacuacauccgcguaggcaacgaaaccggccucgaacucacacucaccaacacaagcaucaucaaccacaaauucugcaaccugucugacgcucacaagaaaaaucuuuacgaucacgcacucaugucgaucauaucaacauuccaccucucgauccccaacuucaaccaauacgaagccauguccugcgacuucaacggcggcaaaaucagcguccaauacaaccucucccacuccuacgccggcgacgcagcagaacacugcggcaccguggcgaacggaguacuccaaaccuucaugcgcauggccuggggcggacgcuacauagcccucgacuccggcuguggcaacugggacugcaucaugaccuccuaccaauaccucaucauccagaauaccaccugggaagaccacugccaauucucccgccccucaccaauaggcuaccucggccuccuaucccaacgaacacgcgacaucuacaucucaagacgcagacgcggcaccuucaccuggacccucucagacucugaaggcaacgaaacccccggaggcuacugccucacacgauggaugcucaucgaagccgaacucaaaugcuucggaaacaccgccguggccaaaugcaacgaaaaacacgacgaggaguucugcgacaugcuccgacucuucgacuucaacaaacaagccauacgccgacuaaaagcccccgcgcaaaugagcauccaacucaucaacaaagccgucaacgcccucaucaaugaucaacucaucaugaaaaaccaccuccgcgacauaaugugcaucccauacugcaacuacucaaaauacugguaccuaaaccacacuuccucaggacgcaccucacuccccaaaugcuggcucaucuccaacggcuccuaccuuaacgaaacacaguucucggacgacaucgaacaacaagcagacaacaugaucaccgaaaugcuacaaaaagaauacaucgaacgccaaggcaaaacaccccuaggccuagucgacauuuucauauucuccaccuccuucuaccucaucucaauuuuccuccaccuaaucaaaauccccacacaucgccacaucguaggaaaaccuugccccaaaccacacagacuaaaccacaugggcgucugcuccugcggccucuacaagcacccaggcguucccacaaaauggaagcgcuaaggacuagucccuguucccagagcccacuuuuuuuucuuuuuuugaaauaaaauagccugucuuucagaucuaaaaaaaaaaaaaaaaaaaaaaaaaaaaaaaaaaaaaaaaaaaaaaaaaaaaaaaaaaaaaaaaugcaucccccccccccccccccccccccccccccccaaaggcucuuuucagagccaccagaauu

SEQ ID NO: 6653 - RNA, 1768 nt, Artificial Sequence
  mRNA product Design a-2 comprising derived and/or modified sequence from LASV(803213;Clade II)__AAF86703__GPCstabilized (opt11)
gggagaguccgcucagccagguugcagaagcggcuuagcguguguccuaaucuucucucugcguguagguaggccugugccgcaaacaagcuuaccaugggccaaaucaucaccuucuuccaggaggucccacacgucaucgaggaagucaugaacaucguccucaucgcccucucccuccuagccauccucaaaggcaucuacaacgucgcaaccugcggacucuucggacuaauauccuuccuccuccuuugcggccgcuccuguucgguaaccuacaaaggcguauacgaacugcaaacacuagaacucaacauggccaaccucaacaugaccaugccccuuuccugcaccaagaauaacucccaccacuacaucauggucggcaacgaaaccggucuagaacucacccuaaccaacacuagcauaaucaaccacaaauucugcaaccuaagcgaugcccacaagaaaaaccucuacgaccacgcccuaaugucgaucaucuccacauuucaccuauccauccccaacuucaaccaauacgaagccauguccugcgacuucaacgguggcaaaaucuccguccaauacaaccucucccacagcuucgccgucgacgcagcgaaccauugcggcaccaucgccaacggcguacuacaaacuuucaugcgcauggccuggggcgggagcuacaucgcccucgacuccggcugcggaaacugggacugcauaaugaccucauaccaauaccucauaauccaaaacacaaccugggaagaccacugccaguucucucgaccaucaccaauaggcuaccuaggccuccuaucucaacgcacccgcgacaucuacaucucccgccgccgccgcggcacauucacauggacccucuccgacagcgaaggcaacgaagccccuggcggauacugccucacccguuggaugcucauagaagcagaacucaaaugcuucggcaacacggccgucgcuaaaugcaacgaaaaacacgacgaagaguucugcgacaugcuccgacucuucgacuucaacaaacaagccaucaaacgucucaaaacgcccgcccaaauguccauccagcucaucaacaaagcagucaacgcccucaucaaugaccaacucaucaugaaaaaccaccuacgcgacaucauguguauccccuacugcaacuacagccguuacugguaccuaaaccacacaguaaccggcaaaacaucacucccacgcugcuggcuagucuccaacggcuccuaccucaacgaaacccacuucuccgacgacaucgaacaacaggccgacaacaugaucaccgagaugcuccaaaaggaguacauggaccgccaaggcaaaacaccccucggccucguagaccuauuuguauucuccaccuccuucuaccuaaucuccauauuccuccaucucguaaaaauucccacccaccgacacaucgucggaaagccaugccccaaaccacaccgacucaaccacaugggcaucugcucgugcggccuauacaagcacccaggcguaccuguaaaauggaaacgcuaaggacuagucccuguucccagagcccacuuuuuuuucuuuuuuugaaauaaaauagccugucuuucagaucuaaaaaaaaaaaaaaaaaaaaaaaaaaaaaaaaaaaaaaaaaaaaaaaaaaaaaaaaaaaaaaaaugcaucccccccccccccccccccccccccccccccaaaggcucuuuucagagccaccagaauu

SEQ ID NO: 6654 - RNA, 1768 nt, Artificial Sequence
  mRNA product Design a-2 comprising derived and/or modified sequence from LASV(GA391;Clade III)__CAA36645__GPCstabilized (opt11)
gggagaguccgcucagccagguugcagaagcggcuuagcguguguccuaaucuucucucugcguguagguaggccugugccgcaaacaagcuuaccaugggccaaaucguuaccuucuuccaagaaguaccacacguaaucgaagaagucaugaacaucguauuaaucgcccucucaauccucgcuauccucaaaggccuuuacaacguagcuaccugcggccucaucggccuaguaaccuuccuccuccucuccggccgcuccugcucccuuaucuacaaaggcacauacgaacuucaaacccucgaacuaaauauggaaacccuaaacaugacuaugccccuauccugcaccaaaaacaacucgcaccacuacauccgagucggcaaugaaacaggccucgaacucacccuuaccaacacaucgauccuaaaccacaaguuuuguaaccucuccgacgcgcacaaacgcaaccucuacgaccacucccucaugucaaucaucuccaccuuccaccuaucuauacccaacuucaaccaauacgaagcaaugucuugcgacuucaacggcggaaaaaucaccguccaguacaaucuaucacacucauucgcagucgacgccgccggucacugcggaacccucgccaacggaguacuucaaacauucaugcgcauggcauggggcggcuccuacaucgcccuagacucaggcugcggcaacugggacugcauaaugaccuccuaccaauaccucauuauccaaaacaccaccugggacgaccacugccaauucucccgaccuucacccaucggcuaccucgggcuacuaucccaacgaacccgagacaucuacaucucccgcaggcgccgcggcacauucaccuggacccuauccgacagcgaaggcaacgaaacccccgguggcuacugccucacccgcuggaugcucauagaagccgaguuaaaaugcuucgguaacacagccgucgcaaaaugcaacgaaaaacacgacgaagaguucugcgacaugcuccgacuuuucgacuucaauaaacaagccauccgccgccuuaagaccccagcccaaaugucaauccaacucaucaacaaagccguaaacgcccucaucaacgaucaacucaucaugaaaaaccaccuccgugacaucaugugcauacccuacugcaacuacucccgcuauugguaccucaaccacaccuccacaggcaagaccucacucccccgcugcuggcucauauccaauggcucuuaucuaaacgaaaccaaauucucagacgacaucgaacaacaagcugacaacaugaucaccgaaaugcuccaaaaagaauacauagaccgccaaggaaaaacaccccucggccucguagaccucuucgucuucuccaccuccuucuaucucaucucgaucuuccuccaccucgucaaaauacccacccaccgacacauagucggaaaacccugccccaaaccacaccgccucaaccacaugggcaucugcuccugcggccuauacaaacaacccggcguccccgugcgcuggaaacgauaaggacuagucccuguucccagagcccacuuuuuuuucuuuuuuugaaauaaaauagccugucuuucagaucuaaaaaaaaaaaaaaaaaaaaaaaaaaaaaaaaaaaaaaaaaaaaaaaaaaaaaaaaaaaaaaaaugcaucccccccccccccccccccccccccccccccaaaggcucuuuucagagccaccagaauu

SEQ ID NO: 6655 - RNA, 1771 nt, Artificial Sequence
  mRNA product Design a-2 comprising derived and/or modified sequence from LASV(AV;Clade V)__CCA30314__GPCstabilized (opt11)
gggagaguccgcucagccagguugcagaagcggcuuagcguguguccuaaucuucucucugcguguagguaggccugugccgcaaacaagcuuaccaugggccaaauaguaaccuucuuccaagaaguuccccacgucaucgaagaagucaugaacaucguccuaauagcccucucaauccuagccguacuaaagggccucuacaacaucgcaaccugcggccucaucggccuaaucaccuuccuacuccugugcggacgcucaugcagcuccaaccuauacaaaggcgucuacgaacuccaaucccuugaccucaacauggaaacucucaacaugaccaugcccuuguccugcaccaaaaacaacucacaccacuacauacgcguaggcaacgacaccggucucgaacuaacccuaaccaacaccucuauccucaaccacaaauucugcaaccuaucagacgcacacaagaaagaccucuacgaccacgcacucaugucgaucauauccaccuuccaccucucaauacccaacuucaaccaauacgaagccaugucaugcgacuuuaacggaggcaaaaucuccguacaauauaaccucucacacuccuacgccaucgacgccgcaaaccacugcggaaccgucgccaacggcauccuccaaacuuucaugcgcauggccuggggaggaucuuacaucgcccuugacagcggaugcgguaacugggauugcaucaugaccuccuaccaauaccucauuauccaaaauacuaccugggaaaaccacugccaguucucccgccccagccccaucggauaccuaggucuacucucccaacgaacccgcgauaucuacaucucccgaagacgccgcggcaccuuuaccuggacacuauccgacucagaagguaacgccaccccagggggauacugccucacgagauggaugcucaucgaagcagaacuuaaaugcuucggcaacaccgccguagcaaaaugcaacgaaaaacacgacgaagaguucugcgacaugcuccgacucuucgacuucaacaaacaagccauaucacgucucaaauccccagcccaaauguccauacaacucauaaacaaagccguuaacgcacucaucaacgaccaacucaucaugaaaaaccaccuccgcgacauaaugugcauacccuacugcaacuacuccaaauacugguaccugaaccacaccauaaccggcaaaacuucacucccuaaaugcuggcucgucucgaacggaucauaccucaacgaaacucacuucuccgacgacaucgaacaacaagccgacaacaugaucaccgaaaugcuccaaaaagaauacauggaacgccaaggcaaaaccccacugggccucgucgaccucuucguauuuuccaccucauucuaccucaucuccaucuuccuccgccucguaaaaauccccacccaccggcacaucgucggaaaacccugccccaaaccccaucgacucaaccacaugggaauuugcucuugugggcuuuacaaacaaccaggcguacccguccgauggaaacgcuaaggacuagucccuguucccagagcccacuuuuuuuucuuuuuuugaaauaaaauagccugucuuucagaucuaaaaaaaaaaaaaaaaaaaaaaaaaaaaaaaaaaaaaaaaaaaaaaaaaaaaaaaaaaaaaaaaugcaucccccccccccccccccccccccccccccccaaaggcucuuuucagagccaccagaauu

SEQ ID NO: 6656 - RNA, 1768 nt, Artificial Sequence
  mRNA product Design a-2 comprising derived and/or modified sequence from LASV(Togo/2016/7082;Clade VI)__AMR44577__GPCstabilized (opt11)
gggagaguccgcucagccagguugcagaagcggcuuagcguguguccuaaucuucucucugcguguagguaggccugugccgcaaacaagcuuaccaugggacaaaucaucaccuucuuccaagaagucccccacguaaucgaagaagucaugaacaucguacucauagcccucucccuacuagccauccucaaaggcgucuacaacgucgccacaugcggcaucauaggccucgucaccuuccuauuccucugcggccgcuccuguucccucaucuacaaaggcucguaugaauuacagacccucgaacucaacauggaaacccucaacaugaccaugccccucucaugcaccaaaaacagcucacaccacuacauccguguuggcaacgaaaccggacucgaauuaacccuuaccaacacauccaucaucaaccacaaguucugcaaccucucagacgcucacaaacgcaaccucuacgaccacgcccucauguccauccucuccaccuuccaccuuuccauccccaacuuuaaccaauacgaagccauguccugcgacuucaacggcggcaaaaucuccguccaauacaaccugucccacgccuacgccgucgacgccgccgaacacugcggcacagucgcaaacgguguccuacaaaccuucaugcguauggccuggggcggcuccuacauagcccuagacucuggauguggaaacugggacugcauaaugaccuccuaucaauaccuaaucauccaaaacacuacaugggaagaccacugccaauuuucccgacccucacccauaggcuaccucggccuccucucccaacgcacccgcgacauauacaucucucgucgccgccgcggcacauucaccuggaccuuaagugacucagaaggaaacgaaacccccggaggauacugccucacacgauggaugcucaucgaagcugaacuuaagugcuucggcaacacugccgucgccaaaugcaacgaaaaacacgacgaagaguucugcgacaugcuccgauuauucgacuucaacaagcaagccauccagcgacucaaaucccccgcccaaaugucgauccagcucauaaacaaagccgucaacgcccuuaucaacgaccaacucauaaugaaaaaccaccucagagacaugaugugcauaccguacugcaacuacuccaaguacugguaucucaaccacacauccuccggaagaaccucacuccccaaaugcuggcucguaucgaacggcucuuaccuaaacgaaacacacuuuagugacgacauugaacaacaagccgacaacaugaucaccgaaaugcuccaaaaagaauacaucgacagacaaggcaaaacaccccucggacucgucgaccuauucguauucucaaccucauucuaccucauauccaucuuucuccaccuaauaaaaauacccacccaccgacacaucgucggcaaacccugccccaaaccucaccgccuaaaccacaugggcaucugcuccugcggccucuacaagcaacccggaguccccacccgcuggaaacgauagggacuagucccuguucccagagcccacuuuuuuuucuuuuuuugaaauaaaauagccugucuuucagaucuaaaaaaaaaaaaaaaaaaaaaaaaaaaaaaaaaaaaaaaaaaaaaaaaaaaaaaaaaaaaaaaaugcaucccccccccccccccccccccccccccccccaaaggcucuuuucagagccaccagaauu

SEQ ID NO: 6657 - RNA, 1768 nt, Artificial Sequence
  mRNA product Design a-2 comprising derived and/or modified sequence from LASV(KAK-428;Clade n.d. (VII))__ANH09740__GPCstabilized (opt11)
gggagaguccgcucagccagguugcagaagcggcuuagcguguguccuaaucuucucucugcguguagguaggccugugccgcaaacaagcuuaccaugggccaaaucguaaccuucuuccaggaaguaccccacgucaucgaagaaguuaugaacaucguacucaucgcccucucccuccuagcgauccuuaaaggacucuacaacuucgcaaccugcggcgucaucggacucauaacguuccuacuacucugcggacgcuccuguuccgccacguacaaaggccaauacgaacuccagacacuagaacucaacauggaaagccuaaacaugacgaugccccuauccugcaccaaaaacaacucacaccacuacauccgcgccgggaauaacaccggccuagaacuaacacucacaaacaccucgaucaucucccacaaauucugcaaccuaucagacgcccacaagaaaaaccucuacgaccacacgcucaugucaauuauuaccaccuuccaccucucgauaccaaacuucaaucaauacgaagccaugucaugcgacuucaacgguggcaaaaucucuauccaguacaacuugucccacuccuacgccggcgacgcggcccagcacugcggcaccguugcaaacggcguacugcagaccuucaugcgaauggccuggggaggcuccuaccucgcccuagacuccggcugccgcggaugggacugcaucaucuccaguuaccaauaccucaucauccaaaacaccacaugggacgaccacugccaauucucacgccccuccccgaucggcuaccucgguuucgucucccagaaaacgcgcgacauauacaucagccgccgacgucgcggcaccuucacauggacccucagcgacagcgaaggccacgacaugcccggcggcuacugccuaacccgauggaugcuaaucgaagccgaucucaagugcuucggcaacaccgccgucgcaaaaugcaacgaaaaacacgacgaagaguucugcgauauguggcgacucuucgacuucaacaaacaggccauccaaaggcuaaaggccccagcccaaaugaacauucaacuuauaaacaaagcagucaacgcccuuaucaacgaccaacucaugaugaagaaccaccuacgcgacaucaugugcauccccuacuguaacuacuccaaauucugguaccucaacaacaccaccaccggccgcaccucucucccacgcugcuggcucaucagcaacggcuccuaccuaaacgaaacccacuucuccgacgacaucgaacaacaagccgacaacaugauaacugaaaugcugcaaaaagaauacauggaccgucaaggcaaaacaccccucggccucgucgaccucuucguuuucuccaccagcuucuaccucaucaccaucuuccuacaccuugucaagauacccacccaccgccacaucgucggcaaacccugucccaaaccccaccgacucaaccacaugggaaucugcuccugcggccuauacaaacaaccaggcguccccguacgcuggaaacgcuaaggacuagucccuguucccagagcccacuuuuuuuucuuuuuuugaaauaaaauagccugucuuucagaucuaaaaaaaaaaaaaaaaaaaaaaaaaaaaaaaaaaaaaaaaaaaaaaaaaaaaaaaaaaaaaaaaugcaucccccccccccccccccccccccccccccccaaaggcucuuuucagagccaccagaauu

SEQ ID NO: 6658 - RNA, 1768 nt, Artificial Sequence
  mRNA product Design a-2 comprising derived and/or modified sequence from LASV(Pinneo-NIG-1969;Clade I)__AIT17836__GPCstabilized (opt11)
gggagaguccgcucagccagguugcagaagcggcuuagcguguguccuaaucuucucucugcguguagguaggccugugccgcaaacaagcuuaccaugggacaaauaaucaccuucuuccaagaagugccccacgucauagaagaagucaugaauaucguccucaucgcacucucccuacucgccauacucaaagggcuguacaacauagcaaccugcggcaucauagggcucguugccuuccucuuccuuugcggcaaaucgugcucccucacccucaaaggcggcuacgaacuacaaacccucgaacucaauauggaaacccuaaacaugaccaugccacuauccuguacaaagaacucaucccaucacuacauccgcguaggcaaugaaacaggccucgaacucacacuaacuaacacguccauaauaaaccacaaauucugcaaccucucagacgcccacaagaaaaaccucuacgaccacgcccucauguccaucaucuccaccuuucaccuauccauucccaacuucaaccaauacgaagccauguccugcgacuucaacggcgguaaaaucucaguacaauacaaccucucacacuccuacgccggcgacgcagccgaacacugcggcaccguagccaacggcguacuacaaacauucaugcgcauggccuggggcggccgcuacauagcacuggacuccggcugcggaaacugggacugcaucaugacauccuaccaauaccucauaauccaaaacaccacaugggaagaccacugccaauucucccgcccaucacccaucggcuaccugggacuccuaucacaacgcacccgagacaucuacaucucccgacgccggcgcggcaccuucacauggacauuaucagacucugaaggcaaugagaccccaggaggcuacugccucacccgcuggaugcucaucgaagccgaacuaaaaugcuucggcaauaccgccguagccaaaugcaacgaaaaacacgaugaagaguucugcgacaugcuccgccuauucgacuucaacaaacaagcaaucagacgccucaaagccccagcccaaauguccauacagcuaauaaacaaagcagucaacgcucucaucaacgaccaacucaucaugaaaaaccaucuccgcgacaucauguguauccccuacugcaacuacagcaaauacugguaucuuaaucacaccuccuccggccgaaccucucuccccaaaugcuggcucauauccaacggauccuaccucaacgaaacccaguucagcgacgacaucgaacaacaagcggacaauaugaucaccgaaaugcuacagaaagaauacaucgaacgccaaggcaaaacaccacucggccuagucgacaucuucaucuucuccaccuccuucuaccucauuagcaucuuccuacaccucauaaaaauccccacacaccgccacaucgucggaaaaccgugccccaaaccucaccgucuuaaccacaugggcgucugcuccugcggccucuacaaacaccccggcguccccaccaaauggaaacgcuaaggacuagucccuguucccagagcccacuuuuuuuucuuuuuuugaaauaaaauagccugucuuucagaucuaaaaaaaaaaaaaaaaaaaaaaaaaaaaaaaaaaaaaaaaaaaaaaaaaaaaaaaaaaaaaaaaugcaucccccccccccccccccccccccccccccccaaaggcucuuuucagagccaccagaauu

SEQ ID NO: 6659 - RNA, 1768 nt, Artificial Sequence
  mRNA product Design a-2 comprising derived and/or modified sequence from LASV(ISTH0009-NIG-2011;Clade II)__AIT17404__GPCstabilized (opt11)
gggagaguccgcucagccagguugcagaagcggcuuagcguguguccuaaucuucucucugcguguagguaggccugugccgcaaacaagcuuaccaugggucagaucauuaccuucuuccaggaagucccacacgucaucgaagaagucaugaacaucguacucaucgcccucagucuacucgcgauccuaaaaggcaucuacaacgucgcaaccugcggacucuuuggccuagucucuuuccuccuucucugcggacggucaugcuccaccaccuacaaaggcgucuacgaacuccaaacccucgaacuugacauggcaucccuaaauaugaccaugccgcucuccugcaccaaaaauaacucucaccacuacaucauggucggaaacgaaaccggccucgaacucacccuaacaaacacauccauuaucaaccacaaauuuugcaaccucuccgacgcucauaagaaaaaccucuacgaccacgcccucauguccaucauaucaaccuuccaccuaucaauaccaaacuucaaccaauacgaagccaugagcugcgacuucaacggaggaaagauaucaguccaauacaaccucucccacgccuacgcagucgacgcagccaaccacugcggcacaaucgccaacggcguacuacaaaccuucaugcgcauggccuggggcgguuccuacaucgcccucgacagcggaugcggaagcugggacugcauaaugacauccuaccaauacuuaaucauccaaaacaccacuugggaagaccacugccaauucucacgccccuccccaauaggauaccucggccuacucucgcaacgcacccgugacauauacauaucccgacgccgccgcggcaccuucacauggacccuauccgacagcgaaggcaacgaaacgccuggcggcuacugccucacccgcuggauguuaaucgaagccgagcuaaaaugcuucggcaacacagccguagccaaaugcaacgaaaaacacgacgaagaguucugcgacaugcucagacucuucgacuucaacaaacaagccauacgacgccucaaaaccccagcacaaauguccauccaacuaaucaacaaagccgucaacgcccuuauaaacgaccagcuuauaaugaaaaaccaccuccgcgacaucaugugcauccccuacugcaacuacagcaaauacugguaccuaaaccacacggucaccggcaaaacgucccucccccgcugcuggcuagucuccaacgguuccuaccucaacgaaacccacuucagcgacgacaucgaacaacaggccgacaacaugaucaccgaacuccuccaaaaagaauacauggaccgccaaggcaaaacaccccuaggccucgucgaccucuuugucuucagcaccucauucuaccucauaucuaucuuccuacaccuuaucaaaauccccacccacagacacaucaccggcaagcccugccccaaaccccaccgccucaaccacauggguaucugcagcugcggccucuacaaacacccuggcguacccguaaaguggaaacgcuaaggacuagucccuguucccagagcccacuuuuuuuucuuuuuuugaaauaaaauagccugucuuucagaucuaaaaaaaaaaaaaaaaaaaaaaaaaaaaaaaaaaaaaaaaaaaaaaaaaaaaaaaaaaaaaaaaugcaucccccccccccccccccccccccccccccccaaaggcucuuuucagagccaccagaauu

SEQ ID NO: 6660 - RNA, 1768 nt, Artificial Sequence
  mRNA product Design a-2 comprising derived and/or modified sequence from LASV(ISTH2010-NIG-2012;Clade II)__AIT17482__GPCstabilized (opt11)
gggagaguccgcucagccagguugcagaagcggcuuagcguguguccuaaucuucucucugcguguagguaggccugugccgcaaacaagcuuaccaugggccaaaucauaacauucuuccaggaagucccgcacgucaucgaagaggucaugaacaucguacuaaucgcccugucccuccuagccauacuaaaaggcauauacaacguagccacaugcggccuauucggccuugucuccuuccuccuccucuguggccgcuccugcucaaccaccuacaaaggcguauacgaacuccaaacacuagaacucgacauggccucccucaacaugaccaugccccucucauguaccaagaacaacucacaccauuacaucauggucggcaacgaaaccggccuggaacucacccucacuaauaccagcaucaucaaccauaaauucugcaaccuauccgacgcccacaagaaaaaccucuacgaccacgcacuaaugucgaucaucucaaccuuccaccuaucuauccccaacuucaaccaauaugaggccauguccugcgacuucaacggcggcaaaauaagcguacaauacaaccucucccacgccuacgcugucgaugccgcuaaccacugcggaaccaucgcuaacggaguccuacaaaccuucaugcgaauggccuggggcggcagcuacaucgcccuagacuccggaugcggcagcugggacugcaucaugaccuccuaccaauaccuaaucauccaaaacaucaccugggaagaccacugccaauucagccgcccaucaccaaucggcuaccucggccuucucucucaacgaacccgagacaucuacaucucccgccgccgccgcggaaccuucaccuggacucucucugacucagaaggcaacgaaaccccaggaggauauugccucacccguuggaugcucaucgaagcagaacucaaauguuucggcaacaccgccgucgccaaaugcaacgaaaaacacgacgaagaguucugcgacaugcuccgacucuucgacuucaacaaacaagccauccggcgacucaaaacccccgcgcaaauguccauacagcucaucaacaaagccguaaacgcccucaucaacgaccagcuuaucaugaaaaaccaccuucgcgacaucaugugcauccccuacugcaacuacuccaaauauugguaccucaaccacaccguaaccgguaaaacgagccucccccgcugcuggcucgucuccaacggcuccuaccucaaugaaacccacuuuuccgacgacaucgaacaacaagccgacaacaugaucaccgaacuccuucaaaaagaauacauagaccgccaagguaaaaccccgcucggccuaguagaccuuuucguauucucaaccucuuucuaccuaaucuccaucuuccuccaccucgucaaaauccccacccaccgacacgucguagguaaaccaugccccaaaccccaccgacucaaucacauggguaucugcuccugcggacucuacaaacaucccggcguacccgucaaauggaaacgcuaaggacuagucccuguucccagagcccacuuuuuuuucuuuuuuugaaauaaaauagccugucuuucagaucuaaaaaaaaaaaaaaaaaaaaaaaaaaaaaaaaaaaaaaaaaaaaaaaaaaaaaaaaaaaaaaaaugcaucccccccccccccccccccccccccccccccaaaggcucuuuucagagccaccagaauu

SEQ ID NO: 6661 - RNA, 1768 nt, Artificial Sequence
  mRNA product Design a-2 comprising derived and/or modified sequence from LASV(Lassa virus/H.sapiens-wt/NGA/2015/ISTH_0543;Clade II)__AVO03639__GPCstabilized (opt11)
gggagaguccgcucagccagguugcagaagcggcuuagcguguguccuaaucuucucucugcguguagguaggccugugccgcaaacaagcuuaccaugggccaaaucaucaccuucuuccaggaaguaccacacgucaucgaagagguaaugaacauaguccucaucgcacucucccuacucgccauauuaaaaggcaucuacaacguagcaaccugcggccuauucggccuagucucauuccuccuccucugcggccgcuccugcuccaccaccuacaaaggaguuuacgaacuccaaacccucgaacucgacauggcaaaccuaaacaugacaaugccucucuccugcaccaaaaacaacucacaccacuacaucauggucggcaacgagaccggccucgaacucacuuuaaccaacaccucaaucaucaaccacaaauucugcaaccuaucggacgcccacaagaaaaaccucuacgaccacgcccugaugucaaucaucucaacauuccaccucuccauacccaacuucaaccaauacgaagcaauguccugcgacuucaacggcggcaaaaucucuguacaauacaaccugucacacaccuacgccgucgacgccgccaaccacugcggaaccaucgccaacggcguccuacaaacauucaugcgcauggcguggggcggauccuacauagcucucgacuccgguugcggcuccugggacuguaucaugacauccuaccaauaccucgucauacaaaacacaaccugggaagaccacugccaauucucccgccccucuccaaucggcuaccugggccuccucagccaacgcacccgugacaucuacaucuccagacgcagacgcggaaccuucacauggacccucucagacuccgaaggcaacgagacccccggcggcuacugccuaaccagauggaugcugaucgaagcagaacugaaauguuucgguaacacugcaguagccaaaugcaacgaaaaacacgacgaagaguucugcgacaugcucagacuuuucgacuucaacaaacaagccauccgccgacuaaaaacccccgcccagaugucuauccaacucaucaacaaagccgucaacgcacucaucaacgaucaacucaucaugaaaaaccaccuccgcgacauuaugugcauaccuuacugcaacuacuccaaauauugguaccucaaccacacagucaccggcaaaaccagccucccccgcugcuggcucgucucaaacggcagcuaccuaaacgaaacccacuucucugaugacauugaacaacaggccgacaacaugauuacagaacuccuacaaaaggaauacaucgacagacaaggaaaaaccccucucggccuaguagaccucuucgucuucucaacauccuucuaccuaaucagcaucuuccuccaccucgucaaaauccccacccaccgccacauaaccggcaaacccugccccaaaccucaccgacucaaccacaugggaaucugcucauguggccucuacaaacaccccggcguacccgucaaauggaaacgcuaaggacuagucccuguucccagagcccacuuuuuuuucuuuuuuugaaauaaaauagccugucuuucagaucuaaaaaaaaaaaaaaaaaaaaaaaaaaaaaaaaaaaaaaaaaaaaaaaaaaaaaaaaaaaaaaaaugcaucccccccccccccccccccccccccccccccaaaggcucuuuucagagccaccagaauu

SEQ ID NO: 6662 - RNA, 1768 nt, Artificial Sequence
  mRNA product Design a-2 comprising derived and/or modified sequence from LASV(Lassa virus/H.sapiens-wt/NGA/2016/ISTH_0009;Clade II)__AVO03571__GPCstabilized (opt11)
gggagaguccgcucagccagguugcagaagcggcuuagcguguguccuaaucuucucucugcguguagguaggccugugccgcaaacaagcuuaccaugggacaaaucaucaccuucuuccaagaagucccccacgucaucgaagaagucaugaauaucguccucauagcccuaucucuccuugcuauccucaaaggcaucuacaacgucgcaaccugcggccuacuagggcucgucuccuuccuacuacucugcggccgcuccugcucaaccaccuacaaaggcgucuacgaacuucaaacucucgaacucgauauggccucucuuaacaugacaaugccccucuccugcaccaaaaacaacucccaccacuacaucaugguuggcaaugaaacaggccucgaacucacccuaacaaacaccuccaucaucaaccacaaauucuguaaucucuccgacgcccacaagaaaaaccuauacgaccacgcccuuaugucuauaaucagcaccuuccaccucuccauacccaacuuuaaccaguacgaagccauguccugcgacuuuaacggcggacgcauauccguccaauacaaccugucacacuccuacgccguggacgcugccaaccacugcggcacaauugccaacggcguccugcaaaccuucaugcgcauggccuggggcggcuccuacauagccuuagacuccggaugcggcuccugggacugcaucaugacgucauaccaauaccucaucauacaaaacaccaccugggaagaccacugccaauuuucccgccccagcccaaucggcuaccucggccuucuaucccaacgaacccgcgacaucuacaucucacgccgccgccgcggcaccuucaccuggacccucuccgacuccgaaggcaacgaaacaccaggcggcuacugucucacacgcuggaugcucaucgaagccgaacuaaaaugcuucggcaacaccgccgucgccaaaugcaacgaaaaacacgacgaagaauuuugcgacaugcuacgacuuuucgacuucaacaaacaagcuauccgccgccuaaaaacccccgcucaaauguccauacaacucaucaacaaagccgucaacgcccucaucaacgaccaacuaaucaugaaaaaccaucuccgagacaucaugugcauccccuauuguaacuacuccaaauacugguaccuaaaccacaccguuaccgguaagacaucccuaccacgcugcuggcuagucucaaacggcuccuaccuaaacgaaacccacuucuccgacgacauagaacagcaagcagacaacaugaucacugaacuccuucaaaaagaauacaucgaccgccaagguaaaacaccccucggccucgucgaccuauucgucuucuccaccuccuucuaucuaauauccaucuuccuccaccucgucaaaauccccacccaucgccauaucacuggaaaacccugccccaaaccacaucgacuaaaccacauggguaucugcuccugcggccuauacaaccaccccggcgucccagucaaguggaaacgcuagggacuagucccuguucccagagcccacuuuuuuuucuuuuuuugaaauaaaauagccugucuuucagaucuaaaaaaaaaaaaaaaaaaaaaaaaaaaaaaaaaaaaaaaaaaaaaaaaaaaaaaaaaaaaaaaaugcaucccccccccccccccccccccccccccccccaaaggcucuuuucagagccaccagaauu

SEQ ID NO: 6663 - RNA, 1768 nt, Artificial Sequence
  mRNA product Design a-2 comprising derived and/or modified sequence from LASV(Lassa virus/H.sapiens-wt/NGA/2016/ISTH_0017;Clade II)__AVO03567__GPCstabilized (opt11)
gggagaguccgcucagccagguugcagaagcggcuuagcguguguccuaaucuucucucugcguguagguaggccugugccgcaaacaagcuuaccaugggccagauuaucaccuucuuccaggaaguaccacacgucaucgaagaaguaaugaacaucguacucaucgcccuaucccuacucgcaauccucaaaggcaucuacaacguagcaaccugcggccucuucggacucguuuccuuccuccuccuuugcggccgcucaugcuccacaaccuacaaaggcgucuacgaacuacaaacacucgaacucgacauggccucccucaacaugaccaugccccucagcugcaccaaaaacaacagccaccacuacaucauggucggcaacgaaacaggacuugaacucacccucacaaacaccucaaucaucaaccacaaguucugcaaccuaagcgacgcgcacaagaaaaaccuauacgaccacgcccuaaugucaaucaucagcaccuuccaccucucgauucccaacuucaaccaauaugaagcaauguccugcgacuucaacggaggcaaaaucagcguccaguacaaccuaagccacacauacgccauagacgccgcaaaccacugcggcaccaucgccaauggcguccuccaaaccuucaugcgcauggccuggggaggcuccuacauagcacucgacuccggcugcggcucaugggacugcaucaugacauccuaccaauaccucaucauccaaaacacgacaugggaagaccacugccaauucucacgccccucccccauaggcuaccuaggccuccuaucacaacgcacccgcgacaucuacaucuccagacgacgucgagguaccuucaccuggacacucagcgacucagaaggcaacgaaacccccggcggauacugccucacccgcuggaugcuaauagaagcagaacucaaaugcuuuggcaacaccgcugucgcaaaaugcaacgaaaagcacgacgaagaguuuugcgacaugcuccgccucuucgacuucaacaaacaagccauccgucgccucaaaacacccgcccaaauguccauccagcuaaucaauaaagccguuaacgcacuuaucaacgaccaacucaucaugaaaaaccaccucagagacauuaugugcaucccauacugcaacuacuccaaauacugguaccuuaaccacacagucaccggcaaaaccucacuuccccgcugcuggcuagucuccaacggcucauaccucaacgaaacacacuuuagcgacgacauugaacagcaggcagacaacaugaucacagaacuacuccaaaaagaauacauggaccgccaaggaaaaacaccccuaggccuuguagaccuuuucgucuucuccaccuccuucuaccuaaucucaaucuuccuccaccucguucgaauccccacccaccgacaugucauaggaaaacccugccccaaaccccaccgacucaaccacaugggcaucuguuccugcggccucuauaaacaucccggaguccccguuaaauggaaacgcuaaggacuagucccuguucccagagcccacuuuuuuuucuuuuuuugaaauaaaauagccugucuuucagaucuaaaaaaaaaaaaaaaaaaaaaaaaaaaaaaaaaaaaaaaaaaaaaaaaaaaaaaaaaaaaaaaaugcaucccccccccccccccccccccccccccccccaaaggcucuuuucagagccaccagaauu

SEQ ID NO: 6664 - RNA, 1768 nt, Artificial Sequence
  mRNA product Design a-2 comprising derived and/or modified sequence from LASV(Lassa virus/H.sapiens-wt/NGA/2018/ISTH_0959;Clade II)__AVV65099__GPCstabilized (opt11)
gggagaguccgcucagccagguugcagaagcggcuuagcguguguccuaaucuucucucugcguguagguaggccugugccgcaaacaagcuuaccaugggccaaaucaucacauucuuccaagaaguaccccacgucaucgaagaagucaugaacaucguucuaauagcccucucccuacuagccauccucaaaggcaucuauaacguagugaccugcggccuauuuggccucgucagcuuccuccuccuaugcggacgauccugcuccaccacauacaaaggagucuacgaacuacaaacacucgaacuugacauggccucccucaacaugaccaugccccucuccugcaccaaaaacaacucccaccauuacaucauggucggcaacgaaaccggccuagaacugacccucacaaauaccuccaucaucaaccacaaauucugcaaccuaagcgacgcccacaagaaaaaucucuacgaucacgcacucaugagcaucauauccaccuuccaccucuccauaccuaacuucaaccaauaugaagccaugucaugcgacuucaacggcggaaaaaucuccguccaauacaaccucagccacgccuacgccaucgacgccgccaaccacugcggaaccauagcgaacggagucuuacaaaccuucaugcgaauggcauggggcggcagcuacaucgcacucgacuccggaugcggcucaugggacugcaucaugaccuccuaccaauaccugauaauccaaaauaccaccugggaagaccauugccaauucagccgccccucccccauaggcuaccugggacuccuuucccaaagaacccgcgacaucuacaucucacgacggcgccgcggcacauucaccuggacccucuccgacagcgaaggcaaugaaaccccaggcggauacugccucacucgcuggaugcuaauagaagccgagcuaaaaugcuucggcaacaccgccgucgcaaaaugcaaugaaaaacacgaugaagaguucugcgacaugcuccgccuauucgacuucaacaaacaagccaucagacggcucaaaacaccagcccaaauguccauccaacucauuaacaaagccgucaacgcccuaaucaaugaccaacucauaaugaaaaaccaccuccgggacaucaugugcauaccauacugcaacuacuccaaauacugguaccucaaucacaccgucaccggcaaaaccucacuaccccgaugcuggcucgucuccaauggcucauaccuaaacgaaacucacuucucagacgacaucgaacaacaagccgacaacaugaucacagaacuccuacaaaaagaauacaucgaccgccaaggcaaaacaccccucggacucguagaucuauucguauucuccaccucauucuaccucaucuccaucuuccuccaccucgucaaaauaccaacccaccgccacgucauaggcaagcccugccccaaaccccaccgccucaaucacaugggcaucugcuccugcggccucuacaaacacccuggggucccaguaaaauggaaacguuagggacuagucccuguucccagagcccacuuuuuuuucuuuuuuugaaauaaaauagccugucuuucagaucuaaaaaaaaaaaaaaaaaaaaaaaaaaaaaaaaaaaaaaaaaaaaaaaaaaaaaaaaaaaaaaaaugcaucccccccccccccccccccccccccccccccaaaggcucuuuucagagccaccagaauu

SEQ ID NO: 6665 - RNA, 1768 nt, Artificial Sequence
  mRNA product Design a-2 comprising derived and/or modified sequence from LASV(LASV003-NIG-2008;Clade II)__AIT17580__GPCstabilized (opt11)
gggagaguccgcucagccagguugcagaagcggcuuagcguguguccuaaucuucucucugcguguagguaggccugugccgcaaacaagcuuaccaugggucaaaucauaacauucuuccaagaaguuccacacgucaucgaagaagucaugaacaucguccucauagcccucucccuccucgcaauucucaaaggcaucuacaauguagccaccuguggccuauucggacucgucagcuuccuacuccuaugcggccgcuccugcuccaccaccuacaaagguguauacgagcuacaaacacucgaacucgacauggccucacucaacaugaccaugccacucuccugcaccaaaaacaacucccaccacuauaucauggucgguaacgaaacuggccucgaacuaacgcucacaaacacauccauaauaaaucacaaauucugcaaucucucagacgcccacaagaaaaaccuuuacgaccacgcccucaugucaaucaucuccaccuuccaccucuccauccccaacuucaaccaguacgaagcaaugucaugcgacuucaacggcggaaaaaucuccguccaauacaaccucucacacaccuacgccgucgacgcagccaaccacugcgguaccauagcaaacggaguacuccaaacauucaugcgcauggccuggggcggcuccuacauugcccuggacucaggcugcggcuccugggauugcaucaugacaagcuaccaauaucucaucauccaaaacaccacaugggaagaucacugucaauucucccgccccucaccaaucggauaccucggucuucucucccaacgaacccgcgacaucuacaucucccgccgucgacgcggcaccuucaccuggacccucuccgacuccgaauccaaugaaacucccggaggcuacugccucacucgcuggaugcuaaucgaagccgaacucaaaugcuuuggcaacaccgccguugcaaaaugcaacgaaaaacacgacgaggaguucugcgacaugcuacgccuuuucgacuuuaacaaacaagccauacgacgccucaaagcccccgcacaaauguccauccaacucaucaacaaagcagucaacgcccucaucaacgaucaacucauaaugaaaaaccaccuucgcgauaucaugugcauucccuacuguaacuacucgaaauacugguaccucaaccacaccgucaccggccgcaccucacucccccgcuguuggcucgucuccaacggcucuuaccucaacgaaacccacuucucagacgacaucgaacaacaagccgacaacaugaucaccgaacuccuccagaaagaauacauggaccgacaaggcaaaacuccacucggacucguagaccucuucgucuucucuaccuccuucuaccucauauccaucuuccuccacuuggucaaaauccccacacaccgccaugucaucggaaaaccaugccccaaaccacaccgccucaaucacaugggaauaugcagcugcggccucuacaaacaccccggcguacccgucaaauggaaacgcuaaggacuagucccuguucccagagcccacuuuuuuuucuuuuuuugaaauaaaauagccugucuuucagaucuaaaaaaaaaaaaaaaaaaaaaaaaaaaaaaaaaaaaaaaaaaaaaaaaaaaaaaaaaaaaaaaaugcaucccccccccccccccccccccccccccccccaaaggcucuuuucagagccaccagaauu

SEQ ID NO: 6666 - RNA, 1768 nt, Artificial Sequence
  mRNA product Design a-2 comprising derived and/or modified sequence from LASV(LASV035-NIG-2009;Clade II)__AIT17588__GPCstabilized (opt11)
gggagaguccgcucagccagguugcagaagcggcuuagcguguguccuaaucuucucucugcguguagguaggccugugccgcaaacaagcuuaccaugggccaaaucaucaccuucuuccaagaagucccucacgucaucgaagaagucaugaacaucguccucauagcccucucucuacucgccauccucaaaggcaucuacaacgucgcaaccugcggccucuucgggcucguaucguuccuccuccucugcggaagauccugcucaaccaccuacaaaggcgucuacgaacuccaaacccucgaacucgacauggccucacuuaacaugaccaugccccucuccugcaccaaaaacaacucccaccauuacaucauggucgguaacgagaccggccuagaacuaacacucaccaacaccucuauaaucaaccacaaauucugcaaccuaucagacgcccacaagaaaaaccuuuacgaccacgcccuuauguccaucaucuccaccuuccaccuauccauacccaacuucaaccaauacgaagccauguccugcgacuucaauggcggcaaaaucuccguccaauacaaccucucccacgcauacgccgucgacgccgccaaccacuguggcaccaucgccaacgggguacuacaaaccuucaugcgcauggccuggggagguucguacaucgcccucgacucaggaugcggcucaugggacugcaucaugaccuccuaucaauaccucaucauccaaaacaccaccugggaagaccacugccaauuuucaagacccucccccauaggcuaccuaggccugcucucacaacgcacccgagacaucuacaucucccgccgacgacgcggaacauucacauggacucucuccgacucagagggcaacgaaacccccggcggcuacugccuaaccagauggaugcuaaucgaggccgaacucaaaugcuucggcaacaccgccgucgcaaaaugcaacgaaaaacacgacgaagaguucugcgacaugcuccgacucuucgacuucaacaaacaagccauucgacgccuaaaagcccccgcacagaugucaauccaacucaucaacaaagccguaaacgcccuaaucaacgaccaacuaaucaugaaaaaccaccuccgcgacaucaugugcaucccuuauugcaauuacuccaaauacugguaccucaaccacaccgucaccggaaaaacaucccuaccccgaugcuggcuaguauccaacggcuccuaccucaaugaaacgcacuucucagacgacaucgaacaacaagccgauaacaugauaaccgaacuucuccaaaaagaauacaucgacagacagggcaaaacaccccucggacucgucgaccuauucguauucucuaccucauucuaccuaauuucgaucuuccuccaccucgucaaaauacccacccaccgacacguuaucggcaaacccugccccaagccccaccgccucaaccacaugggcauaugcuccugcggccucuacaaacacccaggcguccccgucaaguggaaacgcuaaggacuagucccuguucccagagcccacuuuuuuuucuuuuuuugaaauaaaauagccugucuuucagaucuaaaaaaaaaaaaaaaaaaaaaaaaaaaaaaaaaaaaaaaaaaaaaaaaaaaaaaaaaaaaaaaaugcaucccccccccccccccccccccccccccccccaaaggcucuuuucagagccaccagaauu

SEQ ID NO: 6667 - RNA, 1768 nt, Artificial Sequence
  mRNA product Design a-2 comprising derived and/or modified sequence from LASV(LASV1000-NIG-2009;Clade II)__AIT17782__GPCstabilized (opt11)
gggagaguccgcucagccagguugcagaagcggcuuagcguguguccuaaucuucucucugcguguagguaggccugugccgcaaacaagcuuaccaugggccaaauaaucaccuucuuccaagaaguaccucacgucauagaagaagucaugaacaucguccucaucgcccucucccuccucgccauacucaaaggcaucuacaacgucgcaaccuguggccucuucggccucgucucauuccuccuacucugcggcagaucaugcucaaccacauacaaaggcguauacgaacuucagacccucgaacucgacauggccucccucaacaugaccaugccccucuccugcaccaagaacaacucccaucacuacaucauggucggcaacgaaaccggacuagaacucacacuuacgaacaccuccaucaucaaccacaaauucugcaaccuaagcgacgcccacaagaaaaaccuguacgaccacgcucucauguccauaaucuccaccuuccaccucuccauccccaacuucaaccaauacgaagcaaugagcugcgacuucaacggcggcaaaauaucaguccaauacaaccuaucccacaccuacgccgucgacgccgcaaaccacugcggcacaaucgccaacggcguccuccaaaccuucaugcgcauggccuggggcgguagcuacaucgcccucgacuccggcugcggaucaugggacuguaucaugacauccuaucaguaccuaaucauccaaaacaccaccugggaagaccacugccaauuuucccgacccucccccauagguuaccucgggcuccucucccaacgcacacgcgacaucuacaucucucgcagacgccgcggaaccuucaccuggacacucucagacucagaaggcaacgaaacucccggaggauacugccucacacgcuggaugcucaucgaagccgaacucaaaugcuucggaaacaccgcaguagcaaaaugcaacgaaaaacacgacgaagaauuuugcgacaugcucagacuauucgacuucaacaaacaagcuauaaaacgccucaaaacccccgcccaaauguccauccaacucaucaacaaagccgucaacgcacuaaucaacgaccaacuaaucaugaagaaccaccuacgcgacaucaugugcaucccuuacugcaacuacuccaaauacugguaccucaaccacacagucaccggaaaaacuucauuaccccgaugcuggcuggucuccaacggcuccuaccucaacgaaacgcacuucuccgacgacaucgaacaacaagccgacaacaugauaaccgaacuccuccaaaaagaauauaucgaccgccaaggcaaaacuccccucggccucgucgaccucuucguguucucuacauccuucuaccucaucucaaucuuccuacaucucguaaaaauuccaacccaccgccauguaguaggcaaacccugccccaaaccccaccgccucaaccacauggggaucugcucuugcggccuguacaaacaccccggcgucccaguuaaauggaaaagguagggacuagucccuguucccagagcccacuuuuuuuucuuuuuuugaaauaaaauagccugucuuucagaucuaaaaaaaaaaaaaaaaaaaaaaaaaaaaaaaaaaaaaaaaaaaaaaaaaaaaaaaaaaaaaaaaugcaucccccccccccccccccccccccccccccccaaaggcucuuuucagagccaccagaauu

SEQ ID NO: 6668 - RNA, 1768 nt, Artificial Sequence
  mRNA product Design a-2 comprising derived and/or modified sequence from LASV(LASV221-NIG-2010;Clade II)__AIT17624__GPCstabilized (opt11)
gggagaguccgcucagccagguugcagaagcggcuuagcguguguccuaaucuucucucugcguguagguaggccugugccgcaaacaagcuuaccaugggccaaauaaucaccuucuuccaagaaguuccccacguaaucgaggaagucaugaacaucguccucaucgcccuaucccuacuugcuauacucaaaggcauauacaaugucgcaaccugcggccucuucgggcuaguaucuuuccuccuacucugcggccguuccugcuccaccaccuacaaaggcgucuacgaacuccaaacacucgagcucgacauggccucccucaacaugacaaugccccuauccuguaccaagaacaacucccaccacuacaucaugguugguaacgaaacaggccuagagcucacacucaccaacaccuccauuaucaaccacaaauucuguaaccucuccgacgcccauaagaaaaaccucuacgaccacgcccucaugagcaucaucuccaccuuccaccucuccauccccaacuucaaccaauacgaagccauguccugcgacuucaacggaggcaaaaucuccguccaauacaaccucucccacacuuacgccaucgacgccgcgaaccacugcggaaccaucgccaacggcguucuccaaaccuucaugcgcauggccuggggaggcucauacaucgcacuagacuccggaugcggcuccugggacuguaucaugaccuccuaccaauaccucauuauacaaaauacaaccugggaagaccacugccaauucucccgaccauccccaaucggauaccucggccuccucucacaacgaacccgagacaucuacaucucucgccgccgccgaggcacauucacguggacacucuccgacuccgagggcaacgaaacccccggaggcuauugccuaacucgcuggaugcucaucgaagccgaacuaaaaugcuucggcaacaccgccgucgcaaaaugcaacgaaaaacacgacgaagaguucugcgacaugcuccgacucuucgacuucaacaaacaggccauccgccgccuuaaaaccccagcacaaauguccauccaacugaucaacaaagccguaaaugcucuaaucaacgaccaacucauaaugaaaaaccaccuccgagacaucaugugcauccccuacuguaacuacuccaaauacugguaccucaaccacaccguaacaggaaaaaccucccuaccacgcugcuggcucgucagcaacggcuccuaccuaaacgaaacccacuuuucugacgacauagaacaacaagccgacaacaugauaacggaaaugcuacaaaaagaauacauggaccggcaaggcaaaaccccgcucggccucguagaccucuucgucuucuccaccuccuucuaccucaucuccaucuuccuccaccucgucaagauccccacccacagacacguaaucggcaaaccuugccccaaaccccacagguugaaccacaugggcaucugcuccugcggccuauacaaacacccaggcguaccagucaaguggaaacgcuaaggacuagucccuguucccagagcccacuuuuuuuucuuuuuuugaaauaaaauagccugucuuucagaucuaaaaaaaaaaaaaaaaaaaaaaaaaaaaaaaaaaaaaaaaaaaaaaaaaaaaaaaaaaaaaaaaugcaucccccccccccccccccccccccccccccccaaaggcucuuuucagagccaccagaauu

SEQ ID NO: 6669 - RNA, 1768 nt, Artificial Sequence
  mRNA product Design a-2 comprising derived and/or modified sequence from LASV(LASV237-NIG-2010;Clade II)__AIT17638__GPCstabilized (opt11)
gggagaguccgcucagccagguugcagaagcggcuuagcguguguccuaaucuucucucugcguguagguaggccugugccgcaaacaagcuuaccaugggccaaauaaucaccuucuuucaagaagucccccacgucaucgaagaggucaugaacauuguccucauagcccuaucccuacucgcaauccucaaaggcauuuacaacgucgcuaccugcggccuauucggccuagucagcuuccuccucuuaugcggccgcuccugcucaacaacauacaaaggcguuuacgaguuacaaacccucgaacuagacauggccucucuaaacaugaccaugccccuuuccugcacuaaaaacaacucucaccacuauauuaugguaggcaacgagacaggccuugaacucacccucaccaacaccuccaucauaaaccacaaauucugcaaccuauccgacgcccacaaaaaggaccuuuacgaccacgcccucaugucaaucauaagcaccuuccaccucagcauucccaacuucaaucaauacgaagccauguccugcgauuucaacggcggcaaaaucuccguccaauacaaccuuagccacaccuacgccgucgacgccgccaaccacugcggaaccaucgcaaacggcguacuccagacauucaugcgcauggccuggggcgguuccuacaucgcccucgacucuggcugcggcuccugggacugcaucaugaccuccuaccaauaccucauaauccaaaacacaacaugggaagaccacugccaauucucccguccaucucccaucgguuaccucggccuacuuucccaacgaacccgagacaucuacaucagccgacgucgucgcggcacauucaccuggacacuauccgacucugaaggcaacgaaacccccggcggauauugccuaacccgauggaugcucauagaagccgaacucaaaugcuucggcaacaccgccgucgccaaaugcaacgaaaaacacgacgaagaguucugcgacaugcuacgccucuucgacuucaacaaacaagccauccgucgccuaaaaaccccagcccaaaugucaauacagcucaucaacaaggccgucaacgcccucaucaacgaccaacucaucaugaagaaccaccuccgugacaucaugugcauccccuacugcaacuacucaaaauauugguaccuuaaccacacagucacgggcaaaaccucccucccccgcugcuggcucgucuccaacggauccuaccucaacgaaacucacuucuccgacgacaucgaacaacaagccgacaacaugaucaccgaacuacuccaaaaagaauacauggaccgccaaggcaagacuccccucggccucgucgaccucuucguuuucuccaccuccuucuaccucaucagcaucuuccuacaccucaucaaaaucccgacccaccgccacaucaccggcaaacccugcccgaaaccccaccggcuaaaccacaugggcaucugcuccugcggccucuauaaacaccccgguguccccgucaaauggaaacgauaaggacuagucccuguucccagagcccacuuuuuuuucuuuuuuugaaauaaaauagccugucuuucagaucuaaaaaaaaaaaaaaaaaaaaaaaaaaaaaaaaaaaaaaaaaaaaaaaaaaaaaaaaaaaaaaaaugcaucccccccccccccccccccccccccccccccaaaggcucuuuucagagccaccagaauu

SEQ ID NO: 6670 - RNA, 1768 nt, Artificial Sequence
  mRNA product Design a-2 comprising derived and/or modified sequence from LASV(LASV253-NIG-2011;Clade II)__AIT17670__GPCstabilized (opt11)
gggagaguccgcucagccagguugcagaagcggcuuagcguguguccuaaucuucucucugcguguagguaggccugugccgcaaacaagcuuaccaugggccaaaucaucaccuucuuccaagaaguaccacacguaaucgaagaagucaugaacauaguccucauagcacucucccuacucgccauacuuaaaggaauuuacaacguagcaaccugcggucucuucggccuugucuccuuccucuuacugugcggccgaagcugcuccacaacauacaaaggagucuacgaacuacagacccucgaacucgacauggcaucccucaacaugaccaugccccuauccuguaccaaaaacaacucacaccacuacaucaugguagguaacgaaacaggacuugaacuaacccucaccaacacuucaaucauaaaccacaaauucugcaaccucuccgacgcccacaaaaaaaaccucuacgaccacgccuugauguccaucauauccaccuuccaccucuccaucccaaacuuuaaccaauacgaagccauguccugcgacuucaacggaggcaaaauaucaguacaauauaaccuaucccacaccuacgcagucgacgccgccaaccacugcggcaccauagccaacggaguccugcagacauucaugcgaauggcaugggguggaucuuacaucgcucuagacuccgggugcggcuccugggacugcaucaugaccucauaucaauaccucaucauacaaaacaccaccugggaggaccacugucaauucucccgcccuucccccauaggcuaccuggggcuccuaucccaaagaacccgcgacauauacauaucccgccgucgucgaggcaccuucacauggacccucagcgacucagaaggcaacgaaacccccggcggcuacugccucacccguuggaugcuaauagaagcagaacucaaaugcuucggcaacaccgcggucgccaaaugcaacgagaaacacgacgaagaauucugcgacaugcuccgccuauucgacuucaacaaacaagcaauccgccgccuuaaagcccccgcccaaaugucaauccaacucaucaacaaagccguaaacgcacucaucaacgaccaacucaucaugaaaaaccaccuccgcgacauaaugugcauccccuacugcaacuacuccaaauacugguaccucaaccacaccgucaccggccgcaccucucucccccggugcuggcuugucucaaacggcuccuaccucaaugaaacccacuucuccgacgacauagaacaacaagccgacaacaugaucacagaacuccuccaaaaagaauacaucgaccgccaaggcaaaaccccccucggacuagucgaccucuucguuuucuccaccuccuucuaccucaucuccaucuuccuccaccucgucaaaauacccacccaccgucacaucaucggcaaaccaugccccaaaccccaccgccucaaccacaugggcauaugcuccugcggacuguacaaacaccccggaguaccaguaaaauggaaacgcuaaggacuagucccuguucccagagcccacuuuuuuuucuuuuuuugaaauaaaauagccugucuuucagaucuaaaaaaaaaaaaaaaaaaaaaaaaaaaaaaaaaaaaaaaaaaaaaaaaaaaaaaaaaaaaaaaaugcaucccccccccccccccccccccccccccccccaaaggcucuuuucagagccaccagaauu

SEQ ID NO: 6671 - RNA, 1768 nt, Artificial Sequence
  mRNA product Design a-2 comprising derived and/or modified sequence from LASV(LASV254-NIG-2011;Clade II)__AIT17674__GPCstabilized (opt11)
gggagaguccgcucagccagguugcagaagcggcuuagcguguguccuaaucuucucucugcguguagguaggccugugccgcaaacaagcuuaccaugggccaaaucaucaccuucuuccaagaagucccccacgucauugaagaagucaugaacaucguccucauugcccugucccuacucgccauccucaaaggcaucuacaacgucgcaaccugcggucuauuuggccucgucagcuuccuccugcuaugcggccguuccugcuccaccaccuacaaaggcgucuacgaacuucaaacccucgaacucgacaugacaaaucuaaacaugaccaugccccugucuugcaccaaaaacaacagccaccacuacaucauggucggcaacgaaaccggccuagaacucacccuaaccaacacauccaucaucaaccacaaauucugcaaccucuccgacgcccauaagaaaaaccucuauaaccacgcccucauguccauaaucucaacauuccaccucucaauaccaaauuuuaaccaauaugaagccauguccugcgacuucaacggcggcaaaaucucaguacaauacaaucucucccacucuuacgccguagacgcagccaaccacugcggaaccauagccaacgguguccuccagaccuucaugcgcauggccuggggaggaucauacaucgcccucgacagcggcugcggaaacugggacugcaucaugaccuccuaccaauaccucaucauucaaaacaccaccugggaagaccacugccaguucucccgccccagcccaaucggauaccuaggccuccucucccaaagaacccgcgacaucuacaucucccguagacgacguggcacauucaccuggacacuaucugacuccgaaggcaacgaaacccccgguggauacugccucacccgcuggaugcucauugaagccgaacucaaaugcuucggaaacacagcagucgccaaaugcaacgaaaaacaugacgaagaguucugcgacaugcuccgccucuucgacuucaacaaacaagccaucagacgccucaaaacccccgcacaagccaacauacaacucaucaauaaagccgucaaugcacucauaaacgaccaacucaucaugaaaaaccaccuccgagacauaauguguauccccuacugcaacuauuccaaauacugguaccuuaaccacaccgucaccgguaaaaccucccucccccgcugcuggcucguauccaacggcuccuaccucaacgaaacccacuucuccgacgacaucgaacaacaagcagacaacaugaucaccgaacuucuacaaaaagaauacauggacagacagggcaaaacgccgcucggacucgucgaccuauucgucuucagcaccuccuucuaccuaauauccaucuuccuacaccuggucaaaauucccacgcaccgacacguaaucggaaaacccugucccaaaccccaccgacucaaccauaugggcaucugcagcugcggccuuuacaaacaccccggcguccccgucaaauggaaacgcuaaggacuagucccuguucccagagcccacuuuuuuuucuuuuuuugaaauaaaauagccugucuuucagaucuaaaaaaaaaaaaaaaaaaaaaaaaaaaaaaaaaaaaaaaaaaaaaaaaaaaaaaaaaaaaaaaaugcaucccccccccccccccccccccccccccccccaaaggcucuuuucagagccaccagaauu

SEQ ID NO: 6672 - RNA, 1768 nt, Artificial Sequence
  mRNA product Design a-2 comprising derived and/or modified sequence from LASV(Nig08-A19;Clade III)__ADU56618__GPCstabilized (opt11)
gggagaguccgcucagccagguugcagaagcggcuuagcguguguccuaaucuucucucugcguguagguaggccugugccgcaaacaagcuuaccaugggccaaaucgucacauucuuccaagaaguuccccacgucauagaagaagucaugaauaucguccuaaucgcccucuccauccucgccauucucaaaggacuauacaacaucgcaaccugcggccucaucggccuugucacauuccuucuacucuccggccgauccugcucaaugaccuacaagggagucuacgaacuacaaacacucgaacuaaacaugaacacccuaaacaugacuaugccccucuccugcaccaaaaacaacagccaccacuacaucauggucgggaacgaaaccggacuagagcuaacccucaccaacaccucccuccuccaccacaaguucugcaaccuauccgacgcccacaagaaaaaccucuacgaccacacccucaugucaauaaucuccaccuuccaccucuccauccccaacuucaaccaauacgaagccaugucgugcgacuuuaacggcggcaaaauaacaguccaauacaaccucucccacucguacgccauagacgccgccaaccacugcggcaccgucgcaaacggaguccuacaaaccuucaugcgcauggcauggggcggaucauacaucgcccucgacuccggcugcggcaaaugggacugcaucaugaccagcuaccaauaccucaucauccaaaacacaaccugggaggaccacugccaauucucgcgucccucacccaucggcuaccucggacuccucucccaacgcacccgcgacaucuacauaagccgacgccgccgcggcaccuucaccuggacacuuuccgacuccgaagguaacgaaacccccggaggauacugccucacgcgcuggaugcugauagaagcagaacucaaaugcuucggcaacaccgccgucgccaaaugcaacgaaaaacacgaugaagaguucugcgacaugcuucgccuuuucgauuucaacaaacaagcuauacgccgccucaaagccccagcccaaaugucaauccaacuaauuaacaaagcagucaacgcucucaucaacgaccaacucauaaugaaaaaccaccuaagagacaucaugugcauccccuacugcaacuacuccaaauacugguaucucaaccacacuuccaccggacgaaccagccucccacgcugcuggcuaguauccaacggcucauaccucaacgaaacucacuucucggacgacaucgaacaacaagcagacaacaugaucaccgaaaugcuccaaaaagaauaccucgaccgacaaggcaaaaccccucuagggcucguugaucucuucgucuucucaacaucuuucuaccucaucuccauauuccuucaccucgucaagauccccacacaccgccacaucguaggaaaacccugcccaaaaccacaccgacucaaucacaugggcaucugcagcugcggccucuacaagcaacccggcguacccguccgcuggaagcgcuagggacuagucccuguucccagagcccacuuuuuuuucuuuuuuugaaauaaaauagccugucuuucagaucuaaaaaaaaaaaaaaaaaaaaaaaaaaaaaaaaaaaaaaaaaaaaaaaaaaaaaaaaaaaaaaaaugcaucccccccccccccccccccccccccccccccaaaggcucuuuucagagccaccagaauu

SEQ ID NO: 6673 - RNA, 1771 nt, Artificial Sequence
  mRNA product Design a-2 comprising derived and/or modified sequence from LASV(G1180-SLE-2010;Clade IV)__AIT17168__GPCstabilized (opt11)
gggagaguccgcucagccagguugcagaagcggcuuagcguguguccuaaucuucucucugcguguagguaggccugugccgcaaacaagcuuaccaugggccaaauagucaccuucuuccaagaaguaccccacgucaucgaagaagucaugaacauaguccucauagcccucuccauacucgccguccucaaaggccuuuacaacuucgcaaccugcggccuagucggccugcuaaccuuccuacuacucugcggcagauccuguaccgccucacgcuacaaaggagucuacgaguuacaaacacucgaacucaacauggaaacccucaacaugacaaugccccucuccugcacgaaaaauaauucacaccacuacaucauggucggcaacgaaaccggccucgaacucacccucaccaacacaagcaucaucaaccacaaauucugcaaccuaucagacgcacacaagaaaaaccuguacgaccacgcccuaauguccaucaucucuacauuccaccuguccaucccaaacuucaaccaauacgaagcaaugagcugcgacuucaacggcgggaaaaucuccguccaauacaacuuaagccacagcuacgccggagacgccgcaaaccacugcggaacagucgcaaacggcguccuucaaaccuucaugcgcauggccuggggcggcuccuacauugcacuggacuccggcugcggcuccugggacugcaucaugaccuccuaucaauaccuaauaauacaaaacacaaccugggaagaccauugccaauucucccgcccaucacccaucggauaccuaggccuacucucccaacgaacucgagacaucuacaucucccgacgccgccgaggcaccuucaccuggacccucuccgacucagaaggcaaagacacucccggcggauacugccucacccgcuggaugcuuaucgaagccgaacucaaaugcuucggcaacacagccgucgccaaaugcaacgaaaaacacgacgaagaguucugugacaugcuccgacucuucgacuucaacaaacaagccauccaacgccuaaaagcaccagcacaaauguccauccaacucaucaacaaagccgucaaugcccucauuaacgaccaacucaucaugaaaaaccaccuccgagacaucaugugcaucccuuacugcaacuacuccaaauacugguaccuaaaccacaccacaaccggaaaaacaucccuccccaaaugcuggcuuguauccaacggcucauaucucaacgaaacccacuucuccgacgacaucgaacaacaagcagacaacaugauaacagaaaugcuacaaaaagaauacauggaacgacaaggaaaaacaccccuaggcuuggucgaucuauucgucuuuagcacaucauucuaccucauaucaauauuccuccaccucguaaaaauccccacccaccgccacauagucggcaaauccugcccaaaaccacaccgacucaaccacaugggcauauguucaugcggccucuacaaacaacccggcguacccgugaaauggaaacgcuagggacuagucccuguucccagagcccacuuuuuuuucuuuuuuugaaauaaaauagccugucuuucagaucuaaaaaaaaaaaaaaaaaaaaaaaaaaaaaaaaaaaaaaaaaaaaaaaaaaaaaaaaaaaaaaaaugcaucccccccccccccccccccccccccccccccaaaggcucuuuucagagccaccagaauu

SEQ ID NO: 6674 - RNA, 1771 nt, Artificial Sequence
  mRNA product Design a-2 comprising derived and/or modified sequence from LASV(G1442-SLE-2011;Clade IV)__AIT17180__GPCstabilized (opt11)
gggagaguccgcucagccagguugcagaagcggcuuagcguguguccuaaucuucucucugcguguagguaggccugugccgcaaacaagcuuaccaugggccaaaucgucaccuucuuccaagaaguaccccacguaaucgaagaagucaugaacaucguccucaucgcacucuccauccuagccguccuaaaaggacuuuacaacguugccacaugcggucuaaucggacucgucaccuuccuccuccugugcggccgcucauguaccaccacacucuacaaaggcgucuacgaacuccaaacacuagaacucaauauggagacccuuaacaugacaaugccccuaagcugcaccaaaaacaauucucaccacuacauccggguagggaaugaaacagggcuagaacucacccucaccaacaccuccaucaucaaccacaaauucugcaaccuauccgacgcccacaagaaaaaccuauacgaccacgcccucauguccaucaucagcaccuuucaccuauccauacccaacuucaaccaauacgaagccauguccugcgacuucaacggcggcaaaauauccguacaauacaaccuaucccacucuuacgccggcgacgcagccaaccacugcggcacagucgcaaacgguguccuacaaacauucaugcgcauggcauggggcggauccuacaucgcccuugacuccggcugcgguaacugggacugcaucaugaccuccuaccaauaccucaucauccaaaacaccacaugggacgaccacugccaauucagcagacccagcccuauaggcuaccuaggccuacucucacaacgcacccgcgacguuuacaucagccgacgacgccgcggaaccuucaccuggacccucuccgacagcgagggcaaagacaccccaggcggcuacugccucacccgcuggaugcucauagaagccgaauuaaaaugcuucggcaacaccgccguagccaaaugcaacgaaaaacacgacgaagaguucugcgacaugcuccgccucuucgacuucaacaaacaagccauucaacgucucaaagcccccgcccaaauguccauccaacucauaaacaaagccguaaacgcccucaucaacgaccaacucaucaugaaaaaccaucugcgagacaucaugugcaucccguacugcaauuacucaaaauacugguaccuaaacaacaccgcuacaggcaaaacaucccuccccaaaugcuggcucaucuccaacggauccuaucuaaacgaaacccacuucuccgacgacaucgaacaagaagccgauaacaugaucaccgaaaugcuccaaaaagaauacauggaacgccaagguaaaacuccccucggccuugucgaccuauucguuuucucaaccucauuuuaccucauauccauauuccuccaccuaguuaaaauacccacccaccgccacaucgucggaaaauccugccccaaaccccaccgccucaaccacaugggcaucugcucaugcggucuauacaaacaacccggaguaccaguccgcuggaaacgcuaaggacuagucccuguucccagagcccacuuuuuuuucuuuuuuugaaauaaaauagccugucuuucagaucuaaaaaaaaaaaaaaaaaaaaaaaaaaaaaaaaaaaaaaaaaaaaaaaaaaaaaaaaaaaaaaaaugcaucccccccccccccccccccccccccccccccaaaggcucuuuucagagccaccagaauu

SEQ ID NO: 6675 - RNA, 1771 nt, Artificial Sequence
  mRNA product Design a-2 comprising derived and/or modified sequence from LASV(G3010-SLE-2013;Clade IV)__AIT17344__GPCstabilized (opt11)
gggagaguccgcucagccagguugcagaagcggcuuagcguguguccuaaucuucucucugcguguagguaggccugugccgcaaacaagcuuaccaugggccagauagucaccuucuuucaagaagucccccacguaauagaagaggucaugaacaucguccuaauagcccucucaauccuagccguccuaaaaggccuauacaacuucgccacaugcggccuagucggccuaguaaccuuccuccuacugugcggccgcucuugcacgaccagccucuacaaaggagucuacgaacuacaaacccucgaacucaacauggaaacccuaaacaugaccaugccccucuccugcaccaaaaacaacucccaccacuacaucauggucggaaacgaaacaggccuagaacucacccuaaccaacaccucaauaaucaaccacaaguucugcaaccucucagacgcccauaagaaaaaccuauacaaccacgcacuaauguccaucauuuccaccuuucaccuaucuauccccaacuucaaccaauacgaagccaugucuugcgacuucaauggcggcaaaaucucaguccaauauaaccucagucacuccuacgccggagacgcagccucccacugcggcaccgucgccaacggcguacuccaaaccuucaugaggauggcauggggcggaagcuacaucgcccucgacuccggcugcggcaaaugggauugcaucaugacauccuaccaauaucucaucauacaaaacaccaccugggaggaccacugccaauucucccgccccagccccaucgguuaccucggccuacucucccagcgcacccgcgacaucuacaucucccgcagacgccgcggaaccuucaccuggacccuuuccgacuccgaaggcaaagacacacccggcggcuacugccucacucgauggaugcucaucgaagccgaacugaaaugcuuuggcaacacugccgucgccaaaugcaacgagaaacacgacgaagaauuuugcgacaugcuccgccucuucgacuucaacaaacaagccauucaacgccuuaaaacccccgcgcaaauguccauacaacucaucaacaaggccguaaacgcacucaucaaugaccaacuaaucaugaagaaccaccuccgagacauaaugugcauccccuacugcaacuacuccaaauacugguaucucaaccacacaacaaccggcaagaccucccuccccaaauguuggcucguaucaaacggauccuaccucaacgaaacccacuucuccgacgacaucgaacaacaagcagacaacaugaucaccgagaugcuacaaaaggaauacauggaacgccaaggaaaaacgccccuaggacucgucgaccucuucguauucagcaccuccuucuaccugaucuccaucuuccuccaucuugucaaaaucccaacccaccgccacaucgucggcaagucaugccccaaaccacaccgacuaaaccacaugggaauauguucaugcggccucuacaaacagccgggcguccccgugcgcuggaaaagaugaggacuagucccuguucccagagcccacuuuuuuuucuuuuuuugaaauaaaauagccugucuuucagaucuaaaaaaaaaaaaaaaaaaaaaaaaaaaaaaaaaaaaaaaaaaaaaaaaaaaaaaaaaaaaaaaaugcaucccccccccccccccccccccccccccccccaaaggcucuuuucagagccaccagaauu

SEQ ID NO: 6676 - RNA, 1771 nt, Artificial Sequence
  mRNA product Design a-2 comprising derived and/or modified sequence from LASV(G502-SLE-2009;Clade IV)__AIT17126__GPCstabilized (opt11)
gggagaguccgcucagccagguugcagaagcggcuuagcguguguccuaaucuucucucugcguguagguaggccugugccgcaaacaagcuuaccaugggccaaaucgucaccuucuuucaagaagucccccacguuaucgaagaaguuaugaacaucguacucaucgcccucuccauccuagccgucuuaaaagggcucuacaacuucgcaaccugcggccucguaggccuacucaccuuccugcuccucugcggccgaucaugcacaaccggacuuuacaagggcguauacgaacugcaaacccucgaacuaaacauggaaacccucaacaugacuaugccccucuccugcaccaaaaacaacagccaccacuacauaauggucggcaacgaaacaggacuagagcucacccuaaccaacaccucgaucaucaaccacaaguucugcaaccuauccgacgcccacaagaaaaaccucuacgaccacgcgcucauguccauaaucuccaccuuccaccugucaauacccaacuucaaucaauacgaagcaauguccugcgacuucaacggaggcaaaaucuccguacaauacaaucugucccacuccuacgccggagacgccgccgaccacugcggcacaguagccaacggcguacuccaaacuuucaugcgaauggcauggggcggcuccuacaucgcucucgacucaggcugcggacgaugggacugcaucaugaccucauaccaauaccuaaucauccaaaacaccaccugggaagaccacugccaauucucccgacccucgccaaucggauaccugggccugcucucccaacgcacccgcgacaucuacauuucccgccgcagacgcggaaccuucaccuggacccucagcgacuccgagggcaaagacacacccgguggcuacugccuaacacgcuggaugcugaucgaagccgaacucaaaugcuucggaaacaccgccguugcaaaaugcaacgaaaaacacgacgaagaguucugcgacaugcuccgacucuucgacuucaacaaacaagccauacaacgccucaaagcccccgcccaaauguccauacaacucauaaauaaagccgucaacgcccucaucaacgaccagcuaguaaugaaaaaucaccuccgagacaucaugugcauaccauacugcaacuacuccagauacugguaccuaaaccacaccaccaccggccgcaccucccucccuaagugcuggcuaguauccaacggcucauaccucaacgaaacacacuucucagacgacaucgagcaacaagccgacaacaugaucacggaaaugcuacaaaaagaauacauggaacgccaaggaaaaaccccacucggccucgucgaccucuucgucuucuccacuucauucuaccuaaucucaaucuuccuacaccucguaaaaaucccuacccacagacacaucguaggcaaauccugccccaaaccccaccgacuaaaccacaugggaauaugcucuugcggacucuacaaacaacccggcguacccguaaaauggaaaagauaaggacuagucccuguucccagagcccacuuuuuuuucuuuuuuugaaauaaaauagccugucuuucagaucuaaaaaaaaaaaaaaaaaaaaaaaaaaaaaaaaaaaaaaaaaaaaaaaaaaaaaaaaaaaaaaaaugcaucccccccccccccccccccccccccccccccaaaggcucuuuucagagccaccagaauu

SEQ ID NO: 6677 - RNA, 1771 nt, Artificial Sequence
  mRNA product Design a-2 comprising derived and/or modified sequence from LASV(G733-SLE-2010;Clade IV)__AIT17154__GPCstabilized (opt11)
gggagaguccgcucagccagguugcagaagcggcuuagcguguguccuaaucuucucucugcguguagguaggccugugccgcaaacaagcuuaccaugggccaaaucguaaccuucuuucaagaagucccccacgucaucgaagaaguuaugaacauaguucuaaucgcccuaucaauccucgccguccucaaaggccucuacaacuucgcaaccugcggaaucguuggucuuguaucauuccuccuacuuugcggacgguccugcaccacuucccuuuacaaaggagucuacgaacuccaaacccucgaacucaacauggaaacccuaaacaugaccaugccccucucaugcaccaagaacaacucccaccacuacaucauggucggcaacgaaaccggccucgagcucacccugacaaacacaucaaucauuaaccacaaguucugcaaccuuuccgacgcccacaagaaaaaccucuacgaccacgcccucauguccauaauauccaccuuccaccucuccauccccaacuucaaccaauacgaagccauguccugcgacuucaacggcggaaaaaucucaguccaauacaaccucucccacuccuaugccggagacgccgccaaccacugcggcaccauagcaaacggcguccuccaaaccuucaugcgcauggccuggggcggcagcuacauagcccucgacagcggcugcgaccgaugggacugcauuaugacuucauaccaauaccuaaucauccaaaacacaaccugggaagaccacugccaauucucacgccccucccccauaggauaccucggccuacuaucccaacgcacccgcgacaucuacaucucccgacgccgccgaggcacguuuaccuggacauuguccgacuccgagggcaaagacacacccggcggcuacugccuaacccgauggaugcucaucgaagccgaacucaaaugcuucggcaacaccgccgucgccaaaugcaaugagaaacacgacgaagaguucugcgauaugcuccgccuauucgacuucaacaaacaagcuauccaacgccucaaagcucccgcccaaaugagcauccaacucaucaacaaagccguuaacgcccucaucaacgaccaacucauaaugaaaaaccaccuccgggacaucaugugcauccccuacugcaacuacaguaaauacugguaccuuaaccacaccacaacaggaaagaccuccuuacccaaaugcuggcucguauccaacggauccuaccuaaacgaaacacauuucuccgacgacaucgaacaacaagccgacaacaugaucacagaaaugcuccaaaaagaauacauggaacgccaaggaaaaaccccacuuggccucgucgaccuauucguauuuagcaccucuuucuaccucaucuccaucuuccuccaccuagucaagauacccacccaccgccacgucgucggcaaaagcugccccaaaccccaccgacuuaaccacaugggcauaugcuccugcggacucuauggccaacccggcguccccguuaaguggaaaagguaaggacuagucccuguucccagagcccacuuuuuuuucuuuuuuugaaauaaaauagccugucuuucagaucuaaaaaaaaaaaaaaaaaaaaaaaaaaaaaaaaaaaaaaaaaaaaaaaaaaaaaaaaaaaaaaaaugcaucccccccccccccccccccccccccccccccaaaggcucuuuucagagccaccagaauu

SEQ ID NO: 6678 - RNA, 1771 nt, Artificial Sequence
  mRNA product Design a-2 comprising derived and/or modified sequence from MOPV/LASV reassortant(IGS-1;Clade IV)__AFY05576__GPCstabilized (opt11)
gggagaguccgcucagccagguugcagaagcggcuuagcguguguccuaaucuucucucugcguguagguaggccugugccgcaaacaagcuuaccaugggccaaaucgucaccuucuuccaagaagucccacacgucauagaagaagucaugaauaucguccuuaucgcacuauccguacuagcaguccuuaaaggacuuuacaacuucgcaaccugcggccugguaggccuaguaaccuuccuccuccucugcggacgcucaugcaccaccagccucuacaaaggaguauacgaacuacaaacccucgaacucaacauggaaacccuuaacaugaccaugccccucuccugcacaaagaacaacucccaccacuauauaauggucggcaacgaaacaggccuggaacucacccuaacaaacaccuccauaaucaaccacaaauucugcaaccucuccgacgcccacaagaaaaaccuauacgaccacgcccuaaugucgauaaucuccacauuccaccucagcaucccaaacuucaaccaauacgaagccauguccugcgacuucaacggcggcaaaaucucuguccaauacaaccuaucacacuccuacgccggugacgccgccaaccauugcgggaccgucgccaacggcguccuccaaaccuucaugagaauggccuggggcggaucguacaucgcccuagacagcggaugcgguaacugggacugcaucaugaccagcuaccaauaccucaucauacaaaacacuaccugggaggaccacugccaguucucacgccccuccccuauaggcuaccucggccugcucagccaacgcacccgcgacauauacaucucccgacgacgacgaggcaccuucaccuggacacucuccgauuccgaaggcgaagacaccccuggcggauacugccugacacgauggaugcucauagaggccgaacucaaaugcuucggcaacacagcagucgcaaaaugcaacgaaaaacacgacgaagaguucugcgacaugcuccgccuauucgacuucaacaaacaagccauccaacgauuaaaagccccagcccaaauguccauacaacucaucaacaaagccgucaacgcacuaauaaacgaccagcuaaucaugaaaaaccaccuccgagacaucaugugcauaccauacugcaacuacuccaaauacugguaccucaaccacacaaccacuggacgcaccucucuccccaaaugcuggcucgucucaaacggcagcuaccuuaacgaaacccacuucuccgacgacaucgaacaacaagccgacaacaugaucaccgaaaugcuacaaaaagaauacauggaaagacagggcaagacaccccucggccuagucgaccucuucguauucuccaccuccuucuaccuaaucucaaucuuccuacaccuagucaaaauccccacccaccgccacauaguaggcaaauccugccccaaaccccaucgccucaaccacaugggcauaugcucaugcggucucuacaaacaacccggcguccccgucaaguggaaacgaugaggacuagucccuguucccagagcccacuuuuuuuucuuuuuuugaaauaaaauagccugucuuucagaucuaaaaaaaaaaaaaaaaaaaaaaaaaaaaaaaaaaaaaaaaaaaaaaaaaaaaaaaaaaaaaaaaugcaucccccccccccccccccccccccccccccccaaaggcucuuuucagagccaccagaauu

SEQ ID NO: 6679 - RNA, 1771 nt, Artificial Sequence
  mRNA product Design a-2 comprising derived and/or modified sequence from LASV(LM765-SLE-2012;Clade IV)__AIT17814__GPCstabilized (opt11)
gggagaguccgcucagccagguugcagaagcggcuuagcguguguccuaaucuucucucugcguguagguaggccugugccgcaaacaagcuuaccaugggacaaaucgucaccuucuuccaagaagucccgcacgucaucgaggaagucaugaacauaguccucauagcccucucgauacuagccguccuaaaaggccuauacaacuucgcaaccugcggccucguaggccucgucaccuuccuccuccucugcggccgaucguguaccaccucacuauacaaaggagucuacgaacuccaaacucuggaacuuaacauggagacccucaacaugaccaugccccucuccugcaccaaaaacaauucccaccauuacaucauggucggaaacgaaacaggacucgaacuaacccucacgaacacuuccaucauagaucacaaauucugcaaccucagcgacgcccaccgcaaaaaccucuacgaccacgccuuaaugagcaucaucucaacauuccacuuauccauacccaacuucaaccaauacgaagccaugucaugcgauuucaacggcggcaaaaucucaguccaauacaaccuaucccacucuuacgccaaagacgccgccgaccacugcggcacagucgccaacggcguccuccaaaccuucaugcgcauggccuggggcggaagcuacaucgcacucgacucaggcugcggccgcugggacugcauaaugacauccuaccaguaccuuauaauccaaaacacaacaugggaagaccacugucaauucagcagacccagccccaucggauaccuaggccuacucucccaacgcacacgcgacauauacauaucacgccgccgucgcggcaccuucacauggacccuaucagauuccgagggcaaagacacacccggaggcuacugccucacucguuggaugcuaaucgaagcugaacucaaaugcuucgguaacacugccgucgccaaaugcaaugaaaaacacgacgaagaauuuugcgacaugcuccgccucuucgacuucaacaaacaagccauacagcgacuaaaggcccccgcccaaauguccauucaacugaucaacaaagccgucaacgcccuaaucaacgaccaacucaucaugaaaaaccaccuccgcgacauaaugugcaucccauacugcaacuacuccaaguacugguaccuaaaccacaccaccaccggcaaaaccucccuccccaaaugcuggcucgucucuaacggaucuuaccuuaacgaaacccacuucucagacgauaucgagcaacaagcugacaacaugaucaccgaaaugcuccaaaaagaauacauggaaagacaaggcaaaacaccccuaggacucgucgaccucuucgucuucucuaccuccuucuaccucauaucaaucuuucuccaccucgucaagaucccuacccaccgccacaucgucggcaaaccaugccccaaaccccaccgccucaaccacaugggcauaugcuccugcggccucuacaaacagccaggcgucccggucaaauggaaacgauagggacuagucccuguucccagagcccacuuuuuuuucuuuuuuugaaauaaaauagccugucuuucagaucuaaaaaaaaaaaaaaaaaaaaaaaaaaaaaaaaaaaaaaaaaaaaaaaaaaaaaaaaaaaaaaaaugcaucccccccccccccccccccccccccccccccaaaggcucuuuucagagccaccagaauu

SEQ ID NO: 6680 - RNA, 1771 nt, Artificial Sequence
  mRNA product Design a-2 comprising derived and/or modified sequence from LASV(LM776-SLE-2012;Clade IV)__AIT17824__GPCstabilized (opt11)
gggagaguccgcucagccagguugcagaagcggcuuagcguguguccuaaucuucucucugcguguagguaggccugugccgcaaacaagcuuaccaugggccaaaucgucacauucuuccaagaagucccccacgucaucgaagaagucaugaacaucguccucaucgcccucucaauccuagccguccucaaaggccuauacaacuucgcuaccugcggccucgucggccucguaaccuuccuccuccuaugcggccgaucuugcaccaccucugucuacaaaggagucuacgaacuccaaacacucgaacuaaacauggaaacccugaacaugacaaugccccucuccuguaccaagaacaacucccaccacuacaucaugguuggcaacgaaaccggccuagaacuuacccucaccaacacuucaaucauaaaccacaaauucugcaaccucuccgacgcccacaagaaaaaccucuacgaccacgcacucauguccaucaucucaaccuuccaccucagcaucccaaacuucaaccaauacgaagccaugucaugcgacuucaacggcggcaaaaucucuguacaauacaaccuaucccacuccuacgccggcgacgcagccaaccacuguggaaccgucgcaaacggcguccuacagacguucaugcgcauggccuggggcggcucauauaucgcccucgacuccggaugcggcaaaugggacugcaucaugaccucauaccaauaccucauaauacaaaacaccacaugggaagaccauugccaguuuucccgcccuuccccgauaggauaccucggccuccuaucccaacgcacccgcgacauuuacaucucacgccgccgccgaggcacauuuacauggacccucucugacuccgaaggcaaagacacccccggaggcuacugccuaacucgcuggaugcucauagaggccgaacucaaaugcuucggcaacacagccguagccaaaugcaacgaaaaacacgaugaagaguucugcgauaugcuccgccucuucgacuucaacaaacaagcaauccaaagacuaaaagcccccgcacaaaugagcauucaacucaucaacaaagcagucaacgcccuuauaaacgaccaacuaaucaugaaaaaccaucuacgcgacaucaugugcauccccuacugcaacuacucaaaauacugguaccuaaaccacacaacaacuggcaaaaccagccuccccaaauguuggcucgucucuaacggcucauaccucaacgaaacccacuucucagacgacaucgaacaacaagccgacaacaugaucaccgaaaugcuccaaaaagaauacauggaacgccagggcaaaacuccacucggccuaguagaccucuucgucuucuccacaaguuucuaccucaucuccauauuccuacaccuagucaaaauccccacccaccgacacaucguaggcaaaucuugccccaaaccucaucgccuaaaccacaugggaaucugcagcugcggucucuacaaacaacccggcgucccaguccgauggaaacgauaaggacuagucccuguucccagagcccacuuuuuuuucuuuuuuugaaauaaaauagccugucuuucagaucuaaaaaaaaaaaaaaaaaaaaaaaaaaaaaaaaaaaaaaaaaaaaaaaaaaaaaaaaaaaaaaaaugcaucccccccccccccccccccccccccccccccaaaggcucuuuucagagccaccagaauu

SEQ ID NO: 6681 - RNA, 1771 nt, Artificial Sequence
  mRNA product Design a-2 comprising derived and/or modified sequence from LASV(Mad39;Clade IV)__ANH09722__GPCstabilized (opt11)
gggagaguccgcucagccagguugcagaagcggcuuagcguguguccuaaucuucucucugcguguagguaggccugugccgcaaacaagcuuaccaugggccaaaucgucacauucuuccaagaagucccccacgucaucgaagaagucaugaacaucgugcuaauagcacucuccauccuagccguccuaaaaggccucuauaacgucgcaaccugcggccugaucggccuugucaccuuccuacuccucugcggacgauccuguaccaccacccuuuacaaaggcgucuacgaacuccaagcccucgaauuaaauauggaaacccugaacaugaccaugccccucuccugcaccaaaaauaacucccaucacuacauucgagucggcaacgaaaccggacucgaauuaacccucaccaacacaucccuaaucaaccacaaauucugcaaccucucagacgcccacaagaaaaaccucuacgaccacgcccuuauguccaucaucucaacauuccaccucucaauacccaacuucaaccaauacgaagcaauguccugcgacuucaacgacggcaaaaucucuguccaauacaaccucucacacaccuacgccggcgacacagcaaaccacugcggcaccgucgcaaacggcguacuccaaacauucaugcgaauggcuuggggcggauccuacaucgcacuagacucaggaugcggcggcugggacuguaucaugacauccuaccaauacuuaaucauacaaaacacuaccugggaagaccacugucaauucucacgucccucuccgaucggcuaccucggccuccucucccaacgaacccgcgacaucuauaucucccgccgccgccgcggcaccuucacauggacgcuaagcgauucagagggcaaagacacccccggcggcuacugccugacccgcuggaugcuuaucgaagcagaacucaaaugcuucggcaacacagcagucgccaaaugcaacgaaaaacacgacgaggaguucugcgacaugcuccgccuauucgacuucaacaaacaagccauccaacgccucaaagccccagcacaaauguccauucaacuaaucaacaaagccguaaaugcccucaucaacgaccaacucauuaugaaaaaccaccuucgugacaucaugugcauaccauacugcaacuacuccaaauacugguaccucaaccacaccguuaccggcaaaaccucacucccaaaaugcuggcucgucuccaauggcucguaccuaaacgaaacccacuucagcgacgacaucgaacaacaagccgacaacaugaucaccgaaaugcuacaaaaagaauacauggaacgccaaggcaagacaccccugggccuaguggaccuuuucgucuucuccaccuccuucuaccucauauccauauuccuccaccucgucaaaaucccaacacaccgccacguaguaggaaaacccugcccaaaaccccaccgccucaaccacaugggcaucugcagcugcggauucuacaaacaaccuggcgucccaguccguuggaaacgauaaggacuagucccuguucccagagcccacuuuuuuuucuuuuuuugaaauaaaauagccugucuuucagaucuaaaaaaaaaaaaaaaaaaaaaaaaaaaaaaaaaaaaaaaaaaaaaaaaaaaaaaaaaaaaaaaaugcaucccccccccccccccccccccccccccccccaaaggcucuuuucagagccaccagaauu

SEQ ID NO: 6682 - RNA, 1771 nt, Artificial Sequence
  mRNA product Design a-2 comprising derived and/or modified sequence from LASV(Z0947-SLE-2011;Clade IV)__AIT17840__GPCstabilized (opt11)
gggagaguccgcucagccagguugcagaagcggcuuagcguguguccuaaucuucucucugcguguagguaggccugugccgcaaacaagcuuaccaugggucaaaucgucacauuuuuccaagaagucccacacguaauagaagaagucaugaacaucguacuuauagcacucuccauccuugcaguccuuaaaggccucuauaacuucgccacuugcggacucgucggccuaguaacauuccuacuacuguguggccgcuccugcaccaucucacucuacaagggcguauacgaacuccaaacacuugaacucaacauggaaacccuaaacaugaccaugccccucuccugcaccaaaaacaacucucaccacuacauaauggucggaaacgaaacaggacuagaacucacccucaccaacaccucaauaaucaaccacaaauucugcaaccuuuccgaugcacacaagaaaaaccucuacgaccacgcacucauguccauaaucuccaccuuccaccucucaauccccaacuucaaccaauacgaagcaaugucgugcgacuucaacggcgggaaaaucuccguccaauacaaccucucccacuccuacgcuggagacgccgcaaaccacugcgguaccguggccaacgguguccuccagaccuucaugcgcauggccuggggcggauccuacauagcccucgacucagguugugaccgaugggauugcaucaugacauccuaccaauaccucaucauccaaaacaccaccugggaagaccacugccaauucucccgucccucccccauaggcuaccucggccuccucucccaacgcacccgcgauaucuacaucagccgccgacgccgcggcaccuucaccuggacccuuucugacuccgaaggaaaagacacccccggcggcuacugccuaacucgauggaugcucaucgaagccgaacuaaaaugcuucggcaacaccgccgucgccaaaugcaacgaaaaacacgacgaagaguucugcgacaugcuucgccucuucgacuucaacaaacaagccauccagcgccucaaagcccccgcacaaauguccauacaacuaaucaacaaagccgucaacgcccuaauaaacgaccaacucaucaugaaaaaccaccuccgcgauauaaugugcauuccauacugcaacuacuccaaauacugguaucuaaaccacacaaccaccggcaaaaccucccuacccaaaugcuggcucgucuccaacggaucguaucuaaacgaaacucacuucuccgacgacaucgaacaacaagccgacaacaugaucacugagaugcuccagaaagaauacauggaacgacaaggcaaaacaccacuaggccucgucgaccucuucgucuucuccacauccuucuaccucaucucaaucuuccuccaccucguaaaaaucccaacccaccgccacaucgucggaaaacccugccccaagccacaccgccuaaaccacaugggcaucugcuccugcggacucuacaagcaacccggaguacccgucaaauggaaacgauagggacuagucccuguucccagagcccacuuuuuuuucuuuuuuugaaauaaaauagccugucuuucagaucuaaaaaaaaaaaaaaaaaaaaaaaaaaaaaaaaaaaaaaaaaaaaaaaaaaaaaaaaaaaaaaaaugcaucccccccccccccccccccccccccccccccaaaggcucuuuucagagccaccagaauu

SEQ ID NO: 6683 - RNA, 1816 nt, Artificial Sequence
  mRNA product Design b-4 comprising derived and/or modified sequence from LASV(Josiah;Clade IV)__NP_694870__GPCstabilized (wt)
gggagagucccgcagucggcguccagcggcucugcuuguucgugugugugucguugcaggccuuauucaagcuuaccaugggacaaauagugacauucuuccaggaagugccucauguaauagaagaggugaugaacauuguucucauugcacugucuguacuagcagugcugaaaggucuguacaauuuugcaacguguggccuuguugguuuggucacuuuccuccuguugugugguaggucuugcacaaccagucuuuauaaagggguuuaugagcuucagacucuggaacuaaacauggagacacucaauaugaccaugccucucuccugcacaaagaacaacagucaucauuauauaauggugggcaaugagacaggacuagaacugaccuugaccaacacgagcauuauuaaucacaaauuuugcaaucugucugaugcccacaaaaagaaccucuaugaccacgcucuuaugagcauaaucucaacuuuccacuuguccauccccaacuucaaucaguaugaggcaaugagcugcgauuuuaaugggggaaagauuagugugcaguacaaccugagucacagcuaugcuggggaugcagccaaccauugugguacuguugcaaaugguguguuacagacuuuuaugaggauggcuuggggugggagcuacauugcucuugacucaggcugcggcaacugggacuguauuaugacuaguuaucaauaucugauaauccaaaauacaaccugggaagaucacugccaauucucgagaccaucucccaucgguuaucucgggcuccucucacaaaggacuagagauauuuauauuaguagaagacgccggggcacauucacauggacacugucagauucugaagguaaagacacaccagggggauauugucugaccagguggaugcuaauugaggcugaacuaaaaugcuucgggaacacagcuguggcaaaauguaaugagaagcaugaugaggaauuuugugacaugcugaggcuguuugacuucaacaaacaagccauucaaagguugaaagcucccgcacaaaugagcauucaguugaucaacaaagcaguaaaugcuuugauaaaugaccaacuuauaaugaagaaccaucuacgggacaucaugugcauuccauacuguaauuacagcaaguauugguaccucaaccacacaacuacugggagaacaucacugcccaaauguuggcuuguaucaaaugguucauacuugaacgagacccacuuuucugaugauauugaacaacaagcugacaauaugaucacugagauguuacagaaggaguauauggagaggcaggggaagacaccauugggucuaguugaccucuuuguguucaguacaaguuucuaucuuauuagcaucuuccuucaccuagucaaaauaccaacucauaggcauauuguaggcaagucgugucccaaaccucacagauugaaucauaugggcauuuguuccuguggacucuacaaacagccuggugugccugugaaauggaagagaugaggacuaguaauaaggaaacuguaugaaugucugugggcaggaagugaagagauccuucuguaaagguuuuuggaauuaugucugcugaauaauaaacuuuuuugaaauaauaaaucugguagaaaaaugagaucuaaaaaaaaaaaaaaaaaaaaaaaaaaaaaaaaaaaaaaaaaaaaaaaaaaaaaaaaaaaaaaaaugcaucccccccccccccccccccccccccccccccaaaggcucuuuucagagccaccagaauu

SEQ ID NO: 6684 - RNA, 1813 nt, Artificial Sequence
  mRNA product Design b-4 comprising derived and/or modified sequence from LASV(LP;Clade I)__AAF86701__GPCstabilized (wt)
gggagagucccgcagucggcguccagcggcucugcuuguucgugugugugucguugcaggccuuauucaagcuuaccauggggcagauuauuacauucuuucaagaagugccacauguaauagaggaagucaugaacauugugcuaauugcgcuuucucuauuggcaaucuugaagggcuuguauaacaucgcuacaugugggauuauuggauugguugccuuuuuauucuuguguggcaagucuuguucccuaacccuuaaagggggauaugagcugcaaaccuuagaauuaaauauggagacccuaaacaugaccaugcccuuaucaugcaccaagaacagcagucaucauuacauaagagugggcaaugagacuggauuagaauugacuuuaacuaacaccagcauuauaaaucacaaauuuugcaacuuauccgaugcucacaaaaagaaucuuuaugaucaugcucucaugagcaucaucucaacauuccaucuauccauuccaaacuucaaucaguaugaagccaugaguugugauuucaauggagggaaaaucagugugcaauacaaccucucucauuccuaugcuggggaugcggccgaacacugugggacaguugccaacggaguguugcaaacauuuaugagaauggccugggguggaagauacauugcauuagacucaggaugcggaaacugggacuguauaaugaccagcuaccaguaccugauaauucaaaauacaacaugggaggaccacugccaauucucaagaccgucuccuaucggguaccuuggccuuuugucacaaaggacaagagauauauauauaaguaggaggcgccgggggaccuucaccuggacauugucagauucugagggcaaugaaacaccaggugguuauuguuuaaccagguggaugcuaauugaagcagaacucaaguguuuugggaauacagcuguggcaaaaugcaaugagaagcaugaugaggaguuuugugacaugcugagauuguuugauuucaacaagcaagcaauccguagguugaaggcucccgcccagaugaguauucaauuaauaaauaaagccgugaaugccuuaaucaaugaucaauuaaucaugaagaaccauuuaagagacaucaugugcauucccuacugcaauuacagcaaguauugguaccuuaaucauacuaguagcgggagaacaucacuaccaaaguguuggcuuauauccaaugggucauaucuaaaugaaacccaguucucugaugacauagaacagcaagccgacaauaugaucacagagaugcuucagaaagaauacauugaaagacaagggaaaacgcccuugggacuaguggacauuuucaucuuuagcacaagcuuuuaucugaucagcauuuucuugcauuuaauuaaaaucccuacacaucgacacaucguugggaaacccugucccaaaccccauagacuaaaucacaugggaguauguuccuguggacuguacaaacacccugguguuccaacaaaguggaagagauagggacuaguaauaaggaaacuguaugaaugucugugggcaggaagugaagagauccuucuguaaagguuuuuggaauuaugucugcugaauaauaaacuuuuuugaaauaauaaaucugguagaaaaaugagaucuaaaaaaaaaaaaaaaaaaaaaaaaaaaaaaaaaaaaaaaaaaaaaaaaaaaaaaaaaaaaaaaaugcaucccccccccccccccccccccccccccccccaaaggcucuuuucagagccaccagaauu

SEQ ID NO: 6685 - RNA, 1813 nt, Artificial Sequence
  mRNA product Design b-4 comprising derived and/or modified sequence from LASV(803213;Clade II)__AAF86703__GPCstabilized (wt)
gggagagucccgcagucggcguccagcggcucugcuuguucgugugugugucguugcaggccuuauucaagcuuaccauggggcaaaucauaacauucuuccaagaggugccucaugucauagaggaggucaugaacauuguccuaauugcccucagucuccuggcgauacuaaaggggauuuacaauguugcuaccuguggucucuuuggguugaucuccuuucuucucuuauguggcagaucauguucaguaaccuauaaagguguuuaugagcuacaaacucuagaacugaacauggcaaaccuuaauaugacgaugcccuugucuuguacgaagaacaacagccaucauuacaucaugguuggaaaugaaacaggccuagagcugaccuuaacaaacacaagcaucauuaaccacaaguuuugcaaccuuucugaugcacauaaaaagaaucucuaugaccaugcucugaugagcaucaucucaacuuuccacuuaucuauuccaaacuuuaaucaguaugaagcaaugaguugugacuucaauggagggaaaauaaguguucaguacaaccucagucacuccuuugcuguggaugcagccaaccacugugggaccauugccaaugguguucugcagaccuuuaugaggauggcuugggguggcaguuacauagcacuugauuccggaugcgggaacugggauuguauaaugacuuccuaucaauacuugauaauucaaaacaccacuugggaagaucacugccaguuuucucgcccaucuccuauugguuacuuaggacuauugucacagagaacuagagauaucuauaucagucgaagacgccggggaacuuucacuuggacccuuucugauucugaagguaaugaagcaccugguggguauugucuaacuagauggauguuaauugaagcagaacugaaaugcuuugggaacacagcaguugcaaagugcaacgaaaaacaugaugaagaauuuugugacauguugagauuguuugauuucaacaaacaagcuauaaagaggcugaaaacacccgcacagaugaguauucagcugauaaacaaggcagugaaugcauuaaucaaugaccaacugauuaugaagaaccaucuaagggacaucaugugcauuccuuauugcaacuacaguagauauugguaucuaaaucacacugugacagggaagacaucacugccaagauguuggcuugugucaaaugguuccuaccuaaacgaaacacauuuuucugaugacauugaacaacaagcagacaacaugauaacagaaauguugcagaaagaguacauggacaggcaggggaaaacaccuuuaggguuaguggaccuuuuugucuuuagcacuagcuuuuaccucauaagcaucuuucuccaucuggucaagaucccaacucacaggcacaucguggggaaaccuugcccuaagccacacagacucaaccacaugggcaucugcucauguggucuguauaaacaucccgguguuccaguaaaauggaagagauaaggacuaguaauaaggaaacuguaugaaugucugugggcaggaagugaagagauccuucuguaaagguuuuuggaauuaugucugcugaauaauaaacuuuuuugaaauaauaaaucugguagaaaaaugagaucuaaaaaaaaaaaaaaaaaaaaaaaaaaaaaaaaaaaaaaaaaaaaaaaaaaaaaaaaaaaaaaaaugcaucccccccccccccccccccccccccccccccaaaggcucuuuucagagccaccagaauu

SEQ ID NO: 6686 - RNA, 1813 nt, Artificial Sequence
  mRNA product Design b-4 comprising derived and/or modified sequence from LASV(GA391;Clade III)__CAA36645__GPCstabilized (wt)
gggagagucccgcagucggcguccagcggcucugcuuguucgugugugugucguugcaggccuuauucaagcuuaccaugggacagauugugacauucuuccaagaaguuccucauguuauugaggaagugaugaauauuguccuuauugcacuauccauccuagcaauucugaagggacuauacaauguugccacguguggcuugauagggcuugucacauuccuucuacuuucaggaaggucaugcucacugaucuacaaagggacuuacgagcugcaaacccuugaguugaauauggagacucuuaauaugaccaugccgcuauccugcacaaagaacaacagucaucauuauauaaggguggggaaugagacaggacuugagcucaccuugaccaacaccagcauucuuaaucacaaauucuguaaccucucugaugcccacaaaaggaaucuuuaugaucacagccucaugaguaucaucucuaccuuucaucuguccauucccaacuucaaucaauaugaggcaaugagcugcgauuucaauggggggaaaaucacugugcaauacaaccugagucauagcuucgcaguggaugcagcaggucacugcggcacacuugcaaauggugucuuacaaacauuuaugagaauggcuuggggagggaguuauauugcucuugauucuggaugcgguaacugggacuguauaaugaccaguuaccaauaucuaaucauucagaauacaaccugggaugaccacugccaauuuuccagaccaucaccuauuggcuaccuugggcuucucucacaaagaacuagagacauauacauuagcagaaggcgccgggggacauucaccuggacacuaucagacucagagggaaaugaaacaccagggggauacugccuuacuagauggauguugauugaggccgaauuaaagugcuuuggaaacacugcaguagccaagugcaaugagaaacaugaugaagaauuuugugacaugcuaagguuguucgauuucaacaaacaggccauaaggaggcucaaaacacccgcccaaaugagcauacagcugaucaacaaggcugucaaugcuuuaauaaaugaucagcucaucaugaagaaccacuugagagacaucaugugcauaccauauuguaacuacagcagauauugguaccuuaaccacacaucaacaggaaagaccucacuaccaagguguuggcuuaucucaaauggaucauaucucaaugagaccaaguuuucagaugacaucgaacaacaagcugacaacaugauaacagagaugcuacaaaaggaauacauagauagacagggcaaaacuccacugggguuaguugaccuauuuguuuuuagcacaaguuucuaucugauaagcaucuuucuccaccuggucaaaauaccaacccauagacacauuguagguaaaccuugcccaaaaccccacaggcugaaccacaugggcaucugcuccuguggucuauacaaacagccaggugugccugucagauggaagaggugaggacuaguaauaaggaaacuguaugaaugucugugggcaggaagugaagagauccuucuguaaagguuuuuggaauuaugucugcugaauaauaaacuuuuuugaaauaauaaaucugguagaaaaaugagaucuaaaaaaaaaaaaaaaaaaaaaaaaaaaaaaaaaaaaaaaaaaaaaaaaaaaaaaaaaaaaaaaaugcaucccccccccccccccccccccccccccccccaaaggcucuuuucagagccaccagaauu

SEQ ID NO: 6687 - RNA, 1816 nt, Artificial Sequence
  mRNA product Design b-4 comprising derived and/or modified sequence from LASV(AV;Clade V)__CCA30314__GPCstabilized (wt)
gggagagucccgcagucggcguccagcggcucugcuuguucgugugugugucguugcaggccuuauucaagcuuaccauggggcaaauagugacauucuuucaagaggugccucaugugauagaagaggugaugaacauuguucuuauagcauugucuauauuggcaguguugaaaggucucuacaacauugccacaugcggccucaucggcuugaucacuuuccucuuauuauguggaaggucuugcucauccaaccucuacaagggggucuaugaacuucaaucucuggaccugaacauggagacacucaacaugaccaugccccucuccugcacaaagaacaauagucaucacuacauaaggguuggcaaugacacagggcuggaacugaccuugaccaacacgagcauacucaaucacaaauucugcaaccuaucagaugcucacaagaaagaccuauaugaucacgcacucaugagcauaaucucaacuuuccaccugucuauacccaauuucaaccaauacgaagcaaugaguugugacuucaaugggggcaaaaucagugugcaguacaaucuaagccauucuuaugcuauagaugcagcuaaucauugcggcacagucgcgaauggcaucuugcagacuuucaugagaauggcauggggugggagcuauauugcucuugacucaggcugcggaaacugggacuguauuaugacuagcuaucaauaucugauuauucagaacacaaccugggaaaaucacugucaguucucaagaccaucuccuauugguuaucuuggucuccucucacagaggacuagagacauuuacauuagcaggaggcgccggggcacauucacguggacacugucagacucugaggguaaugcuacaccaggagguuauugucugaccagguggauguuaauugaagcugaguugaaaugcuuuggaaacacagcaguagcaaaguguaaugaaaagcaugaugaagaauuuugcgacaugcucagacuuuuugauuuuaauaagcaggcuauaaguagauugaaaucucccgcacaaaugagcauccaacugaucaacaaagcagugaaugcuuugaucaacgaucaauuaauuaugaagaaccacuugcgagacaucaugugcauuccauauuguaauuacagcaaguauugguaccucaaucauacaauaacuggcaaaaccucauuaccuaaauguuggcuuguaucuaaugguucauacuugaaugaaacccauuuuucugacgacaucgagcaacaagcugacaauaugaucacagagaugcuacaaaaggaauacauggagaggcaagggaaaacgccuuuggguuuaguugaucuguuuguguuuagcacaaguuuuuaucuaauuaguaucuuccuccgacuagucaagauuccaacccauagacacauugugggcaaaccauguccuaagccccacagguugaaccacaugggcauuuguucuugcggcuuauacaagcagccuggcguccccgugagauggaagagauagggacuaguaauaaggaaacuguaugaaugucugugggcaggaagugaagagauccuucuguaaagguuuuuggaauuaugucugcugaauaauaaacuuuuuugaaauaauaaaucugguagaaaaaugagaucuaaaaaaaaaaaaaaaaaaaaaaaaaaaaaaaaaaaaaaaaaaaaaaaaaaaaaaaaaaaaaaaaugcaucccccccccccccccccccccccccccccccaaaggcucuuuucagagccaccagaauu

SEQ ID NO: 6688 - RNA, 1813 nt, Artificial Sequence
  mRNA product Design b-4 comprising derived and/or modified sequence from LASV(Togo/2016/7082;Clade VI)__AMR44577__GPCstabilized (wt)
gggagagucccgcagucggcguccagcggcucugcuuguucgugugugugucguugcaggccuuauucaagcuuaccauggggcaaauaauaaccuucuuccaggagguuccucauguuauagaggaggugaugaacauuguucugauagcacucucacuccuagcuauccugaaaggggucuacaauguggcaacaugugggauaauugggcuugugaccuuccucuuucucuguggaagaucuuguucacugaucuacaaaggcaguuaugagcugcaaacauuggaguuaaauauggagacccuaaacaugaccaugccucugucaugcacuaaaaauaguagccaccauuauauucgaguugggaacgagacuggcuuagagcugacauugaccaacaccagcauuauaaaucacaaauucuguaaccugucagaugcucacaaacguaaucuguaugaccacgcacucaugagcauccuuuccacauuccaucuguccaucccaaacuucaaccaguaugaggcgaugaguugugacuucaauggaggcaaaaucagugugcaauauaaucucagccaugcuuaugcaguugaugcugccgaacacugcggaacaguugcaaauggugugcuacaaacauucaugaggauggcuuggggaggaaguuacauugcacuugacucugggugcggcaauugggacuguauuaugacaagcuaccaauacuuaaucauucagaauacaacaugggaagaucacugccaauuuucaagaccuucuccuauugguuaucucggcuuauugucacaaagaacaagagacauuuauaucaguaggaggcgccgggguacauucaccuggacacuuucugacucagagggaaaugagacaccaggcggauacuguuuaacaagauggaugcugauagaggcugagcuaaaauguuuuggaaacacagcuguugcaaaguguaaugagaagcaugaugaggaauucugcgacauguuaagguuguuugacuucaacaaacaggcaauucagaggcucaaaucacccgcacaaaugagcauccaguuaauaaauaaagcagugaaugcauugauaaaugaucagcucauuaugaagaaccacuuaagggauaugaugugcauaccguauugcaacuacaguaaguauugguaucucaaucacaccucaucagggagaacaucguugccuaaaugcuggcuuguuuccaauggaaguuaucugaaugagacccacuucucagaugauauugaacaacaggcagacaacaugauaacugaaauguuacaaaaggaauauaucgauaggcaggguaaaacaccuuuaggacuuguugaccuuuuuguuuucagcacgaguuuuuaccuuauaaguauauucuuacacuugauaaagauaccuacucauaggcacauaguuggaaagccaugccccaagccacaccgccucaaccacauggggaucugcucuuguggacuauacaagcagccuggugucccaaccagauggaagagauaaggacuaguaauaaggaaacuguaugaaugucugugggcaggaagugaagagauccuucuguaaagguuuuuggaauuaugucugcugaauaauaaacuuuuuugaaauaauaaaucugguagaaaaaugagaucuaaaaaaaaaaaaaaaaaaaaaaaaaaaaaaaaaaaaaaaaaaaaaaaaaaaaaaaaaaaaaaaaugcaucccccccccccccccccccccccccccccccaaaggcucuuuucagagccaccagaauu

SEQ ID NO: 6689 - RNA, 1813 nt, Artificial Sequence
  mRNA product Design b-4 comprising derived and/or modified sequence from LASV(KAK-428;Clade n.d. (VII))__ANH09740__GPCstabilized (wt)
gggagagucccgcagucggcguccagcggcucugcuuguucgugugugugucguugcaggccuuauucaagcuuaccaugggucaaauagugaccuucuuccaggaaguaccucauguuauagaggaagugaugaacauaguucugauagcacuuucucucuuagccauccugaagggccucuacaauuuugccaccuguggaguaauuggacugauaacauuccuuuuacuuuguggaagauccuguucagcgaccuacaaaggccaauaugaacuccaaacuuuagaacuaaauauggagucccuaaacaugaccaugccacugucuugcacaaaaaacaacagucaucauuauaucagagcuggcaacaacacaggccuggaguugacccucaccaacaccagcauuauaucucauaaauucugcaaccuuucugaugcucacaagaagaaccuuuaugaccacacucuuaugaguauaauaacuaccuuucauuuguccaucccaaauuucaaccaguaugaggcaaugaguugugacuuuaacggugggaaaaucagcauacaguacaaccucagucacuccuacgcuggugaugcugcgcaacacuguggaacaguugcaaauggggugcugcaaaccuuuaugagaauggcuuggggagguaguuaucuggcccuugauucaggaugcagagguugggacugcauaauuuccaguuaccaauacuugaucauccaaaacacaacuugggaugaccauugccaguuuucaaggccauccccgaucggguaucuuggguuuguaucgcagaagaccagggacaucuauauaaguagaagacgccggggaacuuuuacauggacacuuucagacuccgagggacaugacaugccaggugguuacugcuugaccagauggaugcucauugaagcugauuuaaaguguuuuggaaacacagcugucgcuaaguguaaugagaaacaugacgaggaguucugugacauguggagguuguuugacuuuaauaagcaagccauucaaaggcucaaagcacccgcccagaugaacauccagcucauaaauaaagcugucaaugcucucauaaaugaccaauugaugaugaaaaaccauuuaagggauaucaugugcauucccuauugcaauuacaguaaauucugguaucucaauaacaccacgacugggagaaccucacugccaagaugcuggcugauuucaaauggguccuacuuaaaugagacucacuucucagaugauauugaacagcaagcugacaauaugauaacugagauguugcagaaagaauacauggacagacaaggaaaaacaccgcuaggacugguugaucucuuuguauucaguacaagcuuuuaccucauuaccauuuucuuacaucuugugaaaauaccaacccacagacacauaguuggcaagccgugcccuaaaccacacagacugaaucacaugggcaucugcuccugugggcucuacaaacagccuggugugccaguacgauggaagagaugaggacuaguaauaaggaaacuguaugaaugucugugggcaggaagugaagagauccuucuguaaagguuuuuggaauuaugucugcugaauaauaaacuuuuuugaaauaauaaaucugguagaaaaaugagaucuaaaaaaaaaaaaaaaaaaaaaaaaaaaaaaaaaaaaaaaaaaaaaaaaaaaaaaaaaaaaaaaaugcaucccccccccccccccccccccccccccccccaaaggcucuuuucagagccaccagaauu

SEQ ID NO: 6690 - RNA, 1813 nt, Artificial Sequence; identical to SEQ ID NO: 6684
  mRNA product Design b-4 comprising derived and/or modified sequence from LASV(Pinneo-NIG-1969;Clade I)__AIT17836__GPCstabilized (wt)

SEQ ID NO: 6691 - RNA, 1813 nt, Artificial Sequence
  mRNA product Design b-4 comprising derived and/or modified sequence from LASV(ISTH0009-NIG-2011;Clade II)__AIT17404__GPCstabilized (wt)
gggagagucccgcagucggcguccagcggcucugcuuguucgugugugugucguugcaggccuuauucaagcuuaccaugggacaaaucauaacauuuuuccaggaaguaccucaugucauagaggaagugaugaacauuguccugauugcucucagccuucuggcaauacugaaggggaucuacaauguugccaccuguggccuauuuggacugguguccuuucuccucuuaugugggagaucaugcucaacaacuuauaaggguguuuaugagcuacaaacucuagagcuggacauggcaagccuuaauaugacaaugccccuaucuugcacaaagaacaacagucaccauuacaucauggucggaaaugagacuggcuuggagcugacuuuaacaaauacaaguauuaucaaccacaaguuuuguaaccuuucugaugcacauaaaaagaaucucuaugaccaugcuuuaaugaguaucaucucaaccuuccacuuaucuauuccuaauuuuaaucaguaugaagcaaugaguugugacuucaauggggggaagauaaguguucaguacaaccuuagccacgcuuaugcuguagaugcagccaaucacugugggacuaucgccaauggcguucuucagacuuuuaugaggauggcuugggguggcaguuacauagcacuugauuccggaugcgggaguugggauuguauaaugacuuccuaccaauauuugauaauccagaacaccacuugggaagaucacugccaguuuucucgcccauccccuaucgguuaucuggggcuacugucacaaaggaccagagacauuuacaucagucgaagacgccgggggacuuuuacuuggacucucucugauucugaagguaaugaaacaccggguggguacugucuaacaagauggaugcugauugaggccgaguugaagugcuuugggaacacagcaguugcgaaaugcaaugagaaacaugaugaagaguuuugugacauguuaagacuguuugauuucaacaaacaagcuauaaggaggcuaaagacacccgcacagaugaguauccaacugauaaacaaagcagugaaugcauugaucaaugaccagcuuauuaugaagaaucacuugagagauaucaugugcauuccuuacugcaauuacagcaaguacugguaucuaaaucacacuguaacagggaagacaucguugccaaggugcuggcuugugucaaaugguuccuaccugaaugagacacauuuuucugaugacauugaacaacaggcagacaacaugauaacagaacuguugcaaaaggaguacauggacaggcaagggaaaacacccuuaggguuaguagaucuuuuugucuucagcaccagcuuuuaucucauuagcaucuuccuccaccugaucaaaaucccaacccacagacauaucacagggaaacccugcccuaaaccacacagacuuaaccacaugggcauaugcucauguggucuauacaaacauccugguguaccagucaaguggaaaagauagggacuaguaauaaggaaacuguaugaaugucugugggcaggaagugaagagauccuucuguaaagguuuuuggaauuaugucugcugaauaauaaacuuuuuugaaauaauaaaucugguagaaaaaugagaucuaaaaaaaaaaaaaaaaaaaaaaaaaaaaaaaaaaaaaaaaaaaaaaaaaaaaaaaaaaaaaaaaugcaucccccccccccccccccccccccccccccccaaaggcucuuuucagagccaccagaauu

SEQ ID NO: 6692 - RNA, 1813 nt, Artificial Sequence
  mRNA product Design b-4 comprising derived and/or modified sequence from LASV(ISTH2010-NIG-2012;Clade II)__AIT17482__GPCstabilized (wt)
gggagagucccgcagucggcguccagcggcucugcuuguucgugugugugucguugcaggccuuauucaagcuuaccaugggacaaaucauaacauuuuuccaggaaguaccucaugucauagaggaagugaugaacauuguccugauugcucucagccuucuggcaauauugaaggggaucuacaauguugcuaccuguggccucuuuggauugguguccuuccuccucuuauguggaaggucauguucaacaacuuacaaggguguuuaugagcuacaaacucuggagcuagacauggcaagccuuaauaugacaaugcccuuaucuugcacgaagaacaacagccaccauuacaucauggucggaaaugaaacuggcuuggagcuaacuuuaacaaauacaaguaucaucaaccacaaauuuuguaaccucucugaugcacauaagaagaaucuuuaugaucaugcuuuaaugaguaucauuucaaccuuccacuuauccauuccuaacuuuaaucaguaugaagcaaugagcugugacuucaaugggggaaagauaaguguucaguacaaccuuagccacgcuuaugcuguagaugcagccaaccacugugggaccaucgccaauggcguucuucagacuuuuaugaggauggcuugggguggcagcuauauagcacuugauuccggaugcgggaguugggauuguauaaugacuuccuaccaauauuugauaauccaaaacaucacuugggaagaucacugccaguuuucucgcccauccccuaucgguuaccuagggcuacugucacaaaggaccagggacauuuacaucagucgaagacgccgggggacuuuuacuuggacucucucugauucugaagguaaugaaacaccggguggguauugccuaacaagauggaugcugauugaagccgaguugaaaugcuuugggaacacagcaguugcgaaaugcaaugagaaacaugaugaagaguuuugugacauguuaagauuguuugacuuuaacaaacaggcuauaaggaggcuaaagacacccgcacagaugaguauccaacugauaaacaaagcagugaacgcacugaucaaugaccagcugauuaugaagaaucauuugagagauaucaugugcauuccuuacugcaauuacagcaaguacugguaucuaaaucauacuguaacagggaagacaucguugccaaggugcuggcuugugucaaaugguuccuaccugaaugagacacauuuuucugaugacauugaacaacaggcagacaacaugauaacagaacugcugcaaaaggaguacauagacaggcaagggaaaacaccuuuaggguuaguagaucuuuuugucuucagcaccagcuuuuaucucauuagcaucuuccuccaccugguuaaaaucccaacccacagacaugucguaggaaaacccugcccuaaaccacacagacucaaccacaugggcauauguucauguggucuauacaaacauccuggugugccagucaaguggaaaagauagggacuaguaauaaggaaacuguaugaaugucugugggcaggaagugaagagauccuucuguaaagguuuuuggaauuaugucugcugaauaauaaacuuuuuugaaauaauaaaucugguagaaaaaugagaucuaaaaaaaaaaaaaaaaaaaaaaaaaaaaaaaaaaaaaaaaaaaaaaaaaaaaaaaaaaaaaaaaugcaucccccccccccccccccccccccccccccccaaaggcucuuuucagagccaccagaauu

SEQ ID NO: 6693 - RNA, 1813 nt, Artificial Sequence
  mRNA product Design b-4 comprising derived and/or modified sequence from LASV(Lassa virus/H.sapiens-wt/NGA/2015/ISTH_0543;Clade II)__AVO03639__GPCstabilized (wt)
gggagagucccgcagucggcguccagcggcucugcuuguucgugugugugucguugcaggccuuauucaagcuuaccaugggacaaaucauaacauuuuuccaggaagugccucaugucauagaggaaguaaugaacauuguccugauugcucucagccuucuggcaauauugaaggggaucuacaauguagccaccuguggccuuuuuggacugguguccuuucuccucuuauguggaagaucaugcucaacaacuuauaagggugucuacgagcuacaaacucuagagcuggacauggcaaaccuuaauaugacaaugccccuaucuugcacaaagaacaacagucaccauuacaucauggucggaaaugaaacuggcuuggagcugacuuuaacaaauacaaguauuaucaaccacaaguuuugcaaccuuucugaugcacauaaaaagaaucucuaugaccaugcuuuaaugaguaucaucucaaccuuccacuuaucuauuccuaauuuuaaucaguaugaagcaaugaguugugacuucaauggagggaagauaaguguucaguacaaccuuagccacacuuaugcuguagaugcagccaaucacugugggacuaucgccaauggcguucuucagacuuuuaugaggauggcuugggguggcaguuacauagcacuugauucuggaugcgggaguugggauuguauaaugacuuccuaccaauaucugguaauccagaacaccacuugggaagaucacugccaauuuucucgcccauccccuaucgguuaucuggggcuacugucacaaaggaccagagacauuuacaucagucgaagacgccgggggacuuucacuuggacucucucugauucugaagguaaugaaacaccggguggguacugucuaacaagauggaugcugauugaggccgaguugaagugcuuugggaacacagcaguugcgaaaugcaaugagaaacaugaugaagaguuuugugacauguuaagacuguucgauuuuaacaaacaagcuauaaggaggcugaagacacccgcacagaugaguauccaacuaauaaacaaagcagugaaugcauugaucaaugaccagcuuauuaugaagaaucacuuaagagauaucaugugcauuccuuacugcaauuacagcaaguacugguaucuaaaucacacugugacagggaagacaucguugccaaggugcuggcuuguaucaaaugguuccuaccugaaugagacacauuuuucugaugauauugaacaacaggcagacaacaugauaacagaacuguugcaaaaggaauacauagacaggcaagggaaaacacccuuaggguuaguagaucuuuuugucuucagcaccagcuuuuaucucauuagcauuuuccuccaccuggucaaaaucccaacucacagacauaucacagggaaacccugcccuaaaccacacagacuuaaccacaugggcauaugcucauguggucuauacaaacauccugguguaccagucaaguggaaaagauagggacuaguaauaaggaaacuguaugaaugucugugggcaggaagugaagagauccuucuguaaagguuuuuggaauuaugucugcugaauaauaaacuuuuuugaaauaauaaaucugguagaaaaaugagaucuaaaaaaaaaaaaaaaaaaaaaaaaaaaaaaaaaaaaaaaaaaaaaaaaaaaaaaaaaaaaaaaaugcaucccccccccccccccccccccccccccccccaaaggcucuuuucagagccaccagaauu

SEQ ID NO: 6694 - RNA, 1813 nt, Artificial Sequence
  mRNA product Design b-4 comprising derived and/or modified sequence from LASV(Lassa virus/H.sapiens-wt/NGA/2016/ISTH_0009;Clade II)__AVO03571__GPCstabilized (wt)
gggagagucccgcagucggcguccagcggcucugcuuguucgugugugugucguugcaggccuuauucaagcuuaccaugggacaaaucauaacauuuuuccaggaaguaccucaugucauagaggaagugaugaacauuguccugauugcucucagccuucuggcaauacugaaggggaucuacaauguugccaccuguggccuccuuggacugguguccuuucuccucuuauguggaaggucaugcucaacaacuuauaaggguguuuaugagcuacaaacucuagagcuggacauggcaagccuuaauaugacaaugccccugucuugcacaaagaacaacagucaccauuacaucauggucggaaaugagacuggcuuggagcugacuuuaacaaauacaaguauuaucaaccacaaguuuuguaaccuuucugaugcacauaaaaagaaucucuaugaccaugcucuaaugaguaucaucucaaccuuccacuuaucuauuccuaauuuuaaccaguaugaagcaaugaguugugacuucaauggggggaggauaaguguucaguacaaccuuagccacucuuaugcuguagaugcagccaaucacugugggacuaucgccaauggcguucuucagacuuucaugaggauggcuugggguggcaguuacauagcacuugauuccggaugcgggaguugggauuguauaaugacuuccuaccaauacuugauaauccagaacaccacuugggaagaucacugccaguuuucucgcccauccccuaucgguuauuuggggcuacugucacagaggaccagagacauuuacaucagucgaagacgccgggggacuuuuacuuggacucucucugauucugaagguaaugaaacaccggguggguacugucuaacaagauggaugcugauugaggccgaguugaagugcuuugggaacacagcaguugcgaaaugcaaugagaaacaugaugaagaguucugugacauguuaagacuguuugauuuuaauaaacaagccauaaggaggcugaagacacccgcacagaugaguauccaacugauaaacaaagcagugaaugcauugaucaaugaccagcuuauuaugaagaaccacuugagagauaucaugugcauuccuuacugcaauuacagcaaguacugguaucuaaaucacacuguaacagggaagacaucguugccaaggugcuggcuugugucaaaugguuccuaccugaaugagacacauuuuuccgaugacauugaacaacaggcagacaacaugauaacagaauuguugcagaaggaguacauagacaggcaagggaaaacacccuugggguuaguagaucuuuuugucuucagcaccagcuuuuaucucauuagcaucuuccuccaccuggucaaaauuccaacccacagacauaucacagggaaacccugccccaaaccacacagacuuaaccacaugggcauaugcucauguggucuauacaaccauccuggugugccagucaaguggaaaagauagggacuaguaauaaggaaacuguaugaaugucugugggcaggaagugaagagauccuucuguaaagguuuuuggaauuaugucugcugaauaauaaacuuuuuugaaauaauaaaucugguagaaaaaugagaucuaaaaaaaaaaaaaaaaaaaaaaaaaaaaaaaaaaaaaaaaaaaaaaaaaaaaaaaaaaaaaaaaugcaucccccccccccccccccccccccccccccccaaaggcucuuuucagagccaccagaauu

SEQ ID NO: 6695 - RNA, 1813 nt, Artificial Sequence
  mRNA product Design b-4 comprising derived and/or modified sequence from LASV(Lassa virus/H.sapiens-wt/NGA/2016/ISTH_0017;Clade II)__AVO03567__GPCstabilized (wt)
gggagagucccgcagucggcguccagcggcucugcuuguucgugugugugucguugcaggccuuauucaagcuuaccaugggacaaaucauaacauuuuuccaggaaguaccucaugucauagaggaagugaugaacauuguccugauugcucucagccuucuggcaauacugaaagggaucuacaauguugcuaccuguggccucuuuggguugguguccuuccuccucuuaugugggagaucaugcucaacaacuuacaaggguguuuaugagcuacaaacucuagagcuagacauggcaagccuuaauaugacaaugcccuuaucuugcacgaagaacaauucccaccauuacaucauggucggaaaugagacuggcuuggagcugacuuuaacaaauacaagcauuaucaaccacaaguuuuguaaccuuucugaugcacauaaaaagaaucuuuaugaccaugccuuaaugagcaucauuucaaccuuccacuuauccauuccuaacuuuaaucaguaugaagcaaugaguugugacuucaaugggggaaaaauaaguguucaguacaaccuuagccauacuuaugcuauagaugcagcuaaccacugugggaccauugccaauggcguucuucagacuuuuaugaggauggcuugggguggcaguuacauagcacuugauuccggaugcggcagcugggacugcauuaugacuuccuaccaauauuugauaauccagaacaccacuugggaagaucacugccaguuuucucgcccaucccccaucgguuaucuggggcuacugucacaaaggaccagagacauuuacaucagucgaagacgccgggggacuuuuacauggacccucucugacucugaagguaaugaaacaccagguggguacugucuaacgagauggaugcugauugaggccgaguugaagugcuuugggaacacagcaguugcaaaaugcaaugagaaacaugaugaagaguuuugugauauguuaagauuauuugacuuuaacaaacaagcuauaaggaggcugaagacacccgcgcagaugaguauccaacugauaaacaaagcagugaacgcacugaucaaugaccagcugauuaugaagaaucauuuaagagauaucaugugcauuccuuacugcaauuacagcaaguauugguaucuaaaucacacuguaacagggaagacaucauuaccaagaugcuggcuugugucgaaugguuccuaccugaaugagacacauuuuucugaugacauugaacaacaagcagauaacaugauaacagaacuuuugcaaaaggaauauauggauaggcaagggaaaacacccuuaggguuaguagaucuuuuugucuucagcaccagcuuuuaucucauuagcaucuuccuccaccuggucagaaucccaacucacagacaugucauagggaaacccugcccuaaaccacacagacucaaccacaugggcauaugcucauguggucuguacaaacauccuggugugccagucaaauggaaaagauagggacuaguaauaaggaaacuguaugaaugucugugggcaggaagugaagagauccuucuguaaagguuuuuggaauuaugucugcugaauaauaaacuuuuuugaaauaauaaaucugguagaaaaaugagaucuaaaaaaaaaaaaaaaaaaaaaaaaaaaaaaaaaaaaaaaaaaaaaaaaaaaaaaaaaaaaaaaaugcaucccccccccccccccccccccccccccccccaaaggcucuuuucagagccaccagaauu

SEQ ID NO: 6696 - RNA, 1813 nt, Artificial Sequence
  mRNA product Design b-4 comprising derived and/or modified sequence from LASV(Lassa virus/H.sapiens-wt/NGA/2018/ISTH_0959;Clade II)__AVV65099__GPCstabilized (wt)
gggagagucccgcagucggcguccagcggcucugcuuguucgugugugugucguugcaggccuuauucaagcuuaccaugggacaaaucauaacauuuuuccaggaaguaccucaugucauagaggaagugaugaacauuguccugauugcucucagccuuuuggcaauacugaaggggaucuacaauguuguuaccuguggccucuuuggauugguguccuuccuccucuuauguggaagaucauguucaacaacuuacaaggguguuuaugagcuacaaacucuggagcuggacauggcaagccuuaauaugacaaugcccuuaucuugcacgaagaacaacagccaccauuacaucauggucggaaaugagacuggcuuggagcugacuuuaacaaauacaaguaucaucaaccauaaauuuuguaaccucucugaugcacauaaaaagaaucuuuaugaucaugcuuuaaugaguaucauuucaaccuuccacuuauccauuccaaacuuuaaucaguaugaagcaaugagcugugacuucaaugggggaaagauaaguguucaguacaaccuuagccacgccuaugcuauagaugcagccaaccacugcgggacuauugccaauggcguucuucaaacuuuuaugaggauggcuugggguggcagcuauauagcacuugauuccggaugcgggaguugggacuguauaaugacuuccuaccaguauuugauaauccaaaacaccacuugggaagaucauugucaguuuucucgcccauccccuaucgguuaccuagggcuacugucacaaaggaccagggacauuuacaucagucgaagacgccgggggacuuuuacuuggacucucucugauucugaagguaaugaaacaccggguggguauugucuaacaagauggaugcugauugaggccgaguugaaaugcuuugggaacacagcaguugcgaaaugcaaugagaaacaugaugaagaguuuugugacauguuaagauuguuugacuuuaacaaacaagcuauaaggaggcuaaagacacccgcacagaugaguauccagcugauaaacaaagcagugaacgcacugaucaaugaccagcugauuaugaaaaaucauuugagagauaucaugugcauuccuuacugcaauuacagcaaguacugguaucuaaaucauacuguaacagggaagacaucguugccaaggugcuggcuugugucaaaugguuccuaccugaaugagacacauuuuucugaugacauugaacaacaagcagacaauaugauaacagaacugcugcaaaaggaguacauagacaggcaagggaaaacaccuuuaggguuaguagaucuuuuugucuucagcaccagcuuuuaucucauuagcaucuuccuccaccugguuaaaaucccaacccacagacaugucauaggaaaacccugcccuaaaccacacagacuuaaucacaugggcauauguucauguggucuauacaaacauccuggugugccagucaaguggaaaagauagggacuaguaauaaggaaacuguaugaaugucugugggcaggaagugaagagauccuucuguaaagguuuuuggaauuaugucugcugaauaauaaacuuuuuugaaauaauaaaucugguagaaaaaugagaucuaaaaaaaaaaaaaaaaaaaaaaaaaaaaaaaaaaaaaaaaaaaaaaaaaaaaaaaaaaaaaaaaugcaucccccccccccccccccccccccccccccccaaaggcucuuuucagagccaccagaauu

SEQ ID NO: 6697 - RNA, 1813 nt, Artificial Sequence
  mRNA product Design b-4 comprising derived and/or modified sequence from LASV(LASV003-NIG-2008;Clade II)__AIT17580__GPCstabilized (wt)
gggagagucccgcagucggcguccagcggcucugcuuguucgugugugugucguugcaggccuuauucaagcuuaccauggggcaaaucauaacauuuuuccaggaagugccucaugucauagaagaagugaugaacauuguccugauugcccucagccuuuuggcaauauugaaagggaucuacaauguugcuacuuguggccucuuuggacugguguccuuucuucucuuauguggaagaucaugcucaacaacuuacaaagguguuuaugagcuacaaacucuagagcuagacauggcaagccuuaauaugacaaugcccuuaucuugcacaaagaauaauagccaccauuacaucauggucggaaaugaaacuggcuuagagcugacuuuaacaaauacaaguaucaucaaccacaaguuuuguaaccuuucugaugcacauaaaaagaaucuuuaugaccaugcuuuaaugagcaucaucucaaccuuccacuuauccauuccuaacuuuaaucaauaugaagcaaugaguugugacuucaauggggggaagauaaguguucaguacaaccuuagccacacuuaugcuguagaugcagcuaaccacugugggacuauugccaauggcguucuucagacuuucaugaggauggcuugggguggcagcuacauagcacuugauuccggaugcgggaguugggauuguauaaugacuuccuaccaauaucugauaauccagaacaccacuugggaagaucauugccaguuuucucgcccaucccccaucgguuaucuggggcuacugucacaaaggaccagggacauuuacaucagucgaagacgccgggggacuuuuacuuggacccucucugauucugaaagcaaugaaacuccagguggguauugucuaacaagguggauguugauugaggccgagcugaagugcuuugggaacacagcaguugcgaaaugcaaugaaaaacaugaugaagaguuuugugacaugcuaagauuguuugacuuuaacaaacaagcuauaaggaggcugaaagcacccgcacagaugagcauccaacuaauaaacaaagcagugaaugcacugaucaaugaccagcugauaaugaagaaucauuuaagagauaucaugugcauuccuuacugcaauuacagcaaauauugguacuugaaucacacuguaacagggaggacaucguuaccaagaugcuggcuugugucaaaugguuccuaccugaaugagacacauuuuucugacgacauugaacaacaagcagacaauaugauaacagaacuguugcagaaggaguacauggacaggcaagggaaaacaccuuuaggguuaguagaucuuuuugucuucagcaccagcuuuuaucucaucagcaucuuccuccaccugguuaaaaucccaacccacagacaugucauagggaaacccugcccuaaaccacacagacucaaccacaugggcauaugcucauguggucuguacaaacauccuggugugccagucaaguggaaaagauagggacuaguaauaaggaaacuguaugaaugucugugggcaggaagugaagagauccuucuguaaagguuuuuggaauuaugucugcugaauaauaaacuuuuuugaaauaauaaaucugguagaaaaaugagaucuaaaaaaaaaaaaaaaaaaaaaaaaaaaaaaaaaaaaaaaaaaaaaaaaaaaaaaaaaaaaaaaaugcaucccccccccccccccccccccccccccccccaaaggcucuuuucagagccaccagaauu

SEQ ID NO: 6698 - RNA, 1813 nt, Artificial Sequence
  mRNA product Design b-4 comprising derived and/or modified sequence from LASV(LASV035-NIG-2009;Clade II)__AIT17588__GPCstabilized (wt)
gggagagucccgcagucggcguccagcggcucugcuuguucgugugugugucguugcaggccuuauucaagcuuaccauggggcaaaucauaacauuuuuccaggaagugccucaugucauugaggaggugaugaacauugucuuaauugcucucagucuucuagcaauacugaaagggauuuacaauguugcuaccuguggccucuuuggguugguguccuuucuucucuuauguggaaggucaugcucaacaacuuacaaggguguuuaugagcuucaaacucuagagcuggauauggcaagccuuaauaugacaaugcccuuauccugcacgaagaacaacagccaccacuacaucaugguuggaaaugagacuggcuuggagcugacuuugacaaacacaaguaucaucaaccacaaguucugcaaccuuuccgaugcacauaaaaagaaucucuaugaccaugcuuuaaugagcaucaucucaacuuuccaccuauccaucccuaacuuuaaucaguaugaagcaaugaguugugacuucaauggggggaagauaaguguucaguacaaccucagccacgcuuaugcuguagaugcagcuaaccauugugggaccauugccaauggaguucuucaaacuuuuaugaggauggcuugggguggcaguuacauagcacuugauucuggaugcgggaguugggauuguauaaugacuuccuaccaauauuugauaauccaaaacaccacuugggaagaucacugccaguuuucucgcccauccccuauugguuaucuggggcuacugucacaaagaaccagggauauuuacaucagccgaagacgccggggaacuuuuacuuggacucucucugauucugaaggcaaugaaacaccggguggauauuguuuaacaagauggaugcugauugaggccgaauuaaagugcuuugggaacacagcaguugcgaaaugcaaugagaaacaugaugaagaguuuugugacauguuaagguuguuugacuuuaacaaacaggcuauaaggaggcuaaaggcacccgcacagaugagcauccaacuaauaaacaaagcagugaacgcacugaucaaugaccagcucauuaugaagaaucauuuaagagauaucaugugcauuccuuacugcaauuacagcaaguauugguauuuaaaucacacuguaacagggaagacaucguugccaagaugcuggcuuguaucaaaugguuccuaccugaaugaaacacauuuuucugaugacauugaacaacaagcagauaacaugauaacagaauuguuacagaaagaguacauugacaggcaagggaaaacacccuuaggguugguggaucuuuuugucuucagcacuagcuucuaccuuauuagcaucuuccuccaccugguuaaaaucccaacccacagacaugucauagggaagcccugccccaagccacacagacucaaccacaugggcauaugcucauguggucuguacaaacauccugguguaccagucaaguggaaaagauagggacuaguaauaaggaaacuguaugaaugucugugggcaggaagugaagagauccuucuguaaagguuuuuggaauuaugucugcugaauaauaaacuuuuuugaaauaauaaaucugguagaaaaaugagaucuaaaaaaaaaaaaaaaaaaaaaaaaaaaaaaaaaaaaaaaaaaaaaaaaaaaaaaaaaaaaaaaaugcaucccccccccccccccccccccccccccccccaaaggcucuuuucagagccaccagaauu

SEQ ID NO: 6699 - RNA, 1813 nt, Artificial Sequence
  mRNA product Design b-4 comprising derived and/or modified sequence from LASV(LASV1000-NIG-2009;Clade II)__AIT17782__GPCstabilized (wt)
gggagagucccgcagucggcguccagcggcucugcuuguucgugugugugucguugcaggccuuauucaagcuuaccaugggacaaaucauaacauuuuuccaggaaguuccucaugucauagaggaagugaugaacauuguccugauugcucucagccuccuggcaauacuaaaagggaucuacaauguugcuaccuguggccucuuuggauugguguccuuccuccucuuauguggaagaucaugcucaacaacuuacaaggguguuuaugagcugcaaacucuagagcuagacauggcaagccuuaauaugacaaugccucuaucuugcacgaagaauaacagccaccauuacaucauggucggaaaugagacuggcuuggagcugacuuuaacaaacacaaguauuaucaaucacaaguuuuguaaccuuucugaugcacacaaaaagaaucuuuaugaccaugcuuuaaugagcaucaucucaaccuuccauuuaucuauucccaacuucaaucaguaugaagcaaugaguugugacuucaaugggggaaagauaaguguucaguacaaccuuagccacacuuaugcuguagaugcagccaaccacugugggacuaucgccaauggcguccuucagaccuuuaugaggauggcuugggguggcaguuacauagcacuugauuccggaugcgggaguugggacuguauaaugacuuccuaucaauaucugauaauccaaaacaccacuugggaagaucacugccaguuuucucgcccaucuccuaucgguuaucuggggcuacugucacaaaggaccagagacauuuacaucagucgaagacgccgggggacuuucacuuggacucucucugauucugaagguaaugaaacaccggguggguacugucuaacaagguggaugcugauugaggccgaguugaagugcuuugggaacacagcaguugcgaaaugcaaugagaaacaugaugaagaguuuugugacauguuaagauuguuugacuuuaacaaacaagcuauaaagaggcugaagacacccgcacagaugaguauucaacugauaaacaaagcagugaacgcacugaucaaugaccagcugauuaugaagaaucauuugagagacaucaugugcauuccuuacuguaauuacagcaaguauugguaucuaaaucacaccguaacagggaagacaucguugccaaggugcuggcuugugucaaaugguuccuaccugaaugagacacacuuuucugaugacauugaacaacaagcagauaacaugauaacagaacuauugcaaaaggaguacauagacaggcaagggaaaacacccuuaggguuaguagaccuuuuugucuuuagcaccagcuuuuaucucauuagcaucuuccuccaccuggucaaaaucccaacccauagacaugucguagggaaacccugcccuaaaccacacagacucaaccacaugggcauaugcucauguggucuauacaaacauccugguguaccagucaaauggaaaagauagggacuaguaauaaggaaacuguaugaaugucugugggcaggaagugaagagauccuucuguaaagguuuuuggaauuaugucugcugaauaauaaacuuuuuugaaauaauaaaucugguagaaaaaugagaucuaaaaaaaaaaaaaaaaaaaaaaaaaaaaaaaaaaaaaaaaaaaaaaaaaaaaaaaaaaaaaaaaugcaucccccccccccccccccccccccccccccccaaaggcucuuuucagagccaccagaauu

SEQ ID NO: 6700 - RNA, 1813 nt, Artificial Sequence
  mRNA product Design b-4 comprising derived and/or modified sequence from LASV(LASV221-NIG-2010;Clade II)__AIT17624__GPCstabilized (wt)
gggagagucccgcagucggcguccagcggcucugcuuguucgugugugugucguugcaggccuuauucaagcuuaccaugggacaaaucauaacauuuuuccaggaaguaccucaugucauagaggaagugaugaacauuguccugauugcucucagccuucuggcaauacugaaagggaucuacaauguugcuaccuguggccucuuuggauugguguccuuccuccucuuauguggaagaucaugcucaacaacuuacaaggguguuuaugagcuacaaacucuagagcuagacauggcaagccuuaauaugacaaugcccuuaucuugcacgaagaacaacucccaccauuacaucauggucggaaaugagacuggcuuggagcugacuuugacaaauacaagcauuaucaaccacaaguuuuguaaccuuucugaugcgcauaaaaagaaucuuuaugaccaugcuuuaaugaguaucaucucaaccuuccacuuguccauuccuaacuuuaaucaguaugaagcaaugaguugugauuucaaugggggaaagauaaguguucaguacaaccuuagccacacuuaugcuauagaugcagccaaccacugugggaccauugccaauggcguucuucagacuuucaugagaauggcuugggguggcaguuacauagcacuugauuccggaugcgggagcugggauugcauaaugacuuccuaccaauauuugauaauccaaaacaccacaugggaagaucacugccaguuuucucgcccaucccccaucgguuaucuggggcuacuaucacaaagaaccagggacauuuacauuagucgaagacgccgggggacuuucacuuggacucucucugacucugaagguaaugaaacaccggguggguauugucuaacaagauggaugcugauugaggccgaguugaagugcuuuggaaacacagcaguugcaaaaugcaaugaaaaacaugaugaagaguuuugugauauguugagauuguuugacuucaacaaacaagcuauaaggaggcuaaagacacccgcacagaugaguauccaacugauaaacaaagcggugaacgcacugaucaaugaccagcugaucaugaagaaucauuugagagauaucaugugcauuccuuacugcaauuacagcaaguauugguaucuaaaucacacuguaacagggaagacaucguugccaagaugcuggcuugugucgaaugguucuuaccugaaugagacacauuuuucugaugacauugaacaacaagcagacaacaugauaacagaaauguugcaaaaggaguacauggacaggcaagggaaaacacccuuaggguuaguagaucuuuuugucuucagcaccagcuuuuaucucauuagcaucuuccuccaccuaguuaaaauuccaacccacagacaugucauagggaaacccugcccuaaaccacacagacucaaccacaugggcauauguucauguggucuguauaagcauccuggcgugccagucaaguggaaaagauagggacuaguaauaaggaaacuguaugaaugucugugggcaggaagugaagagauccuucuguaaagguuuuuggaauuaugucugcugaauaauaaacuuuuuugaaauaauaaaucugguagaaaaaugagaucuaaaaaaaaaaaaaaaaaaaaaaaaaaaaaaaaaaaaaaaaaaaaaaaaaaaaaaaaaaaaaaaaugcaucccccccccccccccccccccccccccccccaaaggcucuuuucagagccaccagaauu

SEQ ID NO: 6701 - RNA, 1813 nt, Artificial Sequence
  mRNA product Design b-4 comprising derived and/or modified sequence from LASV(LASV237-NIG-2010;Clade II)__AIT17638__GPCstabilized (wt)
gggagagucccgcagucggcguccagcggcucugcuuguucgugugugugucguugcaggccuuauucaagcuuaccaugggacaaaucauaacauuuuuccaggaaguaccucaugucauagaggaagugaugaacauuguccugauugcucucagccuucuggcaauacugaaggggaucuacaauguugccaccuguggccuauuuggacugguguccuuucuccucuuauguggaagaucaugcucaacaacuuauaaggguguuuaugagcuacaaacucuagagcuggauauggcaagccuuaauaugacaaugccccuaucuugcacaaagaacaacagucaccauuacaucauggucggaaaugagacuggcuuggagcugacuuuaacaaauacaaguauuaucaaccacaaguuuuguaaccuuucugaugcacauaaaaaggaucucuaugaccaugcuuuaaugaguaucaucucaaccuuccacuuaucuauuccuaauuuuaaucaguaugaagcaaugaguugugacuucaauggggggaagauaaguguucaguacaaccuuagccacacuuaugcuguagaugcagccaaucacugugggacuaucgccaauggcguucuucagacuuuuaugaggauggcuugggguggcaguuacauagcacuugauuccggaugcgggaguugggauuguauaaugacuuccuaccaauauuugauaauccagaacaccacuugggaagaucacugccaguuuucucgcccauccccuaucgguuaucuggggcuacugucacaaaggaccagagacauuuacaucagucgaagacgccgggggacuuuuacuuggacucucucugauucugaagguaaugaaacaccggguggguacugucuaacaagauggaugcugauugaggccgaguugaagugcuuugggaacacagcaguugcgaaaugcaaugagaaacaugaugaagaguuuugugacauguuaagacuguuugauuucaacaaacaagcuauaaggaggcuaaagacacccgcacagaugaguauccaacugauaaacaaagcagugaaugcauugaucaaugaccagcuuauuaugaagaaucacuugagagauaucaugugcauuccuuacugcaauuacagcaaguacugguaucugaaucacacuguaacagggaagacaucguugccgaggugcuggcuugugucaaaugguuccuaccugaaugagacacauuuuucugaugacauugaacaacaggcagacaacaugauaacagaacuguugcaaaaggaguacauggacaggcaagggaaaacacccuuaggguuaguagaccuuuuugucuucagcaccagcuuuuaucucauuagcaucuuccuccaccugaucaaaaucccaacccacagacauaucacagggaaacccugcccuaaaccacacagacuuaaccacaugggcauaugcucauguggucuauacaaacauccugguguaccagucaaguggaaaagauagggacuaguaauaaggaaacuguaugaaugucugugggcaggaagugaagagauccuucuguaaagguuuuuggaauuaugucugcugaauaauaaacuuuuuugaaauaauaaaucugguagaaaaaugagaucuaaaaaaaaaaaaaaaaaaaaaaaaaaaaaaaaaaaaaaaaaaaaaaaaaaaaaaaaaaaaaaaaugcaucccccccccccccccccccccccccccccccaaaggcucuuuucagagccaccagaauu

SEQ ID NO: 6702 - RNA, 1813 nt, Artificial Sequence
  mRNA product Design b-4 comprising derived and/or modified sequence from LASV(LASV253-NIG-2011;Clade II)__AIT17670__GPCstabilized (wt)
gggagagucccgcagucggcguccagcggcucugcuuguucgugugugugucguugcaggccuuauucaagcuuaccauggggcaaaucauaacauuuuuucaggaagugccucaugucauagaagaagugaugaacauuguccugauugcccucagccuucuggcaauauugaaagggaucuacaauguugcuacuuguggccucuuuggacugguguccuuucuucucuuauguggaagaucaugcucaacaacuuacaaagguguuuaugagcuacaaacucuagagcuagacauggcaagccuuaauaugacaaugcccuuaucuugcacaaagaauaauagccaccauuacaucauggucggaaaugaaacuggcuuagagcugacuuuaacaaauacaaguaucaucaaccacaaguuuuguaaccuuucugaugcacauaaaaagaaucuuuaugaccaugcuuuaaugagcaucaucucaaccuuccacuuauccauuccuaacuucaaucaauaugaagcaaugaguugugacuucaauggggggaagauaaguguucaguacaaccuuagccacacuuaugcuguagaugcagcuaaccacugugggacuauugccaauggcguucuucagacuuuuaugaggauggcuugggguggcagcuacauagcacuugauuccggaugcgggagcugggauuguauaaugacuuccuaccaauauuugauaauccagaacaccacuugggaggaucacugccaguuuucucgcccaucccccaucgguuaucuggggcuacugucacaaaggaccagggacauuuacaucagucgaagacgccggggaacuuuuacuuggacccucucugauucugaaggcaaugaaacuccagguggguauugucuaacaagguggauguugauugaggccgaguugaagugcuuugggaacacagcaguugcgaaaugcaaugagaaacaugaugaagaguuuugugacaugcuaagauuguuugacuuuaauaaacaagcuauaaggagacugaaagcacccgcacagaugaguauucaacuaauaaacaaagcagugaaugcacugaucaaugaccagcugauaaugaagaaucauuuaagagauaucaugugcauuccuuacugcaauuacagcaaguauugguaucugaaucacacuguaacaggaaggacaucguuaccaagaugcuggcuugugucaaaugguuccuaccugaaugagacacauuuuucugacgacauugaacaacaagcagacaacaugauaacagaacuguugcagaaggaguacauagacaggcaagggaaaacaccuuuaggguuaguggaucuuuuugucuucagcaccagcuuuuaucucaucagcaucuuccuccaccugguuaaaaucccaacccacagacauaucauagggaaacccugcccuaaaccacacagacucaaccacaugggcauaugcucauguggucuguacaaacauccuggugugccaguuaaguggaaaagauagggacuaguaauaaggaaacuguaugaaugucugugggcaggaagugaagagauccuucuguaaagguuuuuggaauuaugucugcugaauaauaaacuuuuuugaaauaauaaaucugguagaaaaaugagaucuaaaaaaaaaaaaaaaaaaaaaaaaaaaaaaaaaaaaaaaaaaaaaaaaaaaaaaaaaaaaaaaaugcaucccccccccccccccccccccccccccccccaaaggcucuuuucagagccaccagaauu

SEQ ID NO: 6703 - RNA, 1813 nt, Artificial Sequence
  mRNA product Design b-4 comprising derived and/or modified sequence from LASV(LASV254-NIG-2011;Clade II)__AIT17674__GPCstabilized (wt)
gggagagucccgcagucggcguccagcggcucugcuuguucgugugugugucguugcaggccuuauucaagcuuaccaugggacaaaucauaacauuuuuccaggaaguaccucaugucauagaggaagugaugaacauuguucugauugcucucagccuucuggcaauauugaaagggaucuacaauguugcuaccuguggccucuuuggauugguguccuuucuucucuuauguggaagaucaugcucaacaacuuacaaggguguuuaugagcuacaaacucuagagcuagacaugacaaaccucaauaugacaaugccuuuauccugcacgaaaaacaacagccaccauuacaucauggucggaaaugagacuggucuggagcugacuuuaacaaauacaagcaucaucaaccacaaguuuuguaaccuuucugaugcacauaaaaagaaucuuuauaaccaugcuuuaaugaguauuauuucaacuuuccacuuauccauuccuaacuuuaaucaguaugaagcaaugaguugugacuucaaugggggcaagauaaguguccaguacaaccuuagccauaguuaugcuguggaugcagcuaaccacugugggaccauugccaauggcgugcuucagacuuuuaugaggauggcuugggguggcaguuacauagcacuugauuccggaugcgggaauugggauuguauaaugaccuccuaccaauauuugauaauccaaaacaccacuugggaagaucacugucaguuuucucgcccauccccuauugguuaucugggguuacugucacaaaggaccagggacauuuacaucagucgaagacgccgggggacuuuuacuuggacucucucugauucugaagguaaugaaacaccagguggguauugucuaacaagauggaugcugauugaggccgaguugaagugcuuugggaacacagcaguugcgaaauguaaugagaaacaugaugaggaguuuugugacauguuaagauuguuugacuuuaacaaacaagcuauaaggaggcugaagacacccgcacaggcgaauauccaacugauaaauaaagcagugaacgcacugaucaaugaccagcugaucaugaagaaucauuugagagauaucaugugcauuccuuacugcaauuacagcaaguauugguacuuaaaucacacuguaacagggaagacaucguugccaagaugcuggcuugugucaaauggcuccuacuugaaugagacacauuuuucugaugacauugaacaacaagcagacaauaugauaacagaacuguugcagaaggaguacauggacaggcaagggaaaacacccuuaggguugguagaucuuuuugucuucagcaccagcuuuuaucucauuagcaucuuccuccaccugguuaaaaucccaacccacagacaugucauagggaaacccugcccuaaaccacacagacucaaccacaugggcauaugcucauguggucuguacaaacauccugguguaccagucaaguggaaaagauagggacuaguaauaaggaaacuguaugaaugucugugggcaggaagugaagagauccuucuguaaagguuuuuggaauuaugucugcugaauaauaaacuuuuuugaaauaauaaaucugguagaaaaaugagaucuaaaaaaaaaaaaaaaaaaaaaaaaaaaaaaaaaaaaaaaaaaaaaaaaaaaaaaaaaaaaaaaaugcaucccccccccccccccccccccccccccccccaaaggcucuuuucagagccaccagaauu

SEQ ID NO: 6704 - RNA, 1813 nt, Artificial Sequence
  mRNA product Design b-4 comprising derived and/or modified sequence from LASV(Nig08-A19;Clade III)__ADU56618__GPCstabilized (wt)
gggagagucccgcagucggcguccagcggcucugcuuguucgugugugugucguugcaggccuuauucaagcuuaccaugggacaaauugugacauucuuccaggaagucccucauguuaucgaggaagugaugaauaucguccucauagcauugucaauuuuggcaauccuaaaaggacucuacaacauugcuacauguggcuugauaggccuugucacauuccucuuacuuucuggaaggucauguucaaugaccuacaaaggaguuuaugaacuacagacccuugaacugaacaugaacacucugaauaugacuaugccgcuaucuuguacaaagaacaauagucaccacuacaucauggugggaaacgagacagggcuugagcucaccuuaaccaacacaagcuugcuccaucacaaauucugcaaccuaucagaugcucauaagaaaaaucuuuaugaucacacucucaugagcauuaucuccacauuccauuuguccauuccuaacuuuaaucaguaugaggcaaugaguugugauuuuaaugguggcaagaucacugugcaauacaaucugagucauagcuaugcaauugaugcagcaaaccauuguggcacaguggcaaacgguguguugcaaacauuuaugaggauggcuuggggagguaguuacauugcccuugauuccggaugcgggaaaugggauuguauaaugaccaguuaucaauacuuaaucauccagaacacaaccugggaagaucauugucaauuuuccagaccauccccaauuggauaucuugggcuccucucacagagaacuagagacauauacauuaguagaagacgccggggaacauuuacuuggacacuuucugacucagaaggaaaugagacaccaggagguuacugucucacuagauggauguugauugaggcugaacuaaaguguuucgggaauacagcuguagcuaagugcaaugaaaaacacgaugaagaguuuugugacaugcuaaggcuauuugacuucaauaagcaagcuauaaggagguuaaaggcacccgcccaaaugagcauacagcugaucaacaaagcaguuaaugcucuaauaaacgaucagcugaucaugaagaaucaucuaagggacaucaugugcauaccauacugcaauuacagcaaguacugguaucucaaucacaccucaacagggaggaccucauuaccgagauguuggcuuguuucaaaugggucauaucucaaugaaacucacuuuucagaugacauugagcagcaagcugauaacaugauaacugaaauguugcaaaaagaauaccuggacagacaaggaaagaccccauugggauugguagaucuuuuugucuucaguacaaguuuuuacuuaaucaguauuuuccuccaucuggucaaaauaccaacccauagacacauuguagggaagccuugccccaaaccucauagguugaaccacaugggcaucugcucuuguggucuauauaaacagccaggaguacccguuagauggaagagauaaggacuaguaauaaggaaacuguaugaaugucugugggcaggaagugaagagauccuucuguaaagguuuuuggaauuaugucugcugaauaauaaacuuuuuugaaauaauaaaucugguagaaaaaugagaucuaaaaaaaaaaaaaaaaaaaaaaaaaaaaaaaaaaaaaaaaaaaaaaaaaaaaaaaaaaaaaaaaugcaucccccccccccccccccccccccccccccccaaaggcucuuuucagagccaccagaauu

SEQ ID NO: 6705 - RNA, 1816 nt, Artificial Sequence
  mRNA product Design b-4 comprising derived and/or modified sequence from LASV(G1180-SLE-2010;Clade IV)__AIT17168__GPCstabilized (wt)
gggagagucccgcagucggcguccagcggcucugcuuguucgugugugugucguugcaggccuuauucaagcuuaccaugggacagauagugacauucuuccaggaagugccucauguaauagaagaggugaugaacauuguucucauugcacugucuauacuagcagugcugaaaggucuguacaauuuugcaacauguggccucguuggucuacucacuuuccuccuguuguguggcagaucuugcacagcuagucguuacaaagggguuuaugagcuucagacucuggaacuaaacauggagacacucaauaugaccaugccucucuccugcacaaagaacaacagucaucauuauauaaugguggguaaugagacaggacuagaacugacuuugacuaacacgagcaucauuaaucauaaauuuugcaaucugucugaugcccacaaaaagaaccuuuaugaccacgcucuuaugagcauaauuucaacuuuccacuuauccauccccaacuucaaucaguaugaggcaaugagcugcgauuuuaaugggggaaagauuagugugcaguacaaccugagucacagcuaugcuggggaugcagccaaucauugugguacuguugcaaauggugucuugcagaccuucaugaggauggcuuggggugggagcuacauugcucuugacucaggcugcggcaguugggacuguauuaugacuaguuaucaauaucugauaauccaaaauacaaccugggaagaucacugccaguucucaagaccaucucccauugguuaucucgggcuccuuucacaaagaaccagagauauuuacauuaguagaagacgccggggcacauucacauggacacugucagauucugaaggcaaggacacaccagggggauauugucugaccagauggaugcuaauugaagcugaacuaaaaugcuucgggaacacagcuguggcaaaauguaaugagaagcaugaugaggaauuuugugacaugcugaggcuguuugacuucaacaaacaagccauucaaagguugaaagcucccgcacaaaugagcauucaauugaucaacaaggcaguaaaugcuuugauaaaugaccaacuuauaaugaagaaccauuuacgagacaucaugugcaucccauacuguaauuacagcaaguauugguaccucaaccacacaaccacugggaaaacaucacugccuaaguguuggcuuguaucaaaugguucauacuuaaaugagacccacuuuucugaugauauugagcaacaagcugacaacaugaucacugagauguuacagaaggaguauauggaaaggcagggcaagacaccauugggccuaguugaccucuuuguguuuagcacaaguuucuaucucauuagcaucuuccuucaccuggucaaaauaccaacucauaggcauauuguaggcaagucgugucccaaaccucauagauugaaucacaugggcauauguuccuguggacucuacaaacagcccggugugccugugaaauggaagagaugaggacuaguaauaaggaaacuguaugaaugucugugggcaggaagugaagagauccuucuguaaagguuuuuggaauuaugucugcugaauaauaaacuuuuuugaaauaauaaaucugguagaaaaaugagaucuaaaaaaaaaaaaaaaaaaaaaaaaaaaaaaaaaaaaaaaaaaaaaaaaaaaaaaaaaaaaaaaaugcaucccccccccccccccccccccccccccccccaaaggcucuuuucagagccaccagaauu

SEQ ID NO: 6706 - RNA, 1816 nt, Artificial Sequence
  mRNA product Design b-4 comprising derived and/or modified sequence from LASV(G1442-SLE-2011;Clade IV)__AIT17180__GPCstabilized (wt)
gggagagucccgcagucggcguccagcggcucugcuuguucgugugugugucguugcaggccuuauucaagcuuaccaugggacaaauagugacauucuuucaggaagugccucaugugauagaggagguaaugaacauugugcucauugcacuauccauacuggcagugcugaagggucuauacaauguugcaacaugcggccugauugguuuagucaccuuccuauuguuaugugguaggucuugcacaacaacucuuuacaaaggaguuuacgaacuucagacucuggaauuaaacauggagacacucaauaugacuaugccucucucuuguacaaagaacaacagucaccacuauauaaggguggguaaugagacaggacuagaguugacccugaccaacacaagcaucaucaaucacaaguuuugcaaucuaucugaugcucacaaaaagaaccucuaugaucaugcuuugaugagcauaaucucgacuuuucacuuguccauucccaacuucaaccaauaugaggcaaugagcugugacuucaauggagggaagauuagugugcaguauaaccugagucacagcuaugcuggagaugcagccaaccauugugguacaguugcaaaugguguuuuacaaaccuucaugaggauggcuuggggugggaguuacaucgcccuugacucagguugcggcaauugggacuguauuaugacuaguuaucaauaccuaauaauucagaauacgaccugggaugaucauugccaauucucaagaccaucccccaucgguuaucuugggcuccucucacaaaggaccagagauguuuauaucaguagaagacgccggggcacauucacauggacacugucagauucugaaggcaaggacacaccaggaggguacugucugaccagguggaugcuaauugaagcugaacugaaaugcuuuggcaacacagcuguagcaaaauguaaugagaaacaugaugaagaauucugugacaugcuaaggcuguuugacuucaauaaacaagcuauucagagguugaaagcccccgcacaaaugaguauucaguugaucaacaaagcagugaaugcuuugauaaaugaccaacuaauaaugaaaaaccaucuacgggacaucaugugcauuccauacugcaauuacagcaaguacugguaucucaacaacacagccacugggaaaacaucacugcccaaauguuggcuuauaucaaauggcucauauuugaacgaaacucacuucucugaugacauugaacaggaagcugacaauaugaucacugagauguuacaaaaagaauacauggagaggcaggggaagacaccauuaggucugguugaccucuuuguguucagcacaaguuucuaucucauuagcaucuuccuucaccuagucaaaauaccaacucacaggcauauugugggcaaaucauguccuaaaccccauagguugaaucacauggguauuugcucuuguggacuuuauaaacaacccggugugccuguaagauggaagagaugaggacuaguaauaaggaaacuguaugaaugucugugggcaggaagugaagagauccuucuguaaagguuuuuggaauuaugucugcugaauaauaaacuuuuuugaaauaauaaaucugguagaaaaaugagaucuaaaaaaaaaaaaaaaaaaaaaaaaaaaaaaaaaaaaaaaaaaaaaaaaaaaaaaaaaaaaaaaaugcaucccccccccccccccccccccccccccccccaaaggcucuuuucagagccaccagaauu

SEQ ID NO: 6707 - RNA, 1816 nt, Artificial Sequence
  mRNA product Design b-4 comprising derived and/or modified sequence from LASV(G3010-SLE-2013;Clade IV)__AIT17344__GPCstabilized (wt)
gggagagucccgcagucggcguccagcggcucugcuuguucgugugugugucguugcaggccuuauucaagcuuaccaugggacagauaguaacauucuuccaggaagugccucaugugauagaagaggugaugaacauuguucucauugcacugucuauauuagcagugcugaaaggucuguacaauuuugcaacauguggccucguugguuugguuaccuuccuccuguuaugugguaggucuugcacaaccagucuuuacaaagggguuuaugagcuucagacucuggaacuaaacauggagacacucaauaugaccaugccucucuccuguacaaagaacaacagucaucauuauauuaugguggguaaugagacaggacuagaacugaccuugaccaacacgagcaucauuaaucauaaauuuugcaaucugucugaugcccacaaaaagaaccucuauaaucacgcucuuaugagcauaauuucaacuuuccaucuguccauucccaacuucaaucaguaugaggcaaugagcugcgauuucaaugggggaaagauuagugugcaguacaaccugagucacaguuaugcuggggaugcggccagccauuguggcacuguugcaaauggugucuuacagacuuucaugaggauggcuugggguggaagcuauauugcucuugacucaggcugcggcaagugggacugcauuaugacuaguuaucaguaccugauaauucaaaauacaaccugggaagaucacugccaauucucaagaccaucucccauuggcuaucucgggcuccucucacaaaggaccagagauauuuauauuaguagaagacgccggggcacauucacauggacacugucggauucugaagguaaggacacaccagggggauauuguuugaccagauggaugcuaauugaagcugaacuaaagugcuucgggaacacagcuguagcaaaauguaaugagaagcaugaugaggaauuuugugacaugcugaggcuguuugacuucaacaaacaagccauucaaagauugaaaacucccgcacaaaugagcauucaguugaucaacaaggcaguaaaugccuuaauaaaugaccagcuuauaaugaagaaccaucuacgagacauaaugugcauuccauacuguaacuacagcaaguauugguaccucaaccacacaaccacugggaaaacaucacugccuaaauguuggcuuguaucaaauggcucauacuugaaugagacccacuuuucugaugauauugaacaacaggcugacaacaugaucacugagauguuacagaaagaguacauggagaggcaggggaagacaccauugggccuggucgaccuuuuuguguucagcacaaguuucuaucucaucaguaucuuucuucaccuagucaaaauaccaacucauagacauauuguaggaaagucgugucccaaaccucacagauugaaucacaugggcauauguuccuguggacucuacaaacagcccggugugccugugagauggaagagaugaggacuaguaauaaggaaacuguaugaaugucugugggcaggaagugaagagauccuucuguaaagguuuuuggaauuaugucugcugaauaauaaacuuuuuugaaauaauaaaucugguagaaaaaugagaucuaaaaaaaaaaaaaaaaaaaaaaaaaaaaaaaaaaaaaaaaaaaaaaaaaaaaaaaaaaaaaaaaugcaucccccccccccccccccccccccccccccccaaaggcucuuuucagagccaccagaauu

SEQ ID NO: 6708 - RNA, 1816 nt, Artificial Sequence
  mRNA product Design b-4 comprising derived and/or modified sequence from LASV(G502-SLE-2009;Clade IV)__AIT17126__GPCstabilized (wt)
gggagagucccgcagucggcguccagcggcucugcuuguucgugugugugucguugcaggccuuauucaagcuuaccaugggacagauagugacauucuuccaggaaguaccucauguaauagaagaggugaugaacauuguucucauugcacugucuauacuagcagugcugaaaggucuguauaauuuugcaacauguggccucguuggucuacucaccuuccuccuauuguguggcaggucuugcacaaccggacuuuacaaagggguuuaugagcuucaaacucuggaacuaaacauggagacacucaauaugaccaugccucucuccugcacaaagaacaacagucaucauuauauaaugguggguaaugagacaggacuagaacugacuuugacuaacacgagcaucauuaaucauaaauuuugcaaucugucugaugcccacaaaaagaaccuuuaugaccacgcucuuaugagcauaauuucaacuuuccacuuguccauccccaacuucaaucaguaugaggcaaugagcugcgauuuuaaugggggaaagauuaguguacaguacaaccugagccacaguuaugcuggggaugcggcugaucauuguggcacuguugcaaauggugucuugcagacuuucaugaggauggccuggggugggagcuacauugcucuugacucagguugcggcaggugggacuguauuaugacuaguuaucaauauuugauaauccaaaauacaaccugggaagaucacugccaguucucaagaccaucucccaucgguuaucucgggcuccucucacaaagaacuagagacauuuacauuaguagaaggcgccggggcacauucacauggacacugucagauucugaaggcaaggacacaccaggaggauauugucugacuagauggaugcugauugaggcugaauuaaaaugcuucgggaacacagcuguagcaaaauguaaugagaagcaugaugaggaauuuugugacaugcugaggcuguuugacuucaacaaacaagccauucaaagguuaaaagcucccgcacagaugagcauucaauugaucaacaaggcaguaaaugcuuugauaaaugaccaacuuguaaugaagaaccacuuacgggacaucaugugcauuccauacuguaauuacagcagguauugguaucucaaccacacaaccacuggaagaacaucacugccuaaauguuggcuugugucaaauggcucauacuuaaacgagacccacuuuucugaugauauugagcaacaagcugacaacaugaucacugagauguuacagaaggaauauauggaaaggcagggaaagacaccauuaggucugguugaccucuuuguguucagcacaaguuucuaucuuauuagcaucuuccuucaccuggucaagauaccaacucauaggcauauugugggcaagucgugucccaaaccucauagauugaaucacaugggcauauguuccuguggacucuacaaacagcccgguguaccugugaaauggaagagaugaggacuaguaauaaggaaacuguaugaaugucugugggcaggaagugaagagauccuucuguaaagguuuuuggaauuaugucugcugaauaauaaacuuuuuugaaauaauaaaucugguagaaaaaugagaucuaaaaaaaaaaaaaaaaaaaaaaaaaaaaaaaaaaaaaaaaaaaaaaaaaaaaaaaaaaaaaaaaugcaucccccccccccccccccccccccccccccccaaaggcucuuuucagagccaccagaauu

SEQ ID NO: 6709 - RNA, 1816 nt, Artificial Sequence
  mRNA product Design b-4 comprising derived and/or modified sequence from LASV(G733-SLE-2010;Clade IV)__AIT17154__GPCstabilized (wt)
gggagagucccgcagucggcguccagcggcucugcuuguucgugugugugucguugcaggccuuauucaagcuuaccaugggacagauagugacauucuuccaggaagugccucauguaauagaagaggugaugaacauuguucucauugcacugucuauacuagcaguccugaagggucuguacaacuuugcaacauguggcaucguugguuuggucagcuuucuccuguuguguggcaggucuugcacaaccagucuuuacaaagggguuuaugagcuucagacucuggagcuaaacauggagacacuuaacaugaccaugccucucucuugcacaaagaacaacagucaucauuauauaauggugggcaaugagacgggauuggaacugaccuugaccaacacgagcauuaucaaucauaaauuuugcaaucuaucugaugcccauaagaagaaccucuaugaccacgcccuuaugaguauaaucucaaccuuccacuuguccauccccaacuucaaucaguaugaagcaaugagcugugauuucaaugggggaaagauuaguguacaguacaaccugagucacagcuaugcuggggaugcagccaaccauuguggcacaauugcaaauggugucuuacagacuuucaugaggauggccuggggugggagcuacauugcucuugacucaggcugcgacaggugggacugcauaaugaccaguuaucaauaucugauaauccaaaacacaaccugggaagaucacugccaauucucaagaccaucucccaucgguuaucuugggcuccucucacaaaggaccagagauauauauauuaguaggagacgccggggcacauuuacauggacauugucagauucugaagguaaggacacaccaggaggguauugucuaaccagauggaugcugauugaggcugagcugaaaugcuuugggaacacagcuguggcaaaaugcaaugagaaacaugaugaggaauuuugugauaugcuaaggcuguuugacuucaacaaacaagccauucaaagguuaaaagcucccgcacaaaugagcauucaguugaucaacaaagcagugaaugcuuugauaaacgaccaacuaauaaugaagaaccaucuacgggacaucaugugcauuccauacuguaauuacagcaaguacugguaccucaaccacacaacuacugggaaaacaucacugccuaaauguuggcuugugucgaaugguucauacuuaaacgagacucacuuuucugaugacauugaacaacaagcugacaauaugaucacugagauguuacagaaggaauacauggaaaggcaggggaagacaccauugggucuaguugaccucuuuguguucagcacaaguuucuaucucauuagcaucuuccuucauuuggucaaaauaccaacucauaggcauguuguaggcaagucgugucccaagccucacagauugaaucacaugggcauaugcuccugcggacucuauggacagccugguguaccugugaaauggaagagaugaggacuaguaauaaggaaacuguaugaaugucugugggcaggaagugaagagauccuucuguaaagguuuuuggaauuaugucugcugaauaauaaacuuuuuugaaauaauaaaucugguagaaaaaugagaucuaaaaaaaaaaaaaaaaaaaaaaaaaaaaaaaaaaaaaaaaaaaaaaaaaaaaaaaaaaaaaaaaugcaucccccccccccccccccccccccccccccccaaaggcucuuuucagagccaccagaauu

SEQ ID NO: 6710 - RNA, 1816 nt, Artificial Sequence
  mRNA product Design b-4 comprising derived and/or modified sequence from MOPV/LASV reassortant(IGS-1;Clade IV)__AFY05576__GPCstabilized (wt)
gggagagucccgcagucggcguccagcggcucugcuuguucgugugugugucguugcaggccuuauucaagcuuaccaugggacaaauagugacauucuuccaggaagugccucauguaauagaagaggugaugaacauuguucucauugcacugucuguacuagcagugcugaaaggucuguacaauuuugcaacguguggccuuguugguuuggucacuuuccuccuguugugugguaggucuugcacaaccagucuuuauaaagggguuuaugagcuucagacucuggaacuaaacauggagacacucaauaugaccaugccucucuccugcacaaagaacaacagucaucauuauauaauggugggcaaugagacaggacuagaacugaccuugaccaacacgagcauuauuaaucacaaauuuugcaaucugucugaugcccacaaaaagaaccucuaugaccacgcucuuaugagcauaaucucaacuuuccacuuguccauccccaacuucaaucaguaugaggcaaugagcugcgauuuuaaugggggaaagauuagugugcaguacaaccugagucacagcuaugcuggggaugcagccaaccauugugguacuguugcaaaugguguguuacagacuuuuaugaggauggcuuggggugggagcuacauugcucuugacucaggcugcggcaacugggacuguauuaugacuaguuaucaauaucugauaauccaaaauacaaccugggaagaucacugccaauucucgagaccaucucccaucgguuaucucgggcuccucucacaaaggacuagagauauuuauauuaguagaagacgccggggcacauucacauggacacugucagauucugaaggugaagacacaccagggggauauugucugaccagguggaugcuaauugaggcugaacuaaaaugcuucgggaacacagcuguggcaaaauguaaugagaagcaugaugaggaauuuugugacaugcugaggcuguuugacuucaacaaacaagccauucaaagguugaaagcucccgcacaaaugagcauucaguugaucaacaaagcaguaaaugcuuugauaaaugaccaacuuauaaugaagaaccaucuacgggacaucaugugcauuccauacuguaauuacagcaaguauugguaccucaaccacacaacuacugggagaacaucacugcccaaauguuggcuuguaucaaaugguucauacuugaacgagacccacuuuucugaugauauugaacaacaagcugacaauaugaucacugagauguuacagaaggaguauauggagaggcaggggaagacaccauugggucuaguugaccucuuuguguucagcacaaguuucuaucuuauuagcaucuuccuucaccuagucaaaauaccaacucauaggcauauuguaggcaagucgugucccaaaccucacagauugaaucauaugggcauuuguuccuguggacucuacaaacagccuggugugccugugaaauggaagagaugaggacuaguaauaaggaaacuguaugaaugucugugggcaggaagugaagagauccuucuguaaagguuuuuggaauuaugucugcugaauaauaaacuuuuuugaaauaauaaaucugguagaaaaaugagaucuaaaaaaaaaaaaaaaaaaaaaaaaaaaaaaaaaaaaaaaaaaaaaaaaaaaaaaaaaaaaaaaaugcaucccccccccccccccccccccccccccccccaaaggcucuuuucagagccaccagaauu

SEQ ID NO: 6711 - RNA, 1816 nt, Artificial Sequence
  mRNA product Design b-4 comprising derived and/or modified sequence from LASV(LM765-SLE-2012;Clade IV)__AIT17814__GPCstabilized (wt)
gggagagucccgcagucggcguccagcggcucugcuuguucgugugugugucguugcaggccuuauucaagcuuaccaugggacaaauagugacauucuuccaggaagugccccaugucauagaagaggugaugaacauuguucucauugcacuguccauacuagcagugcugaaaggucuguacaauuuugcaacauguggccucguuggcuuggucacuuuccuccuguuguguggcaggucuuguacaacuagccuuuacaaagggguuuaugagcuucagacucuggaacuaaacauggaaacacucaauaugaccaugccucucuccugcacaaagaacaauagucaucauuauauaauggugggcaaugagacaggacuagaacugaccuugaccaacacgagcauuauugaucauaaauuuugcaaucugucugaugcccacagaaagaaccucuaugaccacgcucuuaugagcauuaucucaacuuuccacuugucuaucccuaacuucaaucaguaugaggcaaugagcugcgauuucaaugggggaaagauuaguguacaguacaaccugagucacagcuaugccaaggacgcagccgaccauuguggaacuguugcaaaugguguauuacagacuuucaugaggauggcuuggggugggagcuacaucgcucuugacucaggcugcggcaggugggacuguauuaugacuaguuaucaauaucugauaauccaaaauacaaccugggaagaucacugccaauucucgagaccaucucccaucgguuaucucgggcuccucucacagaggaccagagauauuuauauuaguagaaggcgccggggcacauucacauggacacugucagauucugaaggcaaggacacaccagggggauauugucuaaccagauggaugcuaauugaggcugagcuaaagugcuucgggaauacagcuguggcaaaauguaaugagaagcaugaugaggaauuuugugacaugcugagguuguuugacuuuaacaagcaagccauucaaagguugaaagcucccgcacaaaugagcauucaguugaucaacaaagcaguaaaugcuuugauaaaugaccaacuuauaaugaagaaccaucuacgggacaucaugugcauuccauacuguaauuacagcaaguauugguaccucaaccacacaacuacuggaaaaacaucacugcccaaguguuggcuuguaucaaaugguucauaccugaacgagacccacuuuucugaugacauugaacaacaagcugacaacaugaucaccgagauguuacagaaggaguauauggagaggcaggggaagacaccauugggucugguugaccucuuuguguucagcacaagcuucuaucucauuagcaucuuccuucaccuaguuaaaauaccaacucauaggcauauuguaggcaagccgugucccaaaccucacagguugaaucauaugggcauuuguuccuguggacucuauaaacagccuggugugccuguaaaauggaagagaugaggacuaguaauaaggaaacuguaugaaugucugugggcaggaagugaagagauccuucuguaaagguuuuuggaauuaugucugcugaauaauaaacuuuuuugaaauaauaaaucugguagaaaaaugagaucuaaaaaaaaaaaaaaaaaaaaaaaaaaaaaaaaaaaaaaaaaaaaaaaaaaaaaaaaaaaaaaaaugcaucccccccccccccccccccccccccccccccaaaggcucuuuucagagccaccagaauu

SEQ ID NO: 6712 - RNA, 1816 nt, Artificial Sequence
  mRNA product Design b-4 comprising derived and/or modified sequence from LASV(LM776-SLE-2012;Clade IV)__AIT17824__GPCstabilized (wt)
gggagagucccgcagucggcguccagcggcucugcuuguucgugugugugucguugcaggccuuauucaagcuuaccaugggacagauagugacauucuuccaggaagugccucauguaauagaagaggugaugaacauuguccucauugcgcugucuauauuagcagugcugaaaggucuguacaacuuugcaacauguggccucguugguuugguuacuuuccuccuguuguguggcaggucuugcacaaccaguguuuauaaaggggucuaugagcuucagacucuggaguuaaacauggagacacucaauaugaccaugccucucuccugcacaaagaauaacagucaucauuauauaaugguagguaaugagacaggacuagaacugaccuugaccaacacaagcauuauuaaucauaaauuuugcaaucugucugaugcccacaaaaagaaccucuaugaccaugcccuuaugagcauaauuucaacuuuccacuuguccauccccaacuucaaucaguaugaagcaaugagcugugauuucaaugggggaaagauuagugugcaguacaaccugagucacagcuaugcuggggaugcugccaaccauuguggcacuguugcaaauggugucuuacagacuuucaugaggauggcuuggggugggagcuacauugcucuugacucaggcugcggcaagugggacuguauuaugacuaguuaucaauaucugauaauccaaaauacaaccugggaagaucacugccaauucucaagaccaucuccuaucgguuaucuugggcuucucucacaaaggaccagagauauuuauaucaguagaagacgccggggcacauucacauggacacugucagauucugaaggcaaggacacaccagggggauauugucugaccagauggaugcugauugaagcugaauuaaaaugcuucgggaacacagcuguagcaaaauguaaugagaagcaugaugaggaauuuugugacauguugaggcuguuugacuucaacaaacaagccauucaaagguugaaagcucccgcacaaaugagcauucaguugaucaacaaggcaguaaaugccuugauaaaugaucaacuuauaaugaagaaccaucuacgggacaucaugugcaucccauacuguaauuacagcaaauauugguaccucaaccacacaacuacugggaaaacaucacugccuaaauguuggcuugucucaaaugggucauacuugaacgagacccacuuuucugaugauauugaacaacaagcugacaacaugaucacugagauguuacagaaggaguauauggagaggcaggggaagacaccauugggccuaguugaccucuuuguguucagcacaaguuucuaucucaucagcaucuuccuucaccuagucaaaauaccaacucauaggcauauuguaggcaagucguguccuaaaccucacagauugaaucacaugggcauauguuccuguggacucuacaaacagcccggugugccugugagauggaaaagaugaggacuaguaauaaggaaacuguaugaaugucugugggcaggaagugaagagauccuucuguaaagguuuuuggaauuaugucugcugaauaauaaacuuuuuugaaauaauaaaucugguagaaaaaugagaucuaaaaaaaaaaaaaaaaaaaaaaaaaaaaaaaaaaaaaaaaaaaaaaaaaaaaaaaaaaaaaaaaugcaucccccccccccccccccccccccccccccccaaaggcucuuuucagagccaccagaauu

SEQ ID NO: 6713 - RNA, 1816 nt, Artificial Sequence
  mRNA product Design b-4 comprising derived and/or modified sequence from LASV(Mad39;Clade IV)__ANH09722__GPCstabilized (wt)
gggagagucccgcagucggcguccagcggcucugcuuguucgugugugugucguugcaggccuuauucaagcuuaccauggggcaaauugugacauucuuucaggaagugccucauguaauugaggaggugaugaacauuguacucauugcacuauccauacuggcagugcuaaagggucuguacaauguugcaacauguggccucauuggcuugguuaccuuccuccugcugugugguagaucuuguacaaccacucuuuauaaagggguuuaugagcuucaagcucuggaacuaaacauggaaacacucaacaugacuaugccucucucuugcacaaaaaacaacucucaucacuauauaagggugggcaaugaaacaggccuagaacugaccuugaccaacacaagccucauaaaucacaaguucugcaaucugucugaugcucacaaaaagaaccucuaugaucaugcucuuaugagcauaaucucaacuuuccauuuguccauccccaacuucaaucaguaugaagcaaugagcugugauuucaaugaugggaagaucaguguacaguacaaccuaagccacaccuacgcuggggauacagccaaccacugugguacuguugcgaacgguguuuuacagacuuucaugaggauggcuuggggugggaguuacauugcucuugauucaggcugcgguggaugggacugcauuaugaccagcuaucaauauuugauaauucagaacacaaccugggaagaucacugucaguucucaagaccaucucccaucggguaccuugggcuccucucacaaagaaccagagacauuuauaucaguagaagacgccggggcacauucacauggacacuaucagauucugaggguaaagacacaccagggggguacugucuaacuagguggaugcugauugaagcugaauugaaaugcuuuggcaacacagcuguagcaaaaugcaaugagaagcaugaugaggaauuuugugauauguugaggcuauuugacuuuaacaaacaagccauucaaagauugaaagcucccgcacaaaugaguauucagcugaucaacaaagcagugaaugccuugauaaaugaucaacugauaaugaaaaaccauuugcgggacauuaugugcauuccguacugcaacuacagcaaguauugguaucuuaaucacacagucaccggaaagacaucauuacccaaaugcuggcuuguaucaaauggcucauaccuaaacgagacccacuucucugaugauauugagcagcaagcugauaacaugauuacugagaugcuacagaaggaauacauggagagacaggggaagacaccacuuggucugguugaccucuuuguauuuagcacaaguuucuaucucauuagcauuuuccuucaccuagugaaaauaccaacucauaggcauguugugggcaaaccguguccuaaaccucacagacugaaccacauggguauauguucuuguggguucuacaagcaaccuggugugccugugagauggaagagaugaggacuaguaauaaggaaacuguaugaaugucugugggcaggaagugaagagauccuucuguaaagguuuuuggaauuaugucugcugaauaauaaacuuuuuugaaauaauaaaucugguagaaaaaugagaucuaaaaaaaaaaaaaaaaaaaaaaaaaaaaaaaaaaaaaaaaaaaaaaaaaaaaaaaaaaaaaaaaugcaucccccccccccccccccccccccccccccccaaaggcucuuuucagagccaccagaauu

SEQ ID NO: 6714 - RNA, 1816 nt, Artificial Sequence
  mRNA product Design b-4 comprising derived and/or modified sequence from LASV(Z0947-SLE-2011;Clade IV)__AIT17840__GPCstabilized (wt)
gggagagucccgcagucggcguccagcggcucugcuuguucgugugugugucguugcaggccuuauucaagcuuaccaugggacaaauagugacauucuuccaggaagugccccaugucauagaagaggugaugaacaucguucucauugcacugucuauacuagcaguguugaaaggucuguacaauuuugcaacauguggccucguuggcuuggucacuuuccuccuguuguguggcaggucuugcacaauuagccuuuacaaggggguuuaugagcuucagacucuggaacuaaacauggaaacacucaauaugaccaugccucucuccuguacaaagaacaacagucaucauuauauaauggugggcaaugagacaggacuagaacugaccuugaccaacacgagcauuauuaaucauaaauuuugcaaucugucugaugcccacaaaaagaaccucuaugaccaugcucuuaugagcauuaucucaacuuuccacuuguccaucccuaacuucaaucaguaugaggcaaugagcugcgauuucaaugggggaaagauuagugugcaguacaaccugagucacagcuaugccggggacgcagccaaccauugugguacuguugcaaaugguguauuacagacuuucaugaggauggcuuggggugggagcuacaucgcucuugacucaggcugcgacaggugggacuguauuaugacuaguuaucaauaucugauaauccaaaauacaaccugggaagaucacugccaauucucgagaccaucucccaucgguuaucucgggcuccucucacaaaggaccagagauauuuauauuaguagaaggcgccggggcacauucacauggacacugucagauucugaaggcaaggacacaccagggggauauugucuaaccagauggaugcuaauugaggcugagcuaaagugcuucgggaacacagccguggcaaaauguaaugagaagcaugaugaggaauuuugugacaugcugagguuguuugacuuuaacaaacaagccauucaaagguugaaagcucccgcacaaaugagcauucaguugaucaacaaagcaguaaaugcuuugauaaaugaccaacuuauaaugaagaaccaucuacgggacaucaugugcauuccauacuguaauuacagcaaguauugguaccucaaccacacaacuacuggaaaaacaucacugcccaaguguuggcuuguaucaaaugguucauaccugaacgagacccacuuuucugaugacaucgaacaacaagcugacaacaugaucacugagauguuacagaaggaguauauggagaggcaggggaagacaccauugggucugguugaccucuuuguguucagcacaagcuucuaucucauuagcaucuuccuucaccuaguuaaaauaccaacucauaggcauauuguaggcaagccgugucccaaaccucacagguugaaucauaugggcauuuguuccuguggacucuauaaacagccuggugugccugugaaauggaagagaugaggacuaguaauaaggaaacuguaugaaugucugugggcaggaagugaagagauccuucuguaaagguuuuuggaauuaugucugcugaauaauaaacuuuuuugaaauaauaaaucugguagaaaaaugagaucuaaaaaaaaaaaaaaaaaaaaaaaaaaaaaaaaaaaaaaaaaaaaaaaaaaaaaaaaaaaaaaaaugcaucccccccccccccccccccccccccccccccaaaggcucuuuucagagccaccagaauu

SEQ ID NO: 6715 - RNA, 1816 nt, Artificial Sequence
  mRNA product Design b-4 comprising derived and/or modified sequence from LASV(Josiah;Clade IV)__NP_694870__GPCstabilized (opt1)
gggagagucccgcagucggcguccagcggcucugcuuguucgugugugugucguugcaggccuuauucaagcuuaccaugggccagaucgugaccuucuuccaggaggucccccacgugaucgaggaggugaugaacaucguccugaucgcccucagcgugcuggccgugcugaaggggcucuacaacuucgcgaccugcggccuggucgggcuggugacguuccuccugcugugcggccgcuccugcaccaccagccucuacaaggggguguacgagcugcagacccuggagcucaacauggagacgcugaacaugaccaugccgcuguccugcaccaagaacaacagccaccacuacaucauggucggcaacgagaccggccucgagcugacgcugaccaacaccuccaucaucaaccacaaguucugcaaccucagcgacgcccacaagaagaaccuguacgaccacgcccugauguccaucaucagcaccuuccaccucuccauccccaacuucaaccaguacgaggccaugagcugcgacuucaacgggggcaagaucuccgugcaguacaaccugagccacuccuacgccggggacgcggccaaccacugcggcacgguggccaacgggguccugcagaccuucaugcggauggccuggggcggcagcuacaucgcgcucgacuccgggugcggcaacugggacugcaucaugaccagcuaccaguaccugaucauccagaacaccacgugggaggaccacugccaguucucccggcccagccccaucggguaccugggccuccugucccagcgcacccgggacaucuacaucagccgccggcgccggggcaccuucaccuggacgcugagcgacuccgaggggaaggacaccccgggcggguacugccugacccgcuggaugcucaucgaggccgagcugaagugcuucggcaacaccgccguggccaagugcaacgagaagcacgacgaggaguucugcgacaugcugcggcuguucgacuucaacaagcaggccauccagcgccugaaggcgcccgcccagaugagcauccagcugaucaacaaggccgugaacgcccucaucaacgaccagcugaucaugaagaaccaccuccgggacaucaugugcauccccuacugcaacuacuccaaguacugguaccucaaccacacgaccaccggccgcaccagccugcccaagugcuggcuggucuccaacggcagcuaccucaacgagacgcacuucuccgacgacaucgagcagcaggccgacaacaugaucaccgagaugcugcagaaggaguacauggagcggcaggggaagacgccccugggccucguggaccuguucguguucagcaccuccuucuaccugaucagcaucuuccugcaccucgucaagaucccgacccaccgccacaucguggggaaguccugccccaagccccaccggcugaaccacaugggcaucugcagcugcgggcuguacaagcagcccggcgugccggucaaguggaagcgcugaggacuaguaauaaggaaacuguaugaaugucugugggcaggaagugaagagauccuucuguaaagguuuuuggaauuaugucugcugaauaauaaacuuuuuugaaauaauaaaucugguagaaaaaugagaucuaaaaaaaaaaaaaaaaaaaaaaaaaaaaaaaaaaaaaaaaaaaaaaaaaaaaaaaaaaaaaaaaugcaucccccccccccccccccccccccccccccccaaaggcucuuuucagagccaccagaauu

SEQ ID NO: 6716 - RNA, 1813 nt, Artificial Sequence
  mRNA product Design b-4 comprising derived and/or modified sequence from LASV(LP;Clade I)__AAF86701__GPCstabilized (opt1)
gggagagucccgcagucggcguccagcggcucugcuuguucgugugugugucguugcaggccuuauucaagcuuaccaugggccagaucaucaccuucuuccaggaggugccccacgucaucgaggaggugaugaacaucgugcugaucgcccucagccugcuggccauccucaaggggcuguacaacaucgcgaccugcggcaucaucgggcuggucgccuuccucuuccugugcggcaaguccugcagccugacgcucaagggcggguacgagcugcagacccuggagcucaacauggagacccugaacaugaccaugccgcuguccugcacgaagaacagcucccaccacuacauccgcgugggcaacgagaccgggcucgagcugacccugaccaacacgagcaucaucaaccacaaguucugcaaccucuccgacgcccacaagaagaaccuguacgaccacgcccugaugagcaucaucuccaccuuccaccucagcauccccaacuucaaccaguacgaggccauguccugcgacuucaacggcgggaagaucagcgugcaguacaaccugucccacagcuacgcgggcgacgccgccgagcacugcgggaccgucgccaacggcgugcugcagaccuucaugcggauggcguggggcgggcgcuacaucgcccucgacuccggcugcgggaacugggacugcaucaugacgagcuaccaguaccugaucauccagaacaccaccugggaggaccacugccaguucucccggcccagccccaucggcuaccugggccuccugucccagcgcacccgggacaucuacaucagccgccggcgccgggggacguucaccuggacccugagcgacuccgagggcaacgagacccccgggggcuacugccugacgcgcuggaugcucaucgaggccgagcugaagugcuucgggaacaccgccguggccaagugcaacgagaagcacgacgaggaguucugcgacaugcugcggcuguucgacuucaacaagcaggcgauccgccggcugaaggcccccgcccagaugagcauccagcugaucaacaaggccgucaacgcccucaucaacgaccagcugaucaugaagaaccaccuccgcgacaucaugugcauccccuacugcaacuacuccaaguacugguaccucaaccacaccagcuccggccggaccagccugcccaagugcuggcugaucuccaacgggagcuaccucaacgagacgcaguucuccgacgacaucgagcagcaggcggacaacaugaucaccgagaugcugcagaaggaguacaucgagcgccagggcaagaccccgcuggggcucguggacaucuucaucuucagcaccuccuucuaccugaucagcaucuuccugcaccugaucaagaucccgacgcaccggcacaucgugggcaagcccugccccaagccccaccgccucaaccacaugggggucugcuccugcggccuguacaagcacccgggcgugcccaccaaguggaagcggugaggacuaguaauaaggaaacuguaugaaugucugugggcaggaagugaagagauccuucuguaaagguuuuuggaauuaugucugcugaauaauaaacuuuuuugaaauaauaaaucugguagaaaaaugagaucuaaaaaaaaaaaaaaaaaaaaaaaaaaaaaaaaaaaaaaaaaaaaaaaaaaaaaaaaaaaaaaaaugcaucccccccccccccccccccccccccccccccaaaggcucuuuucagagccaccagaauu

SEQ ID NO: 6717 - RNA, 1813 nt, Artificial Sequence
  mRNA product Design b-4 comprising derived and/or modified sequence from LASV(803213;Clade II)__AAF86703__GPCstabilized (opt1)
gggagagucccgcagucggcguccagcggcucugcuuguucgugugugugucguugcaggccuuauucaagcuuaccaugggccagaucaucaccuucuuccaggaggugccccacgucaucgaggaggugaugaacaucgugcugaucgcccucagccugcuggccauccucaaggggaucuacaacgucgcgaccugcggccuguucgggcugaucuccuuccuccugcugugcggccgcagcugcuccgugacguacaaggggguguacgagcuccagacccuggagcugaacauggccaaccucaacaugaccaugccgcugagcugcaccaagaacaacucccaccacuacaucauggucggcaacgagacgggccuggagcucacccugaccaacaccagcaucaucaaccacaaguucugcaaccuguccgacgcccacaagaagaaccucuacgaccacgcccugaugagcaucaucuccacguuccaccugagcauccccaacuucaaccaguacgaggccauguccugcgacuucaacgggggcaagaucagcgugcaguacaaccucucccacagcuucgcgguggacgccgccaaccacugcgggaccaucgccaacggcguccugcagaccuucaugcggauggcguggggcggguccuacaucgcccuggacagcggcugcgggaacugggacugcaucaugaccuccuaccaguaccucaucauccagaacacgaccugggaggaccacugccaguucagccgccccucccccaucggcuaccuggggcugcucagccagcggacccgcgacaucuacaucagccggcgccgccggggcaccuucacguggacccucuccgacagcgagggcaacgaggcccccgggggcuacugccugacccgguggaugcugaucgaggccgagcucaagugcuucgggaacaccgccguggcgaagugcaacgagaagcacgacgaggaguucugcgacaugcugcgccuguucgacuucaacaagcaggccaucaagcggcucaagacgcccgcccagauguccauccagcugaucaacaaggccgugaacgcccugaucaacgaccagcucaucaugaagaaccaccuccgcgacaucaugugcauccccuacugcaacuacagccgguacugguaccugaaccacaccgucaccgggaagaccucccugccccgcugcuggcuggugagcaacggcuccuaccugaacgagacgcacuucagcgacgacaucgagcagcaggcggacaacaugaucaccgagaugcuccagaaggaguacauggaccggcagggcaagaccccgcuggggcugguggaccucuucgucuucuccaccagcuucuaccugaucuccaucuuccugcaccuggugaagaucccgacgcaccgccacaucgugggcaagcccugccccaagccccaccggcucaaccacauggggaucugcagcugcggccuguacaagcacccggggguccccgugaaguggaagcgcugaggacuaguaauaaggaaacuguaugaaugucugugggcaggaagugaagagauccuucuguaaagguuuuuggaauuaugucugcugaauaauaaacuuuuuugaaauaauaaaucugguagaaaaaugagaucuaaaaaaaaaaaaaaaaaaaaaaaaaaaaaaaaaaaaaaaaaaaaaaaaaaaaaaaaaaaaaaaaugcaucccccccccccccccccccccccccccccccaaaggcucuuuucagagccaccagaauu

SEQ ID NO: 6718 - RNA, 1813 nt, Artificial Sequence
  mRNA product Design b-4 comprising derived and/or modified sequence from LASV(GA391;Clade III)__CAA36645__GPCstabilized (opt1)
gggagagucccgcagucggcguccagcggcucugcuuguucgugugugugucguugcaggccuuauucaagcuuaccaugggccagaucgugaccuucuuccaggaggucccccacgugaucgaggaggugaugaacaucguccugaucgcccucagcauccuggccauccugaaggggcucuacaacguggcgaccugcggccugaucgggcuggugacguuccuccugcuguccggccgcagcugcucccucaucuacaaggggaccuacgagcugcagacccuggagcucaacauggagacccugaacaugacgaugccgcugagcugcaccaagaacaacucccaccacuacauccgggucggcaacgagaccggccucgagcugacccugacgaacaccagcauccucaaccacaaguucugcaaccuguccgacgcccacaagcgcaaccuguacgaccacagccucauguccaucaucagcaccuuccaccuguccauccccaacuucaaccaguacgaggccaugagcugcgacuucaacgggggcaagaucaccgugcaguacaaccugucccacagcuucgccguggacgccgcggggcacugcggcacgcucgccaacgggguccugcagaccuucaugcggauggccuggggcggcuccuacaucgcccuggacagcgggugcggcaacugggacugcaucaugaccuccuaccaguaccucaucauccagaacaccacgugggacgaccacugccaguucagccggcccucccccaucggguaccugggccugcucagccagcgcacccgggacaucuacaucagccgccggcgccggggcaccuucaccuggacgcucuccgacagcgaggggaacgagaccccgggcggguacugccugacccgcuggaugcugaucgaggcggagcucaagugcuucggcaacaccgccguggccaagugcaacgagaagcacgacgaggaguucugcgacaugcugcggcuguucgacuucaacaagcaggccauccgccggcucaagacgcccgcccagauguccauccagcugaucaacaaggcggugaacgcccugaucaacgaccagcucaucaugaagaaccaccuccgcgacaucaugugcauccccuacugcaacuacagccgguacugguaccugaaccacaccuccaccggcaagaccagccugccccgcugcuggcugaucuccaacggcagcuaccugaacgagacgaaguucuccgacgacaucgagcagcaggccgacaacaugaucaccgagaugcuccagaaggaguacaucgaccggcaggggaagacgccccugggccuggucgaccuguucguguucagcaccuccuucuaccucaucagcaucuuccugcaccuggugaagaucccgacccaccgccacaucgucgggaagcccugccccaagccccaccggcucaaccacaugggcaucugcuccugcgggcuguacaagcagccgggcgugcccgugcgcuggaagcggugaggacuaguaauaaggaaacuguaugaaugucugugggcaggaagugaagagauccuucuguaaagguuuuuggaauuaugucugcugaauaauaaacuuuuuugaaauaauaaaucugguagaaaaaugagaucuaaaaaaaaaaaaaaaaaaaaaaaaaaaaaaaaaaaaaaaaaaaaaaaaaaaaaaaaaaaaaaaaugcaucccccccccccccccccccccccccccccccaaaggcucuuuucagagccaccagaauu

SEQ ID NO: 6719 - RNA, 1816 nt, Artificial Sequence
  mRNA product Design b-4 comprising derived and/or modified sequence from LASV(AV;Clade V)__CCA30314__GPCstabilized (opt1)
gggagagucccgcagucggcguccagcggcucugcuuguucgugugugugucguugcaggccuuauucaagcuuaccaugggccagaucgugaccuucuuccaggaggucccccacgugaucgaggaggugaugaacaucguccugaucgcccucagcauccuggccgugcugaaggggcucuacaacaucgcgaccugcggccugaucgggcugaucacguuccuccugcugugcggccgcuccugcagcuccaaccucuacaaggggguguacgagcugcagagccuggaccucaacauggagacccugaacaugaccaugccgcuguccugcaccaagaacaacagccaccacuacauccgggucggcaacgacacgggccucgagcugacccugaccaacaccuccauccucaaccacaaguucugcaaccugagcgacgcccacaagaaggaccuguacgaccacgcccucauguccaucaucagcacguuccaccuguccauccccaacuucaaccaguacgaggccaugagcugcgacuucaacgggggcaagaucuccgugcaguacaaccugagccacuccuacgccaucgacgcggccaaccacugcgggaccguggccaacggcauccuccagaccuucaugcgcauggccuggggcgggagcuacaucgcgcuggacuccggcugcgggaacugggacugcaucaugaccagcuaccaguaccugaucauccagaacacgaccugggagaaccacugccaguucucccgccccagccccaucggcuaccucgggcugcugagccagcggacccgcgacaucuacaucucccggcgccgccggggcaccuucacguggacccugagcgacuccgagggcaacgccacccccgggggcuacugccucacccgguggaugcugaucgaggccgagcugaagugcuucgggaacacggccgucgccaagugcaacgagaagcacgacgaggaguucugcgacaugcuccgccuguucgacuucaacaagcaggcgaucagccggcugaagucccccgcccagaugagcauccagcucaucaacaaggccgugaacgcccugaucaacgaccagcugaucaugaagaaccaccuccgcgacaucaugugcauccccuacugcaacuacuccaaguacugguaccugaaccacaccaucaccgggaagaccagccugcccaagugcuggcucguguccaacggcagcuaccugaacgagacgcacuucuccgacgacaucgagcagcaggccgacaacaugaucaccgagaugcugcagaaggaguacauggagcggcagggcaagaccccgcucgggcuggucgaccuguucguguucagcaccuccuucuaccugaucagcaucuuccuccgccuggugaagaucccgacgcaccggcacaucgucggcaagcccugccccaagccccaccgccugaaccacauggggaucugcuccugcggccucuacaagcagccgggggugcccgugcgguggaagcgcugaggacuaguaauaaggaaacuguaugaaugucugugggcaggaagugaagagauccuucuguaaagguuuuuggaauuaugucugcugaauaauaaacuuuuuugaaauaauaaaucugguagaaaaaugagaucuaaaaaaaaaaaaaaaaaaaaaaaaaaaaaaaaaaaaaaaaaaaaaaaaaaaaaaaaaaaaaaaaugcaucccccccccccccccccccccccccccccccaaaggcucuuuucagagccaccagaauu

SEQ ID NO: 6720 - RNA, 1813 nt, Artificial Sequence
  mRNA product Design b-4 comprising derived and/or modified sequence from LASV(Togo/2016/7082;Clade VI)__AMR44577__GPCstabilized (opt1)
gggagagucccgcagucggcguccagcggcucugcuuguucgugugugugucguugcaggccuuauucaagcuuaccaugggccagaucaucaccuucuuccaggaggugccccacgucaucgaggaggugaugaacaucgugcugaucgcccucagccugcuggccauccucaagggggucuacaacguggcgaccugcggcaucaucgggcuggugacguuccuguuccucugcggccgcuccugcagccugaucuacaagggguccuacgagcugcagacccucgagcugaacauggagacccugaacaugaccaugccgcucagcugcacgaagaacuccagccaccacuacauccgggucggcaacgagaccggccuggagcugacccucaccaacacguccaucaucaaccacaaguucugcaaccugagcgacgcccacaagcgcaaccuguacgaccacgcccucauguccauccugagcaccuuccaccuguccauccccaacuucaaccaguacgaggccaugagcugcgacuucaacgggggcaagaucuccgugcaguacaaccucagccacgccuacgcgguggacgccgccgagcacugcgggaccgucgccaacggcgugcugcagaccuucaugcggauggcguggggcggguccuacaucgcccuggacagcggcugcgggaacugggacugcaucaugacguccuaccaguaccucaucauccagaacaccaccugggaggaccacugccaguucagccggcccucccccaucggcuaccuggggcugcucagccagcgcacccgggacaucuacaucagccgccggcgccggggcacguucaccuggacccucuccgacagcgagggcaacgagacccccgggggcuacugccugacgcgcuggaugcugaucgaggccgagcucaagugcuucgggaacaccgccguggccaagugcaacgagaagcacgacgaggaguucugcgacaugcugcggcuguucgacuucaacaagcaggcgauccagcgccucaagucccccgcccagaugagcauccagcugaucaacaaggccgucaacgcccugaucaacgaccagcucaucaugaagaaccaccuccgggacaugaugugcauccccuacugcaacuacuccaaguacugguaccugaaccacaccagcuccgggcgcaccagccugcccaagugcuggcugguguccaacggcagcuaccugaacgagacgcacuucuccgacgacaucgagcagcaggccgacaacaugaucaccgagaugcuccagaaggaguacaucgaccggcagggcaagaccccgcuggggcugguggaccucuucgucuucagcaccuccuucuaccugaucagcaucuuccugcaccugaucaagaucccgacgcaccgccacaucgugggcaagcccugccccaagccccaccggcucaaccacauggggaucugcuccugcggccuguacaagcagccgggggugcccacccgcuggaagcggugaggacuaguaauaaggaaacuguaugaaugucugugggcaggaagugaagagauccuucuguaaagguuuuuggaauuaugucugcugaauaauaaacuuuuuugaaauaauaaaucugguagaaaaaugagaucuaaaaaaaaaaaaaaaaaaaaaaaaaaaaaaaaaaaaaaaaaaaaaaaaaaaaaaaaaaaaaaaaugcaucccccccccccccccccccccccccccccccaaaggcucuuuucagagccaccagaauu

SEQ ID NO: 6721 - RNA, 1813 nt, Artificial Sequence
  mRNA product Design b-4 comprising derived and/or modified sequence from LASV(KAK-428;Clade n.d. (VII))__ANH09740__GPCstabilized (opt1)
gggagagucccgcagucggcguccagcggcucugcuuguucgugugugugucguugcaggccuuauucaagcuuaccaugggccagaucgugaccuucuuccaggaggucccccacgugaucgaggaggugaugaacaucguccugaucgcccucagccugcuggccauccucaaggggcuguacaacuucgcgaccugcggcgugaucgggcugaucacguuccuccugcugugcggccgcuccugcagcgccaccuacaaggggcaguacgagcuccagacccuggagcugaacauggagucccucaacaugaccaugccgcugagcugcacgaagaacaacucccaccacuacauccgggccggcaacaacaccggccuggagcucacccugaccaacacgagcaucaucucccacaaguucugcaaccugagcgacgcccacaagaagaaccucuacgaccacacccugauguccaucaucaccaccuuccaccugagcauccccaacuucaaccaguacgaggccauguccugcgacuucaacgggggcaagaucagcauccaguacaaccucucccacagcuacgcgggggacgccgcccagcacugcggcacgguggccaacgggguccugcagaccuucaugcgcauggcguggggcggcuccuaccuggcccucgacagcgggugccgcggcugggacugcaucaucuccagcuaccaguaccugaucauccagaacaccaccugggacgaccacugccaguucucccggcccagccccaucggguaccugggcuucgugagccagaagacgcgcgacaucuacaucucccggcgccgccggggcaccuucaccuggacccugagcgacuccgaggggcacgacaugccgggcggguacugccucacgcgguggaugcugaucgaggccgaccugaagugcuucggcaacaccgccguggccaagugcaacgagaagcacgacgaggaguucugcgacauguggcgccucuucgacuucaacaagcaggcgauccagcggcugaaggcccccgcccagaugaacauccagcugaucaacaaggccgucaacgcccucaucaacgaccagcugaugaugaagaaccaccuccgcgacaucaugugcauccccuacugcaacuacagcaaguucugguaccugaacaacaccaccacgggccggaccucccugccccgcugcuggcugaucagcaacggcuccuaccucaacgagacccacuucagcgacgacaucgagcagcaggcggacaacaugaucaccgagaugcugcagaaggaguacauggaccggcaggggaagacgccccugggccucguggaccuguucguguucuccaccagcuucuaccugaucaccaucuuccuccaccuggucaagaucccgacccaccgccacaucguggggaagcccugccccaagccccaccggcugaaccacaugggcaucugcuccugcgggcuguacaagcagccgggcgugcccguccgcuggaagcggugaggacuaguaauaaggaaacuguaugaaugucugugggcaggaagugaagagauccuucuguaaagguuuuuggaauuaugucugcugaauaauaaacuuuuuugaaauaauaaaucugguagaaaaaugagaucuaaaaaaaaaaaaaaaaaaaaaaaaaaaaaaaaaaaaaaaaaaaaaaaaaaaaaaaaaaaaaaaaugcaucccccccccccccccccccccccccccccccaaaggcucuuuucagagccaccagaauu

SEQ ID NO: 6722 - RNA, 1813 nt, Artificial Sequence; identical to SEQ ID NO: 6716
  mRNA product Design b-4 comprising derived and/or modified sequence from LASV(Pinneo-NIG-1969;Clade I)__AIT17836__GPCstabilized (opt1)

SEQ ID NO: 6723 - RNA, 1813 nt, Artificial Sequence
  mRNA product Design b-4 comprising derived and/or modified sequence from LASV(ISTH0009-NIG-2011;Clade II)__AIT17404__GPCstabilized (opt1)
gggagagucccgcagucggcguccagcggcucugcuuguucgugugugugucguugcaggccuuauucaagcuuaccaugggccagaucaucaccuucuuccaggaggugccccacgucaucgaggaggugaugaacaucgugcugaucgcccucagccugcuggccauccucaaggggaucuacaacgucgcgaccugcggccuguucgggcugguguccuuccuccugcugugcggccgcagcugcuccacgaccuacaaggggguguacgagcuccagacccuggagcuggacauggccagccucaacaugaccaugccgcuguccugcacgaagaacaacagccaccacuacaucauggucggcaacgagaccggccuggagcucacccugaccaacacguccaucaucaaccacaaguucugcaaccugagcgacgcccacaagaagaaccucuacgaccacgcccugauguccaucaucagcaccuuccaccuguccauccccaacuucaaccaguacgaggccaugagcugcgacuucaacgggggcaagaucuccgugcaguacaaccucagccacgcguacgccguggacgccgccaaccacugcgggaccaucgcgaacggcguccugcagaccuucaugcggauggccuggggcggguccuacaucgcccuggacagcggcugcggguccugggacugcaucaugacgagcuaccaguaccucaucauccagaacaccaccugggaggaccacugccaguucucccgccccagccccaucggcuaccuggggcugcucagccagcggacccgcgacaucuacaucucccggcgccgccggggcacguucaccuggacccucagcgacuccgagggcaacgagacccccgggggcuacugccugacgcgguggaugcugaucgaggccgagcucaagugcuucgggaacaccgccguggcgaagugcaacgagaagcacgacgaggaguucugcgacaugcugcgccuguucgacuucaacaagcaggccauccggcgccucaagacccccgcccagaugagcauccagcugaucaacaaggccgugaacgcccugaucaacgaccagcucaucaugaagaaccaccuccgggacaucaugugcaucccguacugcaacuacuccaaguacugguaccugaaccacaccgucacggggaagaccagccugccccgcugcuggcugguguccaacggcagcuaccugaacgagacccacuucuccgacgacaucgagcagcaggcggacaacaugaucaccgagcuccugcagaaggaguacauggaccggcagggcaagacgccccuggggcucguggaccuguucgucuucagcaccuccuucuaccugaucagcaucuuccugcaccucaucaagaucccgacccaccgccacaucaccggcaagcccugccccaagccccaccggcugaaccacauggggaucugcuccugcggccuguacaagcacccgggggugcccgugaaguggaagcgcugaggacuaguaauaaggaaacuguaugaaugucugugggcaggaagugaagagauccuucuguaaagguuuuuggaauuaugucugcugaauaauaaacuuuuuugaaauaauaaaucugguagaaaaaugagaucuaaaaaaaaaaaaaaaaaaaaaaaaaaaaaaaaaaaaaaaaaaaaaaaaaaaaaaaaaaaaaaaaugcaucccccccccccccccccccccccccccccccaaaggcucuuuucagagccaccagaauu

SEQ ID NO: 6724 - RNA, 1813 nt, Artificial Sequence
  mRNA product Design b-4 comprising derived and/or modified sequence from LASV(ISTH2010-NIG-2012;Clade II)__AIT17482__GPCstabilized (opt1)
gggagagucccgcagucggcguccagcggcucugcuuguucgugugugugucguugcaggccuuauucaagcuuaccaugggccagaucaucaccuucuuccaggaggugccccacgucaucgaggaggugaugaacaucgugcugaucgcccucagccugcuggccauccucaaggggaucuacaacgucgcgaccugcggccuguucgggcugguguccuuccuccugcugugcggccgcagcugcuccacgaccuacaaggggguguacgagcuccagacccuggagcuggacauggccagccucaacaugaccaugccgcuguccugcacgaagaacaacagccaccacuacaucauggucggcaacgagaccggccuggagcucacccugaccaacacguccaucaucaaccacaaguucugcaaccugagcgacgcccacaagaagaaccucuacgaccacgcccugauguccaucaucagcaccuuccaccuguccauccccaacuucaaccaguacgaggccaugagcugcgacuucaacgggggcaagaucuccgugcaguacaaccucagccacgcguacgccguggacgccgccaaccacugcgggaccaucgcgaacggcguccugcagaccuucaugcggauggccuggggcggguccuacaucgcccuggacagcggcugcggguccugggacugcaucaugacgagcuaccaguaccucaucauccagaacaucaccugggaggaccacugccaguucucccgccccagccccaucggcuaccuggggcugcucagccagcggacccgcgacaucuacaucucccggcgccgccggggcaccuucacguggacccucagcgacuccgagggcaacgagacccccgggggcuacugccugacccgguggaugcugaucgaggccgagcucaagugcuucgggaacacggccguggcgaagugcaacgagaagcacgacgaggaguucugcgacaugcugcgccuguucgacuucaacaagcaggccauccggcgccucaagacccccgcccagaugagcauccagcugaucaacaaggccgugaacgcccugaucaacgaccagcucaucaugaagaaccaccuccgggacaucaugugcauccccuacugcaacuacuccaaguacugguaccugaaccacaccgucaccgggaagacgagccugccccgcugcuggcugguguccaacggcagcuaccugaacgagacccacuucuccgacgacaucgagcagcaggcggacaacaugaucaccgagcuccugcagaaggaguacaucgaccggcagggcaagaccccgcuggggcucguggaccuguucgucuucagcacguccuucuaccugaucagcaucuuccugcaccucgugaagaucccgacccaccgccacguggucggcaagcccugccccaagccccaccggcugaaccacauggggaucugcuccugcggccuguacaagcacccgggggugcccgugaaguggaagcgcugaggacuaguaauaaggaaacuguaugaaugucugugggcaggaagugaagagauccuucuguaaagguuuuuggaauuaugucugcugaauaauaaacuuuuuugaaauaauaaaucugguagaaaaaugagaucuaaaaaaaaaaaaaaaaaaaaaaaaaaaaaaaaaaaaaaaaaaaaaaaaaaaaaaaaaaaaaaaaugcaucccccccccccccccccccccccccccccccaaaggcucuuuucagagccaccagaauu

SEQ ID NO: 6725 - RNA, 1813 nt, Artificial Sequence
  mRNA product Design b-4 comprising derived and/or modified sequence from LASV(Lassa virus/H.sapiens-wt/NGA/2015/ISTH_0543;Clade II)__AVO03639__GPCstabilized (opt1)
gggagagucccgcagucggcguccagcggcucugcuuguucgugugugugucguugcaggccuuauucaagcuuaccaugggccagaucaucaccuucuuccaggaggugccccacgucaucgaggaggugaugaacaucgugcugaucgcccucagccugcuggccauccucaaggggaucuacaacgucgcgaccugcggccuguucgggcugguguccuuccuccugcugugcggccgcagcugcuccacgaccuacaaggggguguacgagcuccagacccuggagcuggacauggccaaccucaacaugaccaugccgcugagcugcacgaagaacaacucccaccacuacaucauggucggcaacgagaccggccuggagcucacccugaccaacacgagcaucaucaaccacaaguucugcaaccuguccgacgcccacaagaagaaccucuacgaccacgcccugaugagcaucaucuccaccuuccaccugagcauccccaacuucaaccaguacgaggccauguccugcgacuucaacgggggcaagaucagcgugcaguacaaccucucccacaccuacgcgguggacgccgccaaccacugcgggaccaucgccaacggcguccugcagacguucaugcggauggcguggggcgggagcuacaucgcccuggacuccggcugcgggagcugggacugcaucaugaccuccuaccaguaccucgugauccagaacaccaccugggaggaccacugccaguucagccgccccucccccaucggcuaccuggggcugcucagccagcggacgcgcgacaucuacaucagccggcgccgccggggcaccuucaccuggacccucuccgacagcgagggcaacgagacgcccgggggcuacugccugacccgguggaugcugaucgaggccgagcucaagugcuucgggaacaccgccguggccaagugcaacgagaagcacgacgaggaguucugcgacaugcugcgccuguucgacuucaacaagcaggcgauccggcgccucaagacccccgcccagauguccauccagcugaucaacaaggccgucaacgcccugaucaacgaccagcucaucaugaagaaccaccuccgggacaucaugugcauccccuacugcaacuacagcaaguacugguaccugaaccacacggugaccgggaagaccucccugccccgcugcuggcuggugagcaacggcuccuaccugaacgagacccacuucagcgacgacaucgagcagcaggccgacaacaugaucacggagcuccugcagaaggaguacaucgaccggcagggcaagaccccgcuggggcucgucgaccuguucguguucuccaccagcuucuaccugaucuccaucuuccugcaccucgugaagaucccgacccaccgccacaucacgggcaagcccugccccaagccccaccggcugaaccacauggggaucugcagcugcggccuguacaagcacccggggguccccgugaaguggaagcgcugaggacuaguaauaaggaaacuguaugaaugucugugggcaggaagugaagagauccuucuguaaagguuuuuggaauuaugucugcugaauaauaaacuuuuuugaaauaauaaaucugguagaaaaaugagaucuaaaaaaaaaaaaaaaaaaaaaaaaaaaaaaaaaaaaaaaaaaaaaaaaaaaaaaaaaaaaaaaaugcaucccccccccccccccccccccccccccccccaaaggcucuuuucagagccaccagaauu

SEQ ID NO: 6726 - RNA, 1813 nt, Artificial Sequence
  mRNA product Design b-4 comprising derived and/or modified sequence from LASV(Lassa virus/H.sapiens-wt/NGA/2016/ISTH_0009;Clade II)__AVO03571__GPCstabilized (opt1)
gggagagucccgcagucggcguccagcggcucugcuuguucgugugugugucguugcaggccuuauucaagcuuaccaugggccagaucaucaccuucuuccaggaggugccccacgucaucgaggaggugaugaacaucgugcugaucgcccucagccugcuggccauccucaaggggaucuacaacgucgcgaccugcggccugcuggggcucguguccuuccugcugcucugcggccgcagcugcuccacgaccuacaaggggguguacgagcugcagacccuggagcucgacauggccagccugaacaugaccaugccgcuguccugcacgaagaacaacagccaccacuacaucauggucggcaacgagaccggccucgagcugacccugaccaacacguccaucaucaaccacaaguucugcaaccucagcgacgcccacaagaagaaccuguacgaccacgcccugauguccaucaucagcaccuuccaccucuccauccccaacuucaaccaguacgaggccaugagcugcgacuucaacgggggccggaucuccgugcaguacaaccugagccacuccuacgcgguggacgccgccaaccacugcgggaccaucgccaacggcguccugcagaccuucaugcgcauggcguggggcgggagcuacaucgcccucgacuccggcugcgggagcugggacugcaucaugacguccuaccaguaccugaucauccagaacaccaccugggaggaccacugccaguucagccggcccagccccaucggcuaccuggggcuccugucccagcgcacccgggacaucuacaucagccgccggcgccggggcacguucaccuggacccuguccgacagcgagggcaacgagacccccgggggcuacugccugacgcgcuggaugcucaucgaggccgagcugaagugcuucgggaacaccgccguggccaagugcaacgagaagcacgacgaggaguucugcgacaugcugcggcuguucgacuucaacaagcaggcgauccgccggcugaagacccccgcccagauguccauccagcugaucaacaaggccgugaacgcccucaucaacgaccagcugaucaugaagaaccaccuccgcgacaucaugugcaucccguacugcaacuacagcaaguacugguaccucaaccacaccgucacggggaagaccucccugccccggugcuggcuggugagcaacggcuccuaccucaacgagacccacuucagcgacgacaucgagcagcaggccgacaacaugaucaccgagcugcugcagaaggaguacaucgaccgccagggcaagacgccccucgggcugguggaccuguucgucuucuccaccagcuucuaccugaucuccaucuuccuccaccuggugaagaucccgacccaccggcacaucaccggcaagcccugccccaagccccaccgccugaaccacauggggaucugcagcugcggccucuacaaccacccgggggugcccgucaaguggaagcggugaggacuaguaauaaggaaacuguaugaaugucugugggcaggaagugaagagauccuucuguaaagguuuuuggaauuaugucugcugaauaauaaacuuuuuugaaauaauaaaucugguagaaaaaugagaucuaaaaaaaaaaaaaaaaaaaaaaaaaaaaaaaaaaaaaaaaaaaaaaaaaaaaaaaaaaaaaaaaugcaucccccccccccccccccccccccccccccccaaaggcucuuuucagagccaccagaauu

SEQ ID NO: 6727 - RNA, 1813 nt, Artificial Sequence
  mRNA product Design b-4 comprising derived and/or modified sequence from LASV(Lassa virus/H.sapiens-wt/NGA/2016/ISTH_0017;Clade II)__AVO03567__GPCstabilized (opt1)
gggagagucccgcagucggcguccagcggcucugcuuguucgugugugugucguugcaggccuuauucaagcuuaccaugggccagaucaucaccuucuuccaggaggugccccacgucaucgaggaggugaugaacaucgugcugaucgcccucagccugcuggccauccucaaggggaucuacaacgucgcgaccugcggccuguucgggcugguguccuuccuccugcugugcggccgcagcugcuccacgaccuacaaggggguguacgagcuccagacccuggagcuggacauggccagccucaacaugaccaugccgcuguccugcacgaagaacaacagccaccacuacaucauggucggcaacgagaccggccuggagcucacccugaccaacacguccaucaucaaccacaaguucugcaaccugagcgacgcccacaagaagaaccucuacgaccacgcccugauguccaucaucagcaccuuccaccuguccauccccaacuucaaccaguacgaggccaugagcugcgacuucaacgggggcaagaucuccgugcaguacaaccucagccacaccuacgcgaucgacgccgccaaccacugcgggaccaucgccaacggcgugcugcagacguucaugcggauggcguggggcggguccuacaucgcccuggacagcggcugcggguccugggacugcaucaugaccagcuaccaguaccucaucauccagaacaccaccugggaggaccacugccaguucucccgccccagccccaucggcuaccuggggcugcucagccagcggacgcgcgacaucuacaucucccggcgccgccggggcaccuucaccuggacccucagcgacuccgagggcaacgagacgcccgggggcuacugccugacccgguggaugcugaucgaggccgagcucaagugcuucgggaacaccgccgucgccaagugcaacgagaagcacgacgaggaguucugcgacaugcugcgccuguucgacuucaacaagcaggcgauccggcgccucaagacccccgcccagaugagcauccagcugaucaacaaggccgugaacgcccugaucaacgaccagcucaucaugaagaaccaccuccgggacaucaugugcauccccuacugcaacuacuccaaguacugguaccugaaccacacggugaccgggaagaccagccugccccgcugcuggcuggucuccaacggcagcuaccugaacgagacccacuucuccgacgacaucgagcagcaggccgacaacaugaucacggagcuccugcagaaggaguacauggaccggcagggcaagaccccgcuggggcucguggaccuguucguguucagcaccuccuucuaccugaucagcaucuuccugcaccucguccgcaucccgacccaccggcacgugaucggcaagcccugccccaagccccaccgccugaaccacauggggaucugcuccugcggccuguacaagcacccgggggugcccgucaaguggaagcggugaggacuaguaauaaggaaacuguaugaaugucugugggcaggaagugaagagauccuucuguaaagguuuuuggaauuaugucugcugaauaauaaacuuuuuugaaauaauaaaucugguagaaaaaugagaucuaaaaaaaaaaaaaaaaaaaaaaaaaaaaaaaaaaaaaaaaaaaaaaaaaaaaaaaaaaaaaaaaugcaucccccccccccccccccccccccccccccccaaaggcucuuuucagagccaccagaauu

SEQ ID NO: 6728 - RNA, 1813 nt, Artificial Sequence
  mRNA product Design b-4 comprising derived and/or modified sequence from LASV(Lassa virus/H.sapiens-wt/NGA/2018/ISTH_0959;Clade II)__AVV65099__GPCstabilized (opt1)
gggagagucccgcagucggcguccagcggcucugcuuguucgugugugugucguugcaggccuuauucaagcuuaccaugggccagaucaucaccuucuuccaggaggugccccacgucaucgaggaggugaugaacaucgugcugaucgcccucagccugcuggccauccucaaggggaucuacaacgucgugaccugcggccuguucgggcugguguccuuccuccugcugugcggccgcagcugcuccacgaccuacaagggggucuacgagcuccagacccuggagcuggacauggcgagccucaacaugaccaugccgcuguccugcacgaagaacaacagccaccacuacaucauggugggcaacgagaccggccuggagcucacccugaccaacacguccaucaucaaccacaaguucugcaaccugagcgacgcccacaagaagaaccucuacgaccacgcccugauguccaucaucagcaccuuccaccuguccauccccaacuucaaccaguacgaggccaugagcugcgacuucaacgggggcaagaucuccgugcaguacaaccucagccacgccuacgcgaucgacgccgccaaccacugcgggaccaucgccaacggcguccugcagaccuucaugcggauggcguggggcggguccuacaucgcccuggacagcggcugcggguccugggacugcaucaugacgagcuaccaguaccucaucauccagaacaccaccugggaggaccacugccaguucucccgccccagccccaucggcuaccuggggcugcucagccagcggacccgcgacaucuacaucucccggcgccgccggggcacguucaccuggacccucagcgacuccgagggcaacgagacccccgggggcuacugccugacgcgguggaugcugaucgaggccgagcucaagugcuucgggaacaccgccguggccaagugcaacgagaagcacgacgaggaguucugcgacaugcugcgccuguucgacuucaacaagcaggcgauccggcgccucaagacccccgcccagaugagcauccagcugaucaacaaggccgugaacgcccugaucaacgaccagcucaucaugaagaaccaccuccgggacaucaugugcaucccguacugcaacuacuccaaguacugguaccugaaccacaccgucacggggaagaccagccugccccgcugcuggcugguguccaacggcagcuaccugaacgagacccacuucuccgacgacaucgagcagcaggccgacaacaugaucaccgagcuccugcagaaggaguacaucgaccggcagggcaagacgccccuggggcucguggaccuguucgucuucagcaccuccuucuaccugaucagcaucuuccugcaccucgugaagaucccgacccaccgccacgugaucggcaagcccugccccaagccccaccggcugaaccacauggggaucugcuccugcggccuguacaagcacccggggguccccgugaaguggaagcgcugaggacuaguaauaaggaaacuguaugaaugucugugggcaggaagugaagagauccuucuguaaagguuuuuggaauuaugucugcugaauaauaaacuuuuuugaaauaauaaaucugguagaaaaaugagaucuaaaaaaaaaaaaaaaaaaaaaaaaaaaaaaaaaaaaaaaaaaaaaaaaaaaaaaaaaaaaaaaaugcaucccccccccccccccccccccccccccccccaaaggcucuuuucagagccaccagaauu

SEQ ID NO: 6729 - RNA, 1813 nt, Artificial Sequence
  mRNA product Design b-4 comprising derived and/or modified sequence from LASV(LASV003-NIG-2008;Clade II)__AIT17580__GPCstabilized (opt1)
gggagagucccgcagucggcguccagcggcucugcuuguucgugugugugucguugcaggccuuauucaagcuuaccaugggccagaucaucaccuucuuccaggaggugccccacgucaucgaggaggugaugaacaucgugcugaucgcccucagccugcuggccauccucaaggggaucuacaacgucgcgaccugcggccuguucgggcugguguccuuccuccugcugugcggccgcagcugcuccacgaccuacaaggggguguacgagcuccagacccuggagcuggacauggccagccucaacaugaccaugccgcuguccugcacgaagaacaacagccaccacuacaucauggucggcaacgagaccggccuggagcucacccugaccaacacguccaucaucaaccacaaguucugcaaccugagcgacgcccacaagaagaaccucuacgaccacgcccugauguccaucaucagcaccuuccaccuguccauccccaacuucaaccaguacgaggccaugagcugcgacuucaacgggggcaagaucuccgugcaguacaaccucagccacaccuacgcgguggacgccgccaaccacugcgggaccaucgccaacggcguccugcagacguucaugcggauggcguggggcggguccuacaucgcccuggacagcggcugcggguccugggacugcaucaugaccagcuaccaguaccucaucauccagaacaccaccugggaggaccacugccaguucucccgccccagccccaucggcuaccuggggcugcucagccagcggacgcgcgacaucuacaucucccggcgccgccggggcaccuucaccuggacccucagcgacuccgagagcaacgagacgccgggcggguacugccugacccgguggaugcugaucgaggccgagcucaagugcuucggcaacaccgccguggccaagugcaacgagaagcacgacgaggaguucugcgacaugcugcgccuguucgacuucaacaagcaggcgauccggcgccucaaggcccccgcccagauguccauccagcugaucaacaaggccgugaacgcccugaucaacgaccagcucaucaugaagaaccaccuccgggacaucaugugcauccccuacugcaacuacagcaaguacugguaccugaaccacaccgucacgggccgcaccucccugccccggugcuggcuggugagcaacggguccuaccugaacgagacccacuucagcgacgacaucgagcagcaggcggacaacaugaucaccgagcuccugcagaaggaguacauggaccgccagggcaagacgccccugggccucguggaccuguucgucuucuccaccagcuucuaccugaucuccaucuuccugcaccucgugaagaucccgacccaccggcacgugaucgggaagcccugccccaagccccaccgccugaaccacaugggcaucugcagcugcgggcuguacaagcacccgggcguccccgugaaguggaagcggugaggacuaguaauaaggaaacuguaugaaugucugugggcaggaagugaagagauccuucuguaaagguuuuuggaauuaugucugcugaauaauaaacuuuuuugaaauaauaaaucugguagaaaaaugagaucuaaaaaaaaaaaaaaaaaaaaaaaaaaaaaaaaaaaaaaaaaaaaaaaaaaaaaaaaaaaaaaaaugcaucccccccccccccccccccccccccccccccaaaggcucuuuucagagccaccagaauu

SEQ ID NO: 6730 - RNA, 1813 nt, Artificial Sequence
  mRNA product Design b-4 comprising derived and/or modified sequence from LASV(LASV035-NIG-2009;Clade II)__AIT17588__GPCstabilized (opt1)
gggagagucccgcagucggcguccagcggcucugcuuguucgugugugugucguugcaggccuuauucaagcuuaccaugggccagaucaucaccuucuuccaggaggugccccacgucaucgaggaggugaugaacaucgugcugaucgcccucagccugcuggccauccucaaggggaucuacaacgucgcgaccugcggccuguucgggcugguguccuuccuccugcugugcggccgcagcugcuccacgaccuacaaggggguguacgagcuccagacccuggagcuggacauggccagccucaacaugaccaugccgcuguccugcacgaagaacaacagccaccacuacaucauggucggcaacgagaccggccuggagcucacccugaccaacacguccaucaucaaccacaaguucugcaaccugagcgacgcccacaagaagaaccucuacgaccacgcccugauguccaucaucagcaccuuccaccuguccauccccaacuucaaccaguacgaggccaugagcugcgacuucaacgggggcaagaucuccgugcaguacaaccucagccacgcguacgccguggacgccgccaaccacugcgggaccaucgcgaacggcguccugcagaccuucaugcggauggccuggggcggguccuacaucgcccuggacagcggcugcggguccugggacugcaucaugacgagcuaccaguaccucaucauccagaacaccaccugggaggaccacugccaguucucccgccccagccccaucggcuaccuggggcugcucagccagcggacccgcgacaucuacaucucccggcgccgccggggcacguucaccuggacccucagcgacuccgagggcaacgagacccccgggggcuacugccugacgcgguggaugcugaucgaggccgagcucaagugcuucgggaacaccgccguggcgaagugcaacgagaagcacgacgaggaguucugcgacaugcugcgccuguucgacuucaacaagcaggccauccggcgccucaaggcccccgcccagaugagcauccagcugaucaacaaggccgugaacgcgcugaucaacgaccagcucaucaugaagaaccaccuccgggacaucaugugcauccccuacugcaacuacuccaaguacugguaccugaaccacaccgucaccgggaagacgagccugccccgcugcuggcugguguccaacggcagcuaccugaacgagacccacuucuccgacgacaucgagcagcaggccgacaacaugaucaccgagcuccugcagaaggaguacaucgaccggcagggcaagaccccgcuggggcucguggaccuguucgucuucagcacguccuucuaccugaucagcaucuuccugcaccucgugaagaucccgacccaccgccacgugaucggcaagcccugccccaagccccaccggcugaaccacauggggaucugcuccugcggccuguacaagcacccggggguccccgugaaguggaagcgcugaggacuaguaauaaggaaacuguaugaaugucugugggcaggaagugaagagauccuucuguaaagguuuuuggaauuaugucugcugaauaauaaacuuuuuugaaauaauaaaucugguagaaaaaugagaucuaaaaaaaaaaaaaaaaaaaaaaaaaaaaaaaaaaaaaaaaaaaaaaaaaaaaaaaaaaaaaaaaugcaucccccccccccccccccccccccccccccccaaaggcucuuuucagagccaccagaauu

SEQ ID NO: 6731 - RNA, 1813 nt, Artificial Sequence
  mRNA product Design b-4 comprising derived and/or modified sequence from LASV(LASV1000-NIG-2009;Clade II)__AIT17782__GPCstabilized (opt1)
gggagagucccgcagucggcguccagcggcucugcuuguucgugugugugucguugcaggccuuauucaagcuuaccaugggccagaucaucaccuucuuccaggaggugccccacgucaucgaggaggugaugaacaucgugcugaucgcccucagccugcuggccauccucaaggggaucuacaacgucgcgaccugcggccuguucgggcugguguccuuccuccugcugugcggccgcagcugcuccacgaccuacaaggggguguacgagcuccagacccuggagcuggacauggccagccucaacaugaccaugccgcuguccugcacgaagaacaacagccaccacuacaucauggucggcaacgagaccggccuggagcucacccugaccaacacguccaucaucaaccacaaguucugcaaccugagcgacgcccacaagaagaaccucuacgaccacgcccugauguccaucaucagcaccuuccaccuguccauccccaacuucaaccaguacgaggccaugagcugcgacuucaacgggggcaagaucuccgugcaguacaaccucagccacaccuacgcgguggacgccgccaaccacugcgggaccaucgccaacggcguccugcagacguucaugcggauggcguggggcggguccuacaucgcccuggacagcggcugcggguccugggacugcaucaugaccagcuaccaguaccucaucauccagaacaccaccugggaggaccacugccaguucucccgccccagccccaucggcuaccuggggcugcucagccagcggacgcgcgacaucuacaucucccggcgccgccggggcaccuucaccuggacccucagcgacuccgagggcaacgagacgcccgggggcuacugccugacccgguggaugcugaucgaggccgagcucaagugcuucgggaacaccgccguggccaagugcaacgagaagcacgacgaggaguucugcgacaugcugcgccuguucgacuucaacaagcaggcgaucaagcggcucaagacccccgcccagaugagcauccagcugaucaacaaggccgugaacgcccugaucaacgaccagcucaucaugaagaaccaccuccgcgacaucaugugcauccccuacugcaacuacuccaaguacugguaccugaaccacacggucaccgggaagaccagccugccccggugcuggcugguguccaacggcagcuaccugaacgagacccacuucuccgacgacaucgagcagcaggccgacaacaugaucacggagcuccugcagaaggaguacaucgaccgccagggcaagaccccgcuggggcucguggaccuguucgucuucagcaccuccuucuaccugaucagcaucuuccugcaccucgugaagaucccgacccaccggcacguggucggcaagcccugccccaagccccaccgccugaaccacauggggaucugcuccugcggccuguacaagcacccgggggugcccgugaaguggaagcggugaggacuaguaauaaggaaacuguaugaaugucugugggcaggaagugaagagauccuucuguaaagguuuuuggaauuaugucugcugaauaauaaacuuuuuugaaauaauaaaucugguagaaaaaugagaucuaaaaaaaaaaaaaaaaaaaaaaaaaaaaaaaaaaaaaaaaaaaaaaaaaaaaaaaaaaaaaaaaugcaucccccccccccccccccccccccccccccccaaaggcucuuuucagagccaccagaauu

SEQ ID NO: 6732 - RNA, 1813 nt, Artificial Sequence
  mRNA product Design b-4 comprising derived and/or modified sequence from LASV(LASV221-NIG-2010;Clade II)__AIT17624__GPCstabilized (opt1)
gggagagucccgcagucggcguccagcggcucugcuuguucgugugugugucguugcaggccuuauucaagcuuaccaugggccagaucaucaccuucuuccaggaggugccccacgucaucgaggaggugaugaacaucgugcugaucgcccucagccugcuggccauccucaaggggaucuacaacgucgcgaccugcggccuguucgggcugguguccuuccuccugcugugcggccgcagcugcuccacgaccuacaaggggguguacgagcuccagacccuggagcuggacauggccagccucaacaugaccaugccgcuguccugcacgaagaacaacagccaccacuacaucauggucggcaacgagaccggccuggagcucacccugaccaacacguccaucaucaaccacaaguucugcaaccugagcgacgcccacaagaagaaccucuacgaccacgcccugauguccaucaucagcaccuuccaccuguccauccccaacuucaaccaguacgaggccaugagcugcgacuucaacgggggcaagaucuccgugcaguacaaccucagccacaccuacgcgaucgacgccgccaaccacugcgggaccaucgccaacggcgugcugcagacguucaugcggauggcguggggcggguccuacaucgcccuggacagcggcugcggguccugggacugcaucaugaccagcuaccaguaccucaucauccagaacaccaccugggaggaccacugccaguucucccgccccagccccaucggcuaccuggggcugcucagccagcggacgcgcgacaucuacaucucccggcgccgccggggcaccuucaccuggacccucagcgacuccgagggcaacgagacgcccgggggcuacugccugacccgguggaugcugaucgaggccgagcucaagugcuucgggaacaccgccgucgccaagugcaacgagaagcacgacgaggaguucugcgacaugcugcgccuguucgacuucaacaagcaggcgauccggcgccucaagacccccgcccagaugagcauccagcugaucaacaaggccgugaacgcccugaucaacgaccagcucaucaugaagaaccaccuccgggacaucaugugcauccccuacugcaacuacuccaaguacugguaccugaaccacacggugaccgggaagaccagccugccccgcugcuggcuggucuccaacggcagcuaccugaacgagacccacuucuccgacgacaucgagcagcaggccgacaacaugaucacggagaugcuccagaaggaguacauggaccggcagggcaagaccccgcuggggcugguggaccucuucguguucagcaccuccuucuaccugaucagcaucuuccugcaccuggucaagaucccgacccaccgccacgugaucggcaagcccugccccaagccccaccggcucaaccacauggggaucugcuccugcggccuguacaagcacccgggggugcccgucaaguggaagcgcugaggacuaguaauaaggaaacuguaugaaugucugugggcaggaagugaagagauccuucuguaaagguuuuuggaauuaugucugcugaauaauaaacuuuuuugaaauaauaaaucugguagaaaaaugagaucuaaaaaaaaaaaaaaaaaaaaaaaaaaaaaaaaaaaaaaaaaaaaaaaaaaaaaaaaaaaaaaaaugcaucccccccccccccccccccccccccccccccaaaggcucuuuucagagccaccagaauu

SEQ ID NO: 6733 - RNA, 1813 nt, Artificial Sequence
  mRNA product Design b-4 comprising derived and/or modified sequence from LASV(LASV237-NIG-2010;Clade II)__AIT17638__GPCstabilized (opt1)
gggagagucccgcagucggcguccagcggcucugcuuguucgugugugugucguugcaggccuuauucaagcuuaccaugggccagaucaucaccuucuuccaggaggugccccacgucaucgaggaggugaugaacaucgugcugaucgcccucagccugcuggccauccucaaggggaucuacaacgucgcgaccugcggccuguucgggcugguguccuuccuccugcugugcggccgcagcugcuccacgaccuacaaggggguguacgagcuccagacccuggagcuggacauggccagccucaacaugaccaugccgcuguccugcacgaagaacaacagccaccacuacaucauggucggcaacgagaccggccuggagcucacccugaccaacacguccaucaucaaccacaaguucugcaaccugagcgacgcccacaagaaggaccucuacgaccacgcccugauguccaucaucagcaccuuccaccuguccauccccaacuucaaccaguacgaggccaugagcugcgacuucaacgggggcaagaucuccgugcaguacaaccucagccacaccuacgcgguggacgccgccaaccacugcgggaccaucgccaacggcguccugcagacguucaugcggauggcguggggcggguccuacaucgcccuggacagcggcugcggguccugggacugcaucaugaccagcuaccaguaccucaucauccagaacaccaccugggaggaccacugccaguucucccgccccagccccaucggcuaccuggggcugcucagccagcggacgcgcgacaucuacaucucccggcgccgccggggcaccuucaccuggacccucagcgacuccgagggcaacgagacgcccgggggcuacugccugacccgguggaugcugaucgaggccgagcucaagugcuucgggaacaccgccguggccaagugcaacgagaagcacgacgaggaguucugcgacaugcugcgccuguucgacuucaacaagcaggcgauccggcgccucaagacccccgcccagaugagcauccagcugaucaacaaggccgugaacgcccugaucaacgaccagcucaucaugaagaaccaccuccgggacaucaugugcauccccuacugcaacuacuccaaguacugguaccugaaccacacggucaccgggaagaccagccugccccgcugcuggcugguguccaacggcagcuaccugaacgagacccacuucuccgacgacaucgagcagcaggccgacaacaugaucacggagcuccugcagaaggaguacauggaccggcagggcaagaccccgcuggggcucguggaccuguucgucuucagcaccuccuucuaccugaucagcaucuuccugcaccucaucaagaucccgacccaccgccacaucacgggcaagcccugccccaagccccaccggcugaaccacauggggaucugcuccugcggccuguacaagcacccgggggugcccgugaaguggaagcgcugaggacuaguaauaaggaaacuguaugaaugucugugggcaggaagugaagagauccuucuguaaagguuuuuggaauuaugucugcugaauaauaaacuuuuuugaaauaauaaaucugguagaaaaaugagaucuaaaaaaaaaaaaaaaaaaaaaaaaaaaaaaaaaaaaaaaaaaaaaaaaaaaaaaaaaaaaaaaaugcaucccccccccccccccccccccccccccccccaaaggcucuuuucagagccaccagaauu

SEQ ID NO: 6734 - RNA, 1813 nt, Artificial Sequence
  mRNA product Design b-4 comprising derived and/or modified sequence from LASV(LASV253-NIG-2011;Clade II)__AIT17670__GPCstabilized (opt1)
gggagagucccgcagucggcguccagcggcucugcuuguucgugugugugucguugcaggccuuauucaagcuuaccaugggccagaucaucaccuucuuccaggaggugccccacgucaucgaggaggugaugaacaucgugcugaucgcccucagccugcuggccauccucaaggggaucuacaacgucgcgaccugcggccuguucgggcugguguccuuccuccugcugugcggccgcagcugcuccacgaccuacaaggggguguacgagcuccagacccuggagcuggacauggccagccucaacaugaccaugccgcuguccugcacgaagaacaacagccaccacuacaucauggucggcaacgagaccggccuggagcucacccugaccaacacguccaucaucaaccacaaguucugcaaccugagcgacgcccacaagaagaaccucuacgaccacgcccugauguccaucaucagcaccuuccaccuguccauccccaacuucaaccaguacgaggccaugagcugcgacuucaacgggggcaagaucuccgugcaguacaaccucagccacaccuacgcgguggacgccgccaaccacugcgggaccaucgccaacggcguccugcagacguucaugcggauggcguggggcggguccuacaucgcccuggacagcggcugcggguccugggacugcaucaugaccagcuaccaguaccucaucauccagaacaccaccugggaggaccacugccaguucucccgccccagccccaucggcuaccuggggcugcucagccagcggacgcgcgacaucuacaucucccggcgccgccggggcaccuucaccuggacccucagcgacuccgagggcaacgagacgcccgggggcuacugccugacccgguggaugcugaucgaggccgagcucaagugcuucgggaacaccgccguggccaagugcaacgagaagcacgacgaggaguucugcgacaugcugcgccuguucgacuucaacaagcaggcgauccggcgccucaaggcccccgcccagaugagcauccagcugaucaacaaggccgugaacgcccugaucaacgaccagcucaucaugaagaaccaccuccgggacaucaugugcaucccguacugcaacuacuccaaguacugguaccugaaccacaccgucacggggcgcaccagccugccccggugcuggcugguguccaacggcagcuaccugaacgagacccacuucuccgacgacaucgagcagcaggcggacaacaugaucaccgagcuccugcagaaggaguacaucgaccgccagggcaagacgccccuggggcucguggaccuguucgucuucagcaccuccuucuaccugaucagcaucuuccugcaccucgugaagaucccgacccaccggcacaucaucggcaagcccugccccaagccccaccgccugaaccacauggggaucugcuccugcggccuguacaagcacccgggggugcccgucaaguggaagcggugaggacuaguaauaaggaaacuguaugaaugucugugggcaggaagugaagagauccuucuguaaagguuuuuggaauuaugucugcugaauaauaaacuuuuuugaaauaauaaaucugguagaaaaaugagaucuaaaaaaaaaaaaaaaaaaaaaaaaaaaaaaaaaaaaaaaaaaaaaaaaaaaaaaaaaaaaaaaaugcaucccccccccccccccccccccccccccccccaaaggcucuuuucagagccaccagaauu

SEQ ID NO: 6735 - RNA, 1813 nt, Artificial Sequence
  mRNA product Design b-4 comprising derived and/or modified sequence from LASV(LASV254-NIG-2011;Clade II)__AIT17674__GPCstabilized (opt1)
gggagagucccgcagucggcguccagcggcucugcuuguucgugugugugucguugcaggccuuauucaagcuuaccaugggccagaucaucaccuucuuccaggaggugccccacgucaucgaggaggugaugaacaucgugcugaucgcccucagccugcuggccauccucaaggggaucuacaacgucgcgaccugcggccuguucgggcugguguccuuccuccugcugugcggccgcagcugcuccacgaccuacaaggggguguacgagcuccagacccuggagcuggacaugaccaaccucaacaugacgaugccgcugagcugcaccaagaacaacucccaccacuacaucauggucggcaacgagaccggccuggagcucacccugacgaacaccagcaucaucaaccacaaguucugcaaccuguccgacgcccacaagaagaaccucuacaaccacgcccugaugagcaucaucuccaccuuccaccugagcauccccaacuucaaccaguacgaggccauguccugcgacuucaacgggggcaagaucagcgugcaguacaaccucucccacagcuacgccguggacgcggccaaccacugcgggaccaucgccaacggcguccugcagacguucaugcggauggccuggggcggguccuacaucgcgcuggacagcggcugcgggaacugggacugcaucaugaccuccuaccaguaccucaucauccagaacaccaccugggaggaccacugccaguucagccgccccucccccaucggcuaccuggggcugcucagccagcggacgcgcgacaucuacaucagccggcgccgccggggcaccuucaccuggacccucuccgacagcgagggcaacgagacgcccgggggcuacugccugacccgguggaugcugaucgaggccgagcucaagugcuucgggaacaccgccguggccaagugcaacgagaagcacgacgaggaguucugcgacaugcugcgccuguucgacuucaacaagcaggccauccggcgccucaagacccccgcgcaggccaacauccagcugaucaacaaggccgugaacgcccugaucaacgaccagcucaucaugaagaaccaccuccgggacaucaugugcauccccuacugcaacuacuccaaguacugguaccugaaccacacggucaccgggaagaccagccugccccgcugcuggcugguguccaacggcagcuaccugaacgagacccacuucuccgacgacaucgagcagcaggccgacaacaugaucacggagcuccugcagaaggaguacauggaccggcagggcaagaccccgcuggggcucguggaccuguucgucuucagcaccuccuucuaccugaucagcaucuuccugcaccucgugaagaucccgacccaccgccacgugaucggcaagcccugccccaagccccaccggcugaaccacauggggaucugcuccugcggccuguacaagcacccggggguccccgugaaguggaagcgcugaggacuaguaauaaggaaacuguaugaaugucugugggcaggaagugaagagauccuucuguaaagguuuuuggaauuaugucugcugaauaauaaacuuuuuugaaauaauaaaucugguagaaaaaugagaucuaaaaaaaaaaaaaaaaaaaaaaaaaaaaaaaaaaaaaaaaaaaaaaaaaaaaaaaaaaaaaaaaugcaucccccccccccccccccccccccccccccccaaaggcucuuuucagagccaccagaauu

SEQ ID NO: 6736 - RNA, 1813 nt, Artificial Sequence
  mRNA product Design b-4 comprising derived and/or modified sequence from LASV(Nig08-A19;Clade III)__ADU56618__GPCstabilized (opt1)
gggagagucccgcagucggcguccagcggcucugcuuguucgugugugugucguugcaggccuuauucaagcuuaccaugggccagaucgugaccuucuuccaggaggucccccacgugaucgaggaggugaugaacaucguccugaucgcccucagcauccuggccauccugaaggggcucuacaacaucgcgaccugcggccugaucgggcuggugacguuccuccugcuguccggccgcagcugcuccaugaccuacaaggggguguacgagcuccagacccuggagcugaacaugaacacccucaacaugacgaugccgcugagcugcaccaagaacaacucccaccacuacaucauggucggcaacgagaccggccuggagcucacccugacgaacaccagccugcuccaccacaaguucugcaaccuguccgacgcccacaagaagaaccuguacgaccacacccucaugagcaucaucuccaccuuccaccugagcauccccaacuucaaccaguacgaggccauguccugcgacuucaacgggggcaagaucacggugcaguacaaccugagccacuccuacgccaucgacgccgcgaaccacugcgggaccguggccaacggcguccuccagaccuucaugcggauggccuggggcgggagcuacaucgcccuggacuccggcugcgggaagugggacugcaucaugaccagcuaccaguaccugaucauccagaacacgaccugggaggaccacugccaguucucccggcccagccccaucggcuaccucgggcugcugucccagcgcacccgggacaucuacaucagccgccggcgccggggcaccuucacguggacccugagcgacuccgagggcaacgagacccccgggggcuacugccucacccgcuggaugcugaucgaggcggagcugaagugcuucgggaacacggccguggccaagugcaacgagaagcacgacgaggaguucugcgacaugcuccggcuguucgacuucaacaagcaggccauccgccggcugaaggcccccgcgcagaugagcauccagcucaucaacaaggccgugaacgcccugaucaacgaccagcugaucaugaagaaccaccuccgcgacaucaugugcauccccuacugcaacuacuccaaguacugguaccugaaccacaccagcaccgggcggaccucccugccccgcugcuggcucgucagcaacggcuccuaccugaacgagacgcacuucagcgacgacaucgagcagcaggccgacaacaugaucaccgagaugcugcagaaggaguaccucgaccggcagggcaagaccccgcuggggcugguggaccuguucguguucuccaccagcuucuaccucaucuccaucuuccugcaccuggucaagaucccgacgcaccgccacaucgugggcaagcccugccccaagccccaccggcucaaccacauggggaucugcagcugcggccuguacaagcagccgggggugcccguccgcuggaagcggugaggacuaguaauaaggaaacuguaugaaugucugugggcaggaagugaagagauccuucuguaaagguuuuuggaauuaugucugcugaauaauaaacuuuuuugaaauaauaaaucugguagaaaaaugagaucuaaaaaaaaaaaaaaaaaaaaaaaaaaaaaaaaaaaaaaaaaaaaaaaaaaaaaaaaaaaaaaaaugcaucccccccccccccccccccccccccccccccaaaggcucuuuucagagccaccagaauu

SEQ ID NO: 6737 - RNA, 1816 nt, Artificial Sequence
  mRNA product Design b-4 comprising derived and/or modified sequence from LASV(G1180-SLE-2010;Clade IV)__AIT17168__GPCstabilized (opt1)
gggagagucccgcagucggcguccagcggcucugcuuguucgugugugugucguugcaggccuuauucaagcuuaccaugggccagaucgugaccuucuuccaggaggucccccacgugaucgaggaggugaugaacaucguccugaucgcccucagcauccuggccgugcugaaggggcucuacaacuucgcgaccugcggccugguggggcugcucaccuuccugcugcucugcggccgcuccugcaccgccagccgguacaagggggucuacgagcugcagacccuggagcucaacauggagacccugaacaugacgaugccgcuguccugcaccaagaacaacagccaccacuacaucauggugggcaacgagaccggccucgagcugacccugacgaacaccuccaucaucaaccacaaguucugcaaccucagcgacgcccacaagaagaaccuguacgaccacgcccugauguccaucaucagcaccuuccaccucuccauccccaacuucaaccaguacgaggccaugagcugcgacuucaacgggggcaagaucuccgugcaguacaaccugagccacuccuacgcgggggacgccgccaaccacugcggcaccgucgccaacggggugcugcagacguucaugcgcauggcguggggcggcagcuacaucgcccucgacuccgggugcggcagcugggacugcaucaugaccuccuaccaguaccugaucauccagaacaccaccugggaggaccacugccaguucagccggcccucccccaucggguaccugggccuccugagccagcgcacgcgggacaucuacaucagccgccggcgccggggcaccuucaccuggacccuguccgacagcgaggggaaggacacgccgggcggguacugccugacccgcuggaugcucaucgaggccgagcugaagugcuucggcaacaccgccguggccaagugcaacgagaagcacgacgaggaguucugcgacaugcugcggcuguucgacuucaacaagcaggcgauccagcgccugaaggcccccgcccagauguccauccagcugaucaacaaggccgucaacgcccucaucaacgaccagcugaucaugaagaaccaccuccgggacaucaugugcauccccuacugcaacuacagcaaguacugguaccucaaccacaccacgaccggcaagaccucccugcccaagugcuggcuggugagcaacggcuccuaccucaacgagacccacuucagcgacgacaucgagcagcaggcggacaacaugaucacggagaugcugcagaaggaguacauggagcgccaggggaagacgccccugggccucguggaccuguucgucuucuccaccagcuucuaccugaucuccaucuuccugcaccucgugaagaucccgacccaccggcacaucgugggcaagagcugccccaagccccaccgccugaaccacauggggaucugcuccugcgggcuguacaagcagcccggcgucccggugaaguggaagcggugaggacuaguaauaaggaaacuguaugaaugucugugggcaggaagugaagagauccuucuguaaagguuuuuggaauuaugucugcugaauaauaaacuuuuuugaaauaauaaaucugguagaaaaaugagaucuaaaaaaaaaaaaaaaaaaaaaaaaaaaaaaaaaaaaaaaaaaaaaaaaaaaaaaaaaaaaaaaaugcaucccccccccccccccccccccccccccccccaaaggcucuuuucagagccaccagaauu

SEQ ID NO: 6738 - RNA, 1816 nt, Artificial Sequence
  mRNA product Design b-4 comprising derived and/or modified sequence from LASV(G1442-SLE-2011;Clade IV)__AIT17180__GPCstabilized (opt1)
gggagagucccgcagucggcguccagcggcucugcuuguucgugugugugucguugcaggccuuauucaagcuuaccaugggccagaucgugaccuucuuccaggaggucccccacgugaucgaggaggugaugaacaucguccugaucgcccucagcauccuggccgugcugaaggggcucuacaacguggcgaccugcggccugaucgggcuggucacguuccuccugcugugcggccgcuccugcaccaccacccucuacaaggggguguacgagcugcagacgcuggagcucaacauggagacccugaacaugaccaugccgcugagcugcaccaagaacaacucccaccacuacauccgggugggcaacgagacgggccucgagcugacccugaccaacaccagcaucaucaaccacaaguucugcaaccucuccgacgcccacaagaagaaccuguacgaccacgcccugaugagcaucaucuccacguuccaccucagcauccccaacuucaaccaguacgaggccauguccugcgacuucaacgggggcaagaucagcguccaguacaaccugucccacagcuacgccggggacgcggccaaccacugcggcaccguggccaacggggugcugcagaccuucaugcgcauggccuggggcggcuccuacaucgcgcucgacagcgggugcggcaacugggacugcaucaugaccuccuaccaguaccugaucauccagaacacgaccugggacgaccacugccaguucagccgccccucccccaucggguaccugggccuccugagccagcggacccgcgacgucuacaucucccggcgccgccggggcaccuucacguggacccugagcgacagcgaggggaaggacaccccgggcggguacugccugacccgguggaugcucaucgaggccgagcugaagugcuucggcaacacggccguggccaagugcaacgagaagcacgacgaggaguucugcgacaugcugcgccucuucgacuucaacaagcaggccauccagcggcugaaggcgcccgcccagauguccauccagcugaucaacaaggccgugaacgcccucaucaacgaccagcugaucaugaagaaccaccuccgcgacaucaugugcauccccuacugcaacuacagcaaguacugguaccugaacaacaccgccaccggcaagaccucccugcccaagugcuggcugaucagcaacggcuccuaccucaacgagacgcacuucagcgacgacaucgagcaggaggcggacaacaugaucaccgagaugcugcagaaggaguacauggagcggcaggggaagacgccccugggccucgucgaccuguucguguucuccaccagcuucuaccugaucuccaucuuccugcaccucgugaagaucccgacccaccgccacaucgucggcaagagcugccccaagccccaccggcugaaccacauggggaucugcuccugcgggcuguacaagcagcccggcgugccggugcgcuggaagcggugaggacuaguaauaaggaaacuguaugaaugucugugggcaggaagugaagagauccuucuguaaagguuuuuggaauuaugucugcugaauaauaaacuuuuuugaaauaauaaaucugguagaaaaaugagaucuaaaaaaaaaaaaaaaaaaaaaaaaaaaaaaaaaaaaaaaaaaaaaaaaaaaaaaaaaaaaaaaaugcaucccccccccccccccccccccccccccccccaaaggcucuuuucagagccaccagaauu

SEQ ID NO: 6739 - RNA, 1816 nt, Artificial Sequence
  mRNA product Design b-4 comprising derived and/or modified sequence from LASV(G3010-SLE-2013;Clade IV)__AIT17344__GPCstabilized (opt1)
gggagagucccgcagucggcguccagcggcucugcuuguucgugugugugucguugcaggccuuauucaagcuuaccaugggccagaucgugaccuucuuccaggaggucccccacgugaucgaggaggugaugaacaucguccugaucgcccucagcauccuggccgugcugaaggggcucuacaacuucgcgaccugcggccugguggggcuggucacguuccuccugcugugcggccgcuccugcaccaccagccucuacaaggggguguacgagcugcagacccuggagcucaacauggagacgcugaacaugaccaugccgcuguccugcaccaagaacaacagccaccacuacaucauggugggcaacgagaccggccucgagcugacgcugaccaacaccuccaucaucaaccacaaguucugcaaccucagcgacgcccacaagaagaaccuguacaaccacgcccugauguccaucaucagcaccuuccaccucuccauccccaacuucaaccaguacgaggccaugagcugcgacuucaacgggggcaagaucuccguccaguacaaccugagccacuccuacgccggggacgcggccagccacugcggcacgguggccaacggggugcugcagaccuucaugcggauggccuggggcggcuccuacaucgcgcucgacagcgggugcggcaagugggacugcaucaugaccuccuaccaguaccugaucauccagaacaccacgugggaggaccacugccaguucagccgccccucccccaucggguaccugggccuccugagccagcggacccgcgacaucuacaucagccggcgccgccggggcaccuucaccuggacgcuguccgacagcgaggggaaggacaccccgggcggguacugccugacccgguggaugcucaucgaggccgagcugaagugcuucggcaacaccgccgucgccaagugcaacgagaagcacgacgaggaguucugcgacaugcugcgccucuucgacuucaacaagcaggccauccagcggcugaagacgcccgcgcagauguccauccagcugaucaacaaggccgugaacgcccucaucaacgaccagcugaucaugaagaaccaccuccgcgacaucaugugcauccccuacugcaacuacagcaaguacugguaccugaaccacaccaccaccggcaagacgucccugcccaagugcuggcuggugagcaacggcuccuaccucaacgagacccacuucagcgacgacaucgagcagcaggccgacaacaugaucaccgagaugcugcagaaggaguacauggagcggcaggggaagacgccccugggccucgucgaccuguucguguucuccaccagcuucuaccugaucuccaucuuccugcaccucgugaagaucccgacccaccgccacaucgucggcaagagcugccccaagccccaccggcugaaccacauggggaucugcuccugcgggcuguacaagcagcccggcgugccggugcgcuggaagcggugaggacuaguaauaaggaaacuguaugaaugucugugggcaggaagugaagagauccuucuguaaagguuuuuggaauuaugucugcugaauaauaaacuuuuuugaaauaauaaaucugguagaaaaaugagaucuaaaaaaaaaaaaaaaaaaaaaaaaaaaaaaaaaaaaaaaaaaaaaaaaaaaaaaaaaaaaaaaaugcaucccccccccccccccccccccccccccccccaaaggcucuuuucagagccaccagaauu

SEQ ID NO: 6740 - RNA, 1816 nt, Artificial Sequence
  mRNA product Design b-4 comprising derived and/or modified sequence from LASV(G502-SLE-2009;Clade IV)__AIT17126__GPCstabilized (opt1)
gggagagucccgcagucggcguccagcggcucugcuuguucgugugugugucguugcaggccuuauucaagcuuaccaugggccagaucgugaccuucuuccaggaggucccccacgugaucgaggaggugaugaacaucguccugaucgcccucagcauccuggccgugcugaaggggcucuacaacuucgcgaccugcggccugguggggcugcucacguuccugcugcucugcggccgcuccugcaccaccgggcuguacaagggcgucuacgagcugcagacccucgagcugaacauggagacgcugaacaugaccaugccgcucagcugcaccaagaacaacucccaccacuacaucauggugggcaacgagaccgggcuggagcugacgcucaccaacaccagcaucaucaaccacaaguucugcaaccuguccgacgcccacaagaagaaccuguacgaccacgcccucaugagcaucaucuccaccuuccaccugagcauccccaacuucaaccaguacgaggccauguccugcgacuucaacggcgggaagaucagcgugcaguacaaccugucccacagcuacgccggcgacgcggccgaccacugcgggacggucgccaacggcgugcuccagaccuucaugcggauggccuggggcggguccuacaucgcgcuggacagcggcugcgggcggugggacugcaucaugaccuccuaccaguaccugaucauccagaacaccacgugggaggaccacugccaguucagccgccccucccccaucggcuaccucggccugcugagccagcggacccgcgacaucuacaucucccggcgccgccgggggaccuucaccuggacgcugagcgacagcgagggcaaggacacccccgggggcuacugccucacccgguggaugcugaucgaggccgagcugaagugcuucgggaacaccgccguggccaagugcaacgagaagcacgacgaggaguucugcgacaugcuccgccuguucgacuucaacaagcaggccauccagcggcugaaggcgcccgcccagauguccauccagcucaucaacaaggccgucaacgcccugaucaacgaccagcuggugaugaagaaccaccuccgcgacaucaugugcauccccuacugcaacuacagccgguacugguaccugaaccacacgaccaccggccgcaccucccugcccaagugcuggcucgugagcaacggguccuaccugaacgagacgcacuucagcgacgacaucgagcagcaggccgacaacaugaucaccgagaugcugcagaaggaguacauggagcggcagggcaagaccccgcucgggcuggucgaccuguucguguucuccaccagcuucuaccugaucuccaucuuccuccaccuggugaagaucccgacgcaccgccacaucgucggcaagagcugccccaagccccaccggcugaaccacauggggaucugcuccugcggccucuacaagcagcccggcgugccggugaaguggaagcgcugaggacuaguaauaaggaaacuguaugaaugucugugggcaggaagugaagagauccuucuguaaagguuuuuggaauuaugucugcugaauaauaaacuuuuuugaaauaauaaaucugguagaaaaaugagaucuaaaaaaaaaaaaaaaaaaaaaaaaaaaaaaaaaaaaaaaaaaaaaaaaaaaaaaaaaaaaaaaaugcaucccccccccccccccccccccccccccccccaaaggcucuuuucagagccaccagaauu

SEQ ID NO: 6741 - RNA, 1816 nt, Artificial Sequence
  mRNA product Design b-4 comprising derived and/or modified sequence from LASV(G733-SLE-2010;Clade IV)__AIT17154__GPCstabilized (opt1)
gggagagucccgcagucggcguccagcggcucugcuuguucgugugugugucguugcaggccuuauucaagcuuaccaugggccagaucgugaccuucuuccaggaggucccccacgugaucgaggaggugaugaacaucguccugaucgcccucagcauccuggccgugcugaaggggcucuacaacuucgcgaccugcggcaucguggggcuggucuccuuccugcuccugugcggccgcagcugcacgaccucccuguacaaggggguguacgagcuccagacccuggagcugaacauggagacccucaacaugacgaugccgcugagcugcaccaagaacaacucccaccacuacaucauggugggcaacgagaccggccuggagcucacccugacgaacaccagcaucaucaaccacaaguucugcaaccuguccgacgcccacaagaagaaccucuacgaccacgcccugaugagcaucaucuccaccuuccaccugagcauccccaacuucaaccaguacgaggccauguccugcgacuucaacgggggcaagaucagcguccaguacaaccucucccacagcuacgccggggacgcggccaaccacugcggcaccaucgccaacggggugcugcagacguucaugcggauggccuggggcggcuccuacaucgcgcuggacagcgggugcgaccggugggacugcaucaugaccuccuaccaguaccucaucauccagaacaccaccugggaggaccacugccaguucagccgccccucccccaucggcuaccuggggcugcucagccagcggacgcgcgacaucuacaucagccggcgccgccggggcaccuucaccuggacccucuccgacagcgagggcaaggacacgcccgggggcuacugccugacccgguggaugcugaucgaggccgagcucaagugcuucgggaacaccgccguggccaagugcaacgagaagcacgacgaggaguucugcgacaugcugcgccuguucgacuucaacaagcaggccauccagcggcucaaggcgcccgcccagauguccauccagcugaucaacaaggccgucaacgcccugaucaacgaccagcucaucaugaagaaccaccuccgcgacaucaugugcauccccuacugcaacuacagcaaguacugguaccugaaccacaccacgaccgggaagaccucccugcccaagugcuggcuggugagcaacggcuccuaccugaacgagacccacuucagcgacgacaucgagcagcaggccgacaacaugaucacggagaugcuccagaaggaguacauggagcggcagggcaagaccccgcuggggcugguggaccucuucgucuucuccaccagcuucuaccugaucuccaucuuccugcaccuggugaagaucccgacccaccgccacguggucggcaagagcugccccaagccccaccggcucaaccacauggggaucugcuccugcggccuguacgggcagcccggcgugccggugaaguggaagcgcugaggacuaguaauaaggaaacuguaugaaugucugugggcaggaagugaagagauccuucuguaaagguuuuuggaauuaugucugcugaauaauaaacuuuuuugaaauaauaaaucugguagaaaaaugagaucuaaaaaaaaaaaaaaaaaaaaaaaaaaaaaaaaaaaaaaaaaaaaaaaaaaaaaaaaaaaaaaaaugcaucccccccccccccccccccccccccccccccaaaggcucuuuucagagccaccagaauu

SEQ ID NO: 6742 - RNA, 1816 nt, Artificial Sequence
  mRNA product Design b-4 comprising derived and/or modified sequence from MOPV/LASV reassortant(IGS-1;Clade IV)__AFY05576__GPCstabilized (opt1)
gggagagucccgcagucggcguccagcggcucugcuuguucgugugugugucguugcaggccuuauucaagcuuaccaugggccagaucgugaccuucuuccaggaggucccccacgugaucgaggaggugaugaacaucguccugaucgcccucagcgugcuggccgugcugaaggggcucuacaacuucgcgaccugcggccuggucgggcuggugacguuccuccugcugugcggccgcuccugcaccaccagccucuacaaggggguguacgagcugcagacccuggagcucaacauggagacgcugaacaugaccaugccgcuguccugcaccaagaacaacagccaccacuacaucauggucggcaacgagaccggccucgagcugacgcugaccaacaccuccaucaucaaccacaaguucugcaaccucagcgacgcccacaagaagaaccuguacgaccacgcccugauguccaucaucagcaccuuccaccucuccauccccaacuucaaccaguacgaggccaugagcugcgacuucaacgggggcaagaucuccgugcaguacaaccugagccacuccuacgccggggacgcggccaaccacugcggcacgguggccaacgggguccugcagaccuucaugcggauggccuggggcggcagcuacaucgcgcucgacuccgggugcggcaacugggacugcaucaugaccagcuaccaguaccugaucauccagaacaccacgugggaggaccacugccaguucucccggcccagccccaucggguaccugggccuccugucccagcgcacccgggacaucuacaucagccgccggcgccggggcaccuucaccuggacgcugagcgacuccgagggggaggacaccccgggcggguacugccugacccgcuggaugcucaucgaggccgagcugaagugcuucggcaacaccgccguggccaagugcaacgagaagcacgacgaggaguucugcgacaugcugcggcuguucgacuucaacaagcaggccauccagcgccugaaggcgcccgcccagaugagcauccagcugaucaacaaggccgugaacgcccucaucaacgaccagcugaucaugaagaaccaccuccgggacaucaugugcauccccuacugcaacuacuccaaguacugguaccucaaccacacgaccaccggccgcaccagccugcccaagugcuggcuggucuccaacggcagcuaccucaacgagacgcacuucuccgacgacaucgagcagcaggccgacaacaugaucaccgagaugcugcagaaggaguacauggagcggcaggggaagacgccccugggccucguggaccuguucguguucagcaccuccuucuaccugaucagcaucuuccugcaccucgucaagaucccgacccaccgccacaucguggggaaguccugccccaagccccaccggcugaaccacaugggcaucugcagcugcgggcuguacaagcagcccggcgugccggucaaguggaagcgcugaggacuaguaauaaggaaacuguaugaaugucugugggcaggaagugaagagauccuucuguaaagguuuuuggaauuaugucugcugaauaauaaacuuuuuugaaauaauaaaucugguagaaaaaugagaucuaaaaaaaaaaaaaaaaaaaaaaaaaaaaaaaaaaaaaaaaaaaaaaaaaaaaaaaaaaaaaaaaugcaucccccccccccccccccccccccccccccccaaaggcucuuuucagagccaccagaauu

SEQ ID NO: 6743 - RNA, 1816 nt, Artificial Sequence
  mRNA product Design b-4 comprising derived and/or modified sequence from LASV(LM765-SLE-2012;Clade IV)__AIT17814__GPCstabilized (opt1)
gggagagucccgcagucggcguccagcggcucugcuuguucgugugugugucguugcaggccuuauucaagcuuaccaugggccagaucgugaccuucuuccaggaggucccccacgugaucgaggaggugaugaacaucguccugaucgcccucagcauccuggccgugcugaaggggcucuacaacuucgcgaccugcggccugguggggcuggucacguuccuccugcugugcggccgcuccugcaccaccagccucuacaaggggguguacgagcugcagacccuggagcucaacauggagacgcugaacaugaccaugccgcuguccugcaccaagaacaacagccaccacuacaucauggugggcaacgagaccggccucgagcugacgcugaccaacaccuccaucaucgaccacaaguucugcaaccucagcgacgcccaccggaagaaccuguacgaccacgcccugauguccaucaucagcaccuuccaccucuccauccccaacuucaaccaguacgaggccaugagcugcgacuucaacgggggcaagaucuccguccaguacaaccugagccacuccuacgccaaggacgcggccgaccacugcgggacgguggccaacggcgugcugcagaccuucaugcgcauggccuggggcgggagcuacaucgcgcucgacuccggcugcgggcgcugggacugcaucaugaccagcuaccaguaccugaucauccagaacaccacgugggaggaccacugccaguucucccggcccagccccaucggcuaccuggggcuccugucccagcgcacccgggacaucuacaucagccgccggcgccggggcaccuucaccuggacgcugagcgacuccgagggcaaggacacccccgggggcuacugccugacccgcuggaugcucaucgaggccgagcugaagugcuucgggaacaccgccgucgccaagugcaacgagaagcacgacgaggaguucugcgacaugcugcggcuguucgacuucaacaagcaggccauccagcgccugaaggcgcccgcccagaugagcauccagcugaucaacaaggccgugaacgcccucaucaacgaccagcugaucaugaagaaccaccuccgggacaucaugugcauccccuacugcaacuacuccaaguacugguaccucaaccacacgaccaccgggaagaccagccugcccaagugcuggcugguguccaacggcagcuaccucaacgagacgcacuucuccgacgacaucgagcagcaggccgacaacaugaucaccgagaugcugcagaaggaguacauggagcgccagggcaagaccccgcuggggcucgucgaccuguucguguucagcaccuccuucuaccugaucagcaucuuccugcaccucgugaagaucccgacgcaccggcacaucgucggcaagcccugccccaagccccaccgccugaaccacauggggaucugcuccugcggccuguacaagcagccgggggugcccgugaaguggaagcggugaggacuaguaauaaggaaacuguaugaaugucugugggcaggaagugaagagauccuucuguaaagguuuuuggaauuaugucugcugaauaauaaacuuuuuugaaauaauaaaucugguagaaaaaugagaucuaaaaaaaaaaaaaaaaaaaaaaaaaaaaaaaaaaaaaaaaaaaaaaaaaaaaaaaaaaaaaaaaugcaucccccccccccccccccccccccccccccccaaaggcucuuuucagagccaccagaauu

SEQ ID NO: 6744 - RNA, 1816 nt, Artificial Sequence
  mRNA product Design b-4 comprising derived and/or modified sequence from LASV(LM776-SLE-2012;Clade IV)__AIT17824__GPCstabilized (opt1)
gggagagucccgcagucggcguccagcggcucugcuuguucgugugugugucguugcaggccuuauucaagcuuaccaugggccagaucgugaccuucuuccaggaggucccccacgugaucgaggaggugaugaacaucguccugaucgcccucagcauccuggccgugcugaaggggcucuacaacuucgcgaccugcggccugguggggcuggucacguuccuccugcugugcggccgcuccugcaccaccagcguguacaaggggguguacgagcuccagacccuggagcugaacauggagacgcucaacaugaccaugccgcuguccugcaccaagaacaacagccaccacuacaucauggucggcaacgagaccggccuggagcucacgcugaccaacaccuccaucaucaaccacaaguucugcaaccugagcgacgcccacaagaagaaccucuacgaccacgcccugauguccaucaucagcaccuuccaccuguccauccccaacuucaaccaguacgaggccaugagcugcgacuucaacgggggcaagaucuccgugcaguacaaccucagccacuccuacgccggggacgcggccaaccacugcggcacgguggccaacgggguccugcagaccuucaugcggauggccuggggcggcagcuacaucgcgcuggacuccgggugcggcaagugggacugcaucaugaccagcuaccaguaccucaucauccagaacaccacgugggaggaccacugccaguucucccgccccagccccaucggguaccugggccugcucucccagcggacccgcgacaucuacaucagccggcgccgccggggcaccuucaccuggacgcucagcgacuccgaggggaaggacaccccgggcggguacugccugacccgguggaugcugaucgaggccgagcucaagugcuucggcaacaccgccguggccaagugcaacgagaagcacgacgaggaguucugcgacaugcugcgccuguucgacuucaacaagcaggccauccagcggcucaaggcgcccgcccagaugagcauccagcugaucaacaaggccgugaacgcccugaucaacgaccagcucaucaugaagaaccaccuccgcgacaucaugugcauccccuacugcaacuacuccaaguacugguaccugaaccacacgaccaccggcaagaccagccugcccaagugcuggcuggucuccaacggcagcuaccugaacgagacgcacuucuccgacgacaucgagcagcaggccgacaacaugaucaccgagaugcuccagaaggaguacauggagcggcaggggaagacgccccugggccugguggaccucuucguguucagcaccuccuucuaccugaucagcaucuuccugcaccuggucaagaucccgacccaccgccacaucguggggaaguccugccccaagccccaccggcucaaccacaugggcaucugcagcugcgggcuguacaagcagcccggcgugccgguccgcuggaagcggugaggacuaguaauaaggaaacuguaugaaugucugugggcaggaagugaagagauccuucuguaaagguuuuuggaauuaugucugcugaauaauaaacuuuuuugaaauaauaaaucugguagaaaaaugagaucuaaaaaaaaaaaaaaaaaaaaaaaaaaaaaaaaaaaaaaaaaaaaaaaaaaaaaaaaaaaaaaaaugcaucccccccccccccccccccccccccccccccaaaggcucuuuucagagccaccagaauu

SEQ ID NO: 6745 - RNA, 1816 nt, Artificial Sequence
  mRNA product Design b-4 comprising derived and/or modified sequence from LASV(Mad39;Clade IV)__ANH09722__GPCstabilized (opt1)
gggagagucccgcagucggcguccagcggcucugcuuguucgugugugugucguugcaggccuuauucaagcuuaccaugggccagaucgugaccuucuuccaggaggucccccacgugaucgaggaggugaugaacaucguccugaucgcccucagcauccuggccgugcugaaggggcucuacaacguggcgaccugcggccugaucgggcuggucacguuccuccugcugugcggccgcuccugcaccaccacccucuacaaggggguguacgagcugcaggcccuggagcucaacauggagacgcugaacaugaccaugccgcugagcugcaccaagaacaacucccaccacuacauccgggugggcaacgagaccggccucgagcugacgcugaccaacaccagccucaucaaccacaaguucugcaaccuguccgacgcccacaagaagaaccuguacgaccacgcccucaugagcaucaucuccaccuuccaccugagcauccccaacuucaaccaguacgaggccauguccugcgacuucaacgacgggaagaucagcguccaguacaaccugucccacacguacgcgggcgacaccgccaaccacugcgggaccguggccaacggcgugcuccagaccuucaugcgcauggccuggggcgggagcuacaucgcgcuggacuccggcugcgggggcugggacugcaucaugacgagcuaccaguaccugaucauccagaacaccaccugggaggaccacugccaguucucccggcccagccccaucggguaccucggccugcugucccagcggacccgcgacaucuacaucagccggcgccgccggggcacguucaccuggacccuguccgacagcgaggggaaggacaccccgggcggguacugccucacgcgguggaugcugaucgaggccgagcugaagugcuucggcaacaccgccgucgccaagugcaacgagaagcacgacgaggaguucugcgacaugcuccgccuguucgacuucaacaagcaggccauccagcggcugaaggcgcccgcccagaugagcauccagcucaucaacaaggccgugaacgcccugaucaacgaccagcugaucaugaagaaccaccuccgcgacaucaugugcauccccuacugcaacuacuccaaguacugguaccugaaccacaccgugaccggcaagacgagccugcccaagugcuggcucgucuccaacggcagcuaccugaacgagacccacuucuccgacgacaucgagcagcaggccgacaacaugaucaccgagaugcugcagaaggaguacauggagcggcaggggaagacgccccucggccugguggaccuguucguguucagcaccuccuucuaccugaucagcaucuuccuccaccuggucaagaucccgacccaccgccacgugguggggaagcccugccccaagccccaccggcugaaccacaugggcaucugcuccugcggguucuacaagcagccgggcguccccgugcgcuggaagcggugaggacuaguaauaaggaaacuguaugaaugucugugggcaggaagugaagagauccuucuguaaagguuuuuggaauuaugucugcugaauaauaaacuuuuuugaaauaauaaaucugguagaaaaaugagaucuaaaaaaaaaaaaaaaaaaaaaaaaaaaaaaaaaaaaaaaaaaaaaaaaaaaaaaaaaaaaaaaaugcaucccccccccccccccccccccccccccccccaaaggcucuuuucagagccaccagaauu

SEQ ID NO: 6746 - RNA, 1816 nt, Artificial Sequence
  mRNA product Design b-4 comprising derived and/or modified sequence from LASV(Z0947-SLE-2011;Clade IV)__AIT17840__GPCstabilized (opt1)
gggagagucccgcagucggcguccagcggcucugcuuguucgugugugugucguugcaggccuuauucaagcuuaccaugggccagaucgugaccuucuuccaggaggucccccacgugaucgaggaggugaugaacaucguccugaucgcccucagcauccuggccgugcugaaggggcucuacaacuucgcgaccugcggccugguggggcuggucacguuccuccugcugugcggccgcuccugcaccaucagccucuacaaggggguguacgagcugcagacccuggagcucaacauggagacccugaacaugacgaugccgcuguccugcaccaagaacaacagccaccacuacaucauggugggcaacgagaccggccucgagcugacccugacgaacaccuccaucaucaaccacaaguucugcaaccucagcgacgcccacaagaagaaccuguacgaccacgcccugauguccaucaucagcaccuuccaccucuccauccccaacuucaaccaguacgaggccaugagcugcgacuucaacgggggcaagaucuccguccaguacaaccugagccacuccuacgccggggacgcggccaaccacugcggcaccguggccaacggggugcugcagacguucaugcggauggccuggggcggcagcuacaucgcgcucgacuccgggugcgaccggugggacugcaucaugaccagcuaccaguaccugaucauccagaacaccaccugggaggaccacugccaguucucccgccccagccccaucggcuaccuggggcuccugucccagcggacgcgcgacaucuacaucagccggcgccgccggggcaccuucaccuggacccugagcgacuccgagggcaaggacacgcccgggggcuacugccugacccgguggaugcucaucgaggccgagcugaagugcuucgggaacaccgccgucgccaagugcaacgagaagcacgacgaggaguucugcgacaugcugcgccucuucgacuucaacaagcaggccauccagcggcugaaggcgcccgcccagaugagcauccagcugaucaacaaggccgugaacgcccucaucaacgaccagcugaucaugaagaaccaccuccgcgacaucaugugcauccccuacugcaacuacuccaaguacugguaccugaaccacaccacgaccgggaagaccagccugcccaagugcuggcugguguccaacggcagcuaccucaacgagacccacuucuccgacgacaucgagcagcaggccgacaacaugaucacggagaugcugcagaaggaguacauggagcggcagggcaagaccccgcuggggcucgucgaccuguucguguucagcaccuccuucuaccugaucagcaucuuccugcaccucgugaagaucccgacccaccgccacaucgucggcaagcccugccccaagccccaccggcugaaccacauggggaucugcuccugcggccuguacaagcagccgggggugcccgugaaguggaagcgcugaggacuaguaauaaggaaacuguaugaaugucugugggcaggaagugaagagauccuucuguaaagguuuuuggaauuaugucugcugaauaauaaacuuuuuugaaauaauaaaucugguagaaaaaugagaucuaaaaaaaaaaaaaaaaaaaaaaaaaaaaaaaaaaaaaaaaaaaaaaaaaaaaaaaaaaaaaaaaugcaucccccccccccccccccccccccccccccccaaaggcucuuuucagagccaccagaauu

SEQ ID NO: 6747 - RNA, 1816 nt, Artificial Sequence
  mRNA product Design b-4 comprising derived and/or modified sequence from LASV(Josiah;Clade IV)__NP_694870__GPCstabilized (opt1)
gggagagucccgcagucggcguccagcggcucugcuuguucgugugugugucguugcaggccuuauucaagcuuaccaugggccagaucgugaccuucuuccaggaggucccccacgugaucgaggaggugaugaacaucguccugaucgcccucagcgugcuggccgugcugaaggggcucuacaacuucgcgaccugcggccuggucgggcuggugacguuccuccugcugugcggccgcuccugcaccaccagccucuacaaggggguguacgagcugcagacccuggagcucaacauggagacgcugaacaugaccaugccgcuguccugcaccaagaacaacagccaccacuacaucauggucggcaacgagaccggccucgagcugacgcugaccaacaccuccaucaucaaccacaaguucugcaaccucagcgacgcccacaagaagaaccuguacgaccacgcccugauguccaucaucagcaccuuccaccucuccauccccaacuucaaccaguacgaggccaugagcugcgacuucaacgggggcaagaucuccgugcaguacaaccugagccacuccuacgccggggacgcggccaaccacugcggcacgguggccaacgggguccugcagaccuucaugcggauggccuggggcggcagcuacaucgcgcucgacuccgggugcggcaacugggacugcaucaugaccagcuaccaguaccugaucauccagaacaccacgugggaggaccacugccaguucucccgccccagccccaucggguaccugggccuccugucccagcggacccgcgacaucuacaucagccggcgccggcgcggcaccuucaccuggacgcugagcgacuccgaggggaaggacaccccgggcggguacugccucacccgguggaugcugaucgaggccgagcugaagugcuucggcaacaccgccguggccaagugcaacgagaagcacgacgaggaguucugcgacaugcuccgccuguucgacuucaacaagcaggccauccagcggcugaaggcgcccgcccagaugagcauccagcucaucaacaaggccgugaacgcccugaucaacgaccagcugaucaugaagaaccaccuccgcgacaucaugugcauccccuacugcaacuacuccaaguacugguaccugaaccacacgaccaccgggcggaccagccugcccaagugcuggcucgucuccaacggcagcuaccugaacgagacgcacuucuccgacgacaucgagcagcaggccgacaacaugaucaccgagaugcugcagaaggaguacauggagcgccagggcaagaccccgcucgggcugguggaccuguucguguucagcaccuccuucuaccucaucagcaucuuccugcaccuggucaagauccccacgcaccggcacaucgugggcaaguccugccccaagccccaccgccugaaccacauggggaucugcagcugcggccucuacaagcagccgggggugcccgucaaguggaagcggugaggacuaguaauaaggaaacuguaugaaugucugugggcaggaagugaagagauccuucuguaaagguuuuuggaauuaugucugcugaauaauaaacuuuuuugaaauaauaaaucugguagaaaaaugagaucuaaaaaaaaaaaaaaaaaaaaaaaaaaaaaaaaaaaaaaaaaaaaaaaaaaaaaaaaaaaaaaaaugcaucccccccccccccccccccccccccccccccaaaggcucuuuucagagccaccagaauu

SEQ ID NO: 6748 - RNA, 1813 nt, Artificial Sequence
  mRNA product Design b-4 comprising derived and/or modified sequence from LASV(LP;Clade I)__AAF86701__GPCstabilized (opt1)
gggagagucccgcagucggcguccagcggcucugcuuguucgugugugugucguugcaggccuuauucaagcuuaccaugggccagaucaucaccuucuuccaggaggugccccacgucaucgaggaggugaugaacaucgugcugaucgcccucagccugcuggccauccucaaggggcuguacaacaucgcgaccugcggcaucaucgggcuggucgccuuccucuuccugugcggcaaguccugcagccugacgcucaagggcggguacgagcugcagacccuggagcucaacauggagacccugaacaugaccaugccgcuguccugcacgaagaacagcucccaccacuacauccgcgugggcaacgagaccgggcucgagcugacccugaccaacacgagcaucaucaaccacaaguucugcaaccucuccgacgcccacaagaagaaccuguacgaccacgcccugaugagcaucaucuccaccuuccaccucagcauccccaacuucaaccaguacgaggccauguccugcgacuucaacggcgggaagaucagcgugcaguacaaccugucccacagcuacgcgggcgacgccgccgagcacugcgggaccgucgccaacggcgugcugcagaccuucaugcggauggcguggggcgggcgcuacaucgcccucgacuccggcugcgggaacugggacugcaucaugacgagcuaccaguaccugaucauccagaacaccaccugggaggaccacugccaguucucccggcccagccccaucggcuaccugggccuccugucccagcgcacccgggacaucuacaucagccgccggcgccgggggacguucaccuggacccugagcgacuccgagggcaacgagacccccgggggcuacugccucacgcgcuggaugcugaucgaggccgagcugaagugcuucgggaacaccgccguggccaagugcaacgagaagcacgacgaggaguucugcgacaugcuccggcuguucgacuucaacaagcaggcgauccgccggcugaaggccccggcccagaugagcauccagcucaucaacaaggccgucaacgcccugaucaacgaccagcugaucaugaagaaccaccuccgcgacaucaugugcauccccuacugcaacuacuccaaguacugguaccugaaccacaccagcuccggccggaccagccugcccaagugcuggcucaucuccaacggcagcuaccugaacgagacgcaguucuccgacgacaucgagcagcaggcggacaacaugaucaccgagaugcugcagaaggaguacaucgagcgccaggggaagaccccgcucggccugguggacaucuucaucuucagcaccuccuucuaccugaucagcaucuuccuccaccugaucaagauccccacgcaccggcacaucguggggaagcccugccccaagccgcaccgccugaaccacaugggcgucugcuccugcgggcuguacaagcaccccggcgugcccaccaaguggaagcggugaggacuaguaauaaggaaacuguaugaaugucugugggcaggaagugaagagauccuucuguaaagguuuuuggaauuaugucugcugaauaauaaacuuuuuugaaauaauaaaucugguagaaaaaugagaucuaaaaaaaaaaaaaaaaaaaaaaaaaaaaaaaaaaaaaaaaaaaaaaaaaaaaaaaaaaaaaaaaugcaucccccccccccccccccccccccccccccccaaaggcucuuuucagagccaccagaauu

SEQ ID NO: 6749 - RNA, 1813 nt, Artificial Sequence
  mRNA product Design b-4 comprising derived and/or modified sequence from LASV(803213;Clade II)__AAF86703__GPCstabilized (opt1)
gggagagucccgcagucggcguccagcggcucugcuuguucgugugugugucguugcaggccuuauucaagcuuaccaugggccagaucaucaccuucuuccaggaggugccccacgucaucgaggaggugaugaacaucgugcugaucgcccucagccugcuggccauccucaaggggaucuacaacgucgcgaccugcggccuguucgggcugaucuccuuccuccugcugugcggccgcagcugcuccgugacguacaaggggguguacgagcuccagacccuggagcugaacauggccaaccucaacaugaccaugccgcugagcugcaccaagaacaacucccaccacuacaucauggucggcaacgagacgggccuggagcucacccugaccaacaccagcaucaucaaccacaaguucugcaaccuguccgacgcccacaagaagaaccucuacgaccacgcccugaugagcaucaucuccacguuccaccugagcauccccaacuucaaccaguacgaggccauguccugcgacuucaacgggggcaagaucagcgugcaguacaaccucucccacagcuucgcgguggacgccgccaaccacugcgggaccaucgccaacggcguccugcagaccuucaugcggauggcguggggcggguccuacaucgcccuggacagcggcugcgggaacugggacugcaucaugaccuccuaccaguaccucaucauccagaacacgaccugggaggaccacugccaguucagccgccccucccccaucggcuaccuggggcugcucagccagcggacccgcgacaucuacaucagccggcgccggcgcggcaccuucacguggacccuguccgacagcgagggcaacgaggcccccgggggcuacugccugacccgguggaugcucaucgaggccgagcugaagugcuucgggaacaccgccguggcgaagugcaacgagaagcacgacgaggaguucugcgacaugcugcgccucuucgacuucaacaagcaggccaucaagcggcugaagacgccggcccagauguccauccagcugaucaacaaggccgugaacgcccucaucaacgaccagcugaucaugaagaaccaccuccgcgacaucaugugcauccccuacugcaacuacagccgguacugguaccugaaccacaccgucaccggcaagaccucccugccccgcugcuggcuggugagcaacggguccuaccucaacgagacgcacuucagcgacgacaucgagcagcaggcggacaacaugaucaccgagaugcugcagaaggaguacauggaccggcagggcaagaccccgcugggccucguggaccuguucgucuucuccaccagcuucuaccugaucuccaucuuccuccaccuggugaagauccccacgcaccgccacaucguggggaagcccugccccaagccgcaccggcugaaccacaugggcaucugcagcugcgggcuguacaagcaccccggcguccccgugaaguggaagcgcugaggacuaguaauaaggaaacuguaugaaugucugugggcaggaagugaagagauccuucuguaaagguuuuuggaauuaugucugcugaauaauaaacuuuuuugaaauaauaaaucugguagaaaaaugagaucuaaaaaaaaaaaaaaaaaaaaaaaaaaaaaaaaaaaaaaaaaaaaaaaaaaaaaaaaaaaaaaaaugcaucccccccccccccccccccccccccccccccaaaggcucuuuucagagccaccagaauu

SEQ ID NO: 6750 - RNA, 1813 nt, Artificial Sequence
  mRNA product Design b-4 comprising derived and/or modified sequence from LASV(GA391;Clade III)__CAA36645__GPCstabilized (opt1)
gggagagucccgcagucggcguccagcggcucugcuuguucgugugugugucguugcaggccuuauucaagcuuaccaugggccagaucgugaccuucuuccaggaggucccccacgugaucgaggaggugaugaacaucguccugaucgcccucagcauccuggccauccugaaggggcucuacaacguggcgaccugcggccugaucgggcuggugacguuccuccugcuguccggccgcagcugcucccucaucuacaaggggaccuacgagcugcagacccuggagcucaacauggagacccugaacaugacgaugccgcugagcugcaccaagaacaacucccaccacuacauccgggucggcaacgagaccggccucgagcugacccugacgaacaccagcauccucaaccacaaguucugcaaccuguccgacgcccacaagcgcaaccuguacgaccacagccucauguccaucaucagcaccuuccaccuguccauccccaacuucaaccaguacgaggccaugagcugcgacuucaacgggggcaagaucaccgugcaguacaaccugucccacagcuucgccguggacgccgcggggcacugcggcacgcucgccaacgggguccugcagaccuucaugcggauggccuggggcggcuccuacaucgcccuggacagcgggugcggcaacugggacugcaucaugaccuccuaccaguaccucaucauccagaacaccacgugggacgaccacugccaguucagccgccccucccccaucggguaccugggccugcucagccagcggacccgcgacaucuacaucagccggcgccggcgcggcaccuucaccuggacgcuguccgacagcgaggggaacgagaccccgggcggguacugccugacccgguggaugcucaucgaggcggagcugaagugcuucggcaacaccgccguggccaagugcaacgagaagcacgacgaggaguucugcgacaugcugcgccucuucgacuucaacaagcaggccauccggcgccugaagacgcccgcccagauguccauccagcugaucaacaaggcggugaacgcccucaucaacgaccagcugaucaugaagaaccaccuccgggacaucaugugcauccccuacugcaacuacagccgcuacugguaccugaaccacaccuccaccgggaagaccagccugccccggugcuggcugaucuccaacggcagcuaccucaacgagacgaaguucuccgacgacaucgagcagcaggccgacaacaugaucaccgagaugcugcagaaggaguacaucgaccgccagggcaagaccccgcuggggcucgucgaccuguucguguucagcaccuccuucuaccugaucagcaucuuccugcaccucgugaagauccccacgcaccggcacaucgucggcaagcccugccccaagccgcaccgccugaaccacauggggaucugcuccugcggccuguacaagcagcccggggugcccgugcgguggaagcgcugaggacuaguaauaaggaaacuguaugaaugucugugggcaggaagugaagagauccuucuguaaagguuuuuggaauuaugucugcugaauaauaaacuuuuuugaaauaauaaaucugguagaaaaaugagaucuaaaaaaaaaaaaaaaaaaaaaaaaaaaaaaaaaaaaaaaaaaaaaaaaaaaaaaaaaaaaaaaaugcaucccccccccccccccccccccccccccccccaaaggcucuuuucagagccaccagaauu

SEQ ID NO: 6751 - RNA, 1816 nt, Artificial Sequence
  mRNA product Design b-4 comprising derived and/or modified sequence from LASV(AV;Clade V)__CCA30314__GPCstabilized (opt1)
gggagagucccgcagucggcguccagcggcucugcuuguucgugugugugucguugcaggccuuauucaagcuuaccaugggccagaucgugaccuucuuccaggaggucccccacgugaucgaggaggugaugaacaucguccugaucgcccucagcauccuggccgugcugaaggggcucuacaacaucgcgaccugcggccugaucgggcugaucacguuccuccugcugugcggccgcuccugcagcuccaaccucuacaaggggguguacgagcugcagagccuggaccucaacauggagacccugaacaugaccaugccgcuguccugcaccaagaacaacagccaccacuacauccgggucggcaacgacacgggccucgagcugacccugaccaacaccuccauccucaaccacaaguucugcaaccugagcgacgcccacaagaaggaccuguacgaccacgcccucauguccaucaucagcacguuccaccuguccauccccaacuucaaccaguacgaggccaugagcugcgacuucaacgggggcaagaucuccgugcaguacaaccugagccacuccuacgccaucgacgcggccaaccacugcgggaccguggccaacggcauccuccagaccuucaugcgcauggccuggggcgggagcuacaucgcgcuggacuccggcugcgggaacugggacugcaucaugaccagcuaccaguaccugaucauccagaacacgaccugggagaaccacugccaguucucccggcccagccccaucggcuaccucgggcugcugagccagcgcacccgggacaucuacaucucccgccggcgccggggcaccuucacguggacccucagcgacuccgagggcaacgccacccccgggggcuacugccugacccgcuggaugcugaucgaggccgagcucaagugcuucgggaacacggccgucgccaagugcaacgagaagcacgacgaggaguucugcgacaugcugcggcuguucgacuucaacaagcaggcgaucagccgccucaaguccccggcccagaugagcauccagcugaucaacaaggccgugaacgcccugaucaacgaccagcucaucaugaagaaccaccuccgggacaucaugugcauccccuacugcaacuacuccaaguacugguaccugaaccacaccaucaccggcaagaccagccugcccaagugcuggcugguguccaacgggagcuaccugaacgagacgcacuucuccgacgacaucgagcagcaggccgacaacaugaucaccgagaugcuccagaaggaguacauggagcgccagggcaagaccccgcugggccuggucgaccucuucguguucagcaccuccuucuaccugaucagcaucuuccugcggcuggugaagauccccacgcaccgccacaucgucgggaagcccugccccaagccgcaccggcucaaccacaugggcaucugcuccugcgggcuguacaagcagcccggcgugcccgugcgcuggaagcggugaggacuaguaauaaggaaacuguaugaaugucugugggcaggaagugaagagauccuucuguaaagguuuuuggaauuaugucugcugaauaauaaacuuuuuugaaauaauaaaucugguagaaaaaugagaucuaaaaaaaaaaaaaaaaaaaaaaaaaaaaaaaaaaaaaaaaaaaaaaaaaaaaaaaaaaaaaaaaugcaucccccccccccccccccccccccccccccccaaaggcucuuuucagagccaccagaauu

SEQ ID NO: 6752 - RNA, 1813 nt, Artificial Sequence
  mRNA product Design b-4 comprising derived and/or modified sequence from LASV(Togo/2016/7082;Clade VI)__AMR44577__GPCstabilized (opt1)
gggagagucccgcagucggcguccagcggcucugcuuguucgugugugugucguugcaggccuuauucaagcuuaccaugggccagaucaucaccuucuuccaggaggugccccacgucaucgaggaggugaugaacaucgugcugaucgcccucagccugcuggccauccucaagggggucuacaacguggcgaccugcggcaucaucgggcuggugacguuccuguuccucugcggccgcuccugcagccugaucuacaagggguccuacgagcugcagacccucgagcugaacauggagacccugaacaugaccaugccgcucagcugcacgaagaacuccagccaccacuacauccgggucggcaacgagaccggccuggagcugacccucaccaacacguccaucaucaaccacaaguucugcaaccugagcgacgcccacaagcgcaaccuguacgaccacgcccucauguccauccugagcaccuuccaccuguccauccccaacuucaaccaguacgaggccaugagcugcgacuucaacgggggcaagaucuccgugcaguacaaccucagccacgccuacgcgguggacgccgccgagcacugcgggaccgucgccaacggcgugcugcagaccuucaugcggauggcguggggcggguccuacaucgcccuggacagcggcugcgggaacugggacugcaucaugacguccuaccaguaccucaucauccagaacaccaccugggaggaccacugccaguucagccgccccucccccaucggcuaccuggggcugcucagccagcggacccgcgacaucuacaucagccggcgccggcgcggcacguucaccuggacccuguccgacagcgagggcaacgagacccccgggggcuacugccugacgcgguggaugcucaucgaggccgagcugaagugcuucgggaacaccgccguggccaagugcaacgagaagcacgacgaggaguucugcgacaugcugcgccucuucgacuucaacaagcaggcgauccagcggcugaaguccccggcccagaugagcauccagcugaucaacaaggccgucaacgcccucaucaacgaccagcugaucaugaagaaccaccuccgcgacaugaugugcauccccuacugcaacuacuccaaguacugguaccugaaccacaccagcuccggccggaccagccugcccaagugcuggcugguguccaacgggagcuaccucaacgagacgcacuucuccgacgacaucgagcagcaggccgacaacaugaucaccgagaugcugcagaaggaguacaucgaccgccagggcaagaccccgcugggccucguggaccuguucgucuucagcaccuccuucuaccugaucagcaucuuccuccaccugaucaagauccccacgcaccggcacaucguggggaagcccugccccaagccgcaccgccugaaccacaugggcaucugcuccugcgggcuguacaagcagcccggcgugcccacccgguggaagcgcugaggacuaguaauaaggaaacuguaugaaugucugugggcaggaagugaagagauccuucuguaaagguuuuuggaauuaugucugcugaauaauaaacuuuuuugaaauaauaaaucugguagaaaaaugagaucuaaaaaaaaaaaaaaaaaaaaaaaaaaaaaaaaaaaaaaaaaaaaaaaaaaaaaaaaaaaaaaaaugcaucccccccccccccccccccccccccccccccaaaggcucuuuucagagccaccagaauu

SEQ ID NO: 6753 - RNA, 1813 nt, Artificial Sequence
  mRNA product Design b-4 comprising derived and/or modified sequence from LASV(KAK-428;Clade n.d. (VII))__ANH09740__GPCstabilized (opt1)
gggagagucccgcagucggcguccagcggcucugcuuguucgugugugugucguugcaggccuuauucaagcuuaccaugggccagaucgugaccuucuuccaggaggucccccacgugaucgaggaggugaugaacaucguccugaucgcccucagccugcuggccauccucaaggggcuguacaacuucgcgaccugcggcgugaucgggcugaucacguuccuccugcugugcggccgcuccugcagcgccaccuacaaggggcaguacgagcuccagacccuggagcugaacauggagucccucaacaugaccaugccgcugagcugcacgaagaacaacucccaccacuacauccgggccggcaacaacaccggccuggagcucacccugaccaacacgagcaucaucucccacaaguucugcaaccugagcgacgcccacaagaagaaccucuacgaccacacccugauguccaucaucaccaccuuccaccugagcauccccaacuucaaccaguacgaggccauguccugcgacuucaacgggggcaagaucagcauccaguacaaccucucccacagcuacgcgggggacgccgcccagcacugcggcacgguggccaacgggguccugcagaccuucaugcgcauggcguggggcggcuccuaccuggcccucgacagcgggugccggggcugggacugcaucaucuccagcuaccaguaccugaucauccagaacaccaccugggacgaccacugccaguucucccgccccagccccaucggguaccugggcuucgugagccagaagacgcgggacaucuacaucucccgccggcgccggggcaccuucaccuggacccucagcgacuccgaggggcacgacaugccgggcggguacugccugacgcgcuggaugcugaucgaggccgaccucaagugcuucggcaacaccgccguggccaagugcaacgagaagcacgacgaggaguucugcgacauguggcggcuguucgacuucaacaagcaggcgauccagcgccugaaggcccccgcccagaugaacauccagcucaucaacaaggccgucaacgcccugaucaacgaccagcugaugaugaagaaccaccuccgggacaucaugugcauccccuacugcaacuacagcaaguucugguaccugaacaacaccaccacggggcgcaccucccugccccggugcuggcucaucagcaacggcuccuaccugaacgagacccacuucagcgacgacaucgagcagcaggcggacaacaugaucaccgagaugcugcagaaggaguacauggaccgccagggcaagacgccgcucgggcugguggaccuguucguguucuccaccagcuucuaccucaucaccaucuuccugcaccuggucaagauccccacccaccggcacaucgugggcaagcccugccccaagccgcaccgccucaaccacauggggaucugcuccugcggccuguacaagcagcccggggugcccguccgguggaagcgcugaggacuaguaauaaggaaacuguaugaaugucugugggcaggaagugaagagauccuucuguaaagguuuuuggaauuaugucugcugaauaauaaacuuuuuugaaauaauaaaucugguagaaaaaugagaucuaaaaaaaaaaaaaaaaaaaaaaaaaaaaaaaaaaaaaaaaaaaaaaaaaaaaaaaaaaaaaaaaugcaucccccccccccccccccccccccccccccccaaaggcucuuuucagagccaccagaauu

SEQ ID NO: 6754 - RNA, 1813 nt, Artificial Sequence; identical to SEQ ID NO: 6748
  mRNA product Design b-4 comprising derived and/or modified sequence from LASV(Pinneo-NIG-1969;Clade I)__AIT17836__GPCstabilized (opt1)

SEQ ID NO: 6755 - RNA, 1813 nt, Artificial Sequence
  mRNA product Design b-4 comprising derived and/or modified sequence from LASV(ISTH0009-NIG-2011;Clade II)__AIT17404__GPCstabilized (opt1)
gggagagucccgcagucggcguccagcggcucugcuuguucgugugugugucguugcaggccuuauucaagcuuaccaugggccagaucaucaccuucuuccaggaggugccccacgucaucgaggaggugaugaacaucgugcugaucgcccucagccugcuggccauccucaaggggaucuacaacgucgcgaccugcggccuguucgggcugguguccuuccuccugcugugcggccgcagcugcuccacgaccuacaaggggguguacgagcuccagacccuggagcuggacauggccagccucaacaugaccaugccgcuguccugcacgaagaacaacagccaccacuacaucauggucggcaacgagaccggccuggagcucacccugaccaacacguccaucaucaaccacaaguucugcaaccugagcgacgcccacaagaagaaccucuacgaccacgcccugauguccaucaucagcaccuuccaccuguccauccccaacuucaaccaguacgaggccaugagcugcgacuucaacgggggcaagaucuccgugcaguacaaccucagccacgcguacgccguggacgccgccaaccacugcgggaccaucgcgaacggcguccugcagaccuucaugcggauggccuggggcggguccuacaucgcccuggacagcggcugcggguccugggacugcaucaugacgagcuaccaguaccucaucauccagaacaccaccugggaggaccacugccaguucucccgccccagccccaucggcuaccuggggcugcucagccagcggacccgcgacaucuacaucucccggcgccggcgcggcacguucaccuggacccugagcgacuccgagggcaacgagacccccgggggcuacugccugacgcgguggaugcucaucgaggccgagcugaagugcuucgggaacaccgccguggcgaagugcaacgagaagcacgacgaggaguucugcgacaugcugcgccucuucgacuucaacaagcaggccauccggcgccugaagaccccggcccagaugagcauccagcugaucaacaaggccgugaacgcccucaucaacgaccagcugaucaugaagaaccaccuccgggacaucaugugcauccccuacugcaacuacuccaaguacugguaccugaaccacaccgucacgggcaagaccagccugccccgcugcuggcugguguccaacgggagcuaccucaacgagacccacuucuccgacgacaucgagcagcaggcggacaacaugaucaccgagcugcugcagaaggaguacauggaccggcagggcaagacgccgcucggccugguggaccuguucgucuucagcaccuccuucuaccucaucagcaucuuccugcaccugaucaagauccccacccaccgccacaucaccgggaagcccugccccaagccgcaccggcugaaccacaugggcaucugcuccugcgggcucuacaagcaccccggcgugcccgugaaguggaagcgcugaggacuaguaauaaggaaacuguaugaaugucugugggcaggaagugaagagauccuucuguaaagguuuuuggaauuaugucugcugaauaauaaacuuuuuugaaauaauaaaucugguagaaaaaugagaucuaaaaaaaaaaaaaaaaaaaaaaaaaaaaaaaaaaaaaaaaaaaaaaaaaaaaaaaaaaaaaaaaugcaucccccccccccccccccccccccccccccccaaaggcucuuuucagagccaccagaauu

SEQ ID NO: 6756 - RNA, 1813 nt, Artificial Sequence
  mRNA product Design b-4 comprising derived and/or modified sequence from LASV(ISTH2010-NIG-2012;Clade II)__AIT17482__GPCstabilized (opt1)
gggagagucccgcagucggcguccagcggcucugcuuguucgugugugugucguugcaggccuuauucaagcuuaccaugggccagaucaucaccuucuuccaggaggugccccacgucaucgaggaggugaugaacaucgugcugaucgcccucagccugcuggccauccucaaggggaucuacaacgucgcgaccugcggccuguucgggcugguguccuuccuccugcugugcggccgcagcugcuccacgaccuacaaggggguguacgagcuccagacccuggagcuggacauggccagccucaacaugaccaugccgcuguccugcacgaagaacaacagccaccacuacaucauggucggcaacgagaccggccuggagcucacccugaccaacacguccaucaucaaccacaaguucugcaaccugagcgacgcccacaagaagaaccucuacgaccacgcccugauguccaucaucagcaccuuccaccuguccauccccaacuucaaccaguacgaggccaugagcugcgacuucaacgggggcaagaucuccgugcaguacaaccucagccacgcguacgccguggacgccgccaaccacugcgggaccaucgcgaacggcguccugcagaccuucaugcggauggccuggggcggguccuacaucgcccuggacagcggcugcggguccugggacugcaucaugacgagcuaccaguaccucaucauccagaacaucaccugggaggaccacugccaguucucccgccccagccccaucggcuaccuggggcugcucagccagcggacccgcgacaucuacaucucccggcgccggcgcggcaccuucacguggacccugagcgacuccgagggcaacgagacccccgggggcuacugccugacccgguggaugcucaucgaggccgagcugaagugcuucgggaacacggccguggcgaagugcaacgagaagcacgacgaggaguucugcgacaugcugcgccucuucgacuucaacaagcaggccauccggcgccugaagaccccggcccagaugagcauccagcugaucaacaaggccgugaacgcccucaucaacgaccagcugaucaugaagaaccaccuccgggacaucaugugcauccccuacugcaacuacuccaaguacugguaccugaaccacaccgucaccggcaagacgagccugccccgcugcuggcugguguccaacgggagcuaccucaacgagacccacuucuccgacgacaucgagcagcaggcggacaacaugaucaccgagcugcugcagaaggaguacaucgaccggcagggcaagaccccgcucggccugguggaccuguucgucuucagcacguccuucuaccucaucagcaucuuccugcaccuggugaagauccccacccaccgccacguggucgggaagcccugccccaagccgcaccggcugaaccacaugggcaucugcuccugcgggcucuacaagcaccccggcgugcccgugaaguggaagcgcugaggacuaguaauaaggaaacuguaugaaugucugugggcaggaagugaagagauccuucuguaaagguuuuuggaauuaugucugcugaauaauaaacuuuuuugaaauaauaaaucugguagaaaaaugagaucuaaaaaaaaaaaaaaaaaaaaaaaaaaaaaaaaaaaaaaaaaaaaaaaaaaaaaaaaaaaaaaaaugcaucccccccccccccccccccccccccccccccaaaggcucuuuucagagccaccagaauu

SEQ ID NO: 6757 - RNA, 1813 nt, Artificial Sequence
  mRNA product Design b-4 comprising derived and/or modified sequence from LASV(Lassa virus/H.sapiens-wt/NGA/2015/ISTH_0543;Clade II)__AVO03639__GPCstabilized (opt1)
gggagagucccgcagucggcguccagcggcucugcuuguucgugugugugucguugcaggccuuauucaagcuuaccaugggccagaucaucaccuucuuccaggaggugccccacgucaucgaggaggugaugaacaucgugcugaucgcccucagccugcuggccauccucaaggggaucuacaacgucgcgaccugcggccuguucgggcugguguccuuccuccugcugugcggccgcagcugcuccacgaccuacaaggggguguacgagcuccagacccuggagcuggacauggccaaccucaacaugaccaugccgcugagcugcacgaagaacaacucccaccacuacaucauggucggcaacgagaccggccuggagcucacccugaccaacacgagcaucaucaaccacaaguucugcaaccuguccgacgcccacaagaagaaccucuacgaccacgcccugaugagcaucaucuccaccuuccaccugagcauccccaacuucaaccaguacgaggccauguccugcgacuucaacgggggcaagaucagcgugcaguacaaccucucccacaccuacgcgguggacgccgccaaccacugcgggaccaucgccaacggcguccugcagacguucaugcggauggcguggggcgggagcuacaucgcccuggacuccggcugcgggagcugggacugcaucaugaccuccuaccaguaccucgugauccagaacaccaccugggaggaccacugccaguucagccgccccucccccaucggcuaccuggggcugcucagccagcggacgcgcgacaucuacaucagccggcgccggcgcggcaccuucaccuggacccuguccgacagcgagggcaacgagacgcccgggggcuacugccugacccgguggaugcucaucgaggccgagcugaagugcuucgggaacaccgccguggccaagugcaacgagaagcacgacgaggaguucugcgacaugcugcgccucuucgacuucaacaagcaggcgauccggcgccugaagaccccggcccagauguccauccagcugaucaacaaggccgucaacgcccucaucaacgaccagcugaucaugaagaaccaccuccgggacaucaugugcauccccuacugcaacuacagcaaguacugguaccugaaccacacggugaccggcaagaccucccugccccgcugcuggcuggugagcaacggguccuaccucaacgagacccacuucagcgacgacaucgagcagcaggccgacaacaugaucacggagcugcugcagaaggaguacaucgaccggcagggcaagaccccgcucggccuggucgaccuguucguguucuccaccagcuucuaccucaucuccaucuuccugcaccuggugaagauccccacccaccgccacaucacggggaagcccugccccaagccgcaccggcugaaccacaugggcaucugcagcugcgggcucuacaagcaccccggcguccccgugaaguggaagcgcugaggacuaguaauaaggaaacuguaugaaugucugugggcaggaagugaagagauccuucuguaaagguuuuuggaauuaugucugcugaauaauaaacuuuuuugaaauaauaaaucugguagaaaaaugagaucuaaaaaaaaaaaaaaaaaaaaaaaaaaaaaaaaaaaaaaaaaaaaaaaaaaaaaaaaaaaaaaaaugcaucccccccccccccccccccccccccccccccaaaggcucuuuucagagccaccagaauu

SEQ ID NO: 6758 - RNA, 1813 nt, Artificial Sequence
  mRNA product Design b-4 comprising derived and/or modified sequence from LASV(Lassa virus/H.sapiens-wt/NGA/2016/ISTH_0009;Clade II)__AVO03571__GPCstabilized (opt1)
gggagagucccgcagucggcguccagcggcucugcuuguucgugugugugucguugcaggccuuauucaagcuuaccaugggccagaucaucaccuucuuccaggaggugccccacgucaucgaggaggugaugaacaucgugcugaucgcccucagccugcuggccauccucaaggggaucuacaacgucgcgaccugcggccugcuggggcucguguccuuccugcugcucugcggccgcagcugcuccacgaccuacaaggggguguacgagcugcagacccuggagcucgacauggccagccugaacaugaccaugccgcuguccugcacgaagaacaacagccaccacuacaucauggucggcaacgagaccggccucgagcugacccugaccaacacguccaucaucaaccacaaguucugcaaccucagcgacgcccacaagaagaaccuguacgaccacgcccugauguccaucaucagcaccuuccaccucuccauccccaacuucaaccaguacgaggccaugagcugcgacuucaacgggggccggaucuccgugcaguacaaccugagccacuccuacgcgguggacgccgccaaccacugcgggaccaucgccaacggcguccugcagaccuucaugcgcauggcguggggcgggagcuacaucgcccucgacuccggcugcgggagcugggacugcaucaugacguccuaccaguaccugaucauccagaacaccaccugggaggaccacugccaguucagccggcccagccccaucggcuaccuggggcuccugucccagcgcacccgggacaucuacaucagccgccggcgccggggcacguucaccuggacccuguccgacagcgagggcaacgagacccccgggggcuacugccucacgcgcuggaugcugaucgaggccgagcugaagugcuucgggaacaccgccguggccaagugcaacgagaagcacgacgaggaguucugcgacaugcuccggcuguucgacuucaacaagcaggcgauccgccggcugaagaccccggcccagauguccauccagcucaucaacaaggccgugaacgcccugaucaacgaccagcugaucaugaagaaccaccuccgcgacaucaugugcauccccuacugcaacuacagcaaguacugguaccugaaccacaccgucacgggcaagaccucccugccccggugcuggcucgugagcaacggguccuaccugaacgagacccacuucagcgacgacaucgagcagcaggccgacaacaugaucaccgagcugcuccagaaggaguacaucgaccgccagggcaagacgccgcugggccugguggaccucuucgucuucuccaccagcuucuaccugaucuccaucuuccugcaccuggugaagauccccacccaccggcacaucaccgggaagcccugccccaagccgcaccgccucaaccacaugggcaucugcagcugcgggcuguacaaccaccccggcgugcccgucaaguggaagcggugaggacuaguaauaaggaaacuguaugaaugucugugggcaggaagugaagagauccuucuguaaagguuuuuggaauuaugucugcugaauaauaaacuuuuuugaaauaauaaaucugguagaaaaaugagaucuaaaaaaaaaaaaaaaaaaaaaaaaaaaaaaaaaaaaaaaaaaaaaaaaaaaaaaaaaaaaaaaaugcaucccccccccccccccccccccccccccccccaaaggcucuuuucagagccaccagaauu

SEQ ID NO: 6759 - RNA, 1813 nt, Artificial Sequence
  mRNA product Design b-4 comprising derived and/or modified sequence from LASV(Lassa virus/H.sapiens-wt/NGA/2016/ISTH_0017;Clade II)__AVO03567__GPCstabilized (opt1)
gggagagucccgcagucggcguccagcggcucugcuuguucgugugugugucguugcaggccuuauucaagcuuaccaugggccagaucaucaccuucuuccaggaggugccccacgucaucgaggaggugaugaacaucgugcugaucgcccucagccugcuggccauccucaaggggaucuacaacgucgcgaccugcggccuguucgggcugguguccuuccuccugcugugcggccgcagcugcuccacgaccuacaaggggguguacgagcuccagacccuggagcuggacauggccagccucaacaugaccaugccgcuguccugcacgaagaacaacagccaccacuacaucauggucggcaacgagaccggccuggagcucacccugaccaacacguccaucaucaaccacaaguucugcaaccugagcgacgcccacaagaagaaccucuacgaccacgcccugauguccaucaucagcaccuuccaccuguccauccccaacuucaaccaguacgaggccaugagcugcgacuucaacgggggcaagaucuccgugcaguacaaccucagccacaccuacgcgaucgacgccgccaaccacugcgggaccaucgccaacggcgugcugcagacguucaugcggauggcguggggcggguccuacaucgcccuggacagcggcugcggguccugggacugcaucaugaccagcuaccaguaccucaucauccagaacaccaccugggaggaccacugccaguucucccgccccagccccaucggcuaccuggggcugcucagccagcggacgcgcgacaucuacaucucccggcgccggcgcggcaccuucaccuggacccugagcgacuccgagggcaacgagacgcccgggggcuacugccugacccgguggaugcucaucgaggccgagcugaagugcuucgggaacaccgccgucgccaagugcaacgagaagcacgacgaggaguucugcgacaugcugcgccucuucgacuucaacaagcaggcgauccggcgccugaagaccccggcccagaugagcauccagcugaucaacaaggccgugaacgcccucaucaacgaccagcugaucaugaagaaccaccuccgggacaucaugugcauccccuacugcaacuacuccaaguacugguaccugaaccacacggugaccggcaagaccagccugccccgcugcuggcuggucuccaacgggagcuaccucaacgagacccacuucuccgacgacaucgagcagcaggccgacaacaugaucacggagcugcugcagaaggaguacauggaccggcagggcaagaccccgcucggccugguggaccuguucguguucagcaccuccuucuaccucaucagcaucuuccugcaccugguccgcauccccacccaccggcacgugaucgggaagcccugccccaagccgcaccgccugaaccacaugggcaucugcuccugcgggcucuacaagcaccccggcgugcccgucaaguggaagcggugaggacuaguaauaaggaaacuguaugaaugucugugggcaggaagugaagagauccuucuguaaagguuuuuggaauuaugucugcugaauaauaaacuuuuuugaaauaauaaaucugguagaaaaaugagaucuaaaaaaaaaaaaaaaaaaaaaaaaaaaaaaaaaaaaaaaaaaaaaaaaaaaaaaaaaaaaaaaaugcaucccccccccccccccccccccccccccccccaaaggcucuuuucagagccaccagaauu

SEQ ID NO: 6760 - RNA, 1813 nt, Artificial Sequence
  mRNA product Design b-4 comprising derived and/or modified sequence from LASV(Lassa virus/H.sapiens-wt/NGA/2018/ISTH_0959;Clade II)__AVV65099__GPCstabilized (opt1)
gggagagucccgcagucggcguccagcggcucugcuuguucgugugugugucguugcaggccuuauucaagcuuaccaugggccagaucaucaccuucuuccaggaggugccccacgucaucgaggaggugaugaacaucgugcugaucgcccucagccugcuggccauccucaaggggaucuacaacgucgugaccugcggccuguucgggcugguguccuuccuccugcugugcggccgcagcugcuccacgaccuacaagggggucuacgagcuccagacccuggagcuggacauggcgagccucaacaugaccaugccgcuguccugcacgaagaacaacagccaccacuacaucauggugggcaacgagaccggccuggagcucacccugaccaacacguccaucaucaaccacaaguucugcaaccugagcgacgcccacaagaagaaccucuacgaccacgcccugauguccaucaucagcaccuuccaccuguccauccccaacuucaaccaguacgaggccaugagcugcgacuucaacgggggcaagaucuccgugcaguacaaccucagccacgccuacgcgaucgacgccgccaaccacugcgggaccaucgccaacggcguccugcagaccuucaugcggauggcguggggcggguccuacaucgcccuggacagcggcugcggguccugggacugcaucaugacgagcuaccaguaccucaucauccagaacaccaccugggaggaccacugccaguucucccgccccagccccaucggcuaccuggggcugcucagccagcggacccgcgacaucuacaucucccggcgccggcgcggcacguucaccuggacccugagcgacuccgagggcaacgagacccccgggggcuacugccugacgcgguggaugcucaucgaggccgagcugaagugcuucgggaacaccgccguggccaagugcaacgagaagcacgacgaggaguucugcgacaugcugcgccucuucgacuucaacaagcaggcgauccggcgccugaagaccccggcccagaugagcauccagcugaucaacaaggccgugaacgcccucaucaacgaccagcugaucaugaagaaccaccuccgggacaucaugugcauccccuacugcaacuacuccaaguacugguaccugaaccacaccgucacgggcaagaccagccugccccgcugcuggcugguguccaacgggagcuaccucaacgagacccacuucuccgacgacaucgagcagcaggccgacaacaugaucaccgagcugcugcagaaggaguacaucgaccggcagggcaagacgccgcucggccugguggaccuguucgucuucagcaccuccuucuaccucaucagcaucuuccugcaccuggugaagauccccacccaccgccacgugaucgggaagcccugccccaagccgcaccggcugaaccacaugggcaucugcuccugcgggcucuacaagcaccccggcguccccgugaaguggaagcgcugaggacuaguaauaaggaaacuguaugaaugucugugggcaggaagugaagagauccuucuguaaagguuuuuggaauuaugucugcugaauaauaaacuuuuuugaaauaauaaaucugguagaaaaaugagaucuaaaaaaaaaaaaaaaaaaaaaaaaaaaaaaaaaaaaaaaaaaaaaaaaaaaaaaaaaaaaaaaaugcaucccccccccccccccccccccccccccccccaaaggcucuuuucagagccaccagaauu

SEQ ID NO: 6761 - RNA, 1813 nt, Artificial Sequence
  mRNA product Design b-4 comprising derived and/or modified sequence from LASV(LASV003-NIG-2008;Clade II)__AIT17580__GPCstabilized (opt1)
gggagagucccgcagucggcguccagcggcucugcuuguucgugugugugucguugcaggccuuauucaagcuuaccaugggccagaucaucaccuucuuccaggaggugccccacgucaucgaggaggugaugaacaucgugcugaucgcccucagccugcuggccauccucaaggggaucuacaacgucgcgaccugcggccuguucgggcugguguccuuccuccugcugugcggccgcagcugcuccacgaccuacaaggggguguacgagcuccagacccuggagcuggacauggccagccucaacaugaccaugccgcuguccugcacgaagaacaacagccaccacuacaucauggucggcaacgagaccggccuggagcucacccugaccaacacguccaucaucaaccacaaguucugcaaccugagcgacgcccacaagaagaaccucuacgaccacgcccugauguccaucaucagcaccuuccaccuguccauccccaacuucaaccaguacgaggccaugagcugcgacuucaacgggggcaagaucuccgugcaguacaaccucagccacaccuacgcgguggacgccgccaaccacugcgggaccaucgccaacggcguccugcagacguucaugcggauggcguggggcggguccuacaucgcccuggacagcggcugcggguccugggacugcaucaugaccagcuaccaguaccucaucauccagaacaccaccugggaggaccacugccaguucucccgccccagccccaucggcuaccuggggcugcucagccagcggacgcgcgacaucuacaucucccggcgccggcgcggcaccuucaccuggacccugagcgacuccgagagcaacgagacgccgggcggguacugccugacccgguggaugcucaucgaggccgagcugaagugcuucggcaacaccgccguggccaagugcaacgagaagcacgacgaggaguucugcgacaugcugcgccucuucgacuucaacaagcaggcgauccggcgccugaaggcccccgcccagauguccauccagcugaucaacaaggccgugaacgcccucaucaacgaccagcugaucaugaagaaccaccuccgggacaucaugugcauccccuacugcaacuacagcaaguacugguaccugaaccacaccgucacggggcgcaccucccugccccggugcuggcuggugagcaacggcuccuaccucaacgagacccacuucagcgacgacaucgagcagcaggcggacaacaugaucaccgagcugcugcagaaggaguacauggaccgccaggggaagacgccgcucggccugguggaccuguucgucuucuccaccagcuucuaccucaucuccaucuuccugcaccuggugaagauccccacccaccggcacgugaucggcaagcccugccccaagccgcaccgccugaaccacauggggaucugcagcugcggccucuacaagcaccccgggguccccgugaaguggaagcggugaggacuaguaauaaggaaacuguaugaaugucugugggcaggaagugaagagauccuucuguaaagguuuuuggaauuaugucugcugaauaauaaacuuuuuugaaauaauaaaucugguagaaaaaugagaucuaaaaaaaaaaaaaaaaaaaaaaaaaaaaaaaaaaaaaaaaaaaaaaaaaaaaaaaaaaaaaaaaugcaucccccccccccccccccccccccccccccccaaaggcucuuuucagagccaccagaauu

SEQ ID NO: 6762 - RNA, 1813 nt, Artificial Sequence
  mRNA product Design b-4 comprising derived and/or modified sequence from LASV(LASV035-NIG-2009;Clade II)__AIT17588__GPCstabilized (opt1)
gggagagucccgcagucggcguccagcggcucugcuuguucgugugugugucguugcaggccuuauucaagcuuaccaugggccagaucaucaccuucuuccaggaggugccccacgucaucgaggaggugaugaacaucgugcugaucgcccucagccugcuggccauccucaaggggaucuacaacgucgcgaccugcggccuguucgggcugguguccuuccuccugcugugcggccgcagcugcuccacgaccuacaaggggguguacgagcuccagacccuggagcuggacauggccagccucaacaugaccaugccgcuguccugcacgaagaacaacagccaccacuacaucauggucggcaacgagaccggccuggagcucacccugaccaacacguccaucaucaaccacaaguucugcaaccugagcgacgcccacaagaagaaccucuacgaccacgcccugauguccaucaucagcaccuuccaccuguccauccccaacuucaaccaguacgaggccaugagcugcgacuucaacgggggcaagaucuccgugcaguacaaccucagccacgcguacgccguggacgccgccaaccacugcgggaccaucgcgaacggcguccugcagaccuucaugcggauggccuggggcggguccuacaucgcccuggacagcggcugcggguccugggacugcaucaugacgagcuaccaguaccucaucauccagaacaccaccugggaggaccacugccaguucucccgccccagccccaucggcuaccuggggcugcucagccagcggacccgcgacaucuacaucucccggcgccggcgcggcacguucaccuggacccugagcgacuccgagggcaacgagacccccgggggcuacugccugacgcgguggaugcucaucgaggccgagcugaagugcuucgggaacaccgccguggcgaagugcaacgagaagcacgacgaggaguucugcgacaugcugcgccucuucgacuucaacaagcaggccauccggcgccugaaggccccggcccagaugagcauccagcugaucaacaaggccgugaacgcgcucaucaacgaccagcugaucaugaagaaccaccuccgggacaucaugugcauccccuacugcaacuacuccaaguacugguaccugaaccacaccgucaccggcaagacgagccugccccgcugcuggcugguguccaacgggagcuaccucaacgagacccacuucuccgacgacaucgagcagcaggccgacaacaugaucaccgagcugcugcagaaggaguacaucgaccggcagggcaagaccccgcucggccugguggaccuguucgucuucagcacguccuucuaccucaucagcaucuuccugcaccuggugaagauccccacccaccgccacgugaucgggaagcccugccccaagccgcaccggcugaaccacaugggcaucugcuccugcgggcucuacaagcaccccggcguccccgugaaguggaagcgcugaggacuaguaauaaggaaacuguaugaaugucugugggcaggaagugaagagauccuucuguaaagguuuuuggaauuaugucugcugaauaauaaacuuuuuugaaauaauaaaucugguagaaaaaugagaucuaaaaaaaaaaaaaaaaaaaaaaaaaaaaaaaaaaaaaaaaaaaaaaaaaaaaaaaaaaaaaaaaugcaucccccccccccccccccccccccccccccccaaaggcucuuuucagagccaccagaauu

SEQ ID NO: 6763 - RNA, 1813 nt, Artificial Sequence
  mRNA product Design b-4 comprising derived and/or modified sequence from LASV(LASV1000-NIG-2009;Clade II)__AIT17782__GPCstabilized (opt1)
gggagagucccgcagucggcguccagcggcucugcuuguucgugugugugucguugcaggccuuauucaagcuuaccaugggccagaucaucaccuucuuccaggaggugccccacgucaucgaggaggugaugaacaucgugcugaucgcccucagccugcuggccauccucaaggggaucuacaacgucgcgaccugcggccuguucgggcugguguccuuccuccugcugugcggccgcagcugcuccacgaccuacaaggggguguacgagcuccagacccuggagcuggacauggccagccucaacaugaccaugccgcuguccugcacgaagaacaacagccaccacuacaucauggucggcaacgagaccggccuggagcucacccugaccaacacguccaucaucaaccacaaguucugcaaccugagcgacgcccacaagaagaaccucuacgaccacgcccugauguccaucaucagcaccuuccaccuguccauccccaacuucaaccaguacgaggccaugagcugcgacuucaacgggggcaagaucuccgugcaguacaaccucagccacaccuacgcgguggacgccgccaaccacugcgggaccaucgccaacggcguccugcagacguucaugcggauggcguggggcggguccuacaucgcccuggacagcggcugcggguccugggacugcaucaugaccagcuaccaguaccucaucauccagaacaccaccugggaggaccacugccaguucucccgccccagccccaucggcuaccuggggcugcucagccagcggacgcgcgacaucuacaucucccggcgccggcgcggcaccuucaccuggacccugagcgacuccgagggcaacgagacgcccgggggcuacugccugacccgguggaugcucaucgaggccgagcugaagugcuucgggaacaccgccguggccaagugcaacgagaagcacgacgaggaguucugcgacaugcugcgccucuucgacuucaacaagcaggcgaucaagcggcugaagaccccggcccagaugagcauccagcugaucaacaaggccgugaacgcccucaucaacgaccagcugaucaugaagaaccaccuccgcgacaucaugugcauccccuacugcaacuacuccaaguacugguaccugaaccacacggucaccggcaagaccagccugccccggugcuggcugguguccaacgggagcuaccucaacgagacccacuucuccgacgacaucgagcagcaggccgacaacaugaucacggagcugcugcagaaggaguacaucgaccgccagggcaagaccccgcucggccugguggaccuguucgucuucagcaccuccuucuaccucaucagcaucuuccugcaccuggugaagauccccacccaccggcacguggucgggaagcccugccccaagccgcaccgccugaaccacaugggcaucugcuccugcgggcucuacaagcaccccggcgugcccgugaaguggaagcggugaggacuaguaauaaggaaacuguaugaaugucugugggcaggaagugaagagauccuucuguaaagguuuuuggaauuaugucugcugaauaauaaacuuuuuugaaauaauaaaucugguagaaaaaugagaucuaaaaaaaaaaaaaaaaaaaaaaaaaaaaaaaaaaaaaaaaaaaaaaaaaaaaaaaaaaaaaaaaugcaucccccccccccccccccccccccccccccccaaaggcucuuuucagagccaccagaauu

SEQ ID NO: 6764 - RNA, 1813 nt, Artificial Sequence
  mRNA product Design b-4 comprising derived and/or modified sequence from LASV(LASV221-NIG-2010;Clade II)__AIT17624__GPCstabilized (opt1)
gggagagucccgcagucggcguccagcggcucugcuuguucgugugugugucguugcaggccuuauucaagcuuaccaugggccagaucaucaccuucuuccaggaggugccccacgucaucgaggaggugaugaacaucgugcugaucgcccucagccugcuggccauccucaaggggaucuacaacgucgcgaccugcggccuguucgggcugguguccuuccuccugcugugcggccgcagcugcuccacgaccuacaaggggguguacgagcuccagacccuggagcuggacauggccagccucaacaugaccaugccgcuguccugcacgaagaacaacagccaccacuacaucauggucggcaacgagaccggccuggagcucacccugaccaacacguccaucaucaaccacaaguucugcaaccugagcgacgcccacaagaagaaccucuacgaccacgcccugauguccaucaucagcaccuuccaccuguccauccccaacuucaaccaguacgaggccaugagcugcgacuucaacgggggcaagaucuccgugcaguacaaccucagccacaccuacgcgaucgacgccgccaaccacugcgggaccaucgccaacggcgugcugcagacguucaugcggauggcguggggcggguccuacaucgcccuggacagcggcugcggguccugggacugcaucaugaccagcuaccaguaccucaucauccagaacaccaccugggaggaccacugccaguucucccgccccagccccaucggcuaccuggggcugcucagccagcggacgcgcgacaucuacaucucccggcgccggcgcggcaccuucaccuggacccugagcgacuccgagggcaacgagacgcccgggggcuacugccugacccgguggaugcucaucgaggccgagcugaagugcuucgggaacaccgccgucgccaagugcaacgagaagcacgacgaggaguucugcgacaugcugcgccucuucgacuucaacaagcaggcgauccggcgccugaagaccccggcccagaugagcauccagcugaucaacaaggccgugaacgcccucaucaacgaccagcugaucaugaagaaccaccuccgggacaucaugugcauccccuacugcaacuacuccaaguacugguaccugaaccacacggugaccggcaagaccagccugccccgcugcuggcuggucuccaacgggagcuaccucaacgagacccacuucuccgacgacaucgagcagcaggccgacaacaugaucacggagaugcugcagaaggaguacauggaccggcagggcaagaccccgcugggccucguggaccuguucguguucagcaccuccuucuaccugaucagcaucuuccuccaccuggucaagauccccacccaccgccacgugaucgggaagcccugccccaagccgcaccggcugaaccacaugggcaucugcuccugcgggcuguacaagcaccccggcgugcccgucaaguggaagcgcugaggacuaguaauaaggaaacuguaugaaugucugugggcaggaagugaagagauccuucuguaaagguuuuuggaauuaugucugcugaauaauaaacuuuuuugaaauaauaaaucugguagaaaaaugagaucuaaaaaaaaaaaaaaaaaaaaaaaaaaaaaaaaaaaaaaaaaaaaaaaaaaaaaaaaaaaaaaaaugcaucccccccccccccccccccccccccccccccaaaggcucuuuucagagccaccagaauu

SEQ ID NO: 6765 - RNA, 1813 nt, Artificial Sequence
  mRNA product Design b-4 comprising derived and/or modified sequence from LASV(LASV237-NIG-2010;Clade II)__AIT17638__GPCstabilized (opt1)
gggagagucccgcagucggcguccagcggcucugcuuguucgugugugugucguugcaggccuuauucaagcuuaccaugggccagaucaucaccuucuuccaggaggugccccacgucaucgaggaggugaugaacaucgugcugaucgcccucagccugcuggccauccucaaggggaucuacaacgucgcgaccugcggccuguucgggcugguguccuuccuccugcugugcggccgcagcugcuccacgaccuacaaggggguguacgagcuccagacccuggagcuggacauggccagccucaacaugaccaugccgcuguccugcacgaagaacaacagccaccacuacaucauggucggcaacgagaccggccuggagcucacccugaccaacacguccaucaucaaccacaaguucugcaaccugagcgacgcccacaagaaggaccucuacgaccacgcccugauguccaucaucagcaccuuccaccuguccauccccaacuucaaccaguacgaggccaugagcugcgacuucaacgggggcaagaucuccgugcaguacaaccucagccacaccuacgcgguggacgccgccaaccacugcgggaccaucgccaacggcguccugcagacguucaugcggauggcguggggcggguccuacaucgcccuggacagcggcugcggguccugggacugcaucaugaccagcuaccaguaccucaucauccagaacaccaccugggaggaccacugccaguucucccgccccagccccaucggcuaccuggggcugcucagccagcggacgcgcgacaucuacaucucccggcgccggcgcggcaccuucaccuggacccugagcgacuccgagggcaacgagacgcccgggggcuacugccugacccgguggaugcucaucgaggccgagcugaagugcuucgggaacaccgccguggccaagugcaacgagaagcacgacgaggaguucugcgacaugcugcgccucuucgacuucaacaagcaggcgauccggcgccugaagaccccggcccagaugagcauccagcugaucaacaaggccgugaacgcccucaucaacgaccagcugaucaugaagaaccaccuccgggacaucaugugcauccccuacugcaacuacuccaaguacugguaccugaaccacacggucaccggcaagaccagccugccccgcugcuggcugguguccaacgggagcuaccucaacgagacccacuucuccgacgacaucgagcagcaggccgacaacaugaucacggagcugcugcagaaggaguacauggaccggcagggcaagaccccgcucggccugguggaccuguucgucuucagcaccuccuucuaccucaucagcaucuuccugcaccugaucaagauccccacccaccgccacaucacggggaagcccugccccaagccgcaccggcugaaccacaugggcaucugcuccugcgggcucuacaagcaccccggcgugcccgugaaguggaagcgcugaggacuaguaauaaggaaacuguaugaaugucugugggcaggaagugaagagauccuucuguaaagguuuuuggaauuaugucugcugaauaauaaacuuuuuugaaauaauaaaucugguagaaaaaugagaucuaaaaaaaaaaaaaaaaaaaaaaaaaaaaaaaaaaaaaaaaaaaaaaaaaaaaaaaaaaaaaaaaugcaucccccccccccccccccccccccccccccccaaaggcucuuuucagagccaccagaauu

SEQ ID NO: 6766 - RNA, 1813 nt, Artificial Sequence
  mRNA product Design b-4 comprising derived and/or modified sequence from LASV(LASV253-NIG-2011;Clade II)__AIT17670__GPCstabilized (opt1)
gggagagucccgcagucggcguccagcggcucugcuuguucgugugugugucguugcaggccuuauucaagcuuaccaugggccagaucaucaccuucuuccaggaggugccccacgucaucgaggaggugaugaacaucgugcugaucgcccucagccugcuggccauccucaaggggaucuacaacgucgcgaccugcggccuguucgggcugguguccuuccuccugcugugcggccgcagcugcuccacgaccuacaaggggguguacgagcuccagacccuggagcuggacauggccagccucaacaugaccaugccgcuguccugcacgaagaacaacagccaccacuacaucauggucggcaacgagaccggccuggagcucacccugaccaacacguccaucaucaaccacaaguucugcaaccugagcgacgcccacaagaagaaccucuacgaccacgcccugauguccaucaucagcaccuuccaccuguccauccccaacuucaaccaguacgaggccaugagcugcgacuucaacgggggcaagaucuccgugcaguacaaccucagccacaccuacgcgguggacgccgccaaccacugcgggaccaucgccaacggcguccugcagacguucaugcggauggcguggggcggguccuacaucgcccuggacagcggcugcggguccugggacugcaucaugaccagcuaccaguaccucaucauccagaacaccaccugggaggaccacugccaguucucccgccccagccccaucggcuaccuggggcugcucagccagcggacgcgcgacaucuacaucucccggcgccggcgcggcaccuucaccuggacccugagcgacuccgagggcaacgagacgcccgggggcuacugccugacccgguggaugcucaucgaggccgagcugaagugcuucgggaacaccgccguggccaagugcaacgagaagcacgacgaggaguucugcgacaugcugcgccucuucgacuucaacaagcaggcgauccggcgccugaaggccccggcccagaugagcauccagcugaucaacaaggccgugaacgcccucaucaacgaccagcugaucaugaagaaccaccuccgggacaucaugugcauccccuacugcaacuacuccaaguacugguaccugaaccacaccgucacgggccgcaccagccugccccggugcuggcugguguccaacgggagcuaccucaacgagacccacuucuccgacgacaucgagcagcaggcggacaacaugaucaccgagcugcugcagaaggaguacaucgaccgccagggcaagacgccgcucggccugguggaccuguucgucuucagcaccuccuucuaccucaucagcaucuuccugcaccuggugaagauccccacccaccggcacaucaucgggaagcccugccccaagccgcaccgccugaaccacaugggcaucugcuccugcgggcucuacaagcaccccggcgugcccgucaaguggaagcggugaggacuaguaauaaggaaacuguaugaaugucugugggcaggaagugaagagauccuucuguaaagguuuuuggaauuaugucugcugaauaauaaacuuuuuugaaauaauaaaucugguagaaaaaugagaucuaaaaaaaaaaaaaaaaaaaaaaaaaaaaaaaaaaaaaaaaaaaaaaaaaaaaaaaaaaaaaaaaugcaucccccccccccccccccccccccccccccccaaaggcucuuuucagagccaccagaauu

SEQ ID NO: 6767 - RNA, 1813 nt, Artificial Sequence
  mRNA product Design b-4 comprising derived and/or modified sequence from LASV(LASV254-NIG-2011;Clade II)__AIT17674__GPCstabilized (opt1)
gggagagucccgcagucggcguccagcggcucugcuuguucgugugugugucguugcaggccuuauucaagcuuaccaugggccagaucaucaccuucuuccaggaggugccccacgucaucgaggaggugaugaacaucgugcugaucgcccucagccugcuggccauccucaaggggaucuacaacgucgcgaccugcggccuguucgggcugguguccuuccuccugcugugcggccgcagcugcuccacgaccuacaaggggguguacgagcuccagacccuggagcuggacaugaccaaccucaacaugacgaugccgcugagcugcaccaagaacaacucccaccacuacaucauggucggcaacgagaccggccuggagcucacccugacgaacaccagcaucaucaaccacaaguucugcaaccuguccgacgcccacaagaagaaccucuacaaccacgcccugaugagcaucaucuccaccuuccaccugagcauccccaacuucaaccaguacgaggccauguccugcgacuucaacgggggcaagaucagcgugcaguacaaccucucccacagcuacgccguggacgcggccaaccacugcgggaccaucgccaacggcguccugcagacguucaugcggauggccuggggcggguccuacaucgcgcuggacagcggcugcgggaacugggacugcaucaugaccuccuaccaguaccucaucauccagaacaccaccugggaggaccacugccaguucagccgccccucccccaucggcuaccuggggcugcucagccagcggacgcgcgacaucuacaucagccggcgccggcgcggcaccuucaccuggacccuguccgacagcgagggcaacgagacgcccgggggcuacugccugacccgguggaugcucaucgaggccgagcugaagugcuucgggaacaccgccguggccaagugcaacgagaagcacgacgaggaguucugcgacaugcugcgccucuucgacuucaacaagcaggccauccggcgccugaagaccccggcgcaggccaacauccagcugaucaacaaggccgugaacgcccucaucaacgaccagcugaucaugaagaaccaccuccgggacaucaugugcauccccuacugcaacuacuccaaguacugguaccugaaccacacggucaccggcaagaccagccugccccgcugcuggcugguguccaacgggagcuaccucaacgagacccacuucuccgacgacaucgagcagcaggccgacaacaugaucacggagcugcugcagaaggaguacauggaccggcagggcaagaccccgcucggccugguggaccuguucgucuucagcaccuccuucuaccucaucagcaucuuccugcaccuggugaagauccccacccaccgccacgugaucgggaagcccugccccaagccgcaccggcugaaccacaugggcaucugcuccugcgggcucuacaagcaccccggcguccccgugaaguggaagcgcugaggacuaguaauaaggaaacuguaugaaugucugugggcaggaagugaagagauccuucuguaaagguuuuuggaauuaugucugcugaauaauaaacuuuuuugaaauaauaaaucugguagaaaaaugagaucuaaaaaaaaaaaaaaaaaaaaaaaaaaaaaaaaaaaaaaaaaaaaaaaaaaaaaaaaaaaaaaaaugcaucccccccccccccccccccccccccccccccaaaggcucuuuucagagccaccagaauu

SEQ ID NO: 6768 - RNA, 1813 nt, Artificial Sequence
  mRNA product Design b-4 comprising derived and/or modified sequence from LASV(Nig08-A19;Clade III)__ADU56618__GPCstabilized (opt1)
gggagagucccgcagucggcguccagcggcucugcuuguucgugugugugucguugcaggccuuauucaagcuuaccaugggccagaucgugaccuucuuccaggaggucccccacgugaucgaggaggugaugaacaucguccugaucgcccucagcauccuggccauccugaaggggcucuacaacaucgcgaccugcggccugaucgggcuggugacguuccuccugcuguccggccgcagcugcuccaugaccuacaaggggguguacgagcuccagacccuggagcugaacaugaacacccucaacaugacgaugccgcugagcugcaccaagaacaacucccaccacuacaucauggucggcaacgagaccggccuggagcucacccugacgaacaccagccugcuccaccacaaguucugcaaccuguccgacgcccacaagaagaaccuguacgaccacacccucaugagcaucaucuccaccuuccaccugagcauccccaacuucaaccaguacgaggccauguccugcgacuucaacgggggcaagaucacggugcaguacaaccugagccacuccuacgccaucgacgccgcgaaccacugcgggaccguggccaacggcguccuccagaccuucaugcggauggccuggggcgggagcuacaucgcccuggacuccggcugcgggaagugggacugcaucaugaccagcuaccaguaccugaucauccagaacacgaccugggaggaccacugccaguucucccgccccagccccaucggcuaccucgggcugcugucccagcggacccgcgacaucuacaucagccggcgccggcgcggcaccuucacguggacccucagcgacuccgagggcaacgagacccccgggggcuacugccugacccgguggaugcugaucgaggcggagcucaagugcuucgggaacacggccguggccaagugcaacgagaagcacgacgaggaguucugcgacaugcugcgccuguucgacuucaacaagcaggccauccggcgccucaaggccccggcgcagaugagcauccagcugaucaacaaggccgugaacgcccugaucaacgaccagcucaucaugaagaaccaccuccgggacaucaugugcauccccuacugcaacuacuccaaguacugguaccugaaccacaccagcaccggccgcaccucccugccccggugcuggcuggucagcaacggguccuaccugaacgagacgcacuucagcgacgacaucgagcagcaggccgacaacaugaucaccgagaugcuccagaaggaguaccuggaccgccagggcaagaccccgcugggccucguggaccuguucguguucuccaccagcuucuaccugaucuccaucuuccugcaccucgucaagauccccacgcaccggcacaucguggggaagcccugccccaagccgcaccgccugaaccacaugggcaucugcagcugcgggcuguacaagcagcccggcgugcccguccgguggaagcgcugaggacuaguaauaaggaaacuguaugaaugucugugggcaggaagugaagagauccuucuguaaagguuuuuggaauuaugucugcugaauaauaaacuuuuuugaaauaauaaaucugguagaaaaaugagaucuaaaaaaaaaaaaaaaaaaaaaaaaaaaaaaaaaaaaaaaaaaaaaaaaaaaaaaaaaaaaaaaaugcaucccccccccccccccccccccccccccccccaaaggcucuuuucagagccaccagaauu

SEQ ID NO: 6769 - RNA, 1816 nt, Artificial Sequence
  mRNA product Design b-4 comprising derived and/or modified sequence from LASV(G1180-SLE-2010;Clade IV)__AIT17168__GPCstabilized (opt1)
gggagagucccgcagucggcguccagcggcucugcuuguucgugugugugucguugcaggccuuauucaagcuuaccaugggccagaucgugaccuucuuccaggaggucccccacgugaucgaggaggugaugaacaucguccugaucgcccucagcauccuggccgugcugaaggggcucuacaacuucgcgaccugcggccugguggggcugcucacguuccugcugcucugcggccgcuccugcaccgccagccgguacaagggggucuacgagcugcagacccuggagcucaacauggagacccugaacaugacgaugccgcuguccugcaccaagaacaacagccaccacuacaucauggugggcaacgagaccggccucgagcugacccugacgaacaccuccaucaucaaccacaaguucugcaaccucagcgacgcccacaagaagaaccuguacgaccacgcccugauguccaucaucagcaccuuccaccucuccauccccaacuucaaccaguacgaggccaugagcugcgacuucaacgggggcaagaucuccgugcaguacaaccugagccacuccuacgcgggggacgccgccaaccacugcggcaccgucgccaacggggugcugcagacguucaugcgcauggcguggggcggcagcuacaucgcccucgacuccgggugcggcagcugggacugcaucaugaccuccuaccaguaccugaucauccagaacaccaccugggaggaccacugccaguucagccggcccucccccaucggguaccugggccuccugagccagcgcacgcgggacaucuacaucagccgccggcgccggggcaccuucaccuggacccuguccgacagcgaggggaaggacacgccgggcggguacugccucacccgcuggaugcugaucgaggccgagcugaagugcuucggcaacaccgccguggccaagugcaacgagaagcacgacgaggaguucugcgacaugcuccggcuguucgacuucaacaagcaggcgauccagcgccugaaggcccccgcccagauguccauccagcucaucaacaaggccgucaacgcccugaucaacgaccagcugaucaugaagaaccaccuccgggacaucaugugcauccccuacugcaacuacagcaaguacugguaccugaaccacaccacgaccgggaagaccucccugcccaagugcuggcucgugagcaacggcuccuaccugaacgagacccacuucagcgacgacaucgagcagcaggcggacaacaugaucacggagaugcugcagaaggaguacauggagcgccagggcaagaccccgcucgggcugguggaccuguucgucuucuccaccagcuucuaccucaucuccaucuuccugcaccuggugaagauccccacccaccggcacaucgugggcaagagcugccccaagccccaccgccugaaccacauggggaucugcuccugcggccucuacaagcagccggggguccccgugaaguggaagcggugaggacuaguaauaaggaaacuguaugaaugucugugggcaggaagugaagagauccuucuguaaagguuuuuggaauuaugucugcugaauaauaaacuuuuuugaaauaauaaaucugguagaaaaaugagaucuaaaaaaaaaaaaaaaaaaaaaaaaaaaaaaaaaaaaaaaaaaaaaaaaaaaaaaaaaaaaaaaaugcaucccccccccccccccccccccccccccccccaaaggcucuuuucagagccaccagaauu

SEQ ID NO: 6770 - RNA, 1816 nt, Artificial Sequence
  mRNA product Design b-4 comprising derived and/or modified sequence from LASV(G1442-SLE-2011;Clade IV)__AIT17180__GPCstabilized (opt1)
gggagagucccgcagucggcguccagcggcucugcuuguucgugugugugucguugcaggccuuauucaagcuuaccaugggccagaucgugaccuucuuccaggaggucccccacgugaucgaggaggugaugaacaucguccugaucgcccucagcauccuggccgugcugaaggggcucuacaacguggcgaccugcggccugaucgggcuggucacguuccuccugcugugcggccgcuccugcaccaccacccucuacaaggggguguacgagcugcagacgcuggagcucaacauggagacccugaacaugaccaugccgcugagcugcaccaagaacaacucccaccacuacauccgggugggcaacgagacgggccucgagcugacccugaccaacaccagcaucaucaaccacaaguucugcaaccucuccgacgcccacaagaagaaccuguacgaccacgcccugaugagcaucaucuccacguuccaccucagcauccccaacuucaaccaguacgaggccauguccugcgacuucaacgggggcaagaucagcguccaguacaaccugucccacagcuacgccggggacgcggccaaccacugcggcaccguggccaacggggugcugcagaccuucaugcgcauggccuggggcggcuccuacaucgcgcucgacagcgggugcggcaacugggacugcaucaugaccuccuaccaguaccugaucauccagaacacgaccugggacgaccacugccaguucagccggcccucccccaucggguaccugggccuccugagccagcgcacccgggacgucuacaucucccgccggcgccggggcaccuucacguggacccugagcgacagcgaggggaaggacaccccgggcggguacugccucacccgcuggaugcugaucgaggccgagcugaagugcuucggcaacacggccguggccaagugcaacgagaagcacgacgaggaguucugcgacaugcuccggcuguucgacuucaacaagcaggccauccagcgccugaaggcgcccgcccagauguccauccagcucaucaacaaggccgugaacgcccugaucaacgaccagcugaucaugaagaaccaccuccgggacaucaugugcauccccuacugcaacuacagcaaguacugguaccugaacaacaccgccaccgggaagaccucccugcccaagugcuggcucaucagcaacggcuccuaccugaacgagacgcacuucagcgacgacaucgagcaggaggcggacaacaugaucaccgagaugcugcagaaggaguacauggagcgccagggcaagaccccgcucgggcuggucgaccuguucguguucuccaccagcuucuaccucaucuccaucuuccugcaccuggugaagauccccacgcaccggcacaucgucggcaagagcugccccaagccccaccgccugaaccacauggggaucugcuccugcggccucuacaagcagccgggggugcccgugcgguggaagcgcugaggacuaguaauaaggaaacuguaugaaugucugugggcaggaagugaagagauccuucuguaaagguuuuuggaauuaugucugcugaauaauaaacuuuuuugaaauaauaaaucugguagaaaaaugagaucuaaaaaaaaaaaaaaaaaaaaaaaaaaaaaaaaaaaaaaaaaaaaaaaaaaaaaaaaaaaaaaaaugcaucccccccccccccccccccccccccccccccaaaggcucuuuucagagccaccagaauu

SEQ ID NO: 6771 - RNA, 1816 nt, Artificial Sequence
  mRNA product Design b-4 comprising derived and/or modified sequence from LASV(G3010-SLE-2013;Clade IV)__AIT17344__GPCstabilized (opt1)
gggagagucccgcagucggcguccagcggcucugcuuguucgugugugugucguugcaggccuuauucaagcuuaccaugggccagaucgugaccuucuuccaggaggucccccacgugaucgaggaggugaugaacaucguccugaucgcccucagcauccuggccgugcugaaggggcucuacaacuucgcgaccugcggccugguggggcuggucacguuccuccugcugugcggccgcuccugcaccaccagccucuacaaggggguguacgagcugcagacccuggagcucaacauggagacgcugaacaugaccaugccgcuguccugcaccaagaacaacagccaccacuacaucauggugggcaacgagaccggccucgagcugacgcugaccaacaccuccaucaucaaccacaaguucugcaaccucagcgacgcccacaagaagaaccuguacaaccacgcccugauguccaucaucagcaccuuccaccucuccauccccaacuucaaccaguacgaggccaugagcugcgacuucaacgggggcaagaucuccguccaguacaaccugagccacuccuacgccggggacgcggccagccacugcggcacgguggccaacggggugcugcagaccuucaugcggauggccuggggcggcuccuacaucgcgcucgacagcgggugcggcaagugggacugcaucaugaccuccuaccaguaccugaucauccagaacaccacgugggaggaccacugccaguucagccgccccucccccaucggguaccugggccuccugagccagcggacccgcgacaucuacaucagccggcgccggcgcggcaccuucaccuggacgcuguccgacagcgaggggaaggacaccccgggcggguacugccucacccgguggaugcugaucgaggccgagcugaagugcuucggcaacaccgccgucgccaagugcaacgagaagcacgacgaggaguucugcgacaugcuccgccuguucgacuucaacaagcaggccauccagcggcugaagacgcccgcgcagauguccauccagcucaucaacaaggccgugaacgcccugaucaacgaccagcugaucaugaagaaccaccuccgcgacaucaugugcauccccuacugcaacuacagcaaguacugguaccugaaccacaccaccaccgggaagacgucccugcccaagugcuggcucgugagcaacggcuccuaccugaacgagacccacuucagcgacgacaucgagcagcaggccgacaacaugaucaccgagaugcugcagaaggaguacauggagcggcagggcaagaccccgcucgggcuggucgaccuguucguguucuccacgagcuucuaccucaucuccaucuuccugcaccuggugaagauccccacccaccgccacaucgucggcaagagcugccccaagccccaccggcugaaccacauggggaucugcuccugcggccucuacaagcagccgggggugcccgugcgcuggaagcggugaggacuaguaauaaggaaacuguaugaaugucugugggcaggaagugaagagauccuucuguaaagguuuuuggaauuaugucugcugaauaauaaacuuuuuugaaauaauaaaucugguagaaaaaugagaucuaaaaaaaaaaaaaaaaaaaaaaaaaaaaaaaaaaaaaaaaaaaaaaaaaaaaaaaaaaaaaaaaugcaucccccccccccccccccccccccccccccccaaaggcucuuuucagagccaccagaauu

SEQ ID NO: 6772 - RNA, 1816 nt, Artificial Sequence
  mRNA product Design b-4 comprising derived and/or modified sequence from LASV(G502-SLE-2009;Clade IV)__AIT17126__GPCstabilized (opt1)
gggagagucccgcagucggcguccagcggcucugcuuguucgugugugugucguugcaggccuuauucaagcuuaccaugggccagaucgugaccuucuuccaggaggucccccacgugaucgaggaggugaugaacaucguccugaucgcccucagcauccuggccgugcugaaggggcucuacaacuucgcgaccugcggccugguggggcugcucacguuccugcugcucugcggccgcuccugcaccaccgggcuguacaagggcgucuacgagcugcagacccucgagcugaacauggagacgcugaacaugaccaugccgcucagcugcaccaagaacaacucccaccacuacaucauggugggcaacgagaccgggcuggagcugacgcucaccaacaccagcaucaucaaccacaaguucugcaaccuguccgacgcccacaagaagaaccuguacgaccacgcccucaugagcaucaucuccaccuuccaccugagcauccccaacuucaaccaguacgaggccauguccugcgacuucaacggcgggaagaucagcgugcaguacaaccugucccacagcuacgccggcgacgcggccgaccacugcgggacggucgccaacggcgugcuccagaccuucaugcggauggccuggggcggguccuacaucgcgcuggacagcggcugcgggcgcugggacugcaucaugaccuccuaccaguaccugaucauccagaacaccacgugggaggaccacugccaguucagccggcccucccccaucggcuaccucggccugcugagccagcgcacccgggacaucuacaucucccgccggcgccgggggaccuucaccuggacgcucagcgacagcgagggcaaggacacccccgggggcuacugccugacccgcuggaugcugaucgaggccgagcucaagugcuucgggaacaccgccguggccaagugcaacgagaagcacgacgaggaguucugcgacaugcugcggcuguucgacuucaacaagcaggccauccagcgccucaaggcgccggcccagauguccauccagcugaucaacaaggccgucaacgcccugaucaacgaccagcucgugaugaagaaccaccuccgggacaucaugugcauccccuacugcaacuacagccgcuacugguaccugaaccacacgaccaccggccggaccucccugcccaagugcuggcuggugagcaacggcuccuaccugaacgagacgcacuucagcgacgacaucgagcagcaggccgacaacaugaucaccgagaugcuccagaaggaguacauggagcgccaggggaagaccccgcugggccuggucgaccucuucguguucuccaccagcuucuaccugaucuccaucuuccugcaccuggugaagauccccacgcaccggcacaucgucggcaagagcugccccaagccccaccgccucaaccacauggggaucugcuccugcgggcuguacaagcagccgggcgugcccgugaaguggaagcggugaggacuaguaauaaggaaacuguaugaaugucugugggcaggaagugaagagauccuucuguaaagguuuuuggaauuaugucugcugaauaauaaacuuuuuugaaauaauaaaucugguagaaaaaugagaucuaaaaaaaaaaaaaaaaaaaaaaaaaaaaaaaaaaaaaaaaaaaaaaaaaaaaaaaaaaaaaaaaugcaucccccccccccccccccccccccccccccccaaaggcucuuuucagagccaccagaauu

SEQ ID NO: 6773 - RNA, 1816 nt, Artificial Sequence
  mRNA product Design b-4 comprising derived and/or modified sequence from LASV(G733-SLE-2010;Clade IV)__AIT17154__GPCstabilized (opt1)
gggagagucccgcagucggcguccagcggcucugcuuguucgugugugugucguugcaggccuuauucaagcuuaccaugggccagaucgugaccuucuuccaggaggucccccacgugaucgaggaggugaugaacaucguccugaucgcccucagcauccuggccgugcugaaggggcucuacaacuucgcgaccugcggcaucguggggcuggucuccuuccugcuccugugcggccgcagcugcacgaccucccuguacaaggggguguacgagcuccagacccuggagcugaacauggagacccucaacaugacgaugccgcugagcugcaccaagaacaacucccaccacuacaucauggugggcaacgagaccggccuggagcucacccugacgaacaccagcaucaucaaccacaaguucugcaaccuguccgacgcccacaagaagaaccucuacgaccacgcccugaugagcaucaucuccaccuuccaccugagcauccccaacuucaaccaguacgaggccauguccugcgacuucaacgggggcaagaucagcguccaguacaaccucucccacagcuacgccggggacgcggccaaccacugcggcaccaucgccaacggggugcugcagacguucaugcggauggccuggggcggcuccuacaucgcgcuggacagcgggugcgaccgcugggacugcaucaugaccuccuaccaguaccucaucauccagaacaccaccugggaggaccacugccaguucagccggcccucccccaucggcuaccuggggcugcucagccagcgcacgcgggacaucuacaucagccgccggcgccggggcaccuucaccuggacccuguccgacagcgagggcaaggacacgcccgggggcuacugccugacccgcuggaugcucaucgaggccgagcugaagugcuucgggaacaccgccguggccaagugcaacgagaagcacgacgaggaguucugcgacaugcugcggcuguucgacuucaacaagcaggccauccagcgccugaaggcgccggcccagauguccauccagcugaucaacaaggccgucaacgcccucaucaacgaccagcugaucaugaagaaccaccuccgggacaucaugugcauccccuacugcaacuacagcaaguacugguaccucaaccacaccacgaccggcaagaccucccugcccaagugcuggcuggugagcaacggguccuaccucaacgagacccacuucagcgacgacaucgagcagcaggccgacaacaugaucacggagaugcugcagaaggaguacauggagcgccagggcaagaccccgcugggccucguggaccuguucgucuucuccaccagcuucuaccugaucuccaucuuccuccaccuggugaagauccccacccaccggcacguggucggcaagagcugccccaagccccaccgccugaaccacauggggaucugcuccugcgggcuguacggccagccgggggugcccgugaaguggaagcggugaggacuaguaauaaggaaacuguaugaaugucugugggcaggaagugaagagauccuucuguaaagguuuuuggaauuaugucugcugaauaauaaacuuuuuugaaauaauaaaucugguagaaaaaugagaucuaaaaaaaaaaaaaaaaaaaaaaaaaaaaaaaaaaaaaaaaaaaaaaaaaaaaaaaaaaaaaaaaugcaucccccccccccccccccccccccccccccccaaaggcucuuuucagagccaccagaauu

SEQ ID NO: 6774 - RNA, 1816 nt, Artificial Sequence
  mRNA product Design b-4 comprising derived and/or modified sequence from MOPV/LASV reassortant(IGS-1;Clade IV)__AFY05576__GPCstabilized (opt1)
gggagagucccgcagucggcguccagcggcucugcuuguucgugugugugucguugcaggccuuauucaagcuuaccaugggccagaucgugaccuucuuccaggaggucccccacgugaucgaggaggugaugaacaucguccugaucgcccucagcgugcuggccgugcugaaggggcucuacaacuucgcgaccugcggccuggucgggcuggugacguuccuccugcugugcggccgcuccugcaccaccagccucuacaaggggguguacgagcugcagacccuggagcucaacauggagacgcugaacaugaccaugccgcuguccugcaccaagaacaacagccaccacuacaucauggucggcaacgagaccggccucgagcugacgcugaccaacaccuccaucaucaaccacaaguucugcaaccucagcgacgcccacaagaagaaccuguacgaccacgcccugauguccaucaucagcaccuuccaccucuccauccccaacuucaaccaguacgaggccaugagcugcgacuucaacgggggcaagaucuccgugcaguacaaccugagccacuccuacgccggggacgcggccaaccacugcggcacgguggccaacgggguccugcagaccuucaugcggauggccuggggcggcagcuacaucgcgcucgacuccgggugcggcaacugggacugcaucaugaccagcuaccaguaccugaucauccagaacaccacgugggaggaccacugccaguucucccgccccagccccaucggguaccugggccuccugucccagcggacccgcgacaucuacaucagccggcgccggcgcggcaccuucaccuggacgcugagcgacuccgagggggaggacaccccgggcggguacugccucacccgguggaugcugaucgaggccgagcugaagugcuucggcaacaccgccguggccaagugcaacgagaagcacgacgaggaguucugcgacaugcuccgccuguucgacuucaacaagcaggccauccagcggcugaaggcgcccgcccagaugagcauccagcucaucaacaaggccgugaacgcccugaucaacgaccagcugaucaugaagaaccaccuccgcgacaucaugugcauccccuacugcaacuacuccaaguacugguaccugaaccacacgaccaccgggcggaccagccugcccaagugcuggcucgucuccaacggcagcuaccugaacgagacgcacuucuccgacgacaucgagcagcaggccgacaacaugaucaccgagaugcugcagaaggaguacauggagcgccagggcaagaccccgcucgggcugguggaccuguucguguucagcaccuccuucuaccucaucagcaucuuccugcaccuggucaagauccccacgcaccggcacaucgugggcaaguccugccccaagccccaccgccugaaccacauggggaucugcagcugcggccucuacaagcagccgggggugcccgucaaguggaagcggugaggacuaguaauaaggaaacuguaugaaugucugugggcaggaagugaagagauccuucuguaaagguuuuuggaauuaugucugcugaauaauaaacuuuuuugaaauaauaaaucugguagaaaaaugagaucuaaaaaaaaaaaaaaaaaaaaaaaaaaaaaaaaaaaaaaaaaaaaaaaaaaaaaaaaaaaaaaaaugcaucccccccccccccccccccccccccccccccaaaggcucuuuucagagccaccagaauu

SEQ ID NO: 6775 - RNA, 1816 nt, Artificial Sequence
  mRNA product Design b-4 comprising derived and/or modified sequence from LASV(LM765-SLE-2012;Clade IV)__AIT17814__GPCstabilized (opt1)
gggagagucccgcagucggcguccagcggcucugcuuguucgugugugugucguugcaggccuuauucaagcuuaccaugggccagaucgugaccuucuuccaggaggucccccacgugaucgaggaggugaugaacaucguccugaucgcccucagcauccuggccgugcugaaggggcucuacaacuucgcgaccugcggccugguggggcuggucacguuccuccugcugugcggccgcuccugcaccaccagccucuacaaggggguguacgagcugcagacccuggagcucaacauggagacgcugaacaugaccaugccgcuguccugcaccaagaacaacagccaccacuacaucauggugggcaacgagaccggccucgagcugacgcugaccaacaccuccaucaucgaccacaaguucugcaaccucagcgacgcccaccggaagaaccuguacgaccacgcccugauguccaucaucagcaccuuccaccucuccauccccaacuucaaccaguacgaggccaugagcugcgacuucaacgggggcaagaucuccguccaguacaaccugagccacuccuacgccaaggacgcggccgaccacugcgggacgguggccaacggcgugcugcagaccuucaugcgcauggccuggggcgggagcuacaucgcgcucgacuccggcugcgggcggugggacugcaucaugaccagcuaccaguaccugaucauccagaacaccacgugggaggaccacugccaguucucccgccccagccccaucggcuaccuggggcuccugucccagcggacccgcgacaucuacaucagccggcgccggcgcggcaccuucaccuggacgcugagcgacuccgagggcaaggacacccccgggggcuacugccucacccgguggaugcugaucgaggccgagcugaagugcuucgggaacaccgccgucgccaagugcaacgagaagcacgacgaggaguucugcgacaugcuccgccuguucgacuucaacaagcaggccauccagcggcugaaggcgccggcccagaugagcauccagcucaucaacaaggccgugaacgcccugaucaacgaccagcugaucaugaagaaccaccuccgcgacaucaugugcauccccuacugcaacuacuccaaguacugguaccugaaccacacgaccaccggcaagaccagccugcccaagugcuggcucguguccaacgggagcuaccugaacgagacgcacuucuccgacgacaucgagcagcaggccgacaacaugaucaccgagaugcugcagaaggaguacauggagcggcagggcaagaccccgcucggccuggucgaccuguucguguucagcaccuccuucuaccucaucagcaucuuccugcaccuggugaagauccccacgcaccgccacaucgucgggaagcccugccccaagccgcaccggcugaaccacaugggcaucugcuccugcgggcucuacaagcagcccggcgugcccgugaaguggaagcgcugaggacuaguaauaaggaaacuguaugaaugucugugggcaggaagugaagagauccuucuguaaagguuuuuggaauuaugucugcugaauaauaaacuuuuuugaaauaauaaaucugguagaaaaaugagaucuaaaaaaaaaaaaaaaaaaaaaaaaaaaaaaaaaaaaaaaaaaaaaaaaaaaaaaaaaaaaaaaaugcaucccccccccccccccccccccccccccccccaaaggcucuuuucagagccaccagaauu

SEQ ID NO: 6776 - RNA, 1816 nt, Artificial Sequence
  mRNA product Design b-4 comprising derived and/or modified sequence from LASV(LM776-SLE-2012;Clade IV)__AIT17824__GPCstabilized (opt1)
gggagagucccgcagucggcguccagcggcucugcuuguucgugugugugucguugcaggccuuauucaagcuuaccaugggccagaucgugaccuucuuccaggaggucccccacgugaucgaggaggugaugaacaucguccugaucgcccucagcauccuggccgugcugaaggggcucuacaacuucgcgaccugcggccugguggggcuggucacguuccuccugcugugcggccgcuccugcaccaccagcguguacaaggggguguacgagcuccagacccuggagcugaacauggagacgcucaacaugaccaugccgcuguccugcaccaagaacaacagccaccacuacaucauggucggcaacgagaccggccuggagcucacgcugaccaacaccuccaucaucaaccacaaguucugcaaccugagcgacgcccacaagaagaaccucuacgaccacgcccugauguccaucaucagcaccuuccaccuguccauccccaacuucaaccaguacgaggccaugagcugcgacuucaacgggggcaagaucuccgugcaguacaaccucagccacuccuacgccggggacgcggccaaccacugcggcacgguggccaacgggguccugcagaccuucaugcggauggccuggggcggcagcuacaucgcgcuggacuccgggugcggcaagugggacugcaucaugaccagcuaccaguaccucaucauccagaacaccacgugggaggaccacugccaguucucccgccccagccccaucggguaccugggccugcucucccagcggacccgcgacaucuacaucagccggcgccggcgcggcaccuucaccuggacgcugagcgacuccgaggggaaggacaccccgggcggguacugccugacccgguggaugcucaucgaggccgagcugaagugcuucggcaacaccgccguggccaagugcaacgagaagcacgacgaggaguucugcgacaugcugcgccucuucgacuucaacaagcaggccauccagcggcugaaggcgcccgcccagaugagcauccagcugaucaacaaggccgugaacgcccucaucaacgaccagcugaucaugaagaaccaccuccgcgacaucaugugcauccccuacugcaacuacuccaaguacugguaccugaaccacacgaccaccgggaagaccagccugcccaagugcuggcuggucuccaacggcagcuaccucaacgagacgcacuucuccgacgacaucgagcagcaggccgacaacaugaucaccgagaugcugcagaaggaguacauggagcggcagggcaagaccccgcuggggcucguggaccuguucguguucagcaccuccuucuaccugaucagcaucuuccuccaccuggucaagauccccacgcaccgccacaucgugggcaaguccugccccaagccccaccggcugaaccacauggggaucugcagcugcggccuguacaagcagccgggggugcccguccgcuggaagcggugaggacuaguaauaaggaaacuguaugaaugucugugggcaggaagugaagagauccuucuguaaagguuuuuggaauuaugucugcugaauaauaaacuuuuuugaaauaauaaaucugguagaaaaaugagaucuaaaaaaaaaaaaaaaaaaaaaaaaaaaaaaaaaaaaaaaaaaaaaaaaaaaaaaaaaaaaaaaaugcaucccccccccccccccccccccccccccccccaaaggcucuuuucagagccaccagaauu

SEQ ID NO: 6777 - RNA, 1816 nt, Artificial Sequence
  mRNA product Design b-4 comprising derived and/or modified sequence from LASV(Mad39;Clade IV)__ANH09722__GPCstabilized (opt1)
gggagagucccgcagucggcguccagcggcucugcuuguucgugugugugucguugcaggccuuauucaagcuuaccaugggccagaucgugaccuucuuccaggaggucccccacgugaucgaggaggugaugaacaucguccugaucgcccucagcauccuggccgugcugaaggggcucuacaacguggcgaccugcggccugaucgggcuggucacguuccuccugcugugcggccgcuccugcaccaccacccucuacaaggggguguacgagcugcaggcccuggagcucaacauggagacgcugaacaugaccaugccgcugagcugcaccaagaacaacucccaccacuacauccgggugggcaacgagaccggccucgagcugacgcugaccaacaccagccucaucaaccacaaguucugcaaccuguccgacgcccacaagaagaaccuguacgaccacgcccucaugagcaucaucuccaccuuccaccugagcauccccaacuucaaccaguacgaggccauguccugcgacuucaacgacgggaagaucagcguccaguacaaccugucccacacguacgcgggcgacaccgccaaccacugcgggaccguggccaacggcgugcuccagaccuucaugcgcauggccuggggcgggagcuacaucgcgcuggacuccggcugcgggggcugggacugcaucaugacgagcuaccaguaccugaucauccagaacaccaccugggaggaccacugccaguucucccggcccagccccaucggguaccucggccugcugucccagcgcacccgggacaucuacaucagccgccggcgccggggcacguucaccuggacccucuccgacagcgaggggaaggacaccccgggcggguacugccugacgcgcuggaugcugaucgaggccgagcucaagugcuucggcaacaccgccgucgccaagugcaacgagaagcacgacgaggaguucugcgacaugcugcggcuguucgacuucaacaagcaggccauccagcgccucaaggcgcccgcccagaugagcauccagcugaucaacaaggccgugaacgcccugaucaacgaccagcucaucaugaagaaccaccuccgggacaucaugugcauccccuacugcaacuacuccaaguacugguaccugaaccacaccgugaccgggaagacgagccugcccaagugcuggcuggucuccaacggcagcuaccugaacgagacccacuucuccgacgacaucgagcagcaggccgacaacaugaucaccgagaugcuccagaaggaguacauggagcgccagggcaagaccccgcuggggcugguggaccucuucguguucagcacguccuucuaccugaucagcaucuuccugcaccuggucaagauccccacccaccggcacguggugggcaagcccugccccaagccgcaccgccucaaccacauggggaucugcuccugcggcuucuacaagcagcccgggguccccgugcgguggaagcgcugaggacuaguaauaaggaaacuguaugaaugucugugggcaggaagugaagagauccuucuguaaagguuuuuggaauuaugucugcugaauaauaaacuuuuuugaaauaauaaaucugguagaaaaaugagaucuaaaaaaaaaaaaaaaaaaaaaaaaaaaaaaaaaaaaaaaaaaaaaaaaaaaaaaaaaaaaaaaaugcaucccccccccccccccccccccccccccccccaaaggcucuuuucagagccaccagaauu

SEQ ID NO: 6778 - RNA, 1816 nt, Artificial Sequence
  mRNA product Design b-4 comprising derived and/or modified sequence from LASV(Z0947-SLE-2011;Clade IV)__AIT17840__GPCstabilized (opt1)
gggagagucccgcagucggcguccagcggcucugcuuguucgugugugugucguugcaggccuuauucaagcuuaccaugggccagaucgugaccuucuuccaggaggucccccacgugaucgaggaggugaugaacaucguccugaucgcccucagcauccuggccgugcugaaggggcucuacaacuucgcgaccugcggccugguggggcuggucacguuccuccugcugugcggccgcuccugcaccaucagccucuacaaggggguguacgagcugcagacccuggagcucaacauggagacccugaacaugacgaugccgcuguccugcaccaagaacaacagccaccacuacaucauggugggcaacgagaccggccucgagcugacccugacgaacaccuccaucaucaaccacaaguucugcaaccucagcgacgcccacaagaagaaccuguacgaccacgcccugauguccaucaucagcaccuuccaccucuccauccccaacuucaaccaguacgaggccaugagcugcgacuucaacgggggcaagaucuccguccaguacaaccugagccacuccuacgccggggacgcggccaaccacugcggcaccguggccaacggggugcugcagacguucaugcggauggccuggggcggcagcuacaucgcgcucgacuccgggugcgaccgcugggacugcaucaugaccagcuaccaguaccugaucauccagaacaccaccugggaggaccacugccaguucucccggcccagccccaucggcuaccuggggcuccugucccagcgcacgcgggacaucuacaucagccgccggcgccggggcaccuucaccuggacccugagcgacuccgagggcaaggacacgcccgggggcuacugccucacccgcuggaugcugaucgaggccgagcugaagugcuucgggaacaccgccgucgccaagugcaacgagaagcacgacgaggaguucugcgacaugcuccggcuguucgacuucaacaagcaggccauccagcgccugaaggcgccggcccagaugagcauccagcucaucaacaaggccgugaacgcccugaucaacgaccagcugaucaugaagaaccaccuccgggacaucaugugcauccccuacugcaacuacuccaaguacugguaccugaaccacaccacgaccggcaagaccagccugcccaagugcuggcucguguccaacgggagcuaccugaacgagacccacuucuccgacgacaucgagcagcaggccgacaacaugaucacggagaugcugcagaaggaguacauggagcgccagggcaagaccccgcucggccuggucgaccuguucguguucagcaccuccuucuaccucaucagcaucuuccugcaccuggugaagauccccacccaccggcacaucgucgggaagcccugccccaagccgcaccgccugaaccacaugggcaucugcuccugcgggcucuacaagcagcccggcgugcccgugaaguggaagcggugaggacuaguaauaaggaaacuguaugaaugucugugggcaggaagugaagagauccuucuguaaagguuuuuggaauuaugucugcugaauaauaaacuuuuuugaaauaauaaaucugguagaaaaaugagaucuaaaaaaaaaaaaaaaaaaaaaaaaaaaaaaaaaaaaaaaaaaaaaaaaaaaaaaaaaaaaaaaaugcaucccccccccccccccccccccccccccccccaaaggcucuuuucagagccaccagaauu

SEQ ID NO: 6779 - RNA, 1816 nt, Artificial Sequence
  mRNA product Design b-4 comprising derived and/or modified sequence from LASV(Josiah;Clade IV)__NP_694870__GPCstabilized (opt2)
gggagagucccgcagucggcguccagcggcucugcuuguucgugugugugucguugcaggccuuauucaagcuuaccaugggccagaucgucaccuucuuccaggaggucccccacgucaucgaggaggucaugaacaucguccucaucgcccucuccguccucgccguccucaagggccucuacaacuucgccaccugcggccucgucggccucgucaccuuccuccuccucugcggccgcuccugcaccaccucccucuacaagggcgucuacgagcuccagacccucgagcucaacauggagacccucaacaugaccaugccccucuccugcaccaagaacaacucccaccacuacaucauggucggcaacgagaccggccucgagcucacccucaccaacaccuccaucaucaaccacaaguucugcaaccucuccgacgcccacaagaagaaccucuacgaccacgcccucauguccaucaucuccaccuuccaccucuccauccccaacuucaaccaguacgaggccauguccugcgacuucaacggcggcaagaucuccguccaguacaaccucucccacuccuacgccggcgacgccgccaaccacugcggcaccgucgccaacggcguccuccagaccuucaugcgcauggccuggggcggcuccuacaucgcccucgacuccggcugcggcaacugggacugcaucaugaccuccuaccaguaccucaucauccagaacaccaccugggaggaccacugccaguucucccgccccucccccaucggcuaccucggccuccucucccagcgcacccgcgacaucuacaucucccgccgccgccggggcaccuucaccuggacccucuccgacuccgagggcaaggacacccccggcggcuacugccucacccgcuggaugcucaucgaggccgagcucaagugcuucggcaacaccgccgucgccaagugcaacgagaagcacgacgaggaguucugcgacaugcuccgccucuucgacuucaacaagcaggccauccagcgccucaaggcccccgcccagauguccauccagcucaucaacaaggccgucaacgcccucaucaacgaccagcucaucaugaagaaccaccuccgcgacaucaugugcauccccuacugcaacuacuccaaguacugguaccucaaccacaccaccaccggccgcaccucccuccccaagugcuggcucgucuccaacggcuccuaccucaacgagacccacuucuccgacgacaucgagcagcaggccgacaacaugaucaccgagaugcuccagaaggaguacauggagcgccagggcaagaccccccucggccucgucgaccucuucgucuucuccaccuccuucuaccucaucuccaucuuccuccaccucgucaagauccccacccaccgccacaucgucggcaaguccugccccaagccccaccgccucaaccacaugggcaucugcuccugcggccucuacaagcagcccggcguccccgucaaguggaagcgcugaggacuaguaauaaggaaacuguaugaaugucugugggcaggaagugaagagauccuucuguaaagguuuuuggaauuaugucugcugaauaauaaacuuuuuugaaauaauaaaucugguagaaaaaugagaucuaaaaaaaaaaaaaaaaaaaaaaaaaaaaaaaaaaaaaaaaaaaaaaaaaaaaaaaaaaaaaaaaugcaucccccccccccccccccccccccccccccccaaaggcucuuuucagagccaccagaauu

SEQ ID NO: 6780 - RNA, 1813 nt, Artificial Sequence
  mRNA product Design b-4 comprising derived and/or modified sequence from LASV(LP;Clade I)__AAF86701__GPCstabilized (opt2)
gggagagucccgcagucggcguccagcggcucugcuuguucgugugugugucguugcaggccuuauucaagcuuaccaugggccagaucaucaccuucuuccaggaggucccccacgucaucgaggaggucaugaacaucguccucaucgcccucucccuccucgccauccucaagggccucuacaacaucgccaccugcggcaucaucggccucgucgccuuccucuuccucugcggcaaguccugcucccucacccucaagggcggcuacgagcuccagacccucgagcucaacauggagacccucaacaugaccaugccccucuccugcaccaagaacuccucccaccacuacauccgcgucggcaacgagaccggccucgagcucacccucaccaacaccuccaucaucaaccacaaguucugcaaccucuccgacgcccacaagaagaaccucuacgaccacgcccucauguccaucaucuccaccuuccaccucuccauccccaacuucaaccaguacgaggccauguccugcgacuucaacggcggcaagaucuccguccaguacaaccucucccacuccuacgccggcgacgccgccgagcacugcggcaccgucgccaacggcguccuccagaccuucaugcgcauggccuggggcggccgcuacaucgcccucgacuccggcugcggcaacugggacugcaucaugaccuccuaccaguaccucaucauccagaacaccaccugggaggaccacugccaguucucccgccccucccccaucggcuaccucggccuccucucccagcgcacccgcgacaucuacaucucccgccgccgccggggcaccuucaccuggacccucuccgacuccgagggcaacgagacccccggcggcuacugccucacccgcuggaugcucaucgaggccgagcucaagugcuucggcaacaccgccgucgccaagugcaacgagaagcacgacgaggaguucugcgacaugcuccgccucuucgacuucaacaagcaggccauccgccgccucaaggcccccgcccagauguccauccagcucaucaacaaggccgucaacgcccucaucaacgaccagcucaucaugaagaaccaccuccgcgacaucaugugcauccccuacugcaacuacuccaaguacugguaccucaaccacaccuccuccggccgcaccucccuccccaagugcuggcucaucuccaacggcuccuaccucaacgagacccaguucuccgacgacaucgagcagcaggccgacaacaugaucaccgagaugcuccagaaggaguacaucgagcgccagggcaagaccccccucggccucgucgacaucuucaucuucuccaccuccuucuaccucaucuccaucuuccuccaccucaucaagauccccacccaccgccacaucgucggcaagcccugccccaagccccaccgccucaaccacaugggcgucugcuccugcggccucuacaagcaccccggcguccccaccaaguggaagcgcugaggacuaguaauaaggaaacuguaugaaugucugugggcaggaagugaagagauccuucuguaaagguuuuuggaauuaugucugcugaauaauaaacuuuuuugaaauaauaaaucugguagaaaaaugagaucuaaaaaaaaaaaaaaaaaaaaaaaaaaaaaaaaaaaaaaaaaaaaaaaaaaaaaaaaaaaaaaaaugcaucccccccccccccccccccccccccccccccaaaggcucuuuucagagccaccagaauu

SEQ ID NO: 6781 - RNA, 1813 nt, Artificial Sequence
  mRNA product Design b-4 comprising derived and/or modified sequence from LASV(803213;Clade II)__AAF86703__GPCstabilized (opt2)
gggagagucccgcagucggcguccagcggcucugcuuguucgugugugugucguugcaggccuuauucaagcuuaccaugggccagaucaucaccuucuuccaggaggucccccacgucaucgaggaggucaugaacaucguccucaucgcccucucccuccucgccauccucaagggcaucuacaacgucgccaccugcggccucuucggccucaucuccuuccuccuccucugcggccgcuccugcuccgucaccuacaagggcgucuacgagcuccagacccucgagcucaacauggccaaccucaacaugaccaugccccucuccugcaccaagaacaacucccaccacuacaucauggucggcaacgagaccggccucgagcucacccucaccaacaccuccaucaucaaccacaaguucugcaaccucuccgacgcccacaagaagaaccucuacgaccacgcccucauguccaucaucuccaccuuccaccucuccauccccaacuucaaccaguacgaggccauguccugcgacuucaacggcggcaagaucuccguccaguacaaccucucccacuccuucgccgucgacgccgccaaccacugcggcaccaucgccaacggcguccuccagaccuucaugcgcauggccuggggcggcuccuacaucgcccucgacuccggcugcggcaacugggacugcaucaugaccuccuaccaguaccucaucauccagaacaccaccugggaggaccacugccaguucucccgccccucccccaucggcuaccucggccuccucucccagcgcacccgcgacaucuacaucucccgccgccgccggggcaccuucaccuggacccucuccgacuccgagggcaacgaggcccccggcggcuacugccucacccgcuggaugcucaucgaggccgagcucaagugcuucggcaacaccgccgucgccaagugcaacgagaagcacgacgaggaguucugcgacaugcuccgccucuucgacuucaacaagcaggccaucaagcgccucaagacccccgcccagauguccauccagcucaucaacaaggccgucaacgcccucaucaacgaccagcucaucaugaagaaccaccuccgcgacaucaugugcauccccuacugcaacuacucccgcuacugguaccucaaccacaccgucaccggcaagaccucccucccccgcugcuggcucgucuccaacggcuccuaccucaacgagacccacuucuccgacgacaucgagcagcaggccgacaacaugaucaccgagaugcuccagaaggaguacauggaccgccagggcaagaccccccucggccucgucgaccucuucgucuucuccaccuccuucuaccucaucuccaucuuccuccaccucgucaagauccccacccaccgccacaucgucggcaagcccugccccaagccccaccgccucaaccacaugggcaucugcuccugcggccucuacaagcaccccggcguccccgucaaguggaagcgcugaggacuaguaauaaggaaacuguaugaaugucugugggcaggaagugaagagauccuucuguaaagguuuuuggaauuaugucugcugaauaauaaacuuuuuugaaauaauaaaucugguagaaaaaugagaucuaaaaaaaaaaaaaaaaaaaaaaaaaaaaaaaaaaaaaaaaaaaaaaaaaaaaaaaaaaaaaaaaugcaucccccccccccccccccccccccccccccccaaaggcucuuuucagagccaccagaauu

SEQ ID NO: 6782 - RNA, 1813 nt, Artificial Sequence
  mRNA product Design b-4 comprising derived and/or modified sequence from LASV(GA391;Clade III)__CAA36645__GPCstabilized (opt2)
gggagagucccgcagucggcguccagcggcucugcuuguucgugugugugucguugcaggccuuauucaagcuuaccaugggccagaucgucaccuucuuccaggaggucccccacgucaucgaggaggucaugaacaucguccucaucgcccucuccauccucgccauccucaagggccucuacaacgucgccaccugcggccucaucggccucgucaccuuccuccuccucuccggccgcuccugcucccucaucuacaagggcaccuacgagcuccagacccucgagcucaacauggagacccucaacaugaccaugccccucuccugcaccaagaacaacucccaccacuacauccgcgucggcaacgagaccggccucgagcucacccucaccaacaccuccauccucaaccacaaguucugcaaccucuccgacgcccacaagcgcaaccucuacgaccacucccucauguccaucaucuccaccuuccaccucuccauccccaacuucaaccaguacgaggccauguccugcgacuucaacggcggcaagaucaccguccaguacaaccucucccacuccuucgccgucgacgccgccggccacugcggcacccucgccaacggcguccuccagaccuucaugcgcauggccuggggcggcuccuacaucgcccucgacuccggcugcggcaacugggacugcaucaugaccuccuaccaguaccucaucauccagaacaccaccugggacgaccacugccaguucucccgccccucccccaucggcuaccucggccuccucucccagcgcacccgcgacaucuacaucucccgccgccgccggggcaccuucaccuggacccucuccgacuccgagggcaacgagacccccggcggcuacugccucacccgcuggaugcucaucgaggccgagcucaagugcuucggcaacaccgccgucgccaagugcaacgagaagcacgacgaggaguucugcgacaugcuccgccucuucgacuucaacaagcaggccauccgccgccucaagacccccgcccagauguccauccagcucaucaacaaggccgucaacgcccucaucaacgaccagcucaucaugaagaaccaccuccgcgacaucaugugcauccccuacugcaacuacucccgcuacugguaccucaaccacaccuccaccggcaagaccucccucccccgcugcuggcucaucuccaacggcuccuaccucaacgagaccaaguucuccgacgacaucgagcagcaggccgacaacaugaucaccgagaugcuccagaaggaguacaucgaccgccagggcaagaccccccucggccucgucgaccucuucgucuucuccaccuccuucuaccucaucuccaucuuccuccaccucgucaagauccccacccaccgccacaucgucggcaagcccugccccaagccccaccgccucaaccacaugggcaucugcuccugcggccucuacaagcagcccggcguccccguccgcuggaagcgcugaggacuaguaauaaggaaacuguaugaaugucugugggcaggaagugaagagauccuucuguaaagguuuuuggaauuaugucugcugaauaauaaacuuuuuugaaauaauaaaucugguagaaaaaugagaucuaaaaaaaaaaaaaaaaaaaaaaaaaaaaaaaaaaaaaaaaaaaaaaaaaaaaaaaaaaaaaaaaugcaucccccccccccccccccccccccccccccccaaaggcucuuuucagagccaccagaauu

SEQ ID NO: 6783 - RNA, 1816 nt, Artificial Sequence
  mRNA product Design b-4 comprising derived and/or modified sequence from LASV(AV;Clade V)__CCA30314__GPCstabilized (opt2)
gggagagucccgcagucggcguccagcggcucugcuuguucgugugugugucguugcaggccuuauucaagcuuaccaugggccagaucgucaccuucuuccaggaggucccccacgucaucgaggaggucaugaacaucguccucaucgcccucuccauccucgccguccucaagggccucuacaacaucgccaccugcggccucaucggccucaucaccuuccuccuccucugcggccgcuccugcuccuccaaccucuacaagggcgucuacgagcuccagucccucgaccucaacauggagacccucaacaugaccaugccccucuccugcaccaagaacaacucccaccacuacauccgcgucggcaacgacaccggccucgagcucacccucaccaacaccuccauccucaaccacaaguucugcaaccucuccgacgcccacaagaaggaccucuacgaccacgcccucauguccaucaucuccaccuuccaccucuccauccccaacuucaaccaguacgaggccauguccugcgacuucaacggcggcaagaucuccguccaguacaaccucucccacuccuacgccaucgacgccgccaaccacugcggcaccgucgccaacggcauccuccagaccuucaugcgcauggccuggggcggcuccuacaucgcccucgacuccggcugcggcaacugggacugcaucaugaccuccuaccaguaccucaucauccagaacaccaccugggagaaccacugccaguucucccgccccucccccaucggcuaccucggccuccucucccagcgcacccgcgacaucuacaucucccgccgccgccggggcaccuucaccuggacccucuccgacuccgagggcaacgccacccccggcggcuacugccucacccgcuggaugcucaucgaggccgagcucaagugcuucggcaacaccgccgucgccaagugcaacgagaagcacgacgaggaguucugcgacaugcuccgccucuucgacuucaacaagcaggccaucucccgccucaagucccccgcccagauguccauccagcucaucaacaaggccgucaacgcccucaucaacgaccagcucaucaugaagaaccaccuccgcgacaucaugugcauccccuacugcaacuacuccaaguacugguaccucaaccacaccaucaccggcaagaccucccuccccaagugcuggcucgucuccaacggcuccuaccucaacgagacccacuucuccgacgacaucgagcagcaggccgacaacaugaucaccgagaugcuccagaaggaguacauggagcgccagggcaagaccccccucggccucgucgaccucuucgucuucuccaccuccuucuaccucaucuccaucuuccuccgccucgucaagauccccacccaccgccacaucgucggcaagcccugccccaagccccaccgccucaaccacaugggcaucugcuccugcggccucuacaagcagcccggcguccccguccgcuggaagcgcugaggacuaguaauaaggaaacuguaugaaugucugugggcaggaagugaagagauccuucuguaaagguuuuuggaauuaugucugcugaauaauaaacuuuuuugaaauaauaaaucugguagaaaaaugagaucuaaaaaaaaaaaaaaaaaaaaaaaaaaaaaaaaaaaaaaaaaaaaaaaaaaaaaaaaaaaaaaaaugcaucccccccccccccccccccccccccccccccaaaggcucuuuucagagccaccagaauu

SEQ ID NO: 6784 - RNA, 1813 nt, Artificial Sequence
  mRNA product Design b-4 comprising derived and/or modified sequence from LASV(Togo/2016/7082;Clade VI)__AMR44577__GPCstabilized (opt2)
gggagagucccgcagucggcguccagcggcucugcuuguucgugugugugucguugcaggccuuauucaagcuuaccaugggccagaucaucaccuucuuccaggaggucccccacgucaucgaggaggucaugaacaucguccucaucgcccucucccuccucgccauccucaagggcgucuacaacgucgccaccugcggcaucaucggccucgucaccuuccucuuccucugcggccgcuccugcucccucaucuacaagggcuccuacgagcuccagacccucgagcucaacauggagacccucaacaugaccaugccccucuccugcaccaagaacuccucccaccacuacauccgcgucggcaacgagaccggccucgagcucacccucaccaacaccuccaucaucaaccacaaguucugcaaccucuccgacgcccacaagcgcaaccucuacgaccacgcccucauguccauccucuccaccuuccaccucuccauccccaacuucaaccaguacgaggccauguccugcgacuucaacggcggcaagaucuccguccaguacaaccucucccacgccuacgccgucgacgccgccgagcacugcggcaccgucgccaacggcguccuccagaccuucaugcgcauggccuggggcggcuccuacaucgcccucgacuccggcugcggcaacugggacugcaucaugaccuccuaccaguaccucaucauccagaacaccaccugggaggaccacugccaguucucccgccccucccccaucggcuaccucggccuccucucccagcgcacccgcgacaucuacaucucccgccgccgccggggcaccuucaccuggacccucuccgacuccgagggcaacgagacccccggcggcuacugccucacccgcuggaugcucaucgaggccgagcucaagugcuucggcaacaccgccgucgccaagugcaacgagaagcacgacgaggaguucugcgacaugcuccgccucuucgacuucaacaagcaggccauccagcgccucaagucccccgcccagauguccauccagcucaucaacaaggccgucaacgcccucaucaacgaccagcucaucaugaagaaccaccuccgcgacaugaugugcauccccuacugcaacuacuccaaguacugguaccucaaccacaccuccuccggccgcaccucccuccccaagugcuggcucgucuccaacggcuccuaccucaacgagacccacuucuccgacgacaucgagcagcaggccgacaacaugaucaccgagaugcuccagaaggaguacaucgaccgccagggcaagaccccccucggccucgucgaccucuucgucuucuccaccuccuucuaccucaucuccaucuuccuccaccucaucaagauccccacccaccgccacaucgucggcaagcccugccccaagccccaccgccucaaccacaugggcaucugcuccugcggccucuacaagcagcccggcguccccacccgcuggaagcgcugaggacuaguaauaaggaaacuguaugaaugucugugggcaggaagugaagagauccuucuguaaagguuuuuggaauuaugucugcugaauaauaaacuuuuuugaaauaauaaaucugguagaaaaaugagaucuaaaaaaaaaaaaaaaaaaaaaaaaaaaaaaaaaaaaaaaaaaaaaaaaaaaaaaaaaaaaaaaaugcaucccccccccccccccccccccccccccccccaaaggcucuuuucagagccaccagaauu

SEQ ID NO: 6785 - RNA, 1813 nt, Artificial Sequence
  mRNA product Design b-4 comprising derived and/or modified sequence from LASV(KAK-428;Clade n.d. (VII))__ANH09740__GPCstabilized (opt2)
gggagagucccgcagucggcguccagcggcucugcuuguucgugugugugucguugcaggccuuauucaagcuuaccaugggccagaucgucaccuucuuccaggaggucccccacgucaucgaggaggucaugaacaucguccucaucgcccucucccuccucgccauccucaagggccucuacaacuucgccaccugcggcgucaucggccucaucaccuuccuccuccucugcggccgcuccugcuccgccaccuacaagggccaguacgagcuccagacccucgagcucaacauggagucccucaacaugaccaugccccucuccugcaccaagaacaacucccaccacuacauccgcgccggcaacaacaccggccucgagcucacccucaccaacaccuccaucaucucccacaaguucugcaaccucuccgacgcccacaagaagaaccucuacgaccacacccucauguccaucaucaccaccuuccaccucuccauccccaacuucaaccaguacgaggccauguccugcgacuucaacggcggcaagaucuccauccaguacaaccucucccacuccuacgccggcgacgccgcccagcacugcggcaccgucgccaacggcguccuccagaccuucaugcgcauggccuggggcggcuccuaccucgcccucgacuccggcugccgcggcugggacugcaucaucuccuccuaccaguaccucaucauccagaacaccaccugggacgaccacugccaguucucccgccccucccccaucggcuaccucggcuucgucucccagaagacccgcgacaucuacaucucccgccgccgccggggcaccuucaccuggacccucuccgacuccgagggccacgacaugcccggcggcuacugccucacccgcuggaugcucaucgaggccgaccucaagugcuucggcaacaccgccgucgccaagugcaacgagaagcacgacgaggaguucugcgacauguggcgccucuucgacuucaacaagcaggccauccagcgccucaaggcccccgcccagaugaacauccagcucaucaacaaggccgucaacgcccucaucaacgaccagcucaugaugaagaaccaccuccgcgacaucaugugcauccccuacugcaacuacuccaaguucugguaccucaacaacaccaccaccggccgcaccucccucccccgcugcuggcucaucuccaacggcuccuaccucaacgagacccacuucuccgacgacaucgagcagcaggccgacaacaugaucaccgagaugcuccagaaggaguacauggaccgccagggcaagaccccccucggccucgucgaccucuucgucuucuccaccuccuucuaccucaucaccaucuuccuccaccucgucaagauccccacccaccgccacaucgucggcaagcccugccccaagccccaccgccucaaccacaugggcaucugcuccugcggccucuacaagcagcccggcguccccguccgcuggaagcgcugaggacuaguaauaaggaaacuguaugaaugucugugggcaggaagugaagagauccuucuguaaagguuuuuggaauuaugucugcugaauaauaaacuuuuuugaaauaauaaaucugguagaaaaaugagaucuaaaaaaaaaaaaaaaaaaaaaaaaaaaaaaaaaaaaaaaaaaaaaaaaaaaaaaaaaaaaaaaaugcaucccccccccccccccccccccccccccccccaaaggcucuuuucagagccaccagaauu

SEQ ID NO: 6786 - RNA, 1813 nt, Artificial Sequence; identical to SEQ ID NO: 6780
  mRNA product Design b-4 comprising derived and/or modified sequence from LASV(Pinneo-NIG-1969;Clade I)__AIT17836__GPCstabilized (opt2)

SEQ ID NO: 6787 - RNA, 1813 nt, Artificial Sequence
  mRNA product Design b-4 comprising derived and/or modified sequence from LASV(ISTH0009-NIG-2011;Clade II)__AIT17404__GPCstabilized (opt2)
gggagagucccgcagucggcguccagcggcucugcuuguucgugugugugucguugcaggccuuauucaagcuuaccaugggccagaucaucaccuucuuccaggaggucccccacgucaucgaggaggucaugaacaucguccucaucgcccucucccuccucgccauccucaagggcaucuacaacgucgccaccugcggccucuucggccucgucuccuuccuccuccucugcggccgcuccugcuccaccaccuacaagggcgucuacgagcuccagacccucgagcucgacauggccucccucaacaugaccaugccccucuccugcaccaagaacaacucccaccacuacaucauggucggcaacgagaccggccucgagcucacccucaccaacaccuccaucaucaaccacaaguucugcaaccucuccgacgcccacaagaagaaccucuacgaccacgcccucauguccaucaucuccaccuuccaccucuccauccccaacuucaaccaguacgaggccauguccugcgacuucaacggcggcaagaucuccguccaguacaaccucucccacgccuacgccgucgacgccgccaaccacugcggcaccaucgccaacggcguccuccagaccuucaugcgcauggccuggggcggcuccuacaucgcccucgacuccggcugcggcuccugggacugcaucaugaccuccuaccaguaccucaucauccagaacaccaccugggaggaccacugccaguucucccgccccucccccaucggcuaccucggccuccucucccagcgcacccgcgacaucuacaucucccgccgccgccggggcaccuucaccuggacccucuccgacuccgagggcaacgagacccccggcggcuacugccucacccgcuggaugcucaucgaggccgagcucaagugcuucggcaacaccgccgucgccaagugcaacgagaagcacgacgaggaguucugcgacaugcuccgccucuucgacuucaacaagcaggccauccgccgccucaagacccccgcccagauguccauccagcucaucaacaaggccgucaacgcccucaucaacgaccagcucaucaugaagaaccaccuccgcgacaucaugugcauccccuacugcaacuacuccaaguacugguaccucaaccacaccgucaccggcaagaccucccucccccgcugcuggcucgucuccaacggcuccuaccucaacgagacccacuucuccgacgacaucgagcagcaggccgacaacaugaucaccgagcuccuccagaaggaguacauggaccgccagggcaagaccccccucggccucgucgaccucuucgucuucuccaccuccuucuaccucaucuccaucuuccuccaccucaucaagauccccacccaccgccacaucaccggcaagcccugccccaagccccaccgccucaaccacaugggcaucugcuccugcggccucuacaagcaccccggcguccccgucaaguggaagcgcugaggacuaguaauaaggaaacuguaugaaugucugugggcaggaagugaagagauccuucuguaaagguuuuuggaauuaugucugcugaauaauaaacuuuuuugaaauaauaaaucugguagaaaaaugagaucuaaaaaaaaaaaaaaaaaaaaaaaaaaaaaaaaaaaaaaaaaaaaaaaaaaaaaaaaaaaaaaaaugcaucccccccccccccccccccccccccccccccaaaggcucuuuucagagccaccagaauu

SEQ ID NO: 6788 - RNA, 1813 nt, Artificial Sequence
  mRNA product Design b-4 comprising derived and/or modified sequence from LASV(ISTH2010-NIG-2012;Clade II)__AIT17482__GPCstabilized (opt2)
gggagagucccgcagucggcguccagcggcucugcuuguucgugugugugucguugcaggccuuauucaagcuuaccaugggccagaucaucaccuucuuccaggaggucccccacgucaucgaggaggucaugaacaucguccucaucgcccucucccuccucgccauccucaagggcaucuacaacgucgccaccugcggccucuucggccucgucuccuuccuccuccucugcggccgcuccugcuccaccaccuacaagggcgucuacgagcuccagacccucgagcucgacauggccucccucaacaugaccaugccccucuccugcaccaagaacaacucccaccacuacaucauggucggcaacgagaccggccucgagcucacccucaccaacaccuccaucaucaaccacaaguucugcaaccucuccgacgcccacaagaagaaccucuacgaccacgcccucauguccaucaucuccaccuuccaccucuccauccccaacuucaaccaguacgaggccauguccugcgacuucaacggcggcaagaucuccguccaguacaaccucucccacgccuacgccgucgacgccgccaaccacugcggcaccaucgccaacggcguccuccagaccuucaugcgcauggccuggggcggcuccuacaucgcccucgacuccggcugcggcuccugggacugcaucaugaccuccuaccaguaccucaucauccagaacaucaccugggaggaccacugccaguucucccgccccucccccaucggcuaccucggccuccucucccagcgcacccgcgacaucuacaucucccgccgccgccggggcaccuucaccuggacccucuccgacuccgagggcaacgagacccccggcggcuacugccucacccgcuggaugcucaucgaggccgagcucaagugcuucggcaacaccgccgucgccaagugcaacgagaagcacgacgaggaguucugcgacaugcuccgccucuucgacuucaacaagcaggccauccgccgccucaagacccccgcccagauguccauccagcucaucaacaaggccgucaacgcccucaucaacgaccagcucaucaugaagaaccaccuccgcgacaucaugugcauccccuacugcaacuacuccaaguacugguaccucaaccacaccgucaccggcaagaccucccucccccgcugcuggcucgucuccaacggcuccuaccucaacgagacccacuucuccgacgacaucgagcagcaggccgacaacaugaucaccgagcuccuccagaaggaguacaucgaccgccagggcaagaccccccucggccucgucgaccucuucgucuucuccaccuccuucuaccucaucuccaucuuccuccaccucgucaagauccccacccaccgccacgucgucggcaagcccugccccaagccccaccgccucaaccacaugggcaucugcuccugcggccucuacaagcaccccggcguccccgucaaguggaagcgcugaggacuaguaauaaggaaacuguaugaaugucugugggcaggaagugaagagauccuucuguaaagguuuuuggaauuaugucugcugaauaauaaacuuuuuugaaauaauaaaucugguagaaaaaugagaucuaaaaaaaaaaaaaaaaaaaaaaaaaaaaaaaaaaaaaaaaaaaaaaaaaaaaaaaaaaaaaaaaugcaucccccccccccccccccccccccccccccccaaaggcucuuuucagagccaccagaauu

SEQ ID NO: 6789 - RNA, 1813 nt, Artificial Sequence
  mRNA product Design b-4 comprising derived and/or modified sequence from LASV(Lassa virus/H.sapiens-wt/NGA/2015/ISTH_0543;Clade II)__AVO03639__GPCstabilized (opt2)
gggagagucccgcagucggcguccagcggcucugcuuguucgugugugugucguugcaggccuuauucaagcuuaccaugggccagaucaucaccuucuuccaggaggucccccacgucaucgaggaggucaugaacaucguccucaucgcccucucccuccucgccauccucaagggcaucuacaacgucgccaccugcggccucuucggccucgucuccuuccuccuccucugcggccgcuccugcuccaccaccuacaagggcgucuacgagcuccagacccucgagcucgacauggccaaccucaacaugaccaugccccucuccugcaccaagaacaacucccaccacuacaucauggucggcaacgagaccggccucgagcucacccucaccaacaccuccaucaucaaccacaaguucugcaaccucuccgacgcccacaagaagaaccucuacgaccacgcccucauguccaucaucuccaccuuccaccucuccauccccaacuucaaccaguacgaggccauguccugcgacuucaacggcggcaagaucuccguccaguacaaccucucccacaccuacgccgucgacgccgccaaccacugcggcaccaucgccaacggcguccuccagaccuucaugcgcauggccuggggcggcuccuacaucgcccucgacuccggcugcggcuccugggacugcaucaugaccuccuaccaguaccucgucauccagaacaccaccugggaggaccacugccaguucucccgccccucccccaucggcuaccucggccuccucucccagcgcacccgcgacaucuacaucucccgccgccgccggggcaccuucaccuggacccucuccgacuccgagggcaacgagacccccggcggcuacugccucacccgcuggaugcucaucgaggccgagcucaagugcuucggcaacaccgccgucgccaagugcaacgagaagcacgacgaggaguucugcgacaugcuccgccucuucgacuucaacaagcaggccauccgccgccucaagacccccgcccagauguccauccagcucaucaacaaggccgucaacgcccucaucaacgaccagcucaucaugaagaaccaccuccgcgacaucaugugcauccccuacugcaacuacuccaaguacugguaccucaaccacaccgucaccggcaagaccucccucccccgcugcuggcucgucuccaacggcuccuaccucaacgagacccacuucuccgacgacaucgagcagcaggccgacaacaugaucaccgagcuccuccagaaggaguacaucgaccgccagggcaagaccccccucggccucgucgaccucuucgucuucuccaccuccuucuaccucaucuccaucuuccuccaccucgucaagauccccacccaccgccacaucaccggcaagcccugccccaagccccaccgccucaaccacaugggcaucugcuccugcggccucuacaagcaccccggcguccccgucaaguggaagcgcugaggacuaguaauaaggaaacuguaugaaugucugugggcaggaagugaagagauccuucuguaaagguuuuuggaauuaugucugcugaauaauaaacuuuuuugaaauaauaaaucugguagaaaaaugagaucuaaaaaaaaaaaaaaaaaaaaaaaaaaaaaaaaaaaaaaaaaaaaaaaaaaaaaaaaaaaaaaaaugcaucccccccccccccccccccccccccccccccaaaggcucuuuucagagccaccagaauu

SEQ ID NO: 6790 - RNA, 1813 nt, Artificial Sequence
  mRNA product Design b-4 comprising derived and/or modified sequence from LASV(Lassa virus/H.sapiens-wt/NGA/2016/ISTH_0009;Clade II)__AVO03571__GPCstabilized (opt2)
gggagagucccgcagucggcguccagcggcucugcuuguucgugugugugucguugcaggccuuauucaagcuuaccaugggccagaucaucaccuucuuccaggaggucccccacgucaucgaggaggucaugaacaucguccucaucgcccucucccuccucgccauccucaagggcaucuacaacgucgccaccugcggccuccucggccucgucuccuuccuccuccucugcggccgcuccugcuccaccaccuacaagggcgucuacgagcuccagacccucgagcucgacauggccucccucaacaugaccaugccccucuccugcaccaagaacaacucccaccacuacaucauggucggcaacgagaccggccucgagcucacccucaccaacaccuccaucaucaaccacaaguucugcaaccucuccgacgcccacaagaagaaccucuacgaccacgcccucauguccaucaucuccaccuuccaccucuccauccccaacuucaaccaguacgaggccauguccugcgacuucaacggcggccgcaucuccguccaguacaaccucucccacuccuacgccgucgacgccgccaaccacugcggcaccaucgccaacggcguccuccagaccuucaugcgcauggccuggggcggcuccuacaucgcccucgacuccggcugcggcuccugggacugcaucaugaccuccuaccaguaccucaucauccagaacaccaccugggaggaccacugccaguucucccgccccucccccaucggcuaccucggccuccucucccagcgcacccgcgacaucuacaucucccgccgccgccggggcaccuucaccuggacccucuccgacuccgagggcaacgagacccccggcggcuacugccucacccgcuggaugcucaucgaggccgagcucaagugcuucggcaacaccgccgucgccaagugcaacgagaagcacgacgaggaguucugcgacaugcuccgccucuucgacuucaacaagcaggccauccgccgccucaagacccccgcccagauguccauccagcucaucaacaaggccgucaacgcccucaucaacgaccagcucaucaugaagaaccaccuccgcgacaucaugugcauccccuacugcaacuacuccaaguacugguaccucaaccacaccgucaccggcaagaccucccucccccgcugcuggcucgucuccaacggcuccuaccucaacgagacccacuucuccgacgacaucgagcagcaggccgacaacaugaucaccgagcuccuccagaaggaguacaucgaccgccagggcaagaccccccucggccucgucgaccucuucgucuucuccaccuccuucuaccucaucuccaucuuccuccaccucgucaagauccccacccaccgccacaucaccggcaagcccugccccaagccccaccgccucaaccacaugggcaucugcuccugcggccucuacaaccaccccggcguccccgucaaguggaagcgcugaggacuaguaauaaggaaacuguaugaaugucugugggcaggaagugaagagauccuucuguaaagguuuuuggaauuaugucugcugaauaauaaacuuuuuugaaauaauaaaucugguagaaaaaugagaucuaaaaaaaaaaaaaaaaaaaaaaaaaaaaaaaaaaaaaaaaaaaaaaaaaaaaaaaaaaaaaaaaugcaucccccccccccccccccccccccccccccccaaaggcucuuuucagagccaccagaauu

SEQ ID NO: 6791 - RNA, 1813 nt, Artificial Sequence
  mRNA product Design b-4 comprising derived and/or modified sequence from LASV(Lassa virus/H.sapiens-wt/NGA/2016/ISTH_0017;Clade II)__AVO03567__GPCstabilized (opt2)
gggagagucccgcagucggcguccagcggcucugcuuguucgugugugugucguugcaggccuuauucaagcuuaccaugggccagaucaucaccuucuuccaggaggucccccacgucaucgaggaggucaugaacaucguccucaucgcccucucccuccucgccauccucaagggcaucuacaacgucgccaccugcggccucuucggccucgucuccuuccuccuccucugcggccgcuccugcuccaccaccuacaagggcgucuacgagcuccagacccucgagcucgacauggccucccucaacaugaccaugccccucuccugcaccaagaacaacucccaccacuacaucauggucggcaacgagaccggccucgagcucacccucaccaacaccuccaucaucaaccacaaguucugcaaccucuccgacgcccacaagaagaaccucuacgaccacgcccucauguccaucaucuccaccuuccaccucuccauccccaacuucaaccaguacgaggccauguccugcgacuucaacggcggcaagaucuccguccaguacaaccucucccacaccuacgccaucgacgccgccaaccacugcggcaccaucgccaacggcguccuccagaccuucaugcgcauggccuggggcggcuccuacaucgcccucgacuccggcugcggcuccugggacugcaucaugaccuccuaccaguaccucaucauccagaacaccaccugggaggaccacugccaguucucccgccccucccccaucggcuaccucggccuccucucccagcgcacccgcgacaucuacaucucccgccgccgccggggcaccuucaccuggacccucuccgacuccgagggcaacgagacccccggcggcuacugccucacccgcuggaugcucaucgaggccgagcucaagugcuucggcaacaccgccgucgccaagugcaacgagaagcacgacgaggaguucugcgacaugcuccgccucuucgacuucaacaagcaggccauccgccgccucaagacccccgcccagauguccauccagcucaucaacaaggccgucaacgcccucaucaacgaccagcucaucaugaagaaccaccuccgcgacaucaugugcauccccuacugcaacuacuccaaguacugguaccucaaccacaccgucaccggcaagaccucccucccccgcugcuggcucgucuccaacggcuccuaccucaacgagacccacuucuccgacgacaucgagcagcaggccgacaacaugaucaccgagcuccuccagaaggaguacauggaccgccagggcaagaccccccucggccucgucgaccucuucgucuucuccaccuccuucuaccucaucuccaucuuccuccaccucguccgcauccccacccaccgccacgucaucggcaagcccugccccaagccccaccgccucaaccacaugggcaucugcuccugcggccucuacaagcaccccggcguccccgucaaguggaagcgcugaggacuaguaauaaggaaacuguaugaaugucugugggcaggaagugaagagauccuucuguaaagguuuuuggaauuaugucugcugaauaauaaacuuuuuugaaauaauaaaucugguagaaaaaugagaucuaaaaaaaaaaaaaaaaaaaaaaaaaaaaaaaaaaaaaaaaaaaaaaaaaaaaaaaaaaaaaaaaugcaucccccccccccccccccccccccccccccccaaaggcucuuuucagagccaccagaauu

SEQ ID NO: 6792 - RNA, 1813 nt, Artificial Sequence
  mRNA product Design b-4 comprising derived and/or modified sequence from LASV(Lassa virus/H.sapiens-wt/NGA/2018/ISTH_0959;Clade II)__AVV65099__GPCstabilized (opt2)
gggagagucccgcagucggcguccagcggcucugcuuguucgugugugugucguugcaggccuuauucaagcuuaccaugggccagaucaucaccuucuuccaggaggucccccacgucaucgaggaggucaugaacaucguccucaucgcccucucccuccucgccauccucaagggcaucuacaacgucgucaccugcggccucuucggccucgucuccuuccuccuccucugcggccgcuccugcuccaccaccuacaagggcgucuacgagcuccagacccucgagcucgacauggccucccucaacaugaccaugccccucuccugcaccaagaacaacucccaccacuacaucauggucggcaacgagaccggccucgagcucacccucaccaacaccuccaucaucaaccacaaguucugcaaccucuccgacgcccacaagaagaaccucuacgaccacgcccucauguccaucaucuccaccuuccaccucuccauccccaacuucaaccaguacgaggccauguccugcgacuucaacggcggcaagaucuccguccaguacaaccucucccacgccuacgccaucgacgccgccaaccacugcggcaccaucgccaacggcguccuccagaccuucaugcgcauggccuggggcggcuccuacaucgcccucgacuccggcugcggcuccugggacugcaucaugaccuccuaccaguaccucaucauccagaacaccaccugggaggaccacugccaguucucccgccccucccccaucggcuaccucggccuccucucccagcgcacccgcgacaucuacaucucccgccgccgccggggcaccuucaccuggacccucuccgacuccgagggcaacgagacccccggcggcuacugccucacccgcuggaugcucaucgaggccgagcucaagugcuucggcaacaccgccgucgccaagugcaacgagaagcacgacgaggaguucugcgacaugcuccgccucuucgacuucaacaagcaggccauccgccgccucaagacccccgcccagauguccauccagcucaucaacaaggccgucaacgcccucaucaacgaccagcucaucaugaagaaccaccuccgcgacaucaugugcauccccuacugcaacuacuccaaguacugguaccucaaccacaccgucaccggcaagaccucccucccccgcugcuggcucgucuccaacggcuccuaccucaacgagacccacuucuccgacgacaucgagcagcaggccgacaacaugaucaccgagcuccuccagaaggaguacaucgaccgccagggcaagaccccccucggccucgucgaccucuucgucuucuccaccuccuucuaccucaucuccaucuuccuccaccucgucaagauccccacccaccgccacgucaucggcaagcccugccccaagccccaccgccucaaccacaugggcaucugcuccugcggccucuacaagcaccccggcguccccgucaaguggaagcgcugaggacuaguaauaaggaaacuguaugaaugucugugggcaggaagugaagagauccuucuguaaagguuuuuggaauuaugucugcugaauaauaaacuuuuuugaaauaauaaaucugguagaaaaaugagaucuaaaaaaaaaaaaaaaaaaaaaaaaaaaaaaaaaaaaaaaaaaaaaaaaaaaaaaaaaaaaaaaaugcaucccccccccccccccccccccccccccccccaaaggcucuuuucagagccaccagaauu

SEQ ID NO: 6793 - RNA, 1813 nt, Artificial Sequence
  mRNA product Design b-4 comprising derived and/or modified sequence from LASV(LASV003-NIG-2008;Clade II)__AIT17580__GPCstabilized (opt2)
gggagagucccgcagucggcguccagcggcucugcuuguucgugugugugucguugcaggccuuauucaagcuuaccaugggccagaucaucaccuucuuccaggaggucccccacgucaucgaggaggucaugaacaucguccucaucgcccucucccuccucgccauccucaagggcaucuacaacgucgccaccugcggccucuucggccucgucuccuuccuccuccucugcggccgcuccugcuccaccaccuacaagggcgucuacgagcuccagacccucgagcucgacauggccucccucaacaugaccaugccccucuccugcaccaagaacaacucccaccacuacaucauggucggcaacgagaccggccucgagcucacccucaccaacaccuccaucaucaaccacaaguucugcaaccucuccgacgcccacaagaagaaccucuacgaccacgcccucauguccaucaucuccaccuuccaccucuccauccccaacuucaaccaguacgaggccauguccugcgacuucaacggcggcaagaucuccguccaguacaaccucucccacaccuacgccgucgacgccgccaaccacugcggcaccaucgccaacggcguccuccagaccuucaugcgcauggccuggggcggcuccuacaucgcccucgacuccggcugcggcuccugggacugcaucaugaccuccuaccaguaccucaucauccagaacaccaccugggaggaccacugccaguucucccgccccucccccaucggcuaccucggccuccucucccagcgcacccgcgacaucuacaucucccgccgccgccggggcaccuucaccuggacccucuccgacuccgaguccaacgagacccccggcggcuacugccucacccgcuggaugcucaucgaggccgagcucaagugcuucggcaacaccgccgucgccaagugcaacgagaagcacgacgaggaguucugcgacaugcuccgccucuucgacuucaacaagcaggccauccgccgccucaaggcccccgcccagauguccauccagcucaucaacaaggccgucaacgcccucaucaacgaccagcucaucaugaagaaccaccuccgcgacaucaugugcauccccuacugcaacuacuccaaguacugguaccucaaccacaccgucaccggccgcaccucccucccccgcugcuggcucgucuccaacggcuccuaccucaacgagacccacuucuccgacgacaucgagcagcaggccgacaacaugaucaccgagcuccuccagaaggaguacauggaccgccagggcaagaccccccucggccucgucgaccucuucgucuucuccaccuccuucuaccucaucuccaucuuccuccaccucgucaagauccccacccaccgccacgucaucggcaagcccugccccaagccccaccgccucaaccacaugggcaucugcuccugcggccucuacaagcaccccggcguccccgucaaguggaagcgcugaggacuaguaauaaggaaacuguaugaaugucugugggcaggaagugaagagauccuucuguaaagguuuuuggaauuaugucugcugaauaauaaacuuuuuugaaauaauaaaucugguagaaaaaugagaucuaaaaaaaaaaaaaaaaaaaaaaaaaaaaaaaaaaaaaaaaaaaaaaaaaaaaaaaaaaaaaaaaugcaucccccccccccccccccccccccccccccccaaaggcucuuuucagagccaccagaauu

SEQ ID NO: 6794 - RNA, 1813 nt, Artificial Sequence
  mRNA product Design b-4 comprising derived and/or modified sequence from LASV(LASV035-NIG-2009;Clade II)__AIT17588__GPCstabilized (opt2)
gggagagucccgcagucggcguccagcggcucugcuuguucgugugugugucguugcaggccuuauucaagcuuaccaugggccagaucaucaccuucuuccaggaggucccccacgucaucgaggaggucaugaacaucguccucaucgcccucucccuccucgccauccucaagggcaucuacaacgucgccaccugcggccucuucggccucgucuccuuccuccuccucugcggccgcuccugcuccaccaccuacaagggcgucuacgagcuccagacccucgagcucgacauggccucccucaacaugaccaugccccucuccugcaccaagaacaacucccaccacuacaucauggucggcaacgagaccggccucgagcucacccucaccaacaccuccaucaucaaccacaaguucugcaaccucuccgacgcccacaagaagaaccucuacgaccacgcccucauguccaucaucuccaccuuccaccucuccauccccaacuucaaccaguacgaggccauguccugcgacuucaacggcggcaagaucuccguccaguacaaccucucccacgccuacgccgucgacgccgccaaccacugcggcaccaucgccaacggcguccuccagaccuucaugcgcauggccuggggcggcuccuacaucgcccucgacuccggcugcggcuccugggacugcaucaugaccuccuaccaguaccucaucauccagaacaccaccugggaggaccacugccaguucucccgccccucccccaucggcuaccucggccuccucucccagcgcacccgcgacaucuacaucucccgccgccgccggggcaccuucaccuggacccucuccgacuccgagggcaacgagacccccggcggcuacugccucacccgcuggaugcucaucgaggccgagcucaagugcuucggcaacaccgccgucgccaagugcaacgagaagcacgacgaggaguucugcgacaugcuccgccucuucgacuucaacaagcaggccauccgccgccucaaggcccccgcccagauguccauccagcucaucaacaaggccgucaacgcccucaucaacgaccagcucaucaugaagaaccaccuccgcgacaucaugugcauccccuacugcaacuacuccaaguacugguaccucaaccacaccgucaccggcaagaccucccucccccgcugcuggcucgucuccaacggcuccuaccucaacgagacccacuucuccgacgacaucgagcagcaggccgacaacaugaucaccgagcuccuccagaaggaguacaucgaccgccagggcaagaccccccucggccucgucgaccucuucgucuucuccaccuccuucuaccucaucuccaucuuccuccaccucgucaagauccccacccaccgccacgucaucggcaagcccugccccaagccccaccgccucaaccacaugggcaucugcuccugcggccucuacaagcaccccggcguccccgucaaguggaagcgcugaggacuaguaauaaggaaacuguaugaaugucugugggcaggaagugaagagauccuucuguaaagguuuuuggaauuaugucugcugaauaauaaacuuuuuugaaauaauaaaucugguagaaaaaugagaucuaaaaaaaaaaaaaaaaaaaaaaaaaaaaaaaaaaaaaaaaaaaaaaaaaaaaaaaaaaaaaaaaugcaucccccccccccccccccccccccccccccccaaaggcucuuuucagagccaccagaauu

SEQ ID NO: 6795 - RNA, 1813 nt, Artificial Sequence
  mRNA product Design b-4 comprising derived and/or modified sequence from LASV(LASV1000-NIG-2009;Clade II)__AIT17782__GPCstabilized (opt2)
gggagagucccgcagucggcguccagcggcucugcuuguucgugugugugucguugcaggccuuauucaagcuuaccaugggccagaucaucaccuucuuccaggaggucccccacgucaucgaggaggucaugaacaucguccucaucgcccucucccuccucgccauccucaagggcaucuacaacgucgccaccugcggccucuucggccucgucuccuuccuccuccucugcggccgcuccugcuccaccaccuacaagggcgucuacgagcuccagacccucgagcucgacauggccucccucaacaugaccaugccccucuccugcaccaagaacaacucccaccacuacaucauggucggcaacgagaccggccucgagcucacccucaccaacaccuccaucaucaaccacaaguucugcaaccucuccgacgcccacaagaagaaccucuacgaccacgcccucauguccaucaucuccaccuuccaccucuccauccccaacuucaaccaguacgaggccauguccugcgacuucaacggcggcaagaucuccguccaguacaaccucucccacaccuacgccgucgacgccgccaaccacugcggcaccaucgccaacggcguccuccagaccuucaugcgcauggccuggggcggcuccuacaucgcccucgacuccggcugcggcuccugggacugcaucaugaccuccuaccaguaccucaucauccagaacaccaccugggaggaccacugccaguucucccgccccucccccaucggcuaccucggccuccucucccagcgcacccgcgacaucuacaucucccgccgccgccggggcaccuucaccuggacccucuccgacuccgagggcaacgagacccccggcggcuacugccucacccgcuggaugcucaucgaggccgagcucaagugcuucggcaacaccgccgucgccaagugcaacgagaagcacgacgaggaguucugcgacaugcuccgccucuucgacuucaacaagcaggccaucaagcgccucaagacccccgcccagauguccauccagcucaucaacaaggccgucaacgcccucaucaacgaccagcucaucaugaagaaccaccuccgcgacaucaugugcauccccuacugcaacuacuccaaguacugguaccucaaccacaccgucaccggcaagaccucccucccccgcugcuggcucgucuccaacggcuccuaccucaacgagacccacuucuccgacgacaucgagcagcaggccgacaacaugaucaccgagcuccuccagaaggaguacaucgaccgccagggcaagaccccccucggccucgucgaccucuucgucuucuccaccuccuucuaccucaucuccaucuuccuccaccucgucaagauccccacccaccgccacgucgucggcaagcccugccccaagccccaccgccucaaccacaugggcaucugcuccugcggccucuacaagcaccccggcguccccgucaaguggaagcgcugaggacuaguaauaaggaaacuguaugaaugucugugggcaggaagugaagagauccuucuguaaagguuuuuggaauuaugucugcugaauaauaaacuuuuuugaaauaauaaaucugguagaaaaaugagaucuaaaaaaaaaaaaaaaaaaaaaaaaaaaaaaaaaaaaaaaaaaaaaaaaaaaaaaaaaaaaaaaaugcaucccccccccccccccccccccccccccccccaaaggcucuuuucagagccaccagaauu

SEQ ID NO: 6796 - RNA, 1813 nt, Artificial Sequence
  mRNA product Design b-4 comprising derived and/or modified sequence from LASV(LASV221-NIG-2010;Clade II)__AIT17624__GPCstabilized (opt2)
gggagagucccgcagucggcguccagcggcucugcuuguucgugugugugucguugcaggccuuauucaagcuuaccaugggccagaucaucaccuucuuccaggaggucccccacgucaucgaggaggucaugaacaucguccucaucgcccucucccuccucgccauccucaagggcaucuacaacgucgccaccugcggccucuucggccucgucuccuuccuccuccucugcggccgcuccugcuccaccaccuacaagggcgucuacgagcuccagacccucgagcucgacauggccucccucaacaugaccaugccccucuccugcaccaagaacaacucccaccacuacaucauggucggcaacgagaccggccucgagcucacccucaccaacaccuccaucaucaaccacaaguucugcaaccucuccgacgcccacaagaagaaccucuacgaccacgcccucauguccaucaucuccaccuuccaccucuccauccccaacuucaaccaguacgaggccauguccugcgacuucaacggcggcaagaucuccguccaguacaaccucucccacaccuacgccaucgacgccgccaaccacugcggcaccaucgccaacggcguccuccagaccuucaugcgcauggccuggggcggcuccuacaucgcccucgacuccggcugcggcuccugggacugcaucaugaccuccuaccaguaccucaucauccagaacaccaccugggaggaccacugccaguucucccgccccucccccaucggcuaccucggccuccucucccagcgcacccgcgacaucuacaucucccgccgccgccggggcaccuucaccuggacccucuccgacuccgagggcaacgagacccccggcggcuacugccucacccgcuggaugcucaucgaggccgagcucaagugcuucggcaacaccgccgucgccaagugcaacgagaagcacgacgaggaguucugcgacaugcuccgccucuucgacuucaacaagcaggccauccgccgccucaagacccccgcccagauguccauccagcucaucaacaaggccgucaacgcccucaucaacgaccagcucaucaugaagaaccaccuccgcgacaucaugugcauccccuacugcaacuacuccaaguacugguaccucaaccacaccgucaccggcaagaccucccucccccgcugcuggcucgucuccaacggcuccuaccucaacgagacccacuucuccgacgacaucgagcagcaggccgacaacaugaucaccgagaugcuccagaaggaguacauggaccgccagggcaagaccccccucggccucgucgaccucuucgucuucuccaccuccuucuaccucaucuccaucuuccuccaccucgucaagauccccacccaccgccacgucaucggcaagcccugccccaagccccaccgccucaaccacaugggcaucugcuccugcggccucuacaagcaccccggcguccccgucaaguggaagcgcugaggacuaguaauaaggaaacuguaugaaugucugugggcaggaagugaagagauccuucuguaaagguuuuuggaauuaugucugcugaauaauaaacuuuuuugaaauaauaaaucugguagaaaaaugagaucuaaaaaaaaaaaaaaaaaaaaaaaaaaaaaaaaaaaaaaaaaaaaaaaaaaaaaaaaaaaaaaaaugcaucccccccccccccccccccccccccccccccaaaggcucuuuucagagccaccagaauu

SEQ ID NO: 6797 - RNA, 1813 nt, Artificial Sequence
  mRNA product Design b-4 comprising derived and/or modified sequence from LASV(LASV237-NIG-2010;Clade II)__AIT17638__GPCstabilized (opt2)
gggagagucccgcagucggcguccagcggcucugcuuguucgugugugugucguugcaggccuuauucaagcuuaccaugggccagaucaucaccuucuuccaggaggucccccacgucaucgaggaggucaugaacaucguccucaucgcccucucccuccucgccauccucaagggcaucuacaacgucgccaccugcggccucuucggccucgucuccuuccuccuccucugcggccgcuccugcuccaccaccuacaagggcgucuacgagcuccagacccucgagcucgacauggccucccucaacaugaccaugccccucuccugcaccaagaacaacucccaccacuacaucauggucggcaacgagaccggccucgagcucacccucaccaacaccuccaucaucaaccacaaguucugcaaccucuccgacgcccacaagaaggaccucuacgaccacgcccucauguccaucaucuccaccuuccaccucuccauccccaacuucaaccaguacgaggccauguccugcgacuucaacggcggcaagaucuccguccaguacaaccucucccacaccuacgccgucgacgccgccaaccacugcggcaccaucgccaacggcguccuccagaccuucaugcgcauggccuggggcggcuccuacaucgcccucgacuccggcugcggcuccugggacugcaucaugaccuccuaccaguaccucaucauccagaacaccaccugggaggaccacugccaguucucccgccccucccccaucggcuaccucggccuccucucccagcgcacccgcgacaucuacaucucccgccgccgccggggcaccuucaccuggacccucuccgacuccgagggcaacgagacccccggcggcuacugccucacccgcuggaugcucaucgaggccgagcucaagugcuucggcaacaccgccgucgccaagugcaacgagaagcacgacgaggaguucugcgacaugcuccgccucuucgacuucaacaagcaggccauccgccgccucaagacccccgcccagauguccauccagcucaucaacaaggccgucaacgcccucaucaacgaccagcucaucaugaagaaccaccuccgcgacaucaugugcauccccuacugcaacuacuccaaguacugguaccucaaccacaccgucaccggcaagaccucccucccccgcugcuggcucgucuccaacggcuccuaccucaacgagacccacuucuccgacgacaucgagcagcaggccgacaacaugaucaccgagcuccuccagaaggaguacauggaccgccagggcaagaccccccucggccucgucgaccucuucgucuucuccaccuccuucuaccucaucuccaucuuccuccaccucaucaagauccccacccaccgccacaucaccggcaagcccugccccaagccccaccgccucaaccacaugggcaucugcuccugcggccucuacaagcaccccggcguccccgucaaguggaagcgcugaggacuaguaauaaggaaacuguaugaaugucugugggcaggaagugaagagauccuucuguaaagguuuuuggaauuaugucugcugaauaauaaacuuuuuugaaauaauaaaucugguagaaaaaugagaucuaaaaaaaaaaaaaaaaaaaaaaaaaaaaaaaaaaaaaaaaaaaaaaaaaaaaaaaaaaaaaaaaugcaucccccccccccccccccccccccccccccccaaaggcucuuuucagagccaccagaauu

SEQ ID NO: 6798 - RNA, 1813 nt, Artificial Sequence
  mRNA product Design b-4 comprising derived and/or modified sequence from LASV(LASV253-NIG-2011;Clade II)__AIT17670__GPCstabilized (opt2)
gggagagucccgcagucggcguccagcggcucugcuuguucgugugugugucguugcaggccuuauucaagcuuaccaugggccagaucaucaccuucuuccaggaggucccccacgucaucgaggaggucaugaacaucguccucaucgcccucucccuccucgccauccucaagggcaucuacaacgucgccaccugcggccucuucggccucgucuccuuccuccuccucugcggccgcuccugcuccaccaccuacaagggcgucuacgagcuccagacccucgagcucgacauggccucccucaacaugaccaugccccucuccugcaccaagaacaacucccaccacuacaucauggucggcaacgagaccggccucgagcucacccucaccaacaccuccaucaucaaccacaaguucugcaaccucuccgacgcccacaagaagaaccucuacgaccacgcccucauguccaucaucuccaccuuccaccucuccauccccaacuucaaccaguacgaggccauguccugcgacuucaacggcggcaagaucuccguccaguacaaccucucccacaccuacgccgucgacgccgccaaccacugcggcaccaucgccaacggcguccuccagaccuucaugcgcauggccuggggcggcuccuacaucgcccucgacuccggcugcggcuccugggacugcaucaugaccuccuaccaguaccucaucauccagaacaccaccugggaggaccacugccaguucucccgccccucccccaucggcuaccucggccuccucucccagcgcacccgcgacaucuacaucucccgccgccgccggggcaccuucaccuggacccucuccgacuccgagggcaacgagacccccggcggcuacugccucacccgcuggaugcucaucgaggccgagcucaagugcuucggcaacaccgccgucgccaagugcaacgagaagcacgacgaggaguucugcgacaugcuccgccucuucgacuucaacaagcaggccauccgccgccucaaggcccccgcccagauguccauccagcucaucaacaaggccgucaacgcccucaucaacgaccagcucaucaugaagaaccaccuccgcgacaucaugugcauccccuacugcaacuacuccaaguacugguaccucaaccacaccgucaccggccgcaccucccucccccgcugcuggcucgucuccaacggcuccuaccucaacgagacccacuucuccgacgacaucgagcagcaggccgacaacaugaucaccgagcuccuccagaaggaguacaucgaccgccagggcaagaccccccucggccucgucgaccucuucgucuucuccaccuccuucuaccucaucuccaucuuccuccaccucgucaagauccccacccaccgccacaucaucggcaagcccugccccaagccccaccgccucaaccacaugggcaucugcuccugcggccucuacaagcaccccggcguccccgucaaguggaagcgcugaggacuaguaauaaggaaacuguaugaaugucugugggcaggaagugaagagauccuucuguaaagguuuuuggaauuaugucugcugaauaauaaacuuuuuugaaauaauaaaucugguagaaaaaugagaucuaaaaaaaaaaaaaaaaaaaaaaaaaaaaaaaaaaaaaaaaaaaaaaaaaaaaaaaaaaaaaaaaugcaucccccccccccccccccccccccccccccccaaaggcucuuuucagagccaccagaauu

SEQ ID NO: 6799 - RNA, 1813 nt, Artificial Sequence
  mRNA product Design b-4 comprising derived and/or modified sequence from LASV(LASV254-NIG-2011;Clade II)__AIT17674__GPCstabilized (opt2)
gggagagucccgcagucggcguccagcggcucugcuuguucgugugugugucguugcaggccuuauucaagcuuaccaugggccagaucaucaccuucuuccaggaggucccccacgucaucgaggaggucaugaacaucguccucaucgcccucucccuccucgccauccucaagggcaucuacaacgucgccaccugcggccucuucggccucgucuccuuccuccuccucugcggccgcuccugcuccaccaccuacaagggcgucuacgagcuccagacccucgagcucgacaugaccaaccucaacaugaccaugccccucuccugcaccaagaacaacucccaccacuacaucauggucggcaacgagaccggccucgagcucacccucaccaacaccuccaucaucaaccacaaguucugcaaccucuccgacgcccacaagaagaaccucuacaaccacgcccucauguccaucaucuccaccuuccaccucuccauccccaacuucaaccaguacgaggccauguccugcgacuucaacggcggcaagaucuccguccaguacaaccucucccacuccuacgccgucgacgccgccaaccacugcggcaccaucgccaacggcguccuccagaccuucaugcgcauggccuggggcggcuccuacaucgcccucgacuccggcugcggcaacugggacugcaucaugaccuccuaccaguaccucaucauccagaacaccaccugggaggaccacugccaguucucccgccccucccccaucggcuaccucggccuccucucccagcgcacccgcgacaucuacaucucccgccgccgccggggcaccuucaccuggacccucuccgacuccgagggcaacgagacccccggcggcuacugccucacccgcuggaugcucaucgaggccgagcucaagugcuucggcaacaccgccgucgccaagugcaacgagaagcacgacgaggaguucugcgacaugcuccgccucuucgacuucaacaagcaggccauccgccgccucaagacccccgcccaggccaacauccagcucaucaacaaggccgucaacgcccucaucaacgaccagcucaucaugaagaaccaccuccgcgacaucaugugcauccccuacugcaacuacuccaaguacugguaccucaaccacaccgucaccggcaagaccucccucccccgcugcuggcucgucuccaacggcuccuaccucaacgagacccacuucuccgacgacaucgagcagcaggccgacaacaugaucaccgagcuccuccagaaggaguacauggaccgccagggcaagaccccccucggccucgucgaccucuucgucuucuccaccuccuucuaccucaucuccaucuuccuccaccucgucaagauccccacccaccgccacgucaucggcaagcccugccccaagccccaccgccucaaccacaugggcaucugcuccugcggccucuacaagcaccccggcguccccgucaaguggaagcgcugaggacuaguaauaaggaaacuguaugaaugucugugggcaggaagugaagagauccuucuguaaagguuuuuggaauuaugucugcugaauaauaaacuuuuuugaaauaauaaaucugguagaaaaaugagaucuaaaaaaaaaaaaaaaaaaaaaaaaaaaaaaaaaaaaaaaaaaaaaaaaaaaaaaaaaaaaaaaaugcaucccccccccccccccccccccccccccccccaaaggcucuuuucagagccaccagaauu

SEQ ID NO: 6800 - RNA, 1813 nt, Artificial Sequence
  mRNA product Design b-4 comprising derived and/or modified sequence from LASV(Nig08-A19;Clade III)__ADU56618__GPCstabilized (opt2)
gggagagucccgcagucggcguccagcggcucugcuuguucgugugugugucguugcaggccuuauucaagcuuaccaugggccagaucgucaccuucuuccaggaggucccccacgucaucgaggaggucaugaacaucguccucaucgcccucuccauccucgccauccucaagggccucuacaacaucgccaccugcggccucaucggccucgucaccuuccuccuccucuccggccgcuccugcuccaugaccuacaagggcgucuacgagcuccagacccucgagcucaacaugaacacccucaacaugaccaugccccucuccugcaccaagaacaacucccaccacuacaucauggucggcaacgagaccggccucgagcucacccucaccaacaccucccuccuccaccacaaguucugcaaccucuccgacgcccacaagaagaaccucuacgaccacacccucauguccaucaucuccaccuuccaccucuccauccccaacuucaaccaguacgaggccauguccugcgacuucaacggcggcaagaucaccguccaguacaaccucucccacuccuacgccaucgacgccgccaaccacugcggcaccgucgccaacggcguccuccagaccuucaugcgcauggccuggggcggcuccuacaucgcccucgacuccggcugcggcaagugggacugcaucaugaccuccuaccaguaccucaucauccagaacaccaccugggaggaccacugccaguucucccgccccucccccaucggcuaccucggccuccucucccagcgcacccgcgacaucuacaucucccgccgccgccggggcaccuucaccuggacccucuccgacuccgagggcaacgagacccccggcggcuacugccucacccgcuggaugcucaucgaggccgagcucaagugcuucggcaacaccgccgucgccaagugcaacgagaagcacgacgaggaguucugcgacaugcuccgccucuucgacuucaacaagcaggccauccgccgccucaaggcccccgcccagauguccauccagcucaucaacaaggccgucaacgcccucaucaacgaccagcucaucaugaagaaccaccuccgcgacaucaugugcauccccuacugcaacuacuccaaguacugguaccucaaccacaccuccaccggccgcaccucccucccccgcugcuggcucgucuccaacggcuccuaccucaacgagacccacuucuccgacgacaucgagcagcaggccgacaacaugaucaccgagaugcuccagaaggaguaccucgaccgccagggcaagaccccccucggccucgucgaccucuucgucuucuccaccuccuucuaccucaucuccaucuuccuccaccucgucaagauccccacccaccgccacaucgucggcaagcccugccccaagccccaccgccucaaccacaugggcaucugcuccugcggccucuacaagcagcccggcguccccguccgcuggaagcgcugaggacuaguaauaaggaaacuguaugaaugucugugggcaggaagugaagagauccuucuguaaagguuuuuggaauuaugucugcugaauaauaaacuuuuuugaaauaauaaaucugguagaaaaaugagaucuaaaaaaaaaaaaaaaaaaaaaaaaaaaaaaaaaaaaaaaaaaaaaaaaaaaaaaaaaaaaaaaaugcaucccccccccccccccccccccccccccccccaaaggcucuuuucagagccaccagaauu

SEQ ID NO: 6801 - RNA, 1816 nt, Artificial Sequence
  mRNA product Design b-4 comprising derived and/or modified sequence from LASV(G1180-SLE-2010;Clade IV)__AIT17168__GPCstabilized (opt2)
gggagagucccgcagucggcguccagcggcucugcuuguucgugugugugucguugcaggccuuauucaagcuuaccaugggccagaucgucaccuucuuccaggaggucccccacgucaucgaggaggucaugaacaucguccucaucgcccucuccauccucgccguccucaagggccucuacaacuucgccaccugcggccucgucggccuccucaccuuccuccuccucugcggccgcuccugcaccgccucccgcuacaagggcgucuacgagcuccagacccucgagcucaacauggagacccucaacaugaccaugccccucuccugcaccaagaacaacucccaccacuacaucauggucggcaacgagaccggccucgagcucacccucaccaacaccuccaucaucaaccacaaguucugcaaccucuccgacgcccacaagaagaaccucuacgaccacgcccucauguccaucaucuccaccuuccaccucuccauccccaacuucaaccaguacgaggccauguccugcgacuucaacggcggcaagaucuccguccaguacaaccucucccacuccuacgccggcgacgccgccaaccacugcggcaccgucgccaacggcguccuccagaccuucaugcgcauggccuggggcggcuccuacaucgcccucgacuccggcugcggcuccugggacugcaucaugaccuccuaccaguaccucaucauccagaacaccaccugggaggaccacugccaguucucccgccccucccccaucggcuaccucggccuccucucccagcgcacccgcgacaucuacaucucccgccgccgccggggcaccuucaccuggacccucuccgacuccgagggcaaggacacccccggcggcuacugccucacccgcuggaugcucaucgaggccgagcucaagugcuucggcaacaccgccgucgccaagugcaacgagaagcacgacgaggaguucugcgacaugcuccgccucuucgacuucaacaagcaggccauccagcgccucaaggcccccgcccagauguccauccagcucaucaacaaggccgucaacgcccucaucaacgaccagcucaucaugaagaaccaccuccgcgacaucaugugcauccccuacugcaacuacuccaaguacugguaccucaaccacaccaccaccggcaagaccucccuccccaagugcuggcucgucuccaacggcuccuaccucaacgagacccacuucuccgacgacaucgagcagcaggccgacaacaugaucaccgagaugcuccagaaggaguacauggagcgccagggcaagaccccccucggccucgucgaccucuucgucuucuccaccuccuucuaccucaucuccaucuuccuccaccucgucaagauccccacccaccgccacaucgucggcaaguccugccccaagccccaccgccucaaccacaugggcaucugcuccugcggccucuacaagcagcccggcguccccgucaaguggaagcgcugaggacuaguaauaaggaaacuguaugaaugucugugggcaggaagugaagagauccuucuguaaagguuuuuggaauuaugucugcugaauaauaaacuuuuuugaaauaauaaaucugguagaaaaaugagaucuaaaaaaaaaaaaaaaaaaaaaaaaaaaaaaaaaaaaaaaaaaaaaaaaaaaaaaaaaaaaaaaaugcaucccccccccccccccccccccccccccccccaaaggcucuuuucagagccaccagaauu

SEQ ID NO: 6802 - RNA, 1816 nt, Artificial Sequence
  mRNA product Design b-4 comprising derived and/or modified sequence from LASV(G1442-SLE-2011;Clade IV)__AIT17180__GPCstabilized (opt2)
gggagagucccgcagucggcguccagcggcucugcuuguucgugugugugucguugcaggccuuauucaagcuuaccaugggccagaucgucaccuucuuccaggaggucccccacgucaucgaggaggucaugaacaucguccucaucgcccucuccauccucgccguccucaagggccucuacaacgucgccaccugcggccucaucggccucgucaccuuccuccuccucugcggccgcuccugcaccaccacccucuacaagggcgucuacgagcuccagacccucgagcucaacauggagacccucaacaugaccaugccccucuccugcaccaagaacaacucccaccacuacauccgcgucggcaacgagaccggccucgagcucacccucaccaacaccuccaucaucaaccacaaguucugcaaccucuccgacgcccacaagaagaaccucuacgaccacgcccucauguccaucaucuccaccuuccaccucuccauccccaacuucaaccaguacgaggccauguccugcgacuucaacggcggcaagaucuccguccaguacaaccucucccacuccuacgccggcgacgccgccaaccacugcggcaccgucgccaacggcguccuccagaccuucaugcgcauggccuggggcggcuccuacaucgcccucgacuccggcugcggcaacugggacugcaucaugaccuccuaccaguaccucaucauccagaacaccaccugggacgaccacugccaguucucccgccccucccccaucggcuaccucggccuccucucccagcgcacccgcgacgucuacaucucccgccgccgccggggcaccuucaccuggacccucuccgacuccgagggcaaggacacccccggcggcuacugccucacccgcuggaugcucaucgaggccgagcucaagugcuucggcaacaccgccgucgccaagugcaacgagaagcacgacgaggaguucugcgacaugcuccgccucuucgacuucaacaagcaggccauccagcgccucaaggcccccgcccagauguccauccagcucaucaacaaggccgucaacgcccucaucaacgaccagcucaucaugaagaaccaccuccgcgacaucaugugcauccccuacugcaacuacuccaaguacugguaccucaacaacaccgccaccggcaagaccucccuccccaagugcuggcucaucuccaacggcuccuaccucaacgagacccacuucuccgacgacaucgagcaggaggccgacaacaugaucaccgagaugcuccagaaggaguacauggagcgccagggcaagaccccccucggccucgucgaccucuucgucuucuccaccuccuucuaccucaucuccaucuuccuccaccucgucaagauccccacccaccgccacaucgucggcaaguccugccccaagccccaccgccucaaccacaugggcaucugcuccugcggccucuacaagcagcccggcguccccguccgcuggaagcgcugaggacuaguaauaaggaaacuguaugaaugucugugggcaggaagugaagagauccuucuguaaagguuuuuggaauuaugucugcugaauaauaaacuuuuuugaaauaauaaaucugguagaaaaaugagaucuaaaaaaaaaaaaaaaaaaaaaaaaaaaaaaaaaaaaaaaaaaaaaaaaaaaaaaaaaaaaaaaaugcaucccccccccccccccccccccccccccccccaaaggcucuuuucagagccaccagaauu

SEQ ID NO: 6803 - RNA, 1816 nt, Artificial Sequence
  mRNA product Design b-4 comprising derived and/or modified sequence from LASV(G3010-SLE-2013;Clade IV)__AIT17344__GPCstabilized (opt2)
gggagagucccgcagucggcguccagcggcucugcuuguucgugugugugucguugcaggccuuauucaagcuuaccaugggccagaucgucaccuucuuccaggaggucccccacgucaucgaggaggucaugaacaucguccucaucgcccucuccauccucgccguccucaagggccucuacaacuucgccaccugcggccucgucggccucgucaccuuccuccuccucugcggccgcuccugcaccaccucccucuacaagggcgucuacgagcuccagacccucgagcucaacauggagacccucaacaugaccaugccccucuccugcaccaagaacaacucccaccacuacaucauggucggcaacgagaccggccucgagcucacccucaccaacaccuccaucaucaaccacaaguucugcaaccucuccgacgcccacaagaagaaccucuacaaccacgcccucauguccaucaucuccaccuuccaccucuccauccccaacuucaaccaguacgaggccauguccugcgacuucaacggcggcaagaucuccguccaguacaaccucucccacuccuacgccggcgacgccgccucccacugcggcaccgucgccaacggcguccuccagaccuucaugcgcauggccuggggcggcuccuacaucgcccucgacuccggcugcggcaagugggacugcaucaugaccuccuaccaguaccucaucauccagaacaccaccugggaggaccacugccaguucucccgccccucccccaucggcuaccucggccuccucucccagcgcacccgcgacaucuacaucucccgccgccgccggggcaccuucaccuggacccucuccgacuccgagggcaaggacacccccggcggcuacugccucacccgcuggaugcucaucgaggccgagcucaagugcuucggcaacaccgccgucgccaagugcaacgagaagcacgacgaggaguucugcgacaugcuccgccucuucgacuucaacaagcaggccauccagcgccucaagacccccgcccagauguccauccagcucaucaacaaggccgucaacgcccucaucaacgaccagcucaucaugaagaaccaccuccgcgacaucaugugcauccccuacugcaacuacuccaaguacugguaccucaaccacaccaccaccggcaagaccucccuccccaagugcuggcucgucuccaacggcuccuaccucaacgagacccacuucuccgacgacaucgagcagcaggccgacaacaugaucaccgagaugcuccagaaggaguacauggagcgccagggcaagaccccccucggccucgucgaccucuucgucuucuccaccuccuucuaccucaucuccaucuuccuccaccucgucaagauccccacccaccgccacaucgucggcaaguccugccccaagccccaccgccucaaccacaugggcaucugcuccugcggccucuacaagcagcccggcguccccguccgcuggaagcgcugaggacuaguaauaaggaaacuguaugaaugucugugggcaggaagugaagagauccuucuguaaagguuuuuggaauuaugucugcugaauaauaaacuuuuuugaaauaauaaaucugguagaaaaaugagaucuaaaaaaaaaaaaaaaaaaaaaaaaaaaaaaaaaaaaaaaaaaaaaaaaaaaaaaaaaaaaaaaaugcaucccccccccccccccccccccccccccccccaaaggcucuuuucagagccaccagaauu

SEQ ID NO: 6804 - RNA, 1816 nt, Artificial Sequence
  mRNA product Design b-4 comprising derived and/or modified sequence from LASV(G502-SLE-2009;Clade IV)__AIT17126__GPCstabilized (opt2)
gggagagucccgcagucggcguccagcggcucugcuuguucgugugugugucguugcaggccuuauucaagcuuaccaugggccagaucgucaccuucuuccaggaggucccccacgucaucgaggaggucaugaacaucguccucaucgcccucuccauccucgccguccucaagggccucuacaacuucgccaccugcggccucgucggccuccucaccuuccuccuccucugcggccgcuccugcaccaccggccucuacaagggcgucuacgagcuccagacccucgagcucaacauggagacccucaacaugaccaugccccucuccugcaccaagaacaacucccaccacuacaucauggucggcaacgagaccggccucgagcucacccucaccaacaccuccaucaucaaccacaaguucugcaaccucuccgacgcccacaagaagaaccucuacgaccacgcccucauguccaucaucuccaccuuccaccucuccauccccaacuucaaccaguacgaggccauguccugcgacuucaacggcggcaagaucuccguccaguacaaccucucccacuccuacgccggcgacgccgccgaccacugcggcaccgucgccaacggcguccuccagaccuucaugcgcauggccuggggcggcuccuacaucgcccucgacuccggcugcggccgcugggacugcaucaugaccuccuaccaguaccucaucauccagaacaccaccugggaggaccacugccaguucucccgccccucccccaucggcuaccucggccuccucucccagcgcacccgcgacaucuacaucucccgccgccgccggggcaccuucaccuggacccucuccgacuccgagggcaaggacacccccggcggcuacugccucacccgcuggaugcucaucgaggccgagcucaagugcuucggcaacaccgccgucgccaagugcaacgagaagcacgacgaggaguucugcgacaugcuccgccucuucgacuucaacaagcaggccauccagcgccucaaggcccccgcccagauguccauccagcucaucaacaaggccgucaacgcccucaucaacgaccagcucgucaugaagaaccaccuccgcgacaucaugugcauccccuacugcaacuacucccgcuacugguaccucaaccacaccaccaccggccgcaccucccuccccaagugcuggcucgucuccaacggcuccuaccucaacgagacccacuucuccgacgacaucgagcagcaggccgacaacaugaucaccgagaugcuccagaaggaguacauggagcgccagggcaagaccccccucggccucgucgaccucuucgucuucuccaccuccuucuaccucaucuccaucuuccuccaccucgucaagauccccacccaccgccacaucgucggcaaguccugccccaagccccaccgccucaaccacaugggcaucugcuccugcggccucuacaagcagcccggcguccccgucaaguggaagcgcugaggacuaguaauaaggaaacuguaugaaugucugugggcaggaagugaagagauccuucuguaaagguuuuuggaauuaugucugcugaauaauaaacuuuuuugaaauaauaaaucugguagaaaaaugagaucuaaaaaaaaaaaaaaaaaaaaaaaaaaaaaaaaaaaaaaaaaaaaaaaaaaaaaaaaaaaaaaaaugcaucccccccccccccccccccccccccccccccaaaggcucuuuucagagccaccagaauu

SEQ ID NO: 6805 - RNA, 1816 nt, Artificial Sequence
  mRNA product Design b-4 comprising derived and/or modified sequence from LASV(G733-SLE-2010;Clade IV)__AIT17154__GPCstabilized (opt2)
gggagagucccgcagucggcguccagcggcucugcuuguucgugugugugucguugcaggccuuauucaagcuuaccaugggccagaucgucaccuucuuccaggaggucccccacgucaucgaggaggucaugaacaucguccucaucgcccucuccauccucgccguccucaagggccucuacaacuucgccaccugcggcaucgucggccucgucuccuuccuccuccucugcggccgcuccugcaccaccucccucuacaagggcgucuacgagcuccagacccucgagcucaacauggagacccucaacaugaccaugccccucuccugcaccaagaacaacucccaccacuacaucauggucggcaacgagaccggccucgagcucacccucaccaacaccuccaucaucaaccacaaguucugcaaccucuccgacgcccacaagaagaaccucuacgaccacgcccucauguccaucaucuccaccuuccaccucuccauccccaacuucaaccaguacgaggccauguccugcgacuucaacggcggcaagaucuccguccaguacaaccucucccacuccuacgccggcgacgccgccaaccacugcggcaccaucgccaacggcguccuccagaccuucaugcgcauggccuggggcggcuccuacaucgcccucgacuccggcugcgaccgcugggacugcaucaugaccuccuaccaguaccucaucauccagaacaccaccugggaggaccacugccaguucucccgccccucccccaucggcuaccucggccuccucucccagcgcacccgcgacaucuacaucucccgccgccgccggggcaccuucaccuggacccucuccgacuccgagggcaaggacacccccggcggcuacugccucacccgcuggaugcucaucgaggccgagcucaagugcuucggcaacaccgccgucgccaagugcaacgagaagcacgacgaggaguucugcgacaugcuccgccucuucgacuucaacaagcaggccauccagcgccucaaggcccccgcccagauguccauccagcucaucaacaaggccgucaacgcccucaucaacgaccagcucaucaugaagaaccaccuccgcgacaucaugugcauccccuacugcaacuacuccaaguacugguaccucaaccacaccaccaccggcaagaccucccuccccaagugcuggcucgucuccaacggcuccuaccucaacgagacccacuucuccgacgacaucgagcagcaggccgacaacaugaucaccgagaugcuccagaaggaguacauggagcgccagggcaagaccccccucggccucgucgaccucuucgucuucuccaccuccuucuaccucaucuccaucuuccuccaccucgucaagauccccacccaccgccacgucgucggcaaguccugccccaagccccaccgccucaaccacaugggcaucugcuccugcggccucuacggccagcccggcguccccgucaaguggaagcgcugaggacuaguaauaaggaaacuguaugaaugucugugggcaggaagugaagagauccuucuguaaagguuuuuggaauuaugucugcugaauaauaaacuuuuuugaaauaauaaaucugguagaaaaaugagaucuaaaaaaaaaaaaaaaaaaaaaaaaaaaaaaaaaaaaaaaaaaaaaaaaaaaaaaaaaaaaaaaaugcaucccccccccccccccccccccccccccccccaaaggcucuuuucagagccaccagaauu

SEQ ID NO: 6806 - RNA, 1816 nt, Artificial Sequence
  mRNA product Design b-4 comprising derived and/or modified sequence from MOPV/LASV reassortant(IGS-1;Clade IV)__AFY05576__GPCstabilized (opt2)
gggagagucccgcagucggcguccagcggcucugcuuguucgugugugugucguugcaggccuuauucaagcuuaccaugggccagaucgucaccuucuuccaggaggucccccacgucaucgaggaggucaugaacaucguccucaucgcccucuccguccucgccguccucaagggccucuacaacuucgccaccugcggccucgucggccucgucaccuuccuccuccucugcggccgcuccugcaccaccucccucuacaagggcgucuacgagcuccagacccucgagcucaacauggagacccucaacaugaccaugccccucuccugcaccaagaacaacucccaccacuacaucauggucggcaacgagaccggccucgagcucacccucaccaacaccuccaucaucaaccacaaguucugcaaccucuccgacgcccacaagaagaaccucuacgaccacgcccucauguccaucaucuccaccuuccaccucuccauccccaacuucaaccaguacgaggccauguccugcgacuucaacggcggcaagaucuccguccaguacaaccucucccacuccuacgccggcgacgccgccaaccacugcggcaccgucgccaacggcguccuccagaccuucaugcgcauggccuggggcggcuccuacaucgcccucgacuccggcugcggcaacugggacugcaucaugaccuccuaccaguaccucaucauccagaacaccaccugggaggaccacugccaguucucccgccccucccccaucggcuaccucggccuccucucccagcgcacccgcgacaucuacaucucccgccgccgccggggcaccuucaccuggacccucuccgacuccgagggcgaggacacccccggcggcuacugccucacccgcuggaugcucaucgaggccgagcucaagugcuucggcaacaccgccgucgccaagugcaacgagaagcacgacgaggaguucugcgacaugcuccgccucuucgacuucaacaagcaggccauccagcgccucaaggcccccgcccagauguccauccagcucaucaacaaggccgucaacgcccucaucaacgaccagcucaucaugaagaaccaccuccgcgacaucaugugcauccccuacugcaacuacuccaaguacugguaccucaaccacaccaccaccggccgcaccucccuccccaagugcuggcucgucuccaacggcuccuaccucaacgagacccacuucuccgacgacaucgagcagcaggccgacaacaugaucaccgagaugcuccagaaggaguacauggagcgccagggcaagaccccccucggccucgucgaccucuucgucuucuccaccuccuucuaccucaucuccaucuuccuccaccucgucaagauccccacccaccgccacaucgucggcaaguccugccccaagccccaccgccucaaccacaugggcaucugcuccugcggccucuacaagcagcccggcguccccgucaaguggaagcgcugaggacuaguaauaaggaaacuguaugaaugucugugggcaggaagugaagagauccuucuguaaagguuuuuggaauuaugucugcugaauaauaaacuuuuuugaaauaauaaaucugguagaaaaaugagaucuaaaaaaaaaaaaaaaaaaaaaaaaaaaaaaaaaaaaaaaaaaaaaaaaaaaaaaaaaaaaaaaaugcaucccccccccccccccccccccccccccccccaaaggcucuuuucagagccaccagaauu

SEQ ID NO: 6807 - RNA, 1816 nt, Artificial Sequence
  mRNA product Design b-4 comprising derived and/or modified sequence from LASV(LM765-SLE-2012;Clade IV)__AIT17814__GPCstabilized (opt2)
gggagagucccgcagucggcguccagcggcucugcuuguucgugugugugucguugcaggccuuauucaagcuuaccaugggccagaucgucaccuucuuccaggaggucccccacgucaucgaggaggucaugaacaucguccucaucgcccucuccauccucgccguccucaagggccucuacaacuucgccaccugcggccucgucggccucgucaccuuccuccuccucugcggccgcuccugcaccaccucccucuacaagggcgucuacgagcuccagacccucgagcucaacauggagacccucaacaugaccaugccccucuccugcaccaagaacaacucccaccacuacaucauggucggcaacgagaccggccucgagcucacccucaccaacaccuccaucaucgaccacaaguucugcaaccucuccgacgcccaccgcaagaaccucuacgaccacgcccucauguccaucaucuccaccuuccaccucuccauccccaacuucaaccaguacgaggccauguccugcgacuucaacggcggcaagaucuccguccaguacaaccucucccacuccuacgccaaggacgccgccgaccacugcggcaccgucgccaacggcguccuccagaccuucaugcgcauggccuggggcggcuccuacaucgcccucgacuccggcugcggccgcugggacugcaucaugaccuccuaccaguaccucaucauccagaacaccaccugggaggaccacugccaguucucccgccccucccccaucggcuaccucggccuccucucccagcgcacccgcgacaucuacaucucccgccgccgccggggcaccuucaccuggacccucuccgacuccgagggcaaggacacccccggcggcuacugccucacccgcuggaugcucaucgaggccgagcucaagugcuucggcaacaccgccgucgccaagugcaacgagaagcacgacgaggaguucugcgacaugcuccgccucuucgacuucaacaagcaggccauccagcgccucaaggcccccgcccagauguccauccagcucaucaacaaggccgucaacgcccucaucaacgaccagcucaucaugaagaaccaccuccgcgacaucaugugcauccccuacugcaacuacuccaaguacugguaccucaaccacaccaccaccggcaagaccucccuccccaagugcuggcucgucuccaacggcuccuaccucaacgagacccacuucuccgacgacaucgagcagcaggccgacaacaugaucaccgagaugcuccagaaggaguacauggagcgccagggcaagaccccccucggccucgucgaccucuucgucuucuccaccuccuucuaccucaucuccaucuuccuccaccucgucaagauccccacccaccgccacaucgucggcaagcccugccccaagccccaccgccucaaccacaugggcaucugcuccugcggccucuacaagcagcccggcguccccgucaaguggaagcgcugaggacuaguaauaaggaaacuguaugaaugucugugggcaggaagugaagagauccuucuguaaagguuuuuggaauuaugucugcugaauaauaaacuuuuuugaaauaauaaaucugguagaaaaaugagaucuaaaaaaaaaaaaaaaaaaaaaaaaaaaaaaaaaaaaaaaaaaaaaaaaaaaaaaaaaaaaaaaaugcaucccccccccccccccccccccccccccccccaaaggcucuuuucagagccaccagaauu

SEQ ID NO: 6808 - RNA, 1816 nt, Artificial Sequence
  mRNA product Design b-4 comprising derived and/or modified sequence from LASV(LM776-SLE-2012;Clade IV)__AIT17824__GPCstabilized (opt2)
gggagagucccgcagucggcguccagcggcucugcuuguucgugugugugucguugcaggccuuauucaagcuuaccaugggccagaucgucaccuucuuccaggaggucccccacgucaucgaggaggucaugaacaucguccucaucgcccucuccauccucgccguccucaagggccucuacaacuucgccaccugcggccucgucggccucgucaccuuccuccuccucugcggccgcuccugcaccaccuccgucuacaagggcgucuacgagcuccagacccucgagcucaacauggagacccucaacaugaccaugccccucuccugcaccaagaacaacucccaccacuacaucauggucggcaacgagaccggccucgagcucacccucaccaacaccuccaucaucaaccacaaguucugcaaccucuccgacgcccacaagaagaaccucuacgaccacgcccucauguccaucaucuccaccuuccaccucuccauccccaacuucaaccaguacgaggccauguccugcgacuucaacggcggcaagaucuccguccaguacaaccucucccacuccuacgccggcgacgccgccaaccacugcggcaccgucgccaacggcguccuccagaccuucaugcgcauggccuggggcggcuccuacaucgcccucgacuccggcugcggcaagugggacugcaucaugaccuccuaccaguaccucaucauccagaacaccaccugggaggaccacugccaguucucccgccccucccccaucggcuaccucggccuccucucccagcgcacccgcgacaucuacaucucccgccgccgccggggcaccuucaccuggacccucuccgacuccgagggcaaggacacccccggcggcuacugccucacccgcuggaugcucaucgaggccgagcucaagugcuucggcaacaccgccgucgccaagugcaacgagaagcacgacgaggaguucugcgacaugcuccgccucuucgacuucaacaagcaggccauccagcgccucaaggcccccgcccagauguccauccagcucaucaacaaggccgucaacgcccucaucaacgaccagcucaucaugaagaaccaccuccgcgacaucaugugcauccccuacugcaacuacuccaaguacugguaccucaaccacaccaccaccggcaagaccucccuccccaagugcuggcucgucuccaacggcuccuaccucaacgagacccacuucuccgacgacaucgagcagcaggccgacaacaugaucaccgagaugcuccagaaggaguacauggagcgccagggcaagaccccccucggccucgucgaccucuucgucuucuccaccuccuucuaccucaucuccaucuuccuccaccucgucaagauccccacccaccgccacaucgucggcaaguccugccccaagccccaccgccucaaccacaugggcaucugcuccugcggccucuacaagcagcccggcguccccguccgcuggaagcgcugaggacuaguaauaaggaaacuguaugaaugucugugggcaggaagugaagagauccuucuguaaagguuuuuggaauuaugucugcugaauaauaaacuuuuuugaaauaauaaaucugguagaaaaaugagaucuaaaaaaaaaaaaaaaaaaaaaaaaaaaaaaaaaaaaaaaaaaaaaaaaaaaaaaaaaaaaaaaaugcaucccccccccccccccccccccccccccccccaaaggcucuuuucagagccaccagaauu

SEQ ID NO: 6809 - RNA, 1816 nt, Artificial Sequence
  mRNA product Design b-4 comprising derived and/or modified sequence from LASV(Mad39;Clade IV)__ANH09722__GPCstabilized (opt2)
gggagagucccgcagucggcguccagcggcucugcuuguucgugugugugucguugcaggccuuauucaagcuuaccaugggccagaucgucaccuucuuccaggaggucccccacgucaucgaggaggucaugaacaucguccucaucgcccucuccauccucgccguccucaagggccucuacaacgucgccaccugcggccucaucggccucgucaccuuccuccuccucugcggccgcuccugcaccaccacccucuacaagggcgucuacgagcuccaggcccucgagcucaacauggagacccucaacaugaccaugccccucuccugcaccaagaacaacucccaccacuacauccgcgucggcaacgagaccggccucgagcucacccucaccaacaccucccucaucaaccacaaguucugcaaccucuccgacgcccacaagaagaaccucuacgaccacgcccucauguccaucaucuccaccuuccaccucuccauccccaacuucaaccaguacgaggccauguccugcgacuucaacgacggcaagaucuccguccaguacaaccucucccacaccuacgccggcgacaccgccaaccacugcggcaccgucgccaacggcguccuccagaccuucaugcgcauggccuggggcggcuccuacaucgcccucgacuccggcugcggcggcugggacugcaucaugaccuccuaccaguaccucaucauccagaacaccaccugggaggaccacugccaguucucccgccccucccccaucggcuaccucggccuccucucccagcgcacccgcgacaucuacaucucccgccgccgccggggcaccuucaccuggacccucuccgacuccgagggcaaggacacccccggcggcuacugccucacccgcuggaugcucaucgaggccgagcucaagugcuucggcaacaccgccgucgccaagugcaacgagaagcacgacgaggaguucugcgacaugcuccgccucuucgacuucaacaagcaggccauccagcgccucaaggcccccgcccagauguccauccagcucaucaacaaggccgucaacgcccucaucaacgaccagcucaucaugaagaaccaccuccgcgacaucaugugcauccccuacugcaacuacuccaaguacugguaccucaaccacaccgucaccggcaagaccucccuccccaagugcuggcucgucuccaacggcuccuaccucaacgagacccacuucuccgacgacaucgagcagcaggccgacaacaugaucaccgagaugcuccagaaggaguacauggagcgccagggcaagaccccccucggccucgucgaccucuucgucuucuccaccuccuucuaccucaucuccaucuuccuccaccucgucaagauccccacccaccgccacgucgucggcaagcccugccccaagccccaccgccucaaccacaugggcaucugcuccugcggcuucuacaagcagcccggcguccccguccgcuggaagcgcugaggacuaguaauaaggaaacuguaugaaugucugugggcaggaagugaagagauccuucuguaaagguuuuuggaauuaugucugcugaauaauaaacuuuuuugaaauaauaaaucugguagaaaaaugagaucuaaaaaaaaaaaaaaaaaaaaaaaaaaaaaaaaaaaaaaaaaaaaaaaaaaaaaaaaaaaaaaaaugcaucccccccccccccccccccccccccccccccaaaggcucuuuucagagccaccagaauu

SEQ ID NO: 6810 - RNA, 1816 nt, Artificial Sequence
  mRNA product Design b-4 comprising derived and/or modified sequence from LASV(Z0947-SLE-2011;Clade IV)__AIT17840__GPCstabilized (opt2)
gggagagucccgcagucggcguccagcggcucugcuuguucgugugugugucguugcaggccuuauucaagcuuaccaugggccagaucgucaccuucuuccaggaggucccccacgucaucgaggaggucaugaacaucguccucaucgcccucuccauccucgccguccucaagggccucuacaacuucgccaccugcggccucgucggccucgucaccuuccuccuccucugcggccgcuccugcaccaucucccucuacaagggcgucuacgagcuccagacccucgagcucaacauggagacccucaacaugaccaugccccucuccugcaccaagaacaacucccaccacuacaucauggucggcaacgagaccggccucgagcucacccucaccaacaccuccaucaucaaccacaaguucugcaaccucuccgacgcccacaagaagaaccucuacgaccacgcccucauguccaucaucuccaccuuccaccucuccauccccaacuucaaccaguacgaggccauguccugcgacuucaacggcggcaagaucuccguccaguacaaccucucccacuccuacgccggcgacgccgccaaccacugcggcaccgucgccaacggcguccuccagaccuucaugcgcauggccuggggcggcuccuacaucgcccucgacuccggcugcgaccgcugggacugcaucaugaccuccuaccaguaccucaucauccagaacaccaccugggaggaccacugccaguucucccgccccucccccaucggcuaccucggccuccucucccagcgcacccgcgacaucuacaucucccgccgccgccggggcaccuucaccuggacccucuccgacuccgagggcaaggacacccccggcggcuacugccucacccgcuggaugcucaucgaggccgagcucaagugcuucggcaacaccgccgucgccaagugcaacgagaagcacgacgaggaguucugcgacaugcuccgccucuucgacuucaacaagcaggccauccagcgccucaaggcccccgcccagauguccauccagcucaucaacaaggccgucaacgcccucaucaacgaccagcucaucaugaagaaccaccuccgcgacaucaugugcauccccuacugcaacuacuccaaguacugguaccucaaccacaccaccaccggcaagaccucccuccccaagugcuggcucgucuccaacggcuccuaccucaacgagacccacuucuccgacgacaucgagcagcaggccgacaacaugaucaccgagaugcuccagaaggaguacauggagcgccagggcaagaccccccucggccucgucgaccucuucgucuucuccaccuccuucuaccucaucuccaucuuccuccaccucgucaagauccccacccaccgccacaucgucggcaagcccugccccaagccccaccgccucaaccacaugggcaucugcuccugcggccucuacaagcagcccggcguccccgucaaguggaagcgcugaggacuaguaauaaggaaacuguaugaaugucugugggcaggaagugaagagauccuucuguaaagguuuuuggaauuaugucugcugaauaauaaacuuuuuugaaauaauaaaucugguagaaaaaugagaucuaaaaaaaaaaaaaaaaaaaaaaaaaaaaaaaaaaaaaaaaaaaaaaaaaaaaaaaaaaaaaaaaugcaucccccccccccccccccccccccccccccccaaaggcucuuuucagagccaccagaauu

SEQ ID NO: 6811 - RNA, 1816 nt, Artificial Sequence
  mRNA product Design b-4 comprising derived and/or modified sequence from LASV(Josiah;Clade IV)__NP_694870__GPCstabilized (opt3)
gggagagucccgcagucggcguccagcggcucugcuuguucgugugugugucguugcaggccuuauucaagcuuaccaugggccagaucgugaccuucuuucaagaggucccccacguuauugaagaggugaugaacauaguacugaucgcccucagcgugcuugcuguccugaagggguuguacaauuucgcaacaugcggauuagugggucugguuacuuuucuacuccuguguggcagauccugcacgaccucucuuuauaaagggguguacgaacugcagacauuggagcucaacauggaaacucugaauaugaccaugccucugucauguacaaagaacaauagucaucacuauauuauggucggaaacgagaccggccucgaguuaacucugacaaauaccagcaucauuaaccauaaauucugcaaucuuuccgacgcccacaagaaaaacuuguacgaucaugcgcugaugucuaucauaucgacguuucaccuaucaaucccaaauuucaaccaguaugaagcuaugagcugugacuuuaauggugggaagauuagugugcaguacaaccucucccacucuuaugccggagaugcagccaaucauugcggcacuguagcuaacggcguucugcaaaccuucaugaggauggcauggggagggagcuacaucgcccuugacuccgguugcggcaacugggauuguauuaugacaucauaccaguaucugaucauacagaauacuaccugggaggaccacugccaguuuagucgcccgagccccauuggguacuugggacuccugucucaacgaacacgugauaucuauauuuccagaaggcgccggggcaccuucacguggacucucucagacagcgaagguaaggauacaccugggggauacugucuuacccgguggaugcugaucgaggcugaguugaaaugcuuuggcaacacugccguggcgaaguguaaugaaaaacaugacgaggaguucugcgauaugcuacgccuguuugacuucaacaagcaggcaauccagagacucaaagcccccgcucagaugaguauucaacugauaaauaaggccgucaacgcacuuaucaaugaucagcugauuaugaagaaccacuugagggacaucaugugcauaccauauugcaauuacucuaaauauugguaccucaaccacacaaccacggggcggaccucccugcccaaguguugguuagugagcaauggaucguaccugaacgaaacacauuucucugacgauauugagcagcaagcugacaauaugaucacugagaugcuacagaaagaauauauggagcgccaggguaagaccccucucggccugguggaucuuuuugucuucuccacaucauuuuacuugaucaguauuuuccugcaccucguuaaaaucccaacucaucgacacauugugggaaagagcugccccaaaccucauagacugaaccacauggggauauguuccugcggccuuuauaagcagccagguguaccggugaaguggaaaaggugaggacuaguaauaaggaaacuguaugaaugucugugggcaggaagugaagagauccuucuguaaagguuuuuggaauuaugucugcugaauaauaaacuuuuuugaaauaauaaaucugguagaaaaaugagaucuaaaaaaaaaaaaaaaaaaaaaaaaaaaaaaaaaaaaaaaaaaaaaaaaaaaaaaaaaaaaaaaaugcaucccccccccccccccccccccccccccccccaaaggcucuuuucagagccaccagaauu

SEQ ID NO: 6812 - RNA, 1813 nt, Artificial Sequence
  mRNA product Design b-4 comprising derived and/or modified sequence from LASV(LP;Clade I)__AAF86701__GPCstabilized (opt3)
gggagagucccgcagucggcguccagcggcucugcuuguucgugugugugucguugcaggccuuauucaagcuuaccaugggccagaucauuaccuucuuucaagaggugccccacgucauagaagagguuaugaacaucgugcugauugcccucagccuucuggcuaucuugaagggguuauacaauauugcaacaugcggaaucauaggucugguagccuuccuauuucucuguggcaaauccugcucucugacucuuaaagggggauaugaacugcagacguuggagcucaacauggaaacccugaauaugacaaugccucugucauguacuaagaacaguagccaucacuacaucagagugggcaaugagaccggucucgaguuaacacugaccaacacuuccauuaucaaucauaaguucugcaaccuuucugacgcgcacaaaaagaauuuguaugaucaugcucugaugucgauuaucucaacauuucaccuaagcauaccaaacuucaaucaguacgaagccaugaguugugacuuuaacgggggaaagauuuccguccaguauaaucucucucacagcuacgcaggcgaugccgcugagcauugcggcaccguggcaaacgggguucugcaaacguucaugaggauggccuggggaggucgguauaucgcucuugacuccggcugcgggaauugggauuguauuaugacuucauaccaguaccugaucauccagaacaccacaugggaagaccacugccaguuuagucgcccgagccccauuggauauuugggccuccugucucaacgaacucgugauauauacaucuccagaaggcgccgggguaccuucacauggacccucucagacagcgaggggaacgagacgccuggaggcuauugucuuacucgguggaugcugauugaagccgaguugaagugcuuuggcaauacagcgguggcaaaauguaacgaaaagcaugaugaggaguucugcgacaugcuacgccuguuugauuucaauaaacaggccaucagaaggcucaaggcucccgcccagaugaguauacagcugauuaacaaggcagucaaugcucuuaucaacgaccaacugaucaugaaaaaucacuugcgggauauuaugugcaucccauacugcaacuauucuaaguacugguaucucaaucacaccuccagcggacgcacuucgcugcccaaauguugguuaauuucuaacgguuccuaccugaaugagacacaguucucagacgacauagaacagcaagccgauaacaugaucaccgagaugcuacagaaggaauacauugagcgacagggcaaaacgccucucgggcugguggacaucuuuaucuucaguaccagcuuuuaucuuauuuccauauucuugcaucugaucaagauuccaacacacagacauaucguaggaaaacccugcccuaagccacacaggcucaaucauaugggcguuuguucuugcggucuguacaagcacccgggggugcccacuaaauggaagcggugaggacuaguaauaaggaaacuguaugaaugucugugggcaggaagugaagagauccuucuguaaagguuuuuggaauuaugucugcugaauaauaaacuuuuuugaaauaauaaaucugguagaaaaaugagaucuaaaaaaaaaaaaaaaaaaaaaaaaaaaaaaaaaaaaaaaaaaaaaaaaaaaaaaaaaaaaaaaaugcaucccccccccccccccccccccccccccccccaaaggcucuuuucagagccaccagaauu

SEQ ID NO: 6813 - RNA, 1813 nt, Artificial Sequence
  mRNA product Design b-4 comprising derived and/or modified sequence from LASV(803213;Clade II)__AAF86703__GPCstabilized (opt3)
gggagagucccgcagucggcguccagcggcucugcuuguucgugugugugucguugcaggccuuauucaagcuuaccaugggccagaucauuaccuucuuucaagaggugccccacgucauagaagagguuaugaacaucgugcugauugcccucagccuucuggcuaucuugaaggggauuuacaauguagcaacaugcggauuauucggucugaucuccuuucuacuccuguguggcagaucuugcucagugacuuauaaaggggucuacgaacuucagacgcuggaguugaacauggccaaucucaacaugaccaugccucugaguuguacaaagaauaacagccaucacuauauaauggugggaaaugaaacuggccuggagcucaccuuaacaaacaccuccaucauuaaucauaaauucugcaaccugucugacgcgcacaagaaaaaucuuuacgaucaugcuuugaugucgaucauuucaacuuuucaccugagcaucccaaacuucaaucaguaugaggccaugaguugugacuuuaacggugggaagauauccguucaguacaaucuaucucacagcuucgcaguggaugccgcuaaccauugcggaacaauugcaaacggcguccuccaaaccuuuaugaggauggccuggggcggguccuauaucgcucuggacucaggaugcgguaauugggauuguauuaugacgaguuaccaguaccuuaucauccagaacacuaccugggaagaccacugccaguucagccggccgucucccauuggcuaucugggguugcucucccaacgcacacgagauauauacaucucacguagacgccggggaacuuuuaccuggacacugagcgacagugagggcaaugaagccccugguggguauugucucaccagguggaugcuuauugaggcggagcugaaaugcuucggaaacacggcaguggccaaguguaaugaaaaacaugaugaggaauuuugcgacauguugcggcuauucgauuucaacaagcaggcuaucaaacgccugaagacucccgcccagaugucuauacagcucauuaauaaggcaguaaacgcucugaucaaugaccaacuuaucaugaaaaaccaccugagagauauuaugugcaucccauacugcaauuauuccagguacugguauuugaaccacacaguuaccggcaagacuagccucccccgguguuggcuggugucgaaugggucuuacuuaaacgaaacacauuuuuccgacgacauugagcagcaggccgauaauaugauaaccgagaugcugcaaaaagaauacauggaccgccagggaaagacgccucuaggucucgucgaucuguucguguuuucaaccaguuucuaucuuaucagcaucuuuuugcaccuggugaaaauuccaacacaucgacacaucgucggcaagcccugcccuaaaccacauagacucaaccacauggggauuuguuccugcggacuguacaagcacccgggcguucccgugaaguggaaaaggugaggacuaguaauaaggaaacuguaugaaugucugugggcaggaagugaagagauccuucuguaaagguuuuuggaauuaugucugcugaauaauaaacuuuuuugaaauaauaaaucugguagaaaaaugagaucuaaaaaaaaaaaaaaaaaaaaaaaaaaaaaaaaaaaaaaaaaaaaaaaaaaaaaaaaaaaaaaaaugcaucccccccccccccccccccccccccccccccaaaggcucuuuucagagccaccagaauu

SEQ ID NO: 6814 - RNA, 1813 nt, Artificial Sequence
  mRNA product Design b-4 comprising derived and/or modified sequence from LASV(GA391;Clade III)__CAA36645__GPCstabilized (opt3)
gggagagucccgcagucggcguccagcggcucugcuuguucgugugugugucguugcaggccuuauucaagcuuaccaugggccagaucgugaccuucuuucaagaggucccccacguuauugaagaggugaugaacauaguacugaucgcccucagcauucuugcuauccugaagggguuguacaauguggcaacaugcggauuaauuggucuggucacuuuccuacuccuguccggcagaucuuguucacuuaucuauaaagggacguacgaacugcagaccuuggagcucaacauggaaacacugaauaugacuaugccucugaguugcaccaagaacaauagccaucacuauauaagggugggaaacgagacaggccucgaguuaacccugacuaauacauccauccuuaaccauaaauuuuguaauuugucugacgcccacaagcggaaccuguacgaucauucgcuaaugucaauuaucagcaccuuccaccucaguauuccaaauuuuaaccaguaugaagcgauguccugcgacuucaauggugggaaaaucacgguucaguacaaccugucucacagcuuugcuguggaugccgcaggacauuguggcacucuugccaauggcguccugcaaaccuucaugcgcauggcuuggggaggguccuauauagcauuggacucagguugcggcaacugggauugcauuaugacaaguuaccaguaccucaucauucagaacacuaccugggacgaucacugucaguuuagccguccgucucccaucggguaucugggauuacugucccaaagaacaagggacaucuacauuucacggcgccgccggggcaccuucacguggacucugagcgauagugaggguaaugaaacaccugggggauauugcuugaccagauggaugcuaauagaggccgagcugaaguguuuuggcaacacugcuguggccaagugcaaugaaaaacaugacgaggaguucugugauaugcucaggcuguuugacuucaacaagcaggcgauccggcgccuuaaaacacccgcacagaugucuauucagcugaucaauaaggccguaaacgcuuugauaaaugaucaacucauuaugaaaaaccaucugcgagacaucaugugcaucccauacugcaauuauuccagauacugguauuuaaaccacaccagcacggggaagaccucgcugcccaggugcuggcuaauuucuaauggauccuaccucaacgaaacaaaguucucagacgauaucgagcagcaggccgacaauaugauuacugagaugcugcaaaaagaauacauagaucggcaggguaagaccccucuuggcuugguugaccuguuuguguucaguacuagcuuuuaucucaucuccauuuuccugcaccuugucaaaaucccaacacaccgucauaucguggggaagcccuguccuaaaccacaccgccugaaccauaugggaauuugcucuuguggcuuguacaagcagccgggugugcccgucagauggaaaaggugaggacuaguaauaaggaaacuguaugaaugucugugggcaggaagugaagagauccuucuguaaagguuuuuggaauuaugucugcugaauaauaaacuuuuuugaaauaauaaaucugguagaaaaaugagaucuaaaaaaaaaaaaaaaaaaaaaaaaaaaaaaaaaaaaaaaaaaaaaaaaaaaaaaaaaaaaaaaaugcaucccccccccccccccccccccccccccccccaaaggcucuuuucagagccaccagaauu

SEQ ID NO: 6815 - RNA, 1816 nt, Artificial Sequence
  mRNA product Design b-4 comprising derived and/or modified sequence from LASV(AV;Clade V)__CCA30314__GPCstabilized (opt3)
gggagagucccgcagucggcguccagcggcucugcuuguucgugugugugucguugcaggccuuauucaagcuuaccaugggccagaucgugaccuucuuucaagaggucccccacguuauugaagaggugaugaacauaguacugaucgcccucagcauucuugcugugcugaagggguuguacaauaucgcaacaugcggauuaauuggucugaucacuuuccuacuccuguguggcagauccugcagcucaaaccuuuauaaaggggucuacgaacugcagaguuuggaccucaauauggagacgcugaacaugaccaugccucugagcuguacaaagaauaacucccaucacuauauaagggugggaaaugauacuggccucgaauuaacccugacaaacaccucuauccuuaaucauaaauuuugcaacuugucggacgcccacaagaaagaucuguacgaccaugcgcuaaugucaauuaucagcacuuuccaccucaguauuccaaauuuuaaccaguaugaggcuauguccugugauuucaauggugggaagaucucuguucaguacaaccugagccacuccuaugccauagacgcagccaaucauugcggaacaguggcuaacggcauucuucaaaccuuuaugcggauggcauggggcgggucauacaucgcccuggauaguggaugcgguaacugggacuguauuaugacgagcuaccaguauuugaucauccagaauacuaccugggagaaccacugccaguucucucgaccgucccccauuggcuaccucgggcuguuaucacaacguacaagagauauauauaucagcaggcggcgccggggaacuuuuaccuggacacuuagugacucugaaggcaaugcuaccccugguggguacugucugacgcgcuggauguugauugaggccgaacuaaagugcuucggaaacacugcggucgcaaaauguaaugagaagcaugaugaggaauuuugcgacaugcugagacucuucgauuuuaacaaacaggccaucuccaggcugaagucucccgcucagaugucgauacagcuuauuaauaaagccgugaacgcacugaucaaugaccaauugaucaugaagaaccaccuccgggacauuaugugcaucccauauugcaauuacucuaaguauugguaccugaaccacacaauuaccggcaaaacuuccuuacccaaguguuggcugguaucaaaugggaguuaccuaaacgaaacacauuucagcgaugacauagagcagcaggcugauaauaugaucaccgaaaugcuccaaaaagaguauauggagcgccagggaaagacgccucugggucuuguugacuuguucguguuuuccaccucuuucuaccugauuagcaucuuucuccgacuggucaaaaucccaacacacagacauauugugggcaagcccugcccuaaaccacacaggcuuaaccauauggggauauguucaugcggacuguauaagcagccgggcgugcccguccgguggaagcguugaggacuaguaauaaggaaacuguaugaaugucugugggcaggaagugaagagauccuucuguaaagguuuuuggaauuaugucugcugaauaauaaacuuuuuugaaauaauaaaucugguagaaaaaugagaucuaaaaaaaaaaaaaaaaaaaaaaaaaaaaaaaaaaaaaaaaaaaaaaaaaaaaaaaaaaaaaaaaugcaucccccccccccccccccccccccccccccccaaaggcucuuuucagagccaccagaauu

SEQ ID NO: 6816 - RNA, 1813 nt, Artificial Sequence
  mRNA product Design b-4 comprising derived and/or modified sequence from LASV(Togo/2016/7082;Clade VI)__AMR44577__GPCstabilized (opt3)
gggagagucccgcagucggcguccagcggcucugcuuguucgugugugugucguugcaggccuuauucaagcuuaccaugggccagaucauuaccuucuuucaagaggugccccacgucauagaagagguuaugaacaucgugcugauugcccucagccuucuggcuaucuugaaggggguauacaauguggcaacaugcggaauuaucgguuuagucacuuuccuguuucuauguggcagauccugcucucucauauauaaagggucauacgaacugcagacgcuugagcugaacauggaaaccuugaauaugacaaugccucucaguuguacuaagaacagcucccaucacuauaucagggugggaaaugagaccggccuggagcugacacucaccaacacuucuauuaucaaucauaaauucugcaacuuaucggacgcccacaagcggaaucuguacgaucaugcgcuuaugucaauuuugagcacauuucaccugaguaucccaaacuucaaucaguaugaagcuauguccugugacuuuaacggugggaaaauaucuguucaguacaaucuaagccacgccuaugcaguggaugccgcugagcauugcggaaccgucgcaaacggcgugcuccaaacguucaugcgcauggccuggggcggguccuacauugcucuggacucaggaugcgguaauugggauuguaucaugaccaguuaccaguaucuuauuauccagaacacuacaugggaagaccacugccaguuuagccguccgucucccaucggcuaccugggguugcucucccaaagaacuagggauauuuauauaucacggcgccgccggggaaccuucacauggacccugagcgacagugagggcaacgagacgccugguggguacugucucacuagauggaugcuuaucgaagccgagcugaagugcuuuggaaauacagcgguagcaaaguguaacgaaaaacaugaugaggaguucugcgacauguugaggcuauuugauuucaauaagcaggccauucagcggcugaaaucucccgcucagauguccauccaacucauaaacaaggccguuaaugcacugauuaacgaccagcuuaucaugaaaaaucaucugcgcgauaugaugugcaucccauauugcaacuacagcaaguauugguacuugaaucacaccucgucuggccgaacuucccuccccaaguguuggcuggugucaaacgggaguuacuuaaaugagacacacuucagcgacgacauugaacagcaagcugauaacaugaucaccgagaugcugcagaaagaauauauugacagacagggaaagacgccucuaggucucgucgaucuguuuguguucuccaccucuuuuuaccuuauaagcaucuucuugcaccugauuaaaaucccaacacauaggcacaucgugggcaagcccugcccuaaaccacaucggcucaaucacauggggauuuguucaugcggacuguauaagcagccgggcguccccacucguuggaaacgcugaggacuaguaauaaggaaacuguaugaaugucugugggcaggaagugaagagauccuucuguaaagguuuuuggaauuaugucugcugaauaauaaacuuuuuugaaauaauaaaucugguagaaaaaugagaucuaaaaaaaaaaaaaaaaaaaaaaaaaaaaaaaaaaaaaaaaaaaaaaaaaaaaaaaaaaaaaaaaugcaucccccccccccccccccccccccccccccccaaaggcucuuuucagagccaccagaauu

SEQ ID NO: 6817 - RNA, 1813 nt, Artificial Sequence
  mRNA product Design b-4 comprising derived and/or modified sequence from LASV(KAK-428;Clade n.d. (VII))__ANH09740__GPCstabilized (opt3)
gggagagucccgcagucggcguccagcggcucugcuuguucgugugugugucguugcaggccuuauucaagcuuaccaugggccagaucgugaccuucuuucaagaggucccccacguuauugaagaggugaugaacauaguacugaucgcccucagccuucuggcuauuuugaagggguuauacaauuucgcaacaugcggagugaucggucugauuacuuuucuacuccuguguggcagauccugcucugccacguauaaagggcaguacgaacuucagacccuggaguugaacauggaaucacucaauaugacaaugccucugaguuguacuaagaacaauagccaucacuauaucagggcgggaaacaauaccggccuggagcucacauuaaccaacacuuccauaaucucucauaaauucugcaaucugucggacgcucacaagaaaaaccuuuacgaucauacauugaugucaauuaucaccacguuucaccugagcauuccaaauuucaaccaguaugaggccaugaguugugacuuuaauggugggaagaucuccauacaauacaaccuaucucacagcuaugcaggagaugccgcucagcauugcggcacugucgcaaauggcgugcuccagaccuucaugcggauggccuggggaggguccuaccuggcucuugacucagguugccgaggcugggauuguauuaucaguagcuaccaguaucugauuauccaaaacacaacuugggacgaucacugccaguuuucucguccgucccccaucggguacuugggauucguuucacagaagaccagagacauuuauauaagcaggcggcgccggggcacauuuaccuggacguuaagugauucugaaggucaugacaugccugggggauacugucugacucgcuggaugcucaucgaggccgaucuuaaaugcuucggcaacacagcgguggcaaaguguaaugaaaaacacgacgaggaguuuugcgauauguggagacuguucgacuucaacaagcaggccauucaaagguugaaagcucccgcccagaugaauauccagcuaauaaacaaggcagucaaugcucugauuaacgaccaacucaugaugaagaaucaucugcgggauaucaugugcaucccauauugcaacuacuccaaauuuugguaucuuaauaacaccacuacagggcgcaccagccugccccgauguugguugauuucgaauggaucuuaccucaacgagacgcacuucuccgacgauaucgaacagcaggccgacaauaugauuaccgagaugcugcagaaggaauacauggauagacaagguaaaacaccuuuaggccugguggaccuauuuguauucucaaccaguuuuuaucucauaacuaucuuccugcaccuuguuaagauuccaacacauaggcacaucguggggaaacccugcccuaagccacaucgguugaaccacaugggaaucuguagcugcggccuguacaaacagccggguguccccgugcguuggaagcgcugaggacuaguaauaaggaaacuguaugaaugucugugggcaggaagugaagagauccuucuguaaagguuuuuggaauuaugucugcugaauaauaaacuuuuuugaaauaauaaaucugguagaaaaaugagaucuaaaaaaaaaaaaaaaaaaaaaaaaaaaaaaaaaaaaaaaaaaaaaaaaaaaaaaaaaaaaaaaaugcaucccccccccccccccccccccccccccccccaaaggcucuuuucagagccaccagaauu

SEQ ID NO: 6818 - RNA, 1813 nt, Artificial Sequence; identical to SEQ ID NO: 6812
  mRNA product Design b-4 comprising derived and/or modified sequence from LASV(Pinneo-NIG-1969;Clade I)__AIT17836__GPCstabilized (opt3)

SEQ ID NO: 6819 - RNA, 1813 nt, Artificial Sequence
  mRNA product Design b-4 comprising derived and/or modified sequence from LASV(ISTH0009-NIG-2011;Clade II)__AIT17404__GPCstabilized (opt3)
gggagagucccgcagucggcguccagcggcucugcuuguucgugugugugucguugcaggccuuauucaagcuuaccaugggccagaucauuaccuucuuucaagaggugccccacgucauagaagagguuaugaacaucgugcugauugcccucagccuucuggcuaucuugaaggggauuuacaauguagcaacaugcggauuauucggucugguguccuuucuacuccuguguggcagaucuugcucaacuacguauaaaggggucuacgaacuucagacccuggaguuggacauggccagucucaacaugacaaugccucugagcuguacuaagaauaacucccaucacuauaucauggugggaaaugaaaccggccuggagcucacauuaaccaacacuucuauaaucaaucauaaauucugcaaccugucggaugcgcacaagaaaaaucuuuacgaccaugcuuugaugucaauuaucagcacauuucaccugaguauuccaaacuucaaucaguaugaggccauguccugugauuuuaacggugggaagaucucuguucaguacaaucuaagccacgcauaugccguggacgcugcaaaccauugcggaaccauagccaauggcguccuccaaacguucaugaggauggcuuggggcggguccuacauugcccuggauucaggaugcgguaguugggacuguaucaugacuagcuaccaguaucuuauuauccagaacaccacaugggaagaucacugccaguuuucucggccgucccccaucggcuaccugggguugcucucacaacgcacucgagacauuuauauaagccguagacgccggggaaccuucacauggacccugagugauucugagggcaacgaaacgccugguggguacugucucacuagguggaugcuuaucgaggcggagcugaaaugcuuuggaaauacagcaguggccaaguguaacgaaaaacaugacgaggaguucugcgauauguugcggcuauuugacuucaauaagcaggcuauucgcagacugaaaacccccgcccagauguccauccagcucauaaacaaggcaguaaaugcucugauuaacgaucaacuuaucaugaagaaucaccugagggacaucaugugcauuccauauugcaacuacagcaaauauugguacuugaaucacacuguuacaggcaagaccucgcucccccgguguuggcuggugucuaacggguccuacuuaaaugaaacgcauuucucagacgauaucgagcagcaggccgacaacaugauuaccgagcugcuacaaaaagaauauauggaucgccagggaaagacaccucucggucuggucgaccuuuuuguguucaguacuagcuuuuacuugauauccaucuuccugcaccucauuaaaaucccaacccaucgacacaucacaggcaagcccugcccuaaaccacauagacugaaucacauggggauuuguucuugcggacuuuauaagcacccgggcgugcccgucaaguggaaaaggugaggacuaguaauaaggaaacuguaugaaugucugugggcaggaagugaagagauccuucuguaaagguuuuuggaauuaugucugcugaauaauaaacuuuuuugaaauaauaaaucugguagaaaaaugagaucuaaaaaaaaaaaaaaaaaaaaaaaaaaaaaaaaaaaaaaaaaaaaaaaaaaaaaaaaaaaaaaaaugcaucccccccccccccccccccccccccccccccaaaggcucuuuucagagccaccagaauu

SEQ ID NO: 6820 - RNA, 1813 nt, Artificial Sequence
  mRNA product Design b-4 comprising derived and/or modified sequence from LASV(ISTH2010-NIG-2012;Clade II)__AIT17482__GPCstabilized (opt3)
gggagagucccgcagucggcguccagcggcucugcuuguucgugugugugucguugcaggccuuauucaagcuuaccaugggccagaucauuaccuucuuucaagaggugccccacgucauagaagagguuaugaacaucgugcugauugcccucagccuucuggcuaucuugaaggggauuuacaauguagcaacaugcggauuauucggucugguguccuuucuacuccuguguggcagaucuugcucaacuacguauaaaggggucuacgaacuucagacccuggaguuggacauggccagucucaacaugacaaugccucugagcuguacuaagaauaacucccaucacuauaucauggugggaaaugaaaccggccuggagcucacauuaaccaacacuucuauaaucaaucauaaauucugcaaccugucggaugcgcacaagaaaaaucuuuacgaccaugcuuugaugucaauuaucagcacauuucaccugaguauuccaaacuucaaucaguaugaggccauguccugugauuuuaacggugggaagaucucuguucaguacaaucuaagccacgcauaugccguggacgcugcaaaccauugcggaaccauagccaauggcguccuccaaacguucaugaggauggcuuggggcggguccuacauugcccuggauucaggaugcgguaguugggacuguaucaugacuagcuaccaguaucuuauuauccagaacaucaccugggaagaucacugccaguuuucucggccgucccccauuggcuaccugggguugcucucacaacgcacacgagacauauauaucagccguagacgccggggaacuuucaccuggacacugagugauucugagggcaacgaaaccccugguggguacugucucacgagguggaugcuuauugaggcggagcugaaaugcuuuggaaauacugcaguggccaaguguaacgaaaaacaugacgaggaguucugcgauauguugcggcuauuugacuucaauaagcaggcuauccgcagacugaaaacacccgcccagauguccauacagcucauuaacaaggcaguaaaugcucugaucaacgaucaacuuaucaugaagaaucaccugagggacauuaugugcaucccauauugcaacuacagcaaauauugguacuugaaucacaccguuacuggcaagacaucgcucccccgguguuggcuggugucuaacggguccuacuuaaaugaaacccauuucucagacgauauugagcagcaggccgacaacaugauaacggagcugcuacaaaaagaauauaucgaucgccagggaaagaccccucucggucuggucgaccuuuuuguguucaguacuagcuuuuacuugauuuccaucuuccugcaccucgugaaaaucccaacacaucgacacgucguuggcaagcccugcccuaaaccacauagacugaaucacauggggauuuguucuugcggacuuuauaagcacccgggcgugcccguaaaguggaaaaggugaggacuaguaauaaggaaacuguaugaaugucugugggcaggaagugaagagauccuucuguaaagguuuuuggaauuaugucugcugaauaauaaacuuuuuugaaauaauaaaucugguagaaaaaugagaucuaaaaaaaaaaaaaaaaaaaaaaaaaaaaaaaaaaaaaaaaaaaaaaaaaaaaaaaaaaaaaaaaugcaucccccccccccccccccccccccccccccccaaaggcucuuuucagagccaccagaauu

SEQ ID NO: 6821 - RNA, 1813 nt, Artificial Sequence
  mRNA product Design b-4 comprising derived and/or modified sequence from LASV(Lassa virus/H.sapiens-wt/NGA/2015/ISTH_0543;Clade II)__AVO03639__GPCstabilized (opt3)
gggagagucccgcagucggcguccagcggcucugcuuguucgugugugugucguugcaggccuuauucaagcuuaccaugggccagaucauuaccuucuuucaagaggugccccacgucauagaagagguuaugaacaucgugcugauugcccucagccuucuggcuaucuugaaggggauuuacaauguagcaacaugcggauuauucggucugguguccuuucuacuccuguguggcagaucuugcucaacuacguauaaaggggucuacgaacuucagacccuggaguuggacauggccaaccucaauaugacaaugccucugaguuguacuaagaacaauagccaucacuauaucauggugggaaacgaaaccggccuggagcucacauuaaccaauacuuccauaaucaaccauaaauucugcaaucugucugaugcgcacaagaaaaaccuuuacgaccaugcuuugaugucgauuaucucaacauuucaccugagcauuccaaauuucaaccaguaugaggccaugaguugugauuuuaauggugggaagaucuccguucaguacaaccuaucucacaccuaugcaguggacgccgcuaaucauugcggaacgauagcaaacggcguccuccaaacuuucaugaggauggccuggggcgggagcuacauugcucuggauuccggaugcgguucaugggacuguaucaugaccaguuaccaguaucuugugauucagaacacaacuugggaagaucacugccaguuuagccggccgucucccaucggcuaccugggguugcucucccaacgcacccgagacaucuauauuucacguagacgccggggaacauucaccuggacgcugagcgauagugagggcaaugaaacuccugguggguacugucucacaagguggaugcuuauagaggccgagcugaaaugcuuuggaaacaccgcgguagcaaaguguaaugaaaaacaugacgaggaguucugcgauauguugcggcuauuugacuucaacaagcaggccauccgcagacugaaaacucccgcucagaugucuauucagcucaucaauaaggccguuaacgcacugauaaaugaucaacuuauuaugaagaaccaccugagggacaucaugugcaucccauauugcaauuacuccaaauauugguacuugaaccacacagugaccggcaagacgagccucccccgguguuggcuggucucgaaugggucuuacuuaaacgaaacccauuucuccgacgauauugagcagcaggcugacaauaugaucacagagcugcuacaaaaagaauauauugaucgccagggaaagacuccucucggucugguggaccuuuuuguguucucaaccaguuuuuacuugauaagcaucuuccugcaccucgucaaaauuccaacacaucgacacaucacuggcaagcccugcccuaaaccacauagacugaaccacauggggaucuguuccugcggacuuuauaagcacccgggcguucccgugaaguggaaaaggugaggacuaguaauaaggaaacuguaugaaugucugugggcaggaagugaagagauccuucuguaaagguuuuuggaauuaugucugcugaauaauaaacuuuuuugaaauaauaaaucugguagaaaaaugagaucuaaaaaaaaaaaaaaaaaaaaaaaaaaaaaaaaaaaaaaaaaaaaaaaaaaaaaaaaaaaaaaaaugcaucccccccccccccccccccccccccccccccaaaggcucuuuucagagccaccagaauu

SEQ ID NO: 6822 - RNA, 1813 nt, Artificial Sequence
  mRNA product Design b-4 comprising derived and/or modified sequence from LASV(Lassa virus/H.sapiens-wt/NGA/2016/ISTH_0009;Clade II)__AVO03571__GPCstabilized (opt3)
gggagagucccgcagucggcguccagcggcucugcuuguucgugugugugucguugcaggccuuauucaagcuuaccaugggccagaucauuaccuucuuucaagaggugccccacgucauagaagagguuaugaacaucgugcugauugcccucagccuucuggcuaucuugaaggggauuuacaauguagcaacaugcggauuacugggucuaguguccuuccuccugcuuuguggcagaucuugcucaacuacguauaaaggggucuacgaacugcagaccuuggagcucgacauggccagucugaacaugacaaugccucugagcuguacuaagaauaacucccaucacuauaucauggugggaaaugaaaccggccucgaguuaacacugaccaacacuucuauaaucaaucauaaauuuugcaaccuuucggaugcgcacaagaaaaauuuguacgaccaugcucugaugucaauuaucagcacauuccaccuaaguauuccaaacuuuaaucaguaugaggccauguccugugauuucaacggugggaggaucucuguucaguacaaucucagccacuccuaugcaguggacgccgcuaaccauugcggaaccauagcaaauggcguccugcaaacguuuaugcggauggccuggggcgggucauacauugcucuugauaguggaugcgguagcugggacuguaucaugacuucuuaccaguaucugauuauccagaacaccacaugggaagaucacugccaguucucccgcccgucacccaucggcuacuuggggcuccugagccaacgaacucgugacauuuauauaaguagaaggcgccggggaaccuuuacauggacccucucugauuccgagggcaacgaaacgccugguggguacugucuuacucgguggaugcugaucgaggccgaguugaagugcuucggaaauacagcgguggcaaaauguaacgaaaagcaugacgaggaauuuugcgauaugcuacgccuguucgacuuuaauaaacaggccauuagaaggcucaagacccccgcucagaugagcauccagcugauaaacaaagccguaaaugcacuuauuaacgaucaacugaucaugaagaaucacuugcgggacaucaugugcauuccauauugcaacuacucgaaguauugguaccucaaucacacuguuacaggcaaaaccucucugccccgcuguugguuaguguccaacgggucauaccugaaugaaacgcauuucagugacgauaucgagcagcaggcugacaacaugauuaccgagcuacuccaaaaggaauauauagaucgacagggaaaaacaccucugggucuugucgacuuguucguguuuagcacuuccuucuaccugaucucuauuuuucuccaccuggugaagaucccaacccauagacacaucacaggcaaacccugcccuaagccacauaggcuuaaucacauggggauuuguagcugcggacuguauaaccacccgggcguccccguuaaauggaagcggugaggacuaguaauaaggaaacuguaugaaugucugugggcaggaagugaagagauccuucuguaaagguuuuuggaauuaugucugcugaauaauaaacuuuuuugaaauaauaaaucugguagaaaaaugagaucuaaaaaaaaaaaaaaaaaaaaaaaaaaaaaaaaaaaaaaaaaaaaaaaaaaaaaaaaaaaaaaaaugcaucccccccccccccccccccccccccccccccaaaggcucuuuucagagccaccagaauu

SEQ ID NO: 6823 - RNA, 1813 nt, Artificial Sequence
  mRNA product Design b-4 comprising derived and/or modified sequence from LASV(Lassa virus/H.sapiens-wt/NGA/2016/ISTH_0017;Clade II)__AVO03567__GPCstabilized (opt3)
gggagagucccgcagucggcguccagcggcucugcuuguucgugugugugucguugcaggccuuauucaagcuuaccaugggccagaucauuaccuucuuucaagaggugccccacgucauagaagagguuaugaacaucgugcugauugcccucagccuucuggcuaucuugaaggggauuuacaauguagcaacaugcggauuauucggucugguguccuuucuacuccuguguggcagaucuugcucaacuacguauaaaggggucuacgaacuucagacccuggaguuggacauggccagucucaacaugacaaugccucugagcuguacuaagaauaacucccaucacuauaucauggugggaaaugaaaccggccuggagcucacauuaaccaacacuucuauaaucaaucauaaauucugcaaccugucggaugcgcacaagaaaaaucuuuacgaccaugcuuugaugucaauuaucagcacauuucaccugaguauuccaaacuucaaucaguaugaggccauguccugugauuuuaacggugggaagaucucuguucaguacaaucuaagccacaccuaugcaauagacgccgcuaaccauugcggaacgauugcaaauggcgugcuccaaacuuucaugaggauggccuggggcggguccuacaucgcucuggauucaggaugcgguaguugggacuguauuaugaccagcuaccaguaucuuaucauccagaacacaacuugggaagaucacugccaguuuucucggccgucccccauuggcuaccugggguugcucucacaacgcacccgagacauauauaucagccguagacgccggggaacauucaccuggacgcugagugauucugagggcaacgaaacuccugguggguacugucucacaagguggaugcuuauugaggccgagcugaaaugcuuuggaaauaccgcggucgcaaaguguaacgaaaaacaugacgaggaguucugcgauauguugcggcuauuugacuucaauaagcaggccauccgcagacugaaaacucccgcucagauguccauacagcucauuaacaaggccgugaaugcacugaucaacgaucaacuuaucaugaagaaucaccugagggacauuaugugcaucccauauugcaacuacagcaaauauugguacuugaaucacacaguaaccggcaagacgucgcucccccgguguuggcugguuucuaacggguccuacuuaaaugaaacccauuucucagacgauauugagcagcaggcugacaacaugauaacagagcugcuacaaaaagaauauauggaucgccagggaaagacuccucucggucugguggaccuuuuugucuucaguaccagcuuuuacuugaucuccauuuuccugcaccucgugcgaaucccaacacauagacacgugaucggcaaacccugcccuaagccacauaggcugaaucacauggggauuuguucuugcggacuuuauaaacacccgggcguccccguuaaguggaagcggugaggacuaguaauaaggaaacuguaugaaugucugugggcaggaagugaagagauccuucuguaaagguuuuuggaauuaugucugcugaauaauaaacuuuuuugaaauaauaaaucugguagaaaaaugagaucuaaaaaaaaaaaaaaaaaaaaaaaaaaaaaaaaaaaaaaaaaaaaaaaaaaaaaaaaaaaaaaaaugcaucccccccccccccccccccccccccccccccaaaggcucuuuucagagccaccagaauu

SEQ ID NO: 6824 - RNA, 1813 nt, Artificial Sequence
  mRNA product Design b-4 comprising derived and/or modified sequence from LASV(Lassa virus/H.sapiens-wt/NGA/2018/ISTH_0959;Clade II)__AVV65099__GPCstabilized (opt3)
gggagagucccgcagucggcguccagcggcucugcuuguucgugugugugucguugcaggccuuauucaagcuuaccaugggccagaucauuaccuucuuucaagaggugccccacgucauagaagagguuaugaacaucgugcugauugcccucagccuucuggcuaucuugaaggggauuuacaauguagugacaugcggauuauucggucuggucuccuuucuacuccuguguggcagaucuugcucaacuacguauaaagggguguacgaacuucagacccuggaguuggacauggcaagucucaacaugacaaugccucugagcuguacuaagaauaacucccaucacuauaucaugguuggaaaugaaaccggccuggagcucacauuaaccaacacuucuauaaucaaucauaaauucugcaaccugucggaugcccacaagaaaaaucuuuacgaccaugcguugaugucaauuaucagcacauuucaccugaguauuccaaacuucaaucaguaugaggcuauguccugugauuuuaacggugggaagaucucugugcaguacaaucuaagccacgccuaugcaauagacgccgcuaaccauugcggaaccauugcaaauggcguccuccaaacguucaugaggauggccuggggcggguccuacaucgcucuggauucaggaugcgguaguugggacuguauuaugacuagcuaccaguaucuuaucauccagaacaccacaugggaagaucacugccaguuuucucggccgucccccauuggcuaccugggguugcucucacaacgcacucgagacauauauaucagccguagacgccggggaaccuucacauggacccugagugauucugagggcaacgaaacgccugguggguacugucucacuagguggaugcuuauugaggccgagcugaaaugcuuuggaaauacagcgguggcaaaguguaacgaaaaacaugacgaggaguucugcgauauguugcggcuauuugacuucaauaagcaggccauccgcagacugaaaacccccgcucagauguccauacagcucauuaacaaggccguaaaugcacugaucaacgaucaacuuaucaugaagaaucaccugagggacauuaugugcaucccauauugcaacuacagcaaauauugguacuugaaucacacuguuacaggcaagaccucgcucccccgguguuggcuggugucuaacggguccuacuuaaaugaaacgcauuucucagacgauauugagcagcaggcugacaacaugauaaccgagcugcuacaaaaagaauauaucgaucgccagggaaagacaccucucggucuggucgaccuuuuuguguucaguacuagcuuuuacuugauuuccaucuuccugcaccucgugaaaaucccaacccaucgacacgucauuggcaagcccugcccuaaaccacauagacugaaucacauggggauauguucuugcggacuuuauaagcacccgggcguucccgugaaguggaaaaggugaggacuaguaauaaggaaacuguaugaaugucugugggcaggaagugaagagauccuucuguaaagguuuuuggaauuaugucugcugaauaauaaacuuuuuugaaauaauaaaucugguagaaaaaugagaucuaaaaaaaaaaaaaaaaaaaaaaaaaaaaaaaaaaaaaaaaaaaaaaaaaaaaaaaaaaaaaaaaugcaucccccccccccccccccccccccccccccccaaaggcucuuuucagagccaccagaauu

SEQ ID NO: 6825 - RNA, 1813 nt, Artificial Sequence
  mRNA product Design b-4 comprising derived and/or modified sequence from LASV(LASV003-NIG-2008;Clade II)__AIT17580__GPCstabilized (opt3)
gggagagucccgcagucggcguccagcggcucugcuuguucgugugugugucguugcaggccuuauucaagcuuaccaugggccagaucauuaccuucuuucaagaggugccccacgucauagaagagguuaugaacaucgugcugauugcccucagccuucuggcuaucuugaaggggauuuacaauguagcaacaugcggauuauucggucugguguccuuucuacuccuguguggcagaucuugcucaacuacguauaaaggggucuacgaacuucagacccuggaguuggacauggccagucucaacaugacaaugccucugagcuguacuaagaauaacucccaucacuauaucauggugggaaaugaaaccggccuggagcucacauuaaccaacacuucuauaaucaaucauaaauucugcaaccugucggaugcgcacaagaaaaaucuuuacgaccaugcuuugaugucaauuaucagcacauuucaccugaguauuccaaacuucaaucaguaugaggccauguccugugauuuuaacggugggaagaucucuguucaguacaaucuaagccacaccuaugcaguggacgccgcuaaccauugcggaacgauagcaaauggcguccuccaaacuuucaugaggauggccuggggcggguccuacauugcucuggauucaggaugcgguaguugggacuguaucaugaccagcuaccaguaucuuauuauccagaacacaacuugggaagaucacugccaguuuucucggccgucccccaucggcuaccugggguugcucucacaacgcacccgagacauuuauauaagccguagacgccggggaacauucaccuggacgcugagugauucugaguccaacgaaacuccuggcgguuacugucucacaagguggaugcuuaucgaggccgagcugaaaugcuuugggaauaccgcgguggcaaaguguaacgaaaaacaugacgaggaguucugcgauauguugcggcuauuugacuucaauaagcaggccauucgcagacugaaagcucccgcccagaugagcauccagcucauaaacaaggcaguaaaugcucugauuaacgaucaacuuaucaugaagaaucaccugagggacaucaugugcauuccauauugcaacuacucgaaauauugguacuugaaucacacuguuacaggacggaccucucucccccgcuguuggcugguguccaacggcucauacuuaaaugaaacgcauuucagugacgauaucgagcagcaggccgacaacaugauuaccgagcugcuacaaaaggaauauauggaucgacaggggaaaacaccucucggacuggucgaccuuuuuguguucagcacuuccuuuuacuugauaucuaucuuccugcaccucgugaagauuccaacccauagacacgucaucgguaaacccugcccuaagccacauaggcugaaucacaugggcaucuguagcugcgggcuuuauaaacacccgggaguucccgugaaguggaagcggugaggacuaguaauaaggaaacuguaugaaugucugugggcaggaagugaagagauccuucuguaaagguuuuuggaauuaugucugcugaauaauaaacuuuuuugaaauaauaaaucugguagaaaaaugagaucuaaaaaaaaaaaaaaaaaaaaaaaaaaaaaaaaaaaaaaaaaaaaaaaaaaaaaaaaaaaaaaaaugcaucccccccccccccccccccccccccccccccaaaggcucuuuucagagccaccagaauu

SEQ ID NO: 6826 - RNA, 1813 nt, Artificial Sequence
  mRNA product Design b-4 comprising derived and/or modified sequence from LASV(LASV035-NIG-2009;Clade II)__AIT17588__GPCstabilized (opt3)
gggagagucccgcagucggcguccagcggcucugcuuguucgugugugugucguugcaggccuuauucaagcuuaccaugggccagaucauuaccuucuuucaagaggugccccacgucauagaagagguuaugaacaucgugcugauugcccucagccuucuggcuaucuugaaggggauuuacaauguagcaacaugcggauuauucggucugguguccuuucuacuccuguguggcagaucuugcucaacuacguauaaaggggucuacgaacuucagacccuggaguuggacauggccagucucaacaugacaaugccucugagcuguacuaagaauaacucccaucacuauaucauggugggaaaugaaaccggccuggagcucacauuaaccaacacuucuauaaucaaucauaaauucugcaaccugucggaugcgcacaagaaaaaucuuuacgaccaugcuuugaugucaauuaucagcacauuucaccugaguauuccaaacuucaaucaguaugaggccauguccugugauuuuaacggugggaagaucucuguucaguacaaucuaagccacgcauaugccguggacgcugcaaaccauugcggaaccauagccaauggcguccuccaaacguucaugaggauggcuuggggcggguccuacauugcccuggauucaggaugcgguaguugggacuguaucaugacuagcuaccaguaucuuauuauccagaacaccacaugggaagaucacugccaguuuucucggccgucccccaucggcuaccugggguugcucucacaacgcacucgagacauuuauauaagccguagacgccggggaaccuucacauggacccugagugauucugagggcaacgaaacgccugguggguacugucucacuagguggaugcuuaucgaggcggagcugaaaugcuuuggaaauacagcaguggccaaguguaacgaaaaacaugacgaggaguucugcgauauguugcggcuauuugacuucaauaagcaggcuauucgcagacugaaagcccccgcacagauguccauccagcucauaaacaaggcuguaaaugcccugauuaacgaucaacuuaucaugaagaaucaccugagggacaucaugugcauuccauauugcaacuacagcaaauauugguacuugaaucacaccguuacuggcaagacaucgcucccccgguguuggcuggugucuaacggguccuacuuaaaugaaacccauuucucagacgauaucgagcagcaggcggacaacaugauuacggagcugcuacaaaaagaauauauagaucgccagggaaagaccccucucggucuggucgaccuuuuuguguucaguacuagcuuuuacuugaucuccauuuuccugcaccucgugaaaaucccaacacaucgacacgucaucggcaagcccugcccuaaaccacauagacugaaucacauggggauuuguucuugcggacuuuauaagcacccgggcguucccgugaaguggaaaaggugaggacuaguaauaaggaaacuguaugaaugucugugggcaggaagugaagagauccuucuguaaagguuuuuggaauuaugucugcugaauaauaaacuuuuuugaaauaauaaaucugguagaaaaaugagaucuaaaaaaaaaaaaaaaaaaaaaaaaaaaaaaaaaaaaaaaaaaaaaaaaaaaaaaaaaaaaaaaaugcaucccccccccccccccccccccccccccccccaaaggcucuuuucagagccaccagaauu

SEQ ID NO: 6827 - RNA, 1813 nt, Artificial Sequence
  mRNA product Design b-4 comprising derived and/or modified sequence from LASV(LASV1000-NIG-2009;Clade II)__AIT17782__GPCstabilized (opt3)
gggagagucccgcagucggcguccagcggcucugcuuguucgugugugugucguugcaggccuuauucaagcuuaccaugggccagaucauuaccuucuuucaagaggugccccacgucauagaagagguuaugaacaucgugcugauugcccucagccuucuggcuaucuugaaggggauuuacaauguagcaacaugcggauuauucggucugguguccuuucuacuccuguguggcagaucuugcucaacuacguauaaaggggucuacgaacuucagacccuggaguuggacauggccagucucaacaugacaaugccucugagcuguacuaagaauaacucccaucacuauaucauggugggaaaugaaaccggccuggagcucacauuaaccaacacuucuauaaucaaucauaaauucugcaaccugucggaugcgcacaagaaaaaucuuuacgaccaugcuuugaugucaauuaucagcacauuucaccugaguauuccaaacuucaaucaguaugaggccauguccugugauuuuaacggugggaagaucucuguucaguacaaucuaagccacaccuaugcaguggacgccgcuaaccauugcggaacgauagcaaauggcguccuccaaacuuucaugaggauggccuggggcggguccuacauugcucuggauucaggaugcgguaguugggacuguaucaugaccagcuaccaguaucuuauuauccagaacacaacuugggaagaucacugccaguuuucucggccgucccccaucggcuaccugggguugcucucacaacgcacccgagacauuuauauaagccguagacgccggggaacauucaccuggacgcugagugauucugagggcaacgaaacuccugguggguacugucucacaagguggaugcuuaucgaggccgagcugaaaugcuuuggaaauaccgcgguggcaaaguguaacgaaaaacaugacgaggaguucugcgauauguugcggcuauuugacuucaauaagcaggccauuaaacgccugaagacucccgcucagauguccauccagcucauaaacaaggccguaaaugcacugauuaacgaucaacuuaucaugaaaaaucaccugagagacaucaugugcauuccauauugcaacuacagcaaguauugguacuugaaucacacaguuaccggcaaaacgucgcuccccagguguuggcuggugucuaacggguccuacuuaaaugaaacccauuucucagacgauaucgagcagcaggcugacaacaugauuacagagcugcuacaaaaggaauauauagaucggcagggaaaaacuccucucggucuggucgaccuuuuuguguucaguaccagcuuuuacuugaucuccauuuuccugcaccucgugaagaucccaacacaucgccacgucguuggcaaacccugcccuaagccacaucgacugaaucacauggggaucuguucuugcggacuuuauaagcacccgggcgugcccguaaaauggaagagaugaggacuaguaauaaggaaacuguaugaaugucugugggcaggaagugaagagauccuucuguaaagguuuuuggaauuaugucugcugaauaauaaacuuuuuugaaauaauaaaucugguagaaaaaugagaucuaaaaaaaaaaaaaaaaaaaaaaaaaaaaaaaaaaaaaaaaaaaaaaaaaaaaaaaaaaaaaaaaugcaucccccccccccccccccccccccccccccccaaaggcucuuuucagagccaccagaauu

SEQ ID NO: 6828 - RNA, 1813 nt, Artificial Sequence
  mRNA product Design b-4 comprising derived and/or modified sequence from LASV(LASV221-NIG-2010;Clade II)__AIT17624__GPCstabilized (opt3)
gggagagucccgcagucggcguccagcggcucugcuuguucgugugugugucguugcaggccuuauucaagcuuaccaugggccagaucauuaccuucuuucaagaggugccccacgucauagaagagguuaugaacaucgugcugauugcccucagccuucuggcuaucuugaaggggauuuacaauguagcaacaugcggauuauucggucugguguccuuucuacuccuguguggcagaucuugcucaacuacguauaaaggggucuacgaacuucagacccuggaguuggacauggccagucucaacaugacaaugccucugagcuguacuaagaauaacucccaucacuauaucauggugggaaaugaaaccggccuggagcucacauuaaccaacacuucuauaaucaaucauaaauucugcaaccugucggaugcgcacaagaaaaaucuuuacgaccaugcuuugaugucaauuaucagcacauuucaccugaguauuccaaacuucaaucaguaugaggccauguccugugauuuuaacggugggaagaucucuguucaguacaaucuaagccacaccuaugcaauagacgccgcuaaccauugcggaacgauugcaaauggcgugcuccaaacuuucaugaggauggccuggggcggguccuacaucgcucuggauucaggaugcgguaguugggacuguauuaugaccagcuaccaguaucuuaucauccagaacacaacuugggaagaucacugccaguuuucucggccgucccccauuggcuaccugggguugcucucacaacgcacccgagacauauauaucagccguagacgccggggaacauucaccuggacgcugagugauucugagggcaacgaaacuccugguggguacugucucacaagguggaugcuuauugaggccgagcugaaaugcuuuggaaauaccgcggucgcaaaguguaacgaaaaacaugacgaggaguucugcgauauguugcggcuauuugacuucaauaagcaggccauccgcagacugaaaacucccgcucagauguccauacagcucauuaacaaggccgugaaugcacugaucaacgaucaacuuaucaugaagaaucaccugagggacauuaugugcaucccauauugcaacuacagcaaauauugguacuugaaucacacaguaaccggcaagacgucgcucccccgguguuggcugguuucuaacggguccuacuuaaaugaaacccauuucucagacgauauugagcagcaggcugacaacaugauaacagagaugcugcaaaaagaauauauggaucgccagggaaagacuccucuaggucucguggaccuguuugucuucaguaccagcuuuuaccuuaucuccauuuucuugcaccuggugaaaaucccaacacaucgacacgugaucggcaagcccugcccuaaaccacauagacucaaucacauggggauuuguucuugcggacuguauaagcacccgggcguccccguuaaguggaaaaggugaggacuaguaauaaggaaacuguaugaaugucugugggcaggaagugaagagauccuucuguaaagguuuuuggaauuaugucugcugaauaauaaacuuuuuugaaauaauaaaucugguagaaaaaugagaucuaaaaaaaaaaaaaaaaaaaaaaaaaaaaaaaaaaaaaaaaaaaaaaaaaaaaaaaaaaaaaaaaugcaucccccccccccccccccccccccccccccccaaaggcucuuuucagagccaccagaauu

SEQ ID NO: 6829 - RNA, 1813 nt, Artificial Sequence
  mRNA product Design b-4 comprising derived and/or modified sequence from LASV(LASV237-NIG-2010;Clade II)__AIT17638__GPCstabilized (opt3)
gggagagucccgcagucggcguccagcggcucugcuuguucgugugugugucguugcaggccuuauucaagcuuaccaugggccagaucauuaccuucuuucaagaggugccccacgucauagaagagguuaugaacaucgugcugauugcccucagccuucuggcuaucuugaaggggauuuacaauguagcaacaugcggauuauucggucugguguccuuucuacuccuguguggcagaucuugcucaacuacguauaaaggggucuacgaacuucagacccuggaguuggacauggccagucucaacaugacaaugccucugagcuguacuaagaauaacucccaucacuauaucauggugggaaaugaaaccggccuggagcucacauuaaccaacacuucuauaaucaaucauaaauucugcaaccugucggaugcgcacaagaaagaccuuuacgaucaugcuuugaugucaauuaucagcacauuucaccugaguauuccaaauuucaaccaguaugaggccauguccugugacuuuaauggugggaagaucucuguucaguacaaccuaagccacaccuaugcaguggaugccgcuaaucauugcggaacgauagcaaacggcguccuccaaacuuucaugaggauggccuggggcggguccuacauugcucuggacucaggaugcgguaguugggauuguaucaugaccagcuaccaguaucuuauuauccagaauacaacuugggaagaccacugccaguuuucucggccgucccccaucggcuaccugggguugcucucacaacgcacccgagauauuuauauaagccguagacgccggggaacauucaccuggacgcugagugacucugagggcaacgaaacuccugguggguacugucucacaagguggaugcuuaucgaggccgagcugaaaugcuuuggaaacaccgcgguggcaaaguguaaugaaaaacaugaugaggaguucugcgacauguugcggcuauuugauuucaacaagcaggccauucgcagacugaaaacucccgcucagauguccauccagcucauaaauaaggccguaaacgcacugauuaaugaccaacuuaucaugaagaaccaccugagggacaucaugugcauuccauauugcaauuacagcaaauauugguacuugaaccacacaguuaccggcaagacgucgcucccccgguguuggcuggugucuaauggguccuacuuaaacgaaacccauuucucagaugacaucgagcagcaggcugauaauaugauuacagagcugcuacaaaaagaauauauggaccgccagggaaagacuccucucggucuggucgaucuuuuuguguucaguaccagcuuuuacuugauauccaucuuccugcaccucauuaaaaucccaacacaucgacacaucacuggcaagcccugcccuaaaccacauagacugaaccacauggggauuuguucuugcggacuuuauaagcacccgggcgugcccgucaaguggaaaaggugaggacuaguaauaaggaaacuguaugaaugucugugggcaggaagugaagagauccuucuguaaagguuuuuggaauuaugucugcugaauaauaaacuuuuuugaaauaauaaaucugguagaaaaaugagaucuaaaaaaaaaaaaaaaaaaaaaaaaaaaaaaaaaaaaaaaaaaaaaaaaaaaaaaaaaaaaaaaaugcaucccccccccccccccccccccccccccccccaaaggcucuuuucagagccaccagaauu

SEQ ID NO: 6830 - RNA, 1813 nt, Artificial Sequence
  mRNA product Design b-4 comprising derived and/or modified sequence from LASV(LASV253-NIG-2011;Clade II)__AIT17670__GPCstabilized (opt3)
gggagagucccgcagucggcguccagcggcucugcuuguucgugugugugucguugcaggccuuauucaagcuuaccaugggccagaucauuaccuucuuucaagaggugccccacgucauagaagagguuaugaacaucgugcugauugcccucagccuucuggcuaucuugaaggggauuuacaauguagcaacaugcggauuauucggucugguguccuuucuacuccuguguggcagaucuugcucaacuacguauaaaggggucuacgaacuucagacccuggaguuggacauggccagucucaacaugacaaugccucugagcuguacuaagaauaacucccaucacuauaucauggugggaaaugaaaccggccuggagcucacauuaaccaacacuucuauaaucaaucauaaauucugcaaccugucggaugcgcacaagaaaaaucuuuacgaccaugcuuugaugucaauuaucagcacauuucaccugaguauuccaaacuucaaucaguaugaggccauguccugugauuuuaacggugggaagaucucuguucaguacaaucuaagccacaccuaugcaguggacgccgcuaaccauugcggaacgauagcaaauggcguccuccaaacuuucaugaggauggccuggggcggguccuacauugcucuggauucaggaugcgguaguugggacuguaucaugaccagcuaccaguaucuuauuauccagaacacaacuugggaagaucacugccaguuuucucggccgucccccaucggcuaccugggguugcucucacaacgcacccgagacauuuauauaagccguagacgccggggaacauucaccuggacgcugagugauucugagggcaacgaaacuccugguggguacugucucacaagguggaugcuuaucgaggccgagcugaaaugcuuuggaaauaccgcgguggcaaaguguaacgaaaaacaugacgaggaguucugcgauauguugcggcuauuugacuucaauaagcaggccauucgcagacugaaagcucccgcccagauguccauccagcucauaaacaaggcaguaaaugcucugauuaacgaucaacuuaucaugaagaaucaccugagggacaucaugugcauuccauauugcaacuacagcaaauauugguacuugaaucacacuguuacaggccggaccucgcucccccgcuguuggcuggugucuaacggguccuacuuaaaugaaacgcauuucucagacgauaucgagcagcaggccgacaacaugauuaccgagcugcuacaaaaggaauauauagaucgacagggaaaaacaccucucggucuggucgaccuuuuuguguucaguacuagcuuuuacuugaucuccauuuuccugcaccucgugaagaucccaacccauagacacaucauuggcaaacccugcccuaagccacauaggcugaaucacauggggauauguucuugcggacuuuauaaacacccgggcguccccguuaaguggaagcggugaggacuaguaauaaggaaacuguaugaaugucugugggcaggaagugaagagauccuucuguaaagguuuuuggaauuaugucugcugaauaauaaacuuuuuugaaauaauaaaucugguagaaaaaugagaucuaaaaaaaaaaaaaaaaaaaaaaaaaaaaaaaaaaaaaaaaaaaaaaaaaaaaaaaaaaaaaaaaugcaucccccccccccccccccccccccccccccccaaaggcucuuuucagagccaccagaauu

SEQ ID NO: 6831 - RNA, 1813 nt, Artificial Sequence
  mRNA product Design b-4 comprising derived and/or modified sequence from LASV(LASV254-NIG-2011;Clade II)__AIT17674__GPCstabilized (opt3)
gggagagucccgcagucggcguccagcggcucugcuuguucgugugugugucguugcaggccuuauucaagcuuaccaugggccagaucauuaccuucuuucaagaggugccccacgucauagaagagguuaugaacaucgugcugauugcccucagccuucuggcuaucuugaaggggauuuacaauguagcaacaugcggauuauucggucugguguccuuucuacuccuguguggcagaucuugcucaacuacguauaaaggggucuacgaacuucagacccuggaguuggacaugacaaaccucaauaugacuaugccucugaguuguaccaagaacaauagccaucacuauaucauggugggaaacgaaacaggccuggagcucaccuuaacuaauacauccauaaucaaccauaaauucugcaaucugucugaugcccacaagaaaaaccuuuacaaucaugcguugaugucgauuaucucaaccuuucaccugagcauuccaaacuucaaucaguaugaggcuaugaguugugacuuuaacggugggaagaucuccguucaguacaaucuaucucacagcuaugccguggaugcagccaaccauugcggaacgauagcuaacggcguccuccaaacuuucaugaggauggcauggggcggguccuacauugcccuggacucaggaugcgguaauugggauuguaucaugaccaguuaccaguaucuuauuauccagaacacaacuugggaagaccacugccaguuuagccggccgucucccaucggcuaccugggguugcucucccaacgcacccgagauauuuauauaucacguagacgccggggaacauucaccuggacgcugagcgacagugagggcaaugaaacuccugguggguacugucucacaagguggaugcuuaucgaggcugagcugaaaugcuuuggaaacaccgccguggcgaaguguaaugaaaaacaugaugaggaguucugcgacauguugcggcuauuugauuucaacaagcaggcaauucgcagacugaaaacucccgcccaggcuaauauccagcucauaaacaaggccguaaaugcacugauuaacgaccaacuuaucaugaagaaucaccugagggauaucaugugcauuccauauugcaacuacucuaaauauugguacuugaaucacacaguuaccggcaagacgucccucccccgguguuggcuggugagcaacgggucguacuuaaaugaaacccauuucucugacgacaucgagcagcaggcugauaacaugauuacagagcugcuacaaaaagaauauauggaccgccagggaaagacuccucucggucuggucgaucuuuuuguguucuccaccucauuuuacuugauaaguaucuuccugcaccucgugaaaauuccaacacaucgacacgucaucggcaagcccugcccuaaaccacauagacugaaccacauggggaucuguagcugcggacuuuauaagcacccgggcguucccgugaaguggaaaaggugaggacuaguaauaaggaaacuguaugaaugucugugggcaggaagugaagagauccuucuguaaagguuuuuggaauuaugucugcugaauaauaaacuuuuuugaaauaauaaaucugguagaaaaaugagaucuaaaaaaaaaaaaaaaaaaaaaaaaaaaaaaaaaaaaaaaaaaaaaaaaaaaaaaaaaaaaaaaaugcaucccccccccccccccccccccccccccccccaaaggcucuuuucagagccaccagaauu

SEQ ID NO: 6832 - RNA, 1813 nt, Artificial Sequence
  mRNA product Design b-4 comprising derived and/or modified sequence from LASV(Nig08-A19;Clade III)__ADU56618__GPCstabilized (opt3)
gggagagucccgcagucggcguccagcggcucugcuuguucgugugugugucguugcaggccuuauucaagcuuaccaugggccagaucgugaccuucuuucaagaggucccccacguuauugaagaggugaugaacauaguacugaucgcccucagcauucuugcuauccugaagggguuguacaauauugcaacaugcggauuaaucggucuggugacuuuccuacuccuguccggcagaucuuguucaaugacguauaaaggggucuacgaacuucagacccuggaguugaacaugaauacacucaacaugacuaugccucugaguugcaccaagaauaacagccaucacuauauaauggugggaaaugaaacaggccuggagcucaccuuaacuaacacaucccugcuucaucacaaauuuuguaauuugucugacgcccauaagaaaaaccuguacgaucacacccuaaugucgaucauuucaacguuccaccucagcaucccaaauuuuaaccaguaugaggcgaugaguugcgacuucaauggugggaagauuacuguucaguacaaccugucccauucuuaugcuaucgaugccgcaaaucacuguggaaccguggccaacggcguccuucaaacauuuaugaggauggcuuggggcgggagcuacauagcacuggacuccggaugcgguaagugggauugcauuaugacuucauaccaguauuugaucauucagaacaccacaugggaagaccauugucaguucagucgcccgagccccaucggcuaccucgggcuguuaucucaacgaacccgugauaucuauauuuccagaaggcgccggggaacguuuacuuggacacuuucagacagcgagggcaaugaaaccccugguggguacugccugacucgguggauguugauagaggccgagcuaaaauguuucggaaacacagcuguggccaagugcaaugaaaaacacgaugaggaauuuugugacaugcugcgccucuucgauuuuaacaagcaggcgaucagaaggcugaaagcacccgcccagaugaguauucagcuuaucaauaaggcuguaaacgcccugauaaaugaccaauugauuaugaagaaccaccuccgggauaucaugugcaucccauauugcaauuacucuaaauauugguaccugaaccauaccuccacgggccgcaccagcuuaccccgaugcuggcugguuucgaaugggucuuaccuaaacgaaacacacuucuccgacgacauugagcagcaggcagauaauaugaucacugagaugcuccaaaaggaauaucuggacagacagggaaaaaccccucuugguuugguggaucuguucgucuuuucaacaaguuucuaccucauuagcauauuucugcaucuugugaagaucccaacucacaggcauauugugggcaaacccuguccuaagccacaccggcugaaccacauggggaucugcuccuguggauuguauaaacagccgggcguccccguucguuggaagcgcugaggacuaguaauaaggaaacuguaugaaugucugugggcaggaagugaagagauccuucuguaaagguuuuuggaauuaugucugcugaauaauaaacuuuuuugaaauaauaaaucugguagaaaaaugagaucuaaaaaaaaaaaaaaaaaaaaaaaaaaaaaaaaaaaaaaaaaaaaaaaaaaaaaaaaaaaaaaaaugcaucccccccccccccccccccccccccccccccaaaggcucuuuucagagccaccagaauu

SEQ ID NO: 6833 - RNA, 1816 nt, Artificial Sequence
  mRNA product Design b-4 comprising derived and/or modified sequence from LASV(G1180-SLE-2010;Clade IV)__AIT17168__GPCstabilized (opt3)
gggagagucccgcagucggcguccagcggcucugcuuguucgugugugugucguugcaggccuuauucaagcuuaccaugggccagaucgugaccuucuuucaagaggucccccacguuauugaagaggugaugaacauaguacugaucgcccucagcauucuugcugugcugaagggguuguacaauuucgcaacaugcggauuagucggucugcuaacuuuucuccugcuuuguggcagauccugcacggccucuagguauaaagggguguacgaacugcagaccuuggagcucaacauggaaacacugaauaugacuaugccucugucauguaccaagaacaauagucaucacuauaucaugguuggaaacgagacaggccucgaguuaacccugacuaauacaagcauuaucaaccauaaauucugcaaucuuuccgacgcgcacaagaaaaacuuguacgaucaugcucugaugucuauaaucucgaccuuucaccuaucaauuccaaauuucaaccaguaugaagccaugagcugugacuuuaauggugggaagaucagugugcaguacaaccucucccacucuuaugcaggagaugccgcuaaucauugcggcacggucgcaaacggcgugcugcaaacuuucaugcggauggccuggggagggagcuacauugcucuugacuccgguugcggcucaugggauuguaucaugaccaguuaccaguaucugauaauucagaacacaacuugggaggaccauugccaguuuagccgcccgucucccaucggguacuugggacuccugucccaacgaacccgugauauuuauaucucaagaaggcgccggggcacauucaccuggacgcucagcgacagugaagguaaggauacuccugggggauacugucuuacacgguggaugcugaucgaggccgaguugaaaugcuuuggcaauaccgcgguagcaaaguguaacgaaaaacacgacgaggaguucugcgauaugcuacgccuguuugacuucaauaagcaggccauucagagacucaaagcucccgcccagaugucuauacaacugaucaacaaggcaguuaaugcucuuauuaacgaucagcugaucaugaagaaucacuugagggacauaaugugcauuccauauugcaacuacuccaaauauugguaccucaaucauacuacaaccgggaagacgagccugcccaaauguugguuagugucgaacggaucuuaccugaaugaaacccacuucuccgacgauaucgagcagcaagccgacaacaugaucacagagaugcuacagaaggaauauauggagcggcaggguaaaacuccucucggccuggucgaucuuuuuguguucucaaccaguuuuuacuugauuagcaucuuccugcaucucgugaagauuccaacacaccgccauauagucgggaaauccugccccaagccucaccgacugaaucacaugggaaucuguucuugcggccuuuauaagcagccagguguuccggugaaauggaagagaugaggacuaguaauaaggaaacuguaugaaugucugugggcaggaagugaagagauccuucuguaaagguuuuuggaauuaugucugcugaauaauaaacuuuuuugaaauaauaaaucugguagaaaaaugagaucuaaaaaaaaaaaaaaaaaaaaaaaaaaaaaaaaaaaaaaaaaaaaaaaaaaaaaaaaaaaaaaaaugcaucccccccccccccccccccccccccccccccaaaggcucuuuucagagccaccagaauu

SEQ ID NO: 6834 - RNA, 1816 nt, Artificial Sequence
  mRNA product Design b-4 comprising derived and/or modified sequence from LASV(G1442-SLE-2011;Clade IV)__AIT17180__GPCstabilized (opt3)
gggagagucccgcagucggcguccagcggcucugcuuguucgugugugugucguugcaggccuuauucaagcuuaccaugggccagaucgugaccuucuuucaagaggucccccacguuauugaagaggugaugaacauaguacugaucgcccucagcauucuugcugugcugaagggguuguacaaugucgcaacaugcggauuaaucggucuggugacuuuccuacuccuguguggcagauccugcacgaccacacuuuauaaagggguuuacgaacugcagacuuuggagcucaacauggaaacccugaauaugacaaugccucugucuuguaccaagaacaauucacaucacuauauuagggugggaaacgagacuggccucgaguuaacacugaccaauacgaguaucauaaaccauaaauuuugcaaucuuagcgacgcccacaagaaaaacuuguacgaucaugcgcugauguccaucauuucuacuuuccaccuaucgaucccaaauuuuaaccaguaugaagcuaugucaugugacuucaauggugggaagauuagcguccaguacaaccucagucacuccuaugccggagaugcagccaaucauugcggcaccguggcuaacggcguacugcaaacauuuaugcggauggcauggggagggucuuacaucgcccuugacagcgguugcggcaacugggauuguauaaugacuuccuaccaguaucugauuauccagaauaccacaugggacgaucacugccaguucucacgaccgagucccauuggguacuugggacuccugagccaacguaccagagacguuuauaucucuaggcggcgccggggcacguuuacuuggacacucuccgauucagaggguaaggacaccccugggggauacugucuuacucgcuggaugcugaucgaagcugaguugaaaugcuucggcaacacagccguggcgaaguguaaugagaaacaugaugaagaguuuugcgacaugcuaagacuguucgauuuuaacaagcaggcaauucagaggcucaaagcccccgcucagaugagcauacaacugaucaauaaggccgucaacgcacuuauuaaugaccagcugaucaugaagaaccacuugcgggacauaaugugcauuccauauugcaauuacaguaaauauugguaccucaacaauaccgcuacggggaagaccucucugcccaaauguugguuaaucuccaacggaagcuaccugaaugagacacacuucucggaugacaucgaacaggaggccgauaacaugauuacugagaugcuacaaaaggaauauauggagcgccaggguaaaaccccucucggccugguggaccuuuucguguuuucuacauccuucuacuugaucucaauuuuucugcaucucgucaagauaccaacucaccgacauaucguugggaaaaguugccccaagccucacagacugaaucauaugggaauuuguagcugcggccuuuauaagcagccaggugugccgguaagguggaaacggugaggacuaguaauaaggaaacuguaugaaugucugugggcaggaagugaagagauccuucuguaaagguuuuuggaauuaugucugcugaauaauaaacuuuuuugaaauaauaaaucugguagaaaaaugagaucuaaaaaaaaaaaaaaaaaaaaaaaaaaaaaaaaaaaaaaaaaaaaaaaaaaaaaaaaaaaaaaaaugcaucccccccccccccccccccccccccccccccaaaggcucuuuucagagccaccagaauu

SEQ ID NO: 6835 - RNA, 1816 nt, Artificial Sequence
  mRNA product Design b-4 comprising derived and/or modified sequence from LASV(G3010-SLE-2013;Clade IV)__AIT17344__GPCstabilized (opt3)
gggagagucccgcagucggcguccagcggcucugcuuguucgugugugugucguugcaggccuuauucaagcuuaccaugggccagaucgugaccuucuuucaagaggucccccacguuauugaagaggugaugaacauaguacugaucgcccucagcauucuugcugugcugaagggguuguacaauuucgcaacaugcggauuagucggucuggugacuuuucuacuccuguguggcagauccugcacgaccucucuuuauaaagggguuuacgaacugcagacauuggagcucaacauggaaacucugaauaugaccaugccucugucauguacaaagaacaauagucaucacuauaucauggugggaaacgagaccggccucgaguuaacucugacaaauaccagcauuaucaaccauaaauucugcaaucuuuccgacgcccacaagaaaaacuuguacaaucaugcgcugaugucuauaaucucgacguuucaccuaucaauuccaaacuucaaucaguaugaagcuaugagcugugauuuuaacggugggaagaucaguguccaguacaaucucucccacucuuaugccggagacgcagccagccauugcggcacuguggcuaacggcguacugcaaaccuucaugaggauggcauggggaggguccuacauugcccuugauucagguugcggcaagugggacuguaucaugacaaguuaucaguaccugauaauucagaacacuaccugggaggaucacugccaguuuagccggccgucucccaucggguauuugggacuccugucccaacgcacacgagacauuuacaucucacguagacgccggggcaccuucacguggacucucagcgauagugaagguaaagacacaccugggggauauugucuuaccagguggaugcugaucgaggcugaguugaagugcuuuggcaauacugccguugcgaaauguaacgaaaagcaugaugaggaguucugcgacaugcuacggcuguuugauuucaauaaacaggcaauucagcgccucaagacacccgcccagaugucuauacaacugaucaacaaggcugugaaugcccuuauuaacgaccagcugaucaugaaaaaucacuugagagauauaaugugcauuccauacugcaacuauuccaaguacugguaccucaaucacaccacgaccgggaaaacaagccugcccaaguguugguuagucucgaacggaucuuaucugaaugaaacucauuucuccgacgacaucgagcagcaagcagauaacaugaucaccgagaugcuacagaaagaauacauggagaggcaggguaagacaccucucggccugguggaccuuuuuguguucucaaccaguuuuuauuugauuagcaucuuccugcaccucgucaaaauuccaacucaucggcacauaguugggaaguccugccccaagccucaucgccugaaucacaugggaaucuguucuugcggccuuuacaaacagccaggugugccgguacgauggaagagaugaggacuaguaauaaggaaacuguaugaaugucugugggcaggaagugaagagauccuucuguaaagguuuuuggaauuaugucugcugaauaauaaacuuuuuugaaauaauaaaucugguagaaaaaugagaucuaaaaaaaaaaaaaaaaaaaaaaaaaaaaaaaaaaaaaaaaaaaaaaaaaaaaaaaaaaaaaaaaugcaucccccccccccccccccccccccccccccccaaaggcucuuuucagagccaccagaauu

SEQ ID NO: 6836 - RNA, 1816 nt, Artificial Sequence
  mRNA product Design b-4 comprising derived and/or modified sequence from LASV(G502-SLE-2009;Clade IV)__AIT17126__GPCstabilized (opt3)
gggagagucccgcagucggcguccagcggcucugcuuguucgugugugugucguugcaggccuuauucaagcuuaccaugggccagaucgugaccuucuuucaagaggucccccacguuauugaagaggugaugaacauaguacugaucgcccucagcauucuugcugugcugaagggguuguacaauuucgcaacaugcggauuagucggucugcuaacuuuucuccugcuuuguggcagauccugcacgaccgggcuguauaaaggaguguacgaauugcagacacucgagcugaacauggaaacucugaauaugaccaugccucucucuuguacaaagaacaauucacaucacuauaucaugguuggcaacgagaccgguuuagagcugacucuuacaaauaccaguauuaucaaccauaaauucugcaauuugagcgacgcccacaagaaaaaccuguacgaucaugcgcuaauguccauaaucucuacguuucaccucucgauuccaaauuucaaccaguaugaagcuaugucaugugacuuuaaugggggaaagaucagcgugcaguacaaccugagucacuccuaugccggcgaugcagccgaccauugcggcacugucgcuaauggggugcuucaaaccuucaugaggauggcauggggagguucuuacauugcccuggauagcggcugcgggcgcugggacuguaucaugacauccuaccaguauuugauaauucagaacacuaccugggaggaucacugccaguuuucacgaccgagucccaucggauaccucggccuguuaagccaacguacaagagacauuuauaucucuaggcggcgccgggguaccuucacguggacucuuuccgauucagaagggaaggacacaccuggaggcuacugucugacccgcuggauguugaucgaggcugagcuaaaaugcuuuggcaacacugccguagcgaaguguaaugaaaaacaugaugaggaguucugcgacaugcugagacucuuugauuucaacaagcaggcaauucagaggcugaaagcccccgcucagaugagcauacaacuuaucaauaaggccguuaacgcacugauuaaugaccaguuggugaugaagaaccaccuccgggacaucaugugcauaccauauugcaauuacagucgcuauugguaccugaaccacacaaccacgggacgaaccucuuuacccaaauguuggcuggucuccaaugguagcuaccuaaacgaaacacauuucucggaugacauugagcagcaagcugauaauaugaucacugagaugcuccagaaggaauauauggagagacagggcaaaaccccucuggggcuuguggacuuguuuguguucucuacauccuuuuaccugaucucaauuuuccuccaccuggucaagaucccaacucauaggcacauuguuggaaaaaguugccccaagccucaucggcuuaaccacaugggcauauguagcugcggucuguauaaacagccaggggugccgguaaaguggaagcguugaggacuaguaauaaggaaacuguaugaaugucugugggcaggaagugaagagauccuucuguaaagguuuuuggaauuaugucugcugaauaauaaacuuuuuugaaauaauaaaucugguagaaaaaugagaucuaaaaaaaaaaaaaaaaaaaaaaaaaaaaaaaaaaaaaaaaaaaaaaaaaaaaaaaaaaaaaaaaugcaucccccccccccccccccccccccccccccccaaaggcucuuuucagagccaccagaauu

SEQ ID NO: 6837 - RNA, 1816 nt, Artificial Sequence
  mRNA product Design b-4 comprising derived and/or modified sequence from LASV(G733-SLE-2010;Clade IV)__AIT17154__GPCstabilized (opt3)
gggagagucccgcagucggcguccagcggcucugcuuguucgugugugugucguugcaggccuuauucaagcuuaccaugggccagaucgugaccuucuuucaagaggucccccacguuauugaagaggugaugaacauaguacugaucgcccucagcauucuugcugugcugaagggguuguacaauuucgcaacaugcggaaucgucgguuuaguguccuuucugcuacucuguggcagaucuugcacuacgucacuguauaaagggguuuacgaacuucagacccuggaguugaacauggaaacacucaauaugacuaugccucugaguuguaccaagaacaauagccaucacuauauuauggugggaaacgagacaggccuggagcucaccuuaacuaauacauccaucauaaaccauaaauucugcaaucugucugacgcccacaagaaaaaccuuuacgaucaugcguugaugucgaucauuucaaccuuucaccugagcaucccaaauuucaaccaguaugaagcuaugaguugugacuuuaauggugggaagauuuccguccaguacaaccuaucucacagcuaugccggagaugcagccaaucauugcggcacgaucgcuaacggcgugcuccaaacuuucaugaggauggcauggggaggguccuacauagcccuggacucagguugcgaucgcugggacuguauuaugaccaguuaccaguaucuuaucauucagaacacaacuugggaggaucacugccaguuuagccgaccgucucccaucggcuaccugggguugcucucccaacguaccagagacaucuauauuucaaggcggcgccggggaacauucaccuggacgcugagcgauagugaaggcaaggacacuccugguggguacugucucacacgcuggaugcuuauagaggcugagcugaaaugcuuuggaaauaccgccguagcgaaguguaacgaaaaacaugaugaggaguucugcgacauguugagacuauuugauuucaauaagcaggcaauccagaggcugaaagcccccgcucagaugucuauucaacucaucaacaaggccguuaaugcacugauaaacgaccagcuuauuaugaagaaucaucugcgggacaucaugugcaucccauauugcaacuacuccaaauauugguacuugaaucacacuacaaccggcaagacgagccuccccaaauguuggcuggugucgaacgggucuuacuuaaaugaaacccacuucuccgaugacauugagcagcaagcugauaacaugaucacagagaugcugcagaaggaauauauggagcgccagggaaaaacuccucuaggucucgucgaccuguuuguguucucaaccaguuuuuaccuuauuagcauauucuugcaccuggugaagaucccaacacaucgacacgucguuggcaaauccugccccaagccucauagacucaaucacauggggauuuguucuugcggacuguauggccagccaggugugccgguaaaguggaaaaggugaggacuaguaauaaggaaacuguaugaaugucugugggcaggaagugaagagauccuucuguaaagguuuuuggaauuaugucugcugaauaauaaacuuuuuugaaauaauaaaucugguagaaaaaugagaucuaaaaaaaaaaaaaaaaaaaaaaaaaaaaaaaaaaaaaaaaaaaaaaaaaaaaaaaaaaaaaaaaugcaucccccccccccccccccccccccccccccccaaaggcucuuuucagagccaccagaauu

SEQ ID NO: 6838 - RNA, 1816 nt, Artificial Sequence
  mRNA product Design b-4 comprising derived and/or modified sequence from MOPV/LASV reassortant(IGS-1;Clade IV)__AFY05576__GPCstabilized (opt3)
gggagagucccgcagucggcguccagcggcucugcuuguucgugugugugucguugcaggccuuauucaagcuuaccaugggccagaucgugaccuucuuucaagaggucccccacguuauugaagaggugaugaacauaguacugaucgcccucagcgugcuugcuguccugaagggguuguacaauuucgcaacaugcggauuagugggucugguuacuuuucuacuccuguguggcagauccugcacgaccucucuuuauaaagggguguacgaacugcagacauuggagcucaacauggaaacucugaauaugaccaugccucugucauguacaaagaacaauagucaucacuauauuauggucggaaacgagaccggccucgaguuaacucugacaaauaccagcaucauuaaccauaaauucugcaaucuuuccgacgcccacaagaaaaacuuguacgaucaugcgcugaugucuaucauaucgacguuucaccuaucaaucccaaauuucaaccaguaugaagcuaugagcugugacuuuaauggugggaagauuagugugcaguacaaccucucccacucuuaugccggagaugcagccaaucauugcggcacuguagcuaacggcguucugcaaaccuucaugaggauggcauggggagggagcuacaucgcccuugacuccgguugcggcaacugggauuguauuaugacaucauaccaguaucugaucauacagaauacuaccugggaggaccacugccaguuuagucgcccgagccccauuggguacuugggacuccugucucaacgaacacgugauaucuauauuuccagaaggcgccggggcaccuucacguggacucucucagacagcgaaggugaggauacaccugggggauacugucuuacccgguggaugcugaucgaggcugaauugaagugcuuuggcaacacugccguggcgaaauguaaugagaagcaugacgaagaguucugcgauaugcuacgccuguuugacuucaacaaacaggcaauccagagacucaaggcccccgcucagaugaguauucaacugauaaauaaagccgucaacgcacuuaucaaugaucagcugauuaugaagaaccacuugagggacaucaugugcauaccauauugcaauuacucuaaguauugguaccucaaccacacaaccacggggcggaccucccugcccaaauguugguuagugagcaauggaucguaccugaacgagacacauuucucugacgauauugagcagcaagcugacaauaugaucacugaaaugcuacagaaggaguauauggaacgccaggguaaaaccccucucggccugguggaucuuuuugucuucuccacaucauuuuacuugaucaguauuuuccugcaccucguuaagaucccaacucaucgacacauuguggggaaaagcugccccaagccucauagacugaaccacaugggaauauguuccugcggccuuuauaaacagccagguguaccggugaaguggaagaggugaggacuaguaauaaggaaacuguaugaaugucugugggcaggaagugaagagauccuucuguaaagguuuuuggaauuaugucugcugaauaauaaacuuuuuugaaauaauaaaucugguagaaaaaugagaucuaaaaaaaaaaaaaaaaaaaaaaaaaaaaaaaaaaaaaaaaaaaaaaaaaaaaaaaaaaaaaaaaugcaucccccccccccccccccccccccccccccccaaaggcucuuuucagagccaccagaauu

SEQ ID NO: 6839 - RNA, 1816 nt, Artificial Sequence
  mRNA product Design b-4 comprising derived and/or modified sequence from LASV(LM765-SLE-2012;Clade IV)__AIT17814__GPCstabilized (opt3)
gggagagucccgcagucggcguccagcggcucugcuuguucgugugugugucguugcaggccuuauucaagcuuaccaugggccagaucgugaccuucuuucaagaggucccccacguuauugaagaggugaugaacauaguacugaucgcccucagcauucuugcugugcugaagggguuguacaauuucgcaacaugcggauuagucggucuggugacuuuucuacuccuguguggcagauccugcacgaccucucuuuauaaagggguuuacgaacugcagacauuggagcucaacauggaaacucugaauaugaccaugccucugucauguacaaagaacaauagucaucacuauaucauggugggaaacgagaccggccucgaguuaacucugacaaauaccagcauuaucgaccauaaauucugcaaccuuuccgaugcccacaggaagaauuuguacgaccaugcgcugaugucuauaaucucgacguuucaccuaucaauuccaaacuucaaucaguaugaagcuaugagcugugauuuuaacggugggaaaaucaguguccaguacaaucucucccacucuuaugccaaggacgcagccgaucauugcggaacuguggcuaacggcguacugcaaaccuucaugcggauggcauggggcgggagcuacauugcccuugacuccggaugcggucgaugggauuguaucaugacaucauaccaguaucugauaauucagaauacuaccugggaggaccacugccaguuuagucguccgagccccaucggcuacuuggggcuccugucucaaagaacaagggauauuuauaucucccggcgccgccggggaaccuucacguggacucucucagacagcgaaggcaaggauacaccugguggguacugucuuaccagauggaugcugaucgaggcugaguugaaaugcuuuggaaacacugccguugcgaaguguaacgaaaaacaugacgaggaguucugcgauaugcuaaggcuguuugacuucaauaagcaggcaauucagcggcucaaagcccccgcucagaugaguauacaacugaucaacaaggccgugaaugcacuuauuaacgaccagcugaucaugaagaaucacuugcgcgauauaaugugcauuccauauugcaacuacucuaaauauugguaccucaaucacacaaccacgggcaagaccucccugcccaaauguugguuagucagcaacgggucguaccugaaugaaacacauuucucugacgauaucgagcagcaagcugacaacaugaucacugagaugcuacagaaggaauauauggagcgacagggaaaaaccccucucggucugguggaucuuuuuguguucuccacaucauuuuacuugauuaguaucuuccugcaccucgucaagauuccaacucauagacacauaguuggcaaacccugcccuaagccacauaggcugaaucacauggggaucuguagcugcggacuuuauaagcagccgggcgugcccguaaaauggaagcggugaggacuaguaauaaggaaacuguaugaaugucugugggcaggaagugaagagauccuucuguaaagguuuuuggaauuaugucugcugaauaauaaacuuuuuugaaauaauaaaucugguagaaaaaugagaucuaaaaaaaaaaaaaaaaaaaaaaaaaaaaaaaaaaaaaaaaaaaaaaaaaaaaaaaaaaaaaaaaugcaucccccccccccccccccccccccccccccccaaaggcucuuuucagagccaccagaauu

SEQ ID NO: 6840 - RNA, 1816 nt, Artificial Sequence
  mRNA product Design b-4 comprising derived and/or modified sequence from LASV(LM776-SLE-2012;Clade IV)__AIT17824__GPCstabilized (opt3)
gggagagucccgcagucggcguccagcggcucugcuuguucgugugugugucguugcaggccuuauucaagcuuaccaugggccagaucgugaccuucuuucaagaggucccccacguuauugaagaggugaugaacauaguacugaucgcccucagcauucuugcugugcugaagggguuguacaauuucgcaacaugcggauuagucggucuggugacuuuucuacuccuguguggcagauccugcacgaccucuguuuauaaagggguguacgaacuucagacacuggaguugaacauggaaacucucaauaugaccaugccucugucauguacaaagaacaauagucaucacuauaucauggucggaaacgagaccggccuggagcucacuuuaacaaauaccagcauuaucaaccauaaauucugcaaucuguccgacgcccacaagaaaaaccuuuacgaucaugcguugaugucuauaaucucgacguuucaccugucaauuccaaauuucaaccaguaugaagcuaugagcugugacuuuaauggugggaagaucagugugcaguacaaccuaucccacucuuaugccggagaugcagccaaucauugcggcacuguagcuaacggcguucuccaaaccuucaugaggauggcauggggagggagcuacauugcccuggacuccgguugcggcaagugggauuguaucaugacaucauaccaguaucuuauaauucagaacacuaccugggaggaccauugccaguuuagucggccgagccccaucggguaccugggauugcucucucaacgcacacgagauauuuauaucucccguagacgccggggcaccuucacguggacucugucagacagcgaagguaaagauacaccugggggauacugucucaccagguggaugcuuaucgaggcugagcugaagugcuuuggcaauacugccguggcgaaauguaacgaaaagcacgacgaggaguucugcgauauguugcggcuauuugacuucaauaaacaggcaauucagcgccugaaggcccccgcucagaugaguauacaacucaucaacaaggccgucaaugcacugauuaacgaucagcuuaucaugaaaaaucaccugagagacauaaugugcauuccauauugcaacuacucuaaguauugguacuugaaucauacaaccacggggaaaaccucccuccccaaguguuggcuggugagcaacggaucguacuuaaaugaaacacacuucucugacgauaucgagcagcaagcugacaacaugaucacugagaugcugcagaaagaauauauggagaggcaggguaagaccccucuaggccucguggaucuguuugucuucuccacaucauuuuaccuuauuaguaucuucuugcaucugguuaaaauuccaacucaccggcauauagugggaaagagcugccccaagccucaccgccucaaucacauggggaucuguuccugcggccuguauaaacagccagguguaccggugcgauggaagagaugaggacuaguaauaaggaaacuguaugaaugucugugggcaggaagugaagagauccuucuguaaagguuuuuggaauuaugucugcugaauaauaaacuuuuuugaaauaauaaaucugguagaaaaaugagaucuaaaaaaaaaaaaaaaaaaaaaaaaaaaaaaaaaaaaaaaaaaaaaaaaaaaaaaaaaaaaaaaaugcaucccccccccccccccccccccccccccccccaaaggcucuuuucagagccaccagaauu

SEQ ID NO: 6841 - RNA, 1816 nt, Artificial Sequence
  mRNA product Design b-4 comprising derived and/or modified sequence from LASV(Mad39;Clade IV)__ANH09722__GPCstabilized (opt3)
gggagagucccgcagucggcguccagcggcucugcuuguucgugugugugucguugcaggccuuauucaagcuuaccaugggccagaucgugaccuucuuucaagaggucccccacguuauugaagaggugaugaacauaguacugaucgcccucagcauucuugcugugcugaagggguuguacaaugucgcaacaugcggauuaaucggucuggugacuuuccuacuccuguguggcagauccugcacgaccacacuuuauaaagggguuuacgaacugcaggccuuggagcucaacauggaaacucugaauaugaccaugccucugucuuguacaaagaacaauucacaucacuauauuagggugggaaacgagaccggccucgaguuaacucugacaaauaccagucuuaucaaccauaaauuuugcaauuugagcgacgcgcacaagaaaaaccuguacgaucaugcucuaauguccauaaucucuacguuccaccucucgauuccaaauuuuaaccaguaugaagccaugucaugugacuucaaugaugguaagaucagcguccaguacaaccugagucacacuuaugcaggggacaccgccaaucauugcggaacaguggcuaacggcguacuucaaacuuuuaugcggauggcauggggcggguccuacauugcccuggauucuggaugcgguggcugggacuguaucaugaccagcuaccaguauuugauaauucagaacacaaccugggaggaucacugccaguucucccgaccgucacccaucggguaccucggacuguuaagucaacguacgagagacauuuauaucagcaggcggcgccggggcacuuuuacauggacccuuucugauuccgaagguaaggacacuccugggggauacugucugacacgcuggauguugaucgaggcugagcuaaaaugcuucggcaauaccgccguugcgaaguguaacgaaaaacaugaugaggaauuuugcgacaugcugagacucuucgauuuuaauaagcaggcaauucagaggcugaaagcccccgcucagaugucaauacaacuuaucaacaaggccgugaaugcacugauuaacgaccaguugaucaugaagaaucaccuccgggacauaaugugcauuccauauugcaacuacagcaaauauugguaccugaaucacacggucaccgggaagacaaguuuacccaaauguuggcuggugucuaacggauccuaccuaaaugaaacucauuucagcgaugacaucgagcagcaagcugauaacaugaucaccgagaugcuccagaaggaauauauggagcgccaggguaaaacaccucugggccuuguggacuuguucgucuuuucgacuucuuucuaccugauuuccaucuuucuccaccugguuaagauuccaacccaucgacacgugguagggaaacccugcccuaagccacauagacuuaaucacaugggaauauguucaugcggcuucuauaagcagccgggugugcccgucagguggaaacggugaggacuaguaauaaggaaacuguaugaaugucugugggcaggaagugaagagauccuucuguaaagguuuuuggaauuaugucugcugaauaauaaacuuuuuugaaauaauaaaucugguagaaaaaugagaucuaaaaaaaaaaaaaaaaaaaaaaaaaaaaaaaaaaaaaaaaaaaaaaaaaaaaaaaaaaaaaaaaugcaucccccccccccccccccccccccccccccccaaaggcucuuuucagagccaccagaauu

SEQ ID NO: 6842 - RNA, 1816 nt, Artificial Sequence
  mRNA product Design b-4 comprising derived and/or modified sequence from LASV(Z0947-SLE-2011;Clade IV)__AIT17840__GPCstabilized (opt3)
gggagagucccgcagucggcguccagcggcucugcuuguucgugugugugucguugcaggccuuauucaagcuuaccaugggccagaucgugaccuucuuucaagaggucccccacguuauugaagaggugaugaacauaguacugaucgcccucagcauucuugcugugcugaagggguuguacaauuucgcaacaugcggauuagucggucuggugacuuuucuacuccuguguggcagauccugcacgaucucucuuuauaaagggguuuacgaacugcagaccuuggagcucaacauggaaacacugaauaugacuaugccucugucauguaccaagaacaauagucaucacuauauuauggugggaaacgagacaggccucgaguuaacccugacuaauacaagcaucauaaaccauaaauucugcaaucuuuccgacgcccacaagaaaaacuuguacgaucaugcgcugaugucuaucauuucgaccuuucaccuaucaaucccaaauuucaaccaguaugaagcuaugagcugugacuuuaauggugggaagauuaguguccaguacaaccucucccacucuuaugccggagaugcagccaaucauugcggcacgguggcuaacggcguacugcaaacuuucaugaggauggcauggggagggagcuacaucgcccuugacuccgguugcgaucgcugggacuguauaaugaccucauaccaguaucugauuauccagaacacaacuugggaggaucacugccaguuuagucgaccgagccccauuggcuacuuggggcuccugucucaacguaccagagacaucuauaucuccaggcggcgccggggaacauucaccuggacgcucucagauagcgaaggcaaggacacuccugguggguacugucuuacacgcuggaugcugauugaggcugaguugaaaugcuuuggaaauaccgccguugcgaaguguaacgaaaaacaugaugaggaguucugcgacaugcuaagacuguuugauuucaauaagcaggcaauacagaggcucaaagcccccgcucagaugaguauccaacugauuaacaaggccgugaaugcacuuaucaacgaccagcugauaaugaagaaucacuugcgggacauuaugugcaucccauauugcaacuacucuaaauauugguaccucaaucacacuacaaccggcaagacgucccugcccaaauguugguuagucagcaacgggucguaccugaaugaaacccauuucucugaugacaucgagcagcaagcugauaacaugauuacagagaugcuacagaaggaauauauggagcgccagggaaaaacuccucucggucugguggaccuuuuuguguucuccaccucauuuuacuugaucaguauuuuccugcaccucgucaagauaccaacacaucgacacaucguuggcaaacccugcccuaagccacauagacugaaucacauggggauuuguagcugcggacuuuauaagcagccgggcgugcccguaaaauggaagaggugaggacuaguaauaaggaaacuguaugaaugucugugggcaggaagugaagagauccuucuguaaagguuuuuggaauuaugucugcugaauaauaaacuuuuuugaaauaauaaaucugguagaaaaaugagaucuaaaaaaaaaaaaaaaaaaaaaaaaaaaaaaaaaaaaaaaaaaaaaaaaaaaaaaaaaaaaaaaaugcaucccccccccccccccccccccccccccccccaaaggcucuuuucagagccaccagaauu

SEQ ID NO: 6843 - RNA, 1816 nt, Artificial Sequence
  mRNA product Design b-4 comprising derived and/or modified sequence from LASV(Josiah;Clade IV)__NP_694870__GPCstabilized (opt4)
gggagagucccgcagucggcguccagcggcucugcuuguucgugugugugucguugcaggccuuauucaagcuuaccaugggccagaucgugaccuucuuccaggaggugccccacgugaucgaggaggugaugaacaucgugcugaucgcccugagcgugcuggccgugcugaagggccuguacaacuucgccaccugcggccuggugggccuggugaccuuccugcugcugugcggcagaagcugcaccaccagccuguacaagggcguguacgagcugcagacccuggagcugaacauggagacccugaacaugaccaugccccugagcugcaccaagaacaacagccaccacuacaucauggugggcaacgagaccggccuggagcugacccugaccaacaccagcaucaucaaccacaaguucugcaaccugagcgacgcccacaagaagaaccuguacgaccacgcccugaugagcaucaucagcaccuuccaccugagcauccccaacuucaaccaguacgaggccaugagcugcgacuucaacggcggcaagaucagcgugcaguacaaccugagccacagcuacgccggcgacgccgccaaccacugcggcaccguggccaacggcgugcugcagaccuucaugagaauggccuggggcggcagcuacaucgcccuggacagcggcugcggcaacugggacugcaucaugaccagcuaccaguaccugaucauccagaacaccaccugggaggaccacugccaguucagcagacccagccccaucggcuaccugggccugcugagccagagaaccagagacaucuacaucagcagaagacgccggggcaccuucaccuggacccugagcgacagcgagggcaaggacacccccggcggcuacugccugaccagauggaugcugaucgaggccgagcugaagugcuucggcaacaccgccguggccaagugcaacgagaagcacgacgaggaguucugcgacaugcugagacuguucgacuucaacaagcaggccauccagagacugaaggcccccgcccagaugagcauccagcugaucaacaaggccgugaacgcccugaucaacgaccagcugaucaugaagaaccaccugagagacaucaugugcauccccuacugcaacuacagcaaguacugguaccugaaccacaccaccaccggcagaaccagccugcccaagugcuggcuggugagcaacggcagcuaccugaacgagacccacuucagcgacgacaucgagcagcaggccgacaacaugaucaccgagaugcugcagaaggaguacauggagagacagggcaagaccccccugggccugguggaccuguucguguucagcaccagcuucuaccugaucagcaucuuccugcaccuggugaagauccccacccacagacacaucgugggcaagagcugccccaagccccacagacugaaccacaugggcaucugcagcugcggccuguacaagcagcccggcgugcccgugaaguggaagagaugaggacuaguaauaaggaaacuguaugaaugucugugggcaggaagugaagagauccuucuguaaagguuuuuggaauuaugucugcugaauaauaaacuuuuuugaaauaauaaaucugguagaaaaaugagaucuaaaaaaaaaaaaaaaaaaaaaaaaaaaaaaaaaaaaaaaaaaaaaaaaaaaaaaaaaaaaaaaaugcaucccccccccccccccccccccccccccccccaaaggcucuuuucagagccaccagaauu

SEQ ID NO: 6844 - RNA, 1813 nt, Artificial Sequence
  mRNA product Design b-4 comprising derived and/or modified sequence from LASV(LP;Clade I)__AAF86701__GPCstabilized (opt4)
gggagagucccgcagucggcguccagcggcucugcuuguucgugugugugucguugcaggccuuauucaagcuuaccaugggccagaucaucaccuucuuccaggaggugccccacgugaucgaggaggugaugaacaucgugcugaucgcccugagccugcuggccauccugaagggccuguacaacaucgccaccugcggcaucaucggccugguggccuuccuguuccugugcggcaagagcugcagccugacccugaagggcggcuacgagcugcagacccuggagcugaacauggagacccugaacaugaccaugccccugagcugcaccaagaacagcagccaccacuacaucagagugggcaacgagaccggccuggagcugacccugaccaacaccagcaucaucaaccacaaguucugcaaccugagcgacgcccacaagaagaaccuguacgaccacgcccugaugagcaucaucagcaccuuccaccugagcauccccaacuucaaccaguacgaggccaugagcugcgacuucaacggcggcaagaucagcgugcaguacaaccugagccacagcuacgccggcgacgccgccgagcacugcggcaccguggccaacggcgugcugcagaccuucaugagaauggccuggggcggcagauacaucgcccuggacagcggcugcggcaacugggacugcaucaugaccagcuaccaguaccugaucauccagaacaccaccugggaggaccacugccaguucagcagacccagccccaucggcuaccugggccugcugagccagagaaccagagacaucuacaucagcagaagacgccggggcaccuucaccuggacccugagcgacagcgagggcaacgagacccccggcggcuacugccugaccagauggaugcugaucgaggccgagcugaagugcuucggcaacaccgccguggccaagugcaacgagaagcacgacgaggaguucugcgacaugcugagacuguucgacuucaacaagcaggccaucagaagacugaaggcccccgcccagaugagcauccagcugaucaacaaggccgugaacgcccugaucaacgaccagcugaucaugaagaaccaccugagagacaucaugugcauccccuacugcaacuacagcaaguacugguaccugaaccacaccagcagcggcagaaccagccugcccaagugcuggcugaucagcaacggcagcuaccugaacgagacccaguucagcgacgacaucgagcagcaggccgacaacaugaucaccgagaugcugcagaaggaguacaucgagagacagggcaagaccccccugggccugguggacaucuucaucuucagcaccagcuucuaccugaucagcaucuuccugcaccugaucaagauccccacccacagacacaucgugggcaagcccugccccaagccccacagacugaaccacaugggcgugugcagcugcggccuguacaagcaccccggcgugcccaccaaguggaagagaugaggacuaguaauaaggaaacuguaugaaugucugugggcaggaagugaagagauccuucuguaaagguuuuuggaauuaugucugcugaauaauaaacuuuuuugaaauaauaaaucugguagaaaaaugagaucuaaaaaaaaaaaaaaaaaaaaaaaaaaaaaaaaaaaaaaaaaaaaaaaaaaaaaaaaaaaaaaaaugcaucccccccccccccccccccccccccccccccaaaggcucuuuucagagccaccagaauu

SEQ ID NO: 6845 - RNA, 1813 nt, Artificial Sequence
  mRNA product Design b-4 comprising derived and/or modified sequence from LASV(803213;Clade II)__AAF86703__GPCstabilized (opt4)
gggagagucccgcagucggcguccagcggcucugcuuguucgugugugugucguugcaggccuuauucaagcuuaccaugggccagaucaucaccuucuuccaggaggugccccacgugaucgaggaggugaugaacaucgugcugaucgcccugagccugcuggccauccugaagggcaucuacaacguggccaccugcggccuguucggccugaucagcuuccugcugcugugcggcagaagcugcagcgugaccuacaagggcguguacgagcugcagacccuggagcugaacauggccaaccugaacaugaccaugccccugagcugcaccaagaacaacagccaccacuacaucauggugggcaacgagaccggccuggagcugacccugaccaacaccagcaucaucaaccacaaguucugcaaccugagcgacgcccacaagaagaaccuguacgaccacgcccugaugagcaucaucagcaccuuccaccugagcauccccaacuucaaccaguacgaggccaugagcugcgacuucaacggcggcaagaucagcgugcaguacaaccugagccacagcuucgccguggacgccgccaaccacugcggcaccaucgccaacggcgugcugcagaccuucaugagaauggccuggggcggcagcuacaucgcccuggacagcggcugcggcaacugggacugcaucaugaccagcuaccaguaccugaucauccagaacaccaccugggaggaccacugccaguucagcagacccagccccaucggcuaccugggccugcugagccagagaaccagagacaucuacaucagcagaagacgccggggcaccuucaccuggacccugagcgacagcgagggcaacgaggcccccggcggcuacugccugaccagauggaugcugaucgaggccgagcugaagugcuucggcaacaccgccguggccaagugcaacgagaagcacgacgaggaguucugcgacaugcugagacuguucgacuucaacaagcaggccaucaagagacugaagacccccgcccagaugagcauccagcugaucaacaaggccgugaacgcccugaucaacgaccagcugaucaugaagaaccaccugagagacaucaugugcauccccuacugcaacuacagcagauacugguaccugaaccacaccgugaccggcaagaccagccugcccagaugcuggcuggugagcaacggcagcuaccugaacgagacccacuucagcgacgacaucgagcagcaggccgacaacaugaucaccgagaugcugcagaaggaguacauggacagacagggcaagaccccccugggccugguggaccuguucguguucagcaccagcuucuaccugaucagcaucuuccugcaccuggugaagauccccacccacagacacaucgugggcaagcccugccccaagccccacagacugaaccacaugggcaucugcagcugcggccuguacaagcaccccggcgugcccgugaaguggaagagaugaggacuaguaauaaggaaacuguaugaaugucugugggcaggaagugaagagauccuucuguaaagguuuuuggaauuaugucugcugaauaauaaacuuuuuugaaauaauaaaucugguagaaaaaugagaucuaaaaaaaaaaaaaaaaaaaaaaaaaaaaaaaaaaaaaaaaaaaaaaaaaaaaaaaaaaaaaaaaugcaucccccccccccccccccccccccccccccccaaaggcucuuuucagagccaccagaauu

SEQ ID NO: 6846 - RNA, 1813 nt, Artificial Sequence
  mRNA product Design b-4 comprising derived and/or modified sequence from LASV(GA391;Clade III)__CAA36645__GPCstabilized (opt4)
gggagagucccgcagucggcguccagcggcucugcuuguucgugugugugucguugcaggccuuauucaagcuuaccaugggccagaucgugaccuucuuccaggaggugccccacgugaucgaggaggugaugaacaucgugcugaucgcccugagcauccuggccauccugaagggccuguacaacguggccaccugcggccugaucggccuggugaccuuccugcugcugagcggcagaagcugcagccugaucuacaagggcaccuacgagcugcagacccuggagcugaacauggagacccugaacaugaccaugccccugagcugcaccaagaacaacagccaccacuacaucagagugggcaacgagaccggccuggagcugacccugaccaacaccagcauccugaaccacaaguucugcaaccugagcgacgcccacaagagaaaccuguacgaccacagccugaugagcaucaucagcaccuuccaccugagcauccccaacuucaaccaguacgaggccaugagcugcgacuucaacggcggcaagaucaccgugcaguacaaccugagccacagcuucgccguggacgccgccggccacugcggcacccuggccaacggcgugcugcagaccuucaugagaauggccuggggcggcagcuacaucgcccuggacagcggcugcggcaacugggacugcaucaugaccagcuaccaguaccugaucauccagaacaccaccugggacgaccacugccaguucagcagacccagccccaucggcuaccugggccugcugagccagagaaccagagacaucuacaucagcagaagacgccggggcaccuucaccuggacccugagcgacagcgagggcaacgagacccccggcggcuacugccugaccagauggaugcugaucgaggccgagcugaagugcuucggcaacaccgccguggccaagugcaacgagaagcacgacgaggaguucugcgacaugcugagacuguucgacuucaacaagcaggccaucagaagacugaagacccccgcccagaugagcauccagcugaucaacaaggccgugaacgcccugaucaacgaccagcugaucaugaagaaccaccugagagacaucaugugcauccccuacugcaacuacagcagauacugguaccugaaccacaccagcaccggcaagaccagccugcccagaugcuggcugaucagcaacggcagcuaccugaacgagaccaaguucagcgacgacaucgagcagcaggccgacaacaugaucaccgagaugcugcagaaggaguacaucgacagacagggcaagaccccccugggccugguggaccuguucguguucagcaccagcuucuaccugaucagcaucuuccugcaccuggugaagauccccacccacagacacaucgugggcaagcccugccccaagccccacagacugaaccacaugggcaucugcagcugcggccuguacaagcagcccggcgugcccgugagauggaagagaugaggacuaguaauaaggaaacuguaugaaugucugugggcaggaagugaagagauccuucuguaaagguuuuuggaauuaugucugcugaauaauaaacuuuuuugaaauaauaaaucugguagaaaaaugagaucuaaaaaaaaaaaaaaaaaaaaaaaaaaaaaaaaaaaaaaaaaaaaaaaaaaaaaaaaaaaaaaaaugcaucccccccccccccccccccccccccccccccaaaggcucuuuucagagccaccagaauu

SEQ ID NO: 6847 - RNA, 1816 nt, Artificial Sequence
  mRNA product Design b-4 comprising derived and/or modified sequence from LASV(AV;Clade V)__CCA30314__GPCstabilized (opt4)
gggagagucccgcagucggcguccagcggcucugcuuguucgugugugugucguugcaggccuuauucaagcuuaccaugggccagaucgugaccuucuuccaggaggugccccacgugaucgaggaggugaugaacaucgugcugaucgcccugagcauccuggccgugcugaagggccuguacaacaucgccaccugcggccugaucggccugaucaccuuccugcugcugugcggcagaagcugcagcagcaaccuguacaagggcguguacgagcugcagagccuggaccugaacauggagacccugaacaugaccaugccccugagcugcaccaagaacaacagccaccacuacaucagagugggcaacgacaccggccuggagcugacccugaccaacaccagcauccugaaccacaaguucugcaaccugagcgacgcccacaagaaggaccuguacgaccacgcccugaugagcaucaucagcaccuuccaccugagcauccccaacuucaaccaguacgaggccaugagcugcgacuucaacggcggcaagaucagcgugcaguacaaccugagccacagcuacgccaucgacgccgccaaccacugcggcaccguggccaacggcauccugcagaccuucaugagaauggccuggggcggcagcuacaucgcccuggacagcggcugcggcaacugggacugcaucaugaccagcuaccaguaccugaucauccagaacaccaccugggagaaccacugccaguucagcagacccagccccaucggcuaccugggccugcugagccagagaaccagagacaucuacaucagcagaagacgccggggcaccuucaccuggacccugagcgacagcgagggcaacgccacccccggcggcuacugccugaccagauggaugcugaucgaggccgagcugaagugcuucggcaacaccgccguggccaagugcaacgagaagcacgacgaggaguucugcgacaugcugagacuguucgacuucaacaagcaggccaucagcagacugaagagccccgcccagaugagcauccagcugaucaacaaggccgugaacgcccugaucaacgaccagcugaucaugaagaaccaccugagagacaucaugugcauccccuacugcaacuacagcaaguacugguaccugaaccacaccaucaccggcaagaccagccugcccaagugcuggcuggugagcaacggcagcuaccugaacgagacccacuucagcgacgacaucgagcagcaggccgacaacaugaucaccgagaugcugcagaaggaguacauggagagacagggcaagaccccccugggccugguggaccuguucguguucagcaccagcuucuaccugaucagcaucuuccugagacuggugaagauccccacccacagacacaucgugggcaagcccugccccaagccccacagacugaaccacaugggcaucugcagcugcggccuguacaagcagcccggcgugcccgugagauggaagagaugaggacuaguaauaaggaaacuguaugaaugucugugggcaggaagugaagagauccuucuguaaagguuuuuggaauuaugucugcugaauaauaaacuuuuuugaaauaauaaaucugguagaaaaaugagaucuaaaaaaaaaaaaaaaaaaaaaaaaaaaaaaaaaaaaaaaaaaaaaaaaaaaaaaaaaaaaaaaaugcaucccccccccccccccccccccccccccccccaaaggcucuuuucagagccaccagaauu

SEQ ID NO: 6848 - RNA, 1813 nt, Artificial Sequence
  mRNA product Design b-4 comprising derived and/or modified sequence from LASV(Togo/2016/7082;Clade VI)__AMR44577__GPCstabilized (opt4)
gggagagucccgcagucggcguccagcggcucugcuuguucgugugugugucguugcaggccuuauucaagcuuaccaugggccagaucaucaccuucuuccaggaggugccccacgugaucgaggaggugaugaacaucgugcugaucgcccugagccugcuggccauccugaagggcguguacaacguggccaccugcggcaucaucggccuggugaccuuccuguuccugugcggcagaagcugcagccugaucuacaagggcagcuacgagcugcagacccuggagcugaacauggagacccugaacaugaccaugccccugagcugcaccaagaacagcagccaccacuacaucagagugggcaacgagaccggccuggagcugacccugaccaacaccagcaucaucaaccacaaguucugcaaccugagcgacgcccacaagagaaaccuguacgaccacgcccugaugagcauccugagcaccuuccaccugagcauccccaacuucaaccaguacgaggccaugagcugcgacuucaacggcggcaagaucagcgugcaguacaaccugagccacgccuacgccguggacgccgccgagcacugcggcaccguggccaacggcgugcugcagaccuucaugagaauggccuggggcggcagcuacaucgcccuggacagcggcugcggcaacugggacugcaucaugaccagcuaccaguaccugaucauccagaacaccaccugggaggaccacugccaguucagcagacccagccccaucggcuaccugggccugcugagccagagaaccagagacaucuacaucagcagaagacgccggggcaccuucaccuggacccugagcgacagcgagggcaacgagacccccggcggcuacugccugaccagauggaugcugaucgaggccgagcugaagugcuucggcaacaccgccguggccaagugcaacgagaagcacgacgaggaguucugcgacaugcugagacuguucgacuucaacaagcaggccauccagagacugaagagccccgcccagaugagcauccagcugaucaacaaggccgugaacgcccugaucaacgaccagcugaucaugaagaaccaccugagagacaugaugugcauccccuacugcaacuacagcaaguacugguaccugaaccacaccagcagcggcagaaccagccugcccaagugcuggcuggugagcaacggcagcuaccugaacgagacccacuucagcgacgacaucgagcagcaggccgacaacaugaucaccgagaugcugcagaaggaguacaucgacagacagggcaagaccccccugggccugguggaccuguucguguucagcaccagcuucuaccugaucagcaucuuccugcaccugaucaagauccccacccacagacacaucgugggcaagcccugccccaagccccacagacugaaccacaugggcaucugcagcugcggccuguacaagcagcccggcgugcccaccagauggaagagaugaggacuaguaauaaggaaacuguaugaaugucugugggcaggaagugaagagauccuucuguaaagguuuuuggaauuaugucugcugaauaauaaacuuuuuugaaauaauaaaucugguagaaaaaugagaucuaaaaaaaaaaaaaaaaaaaaaaaaaaaaaaaaaaaaaaaaaaaaaaaaaaaaaaaaaaaaaaaaugcaucccccccccccccccccccccccccccccccaaaggcucuuuucagagccaccagaauu

SEQ ID NO: 6849 - RNA, 1813 nt, Artificial Sequence
  mRNA product Design b-4 comprising derived and/or modified sequence from LASV(KAK-428;Clade n.d. (VII))__ANH09740__GPCstabilized (opt4)
gggagagucccgcagucggcguccagcggcucugcuuguucgugugugugucguugcaggccuuauucaagcuuaccaugggccagaucgugaccuucuuccaggaggugccccacgugaucgaggaggugaugaacaucgugcugaucgcccugagccugcuggccauccugaagggccuguacaacuucgccaccugcggcgugaucggccugaucaccuuccugcugcugugcggcagaagcugcagcgccaccuacaagggccaguacgagcugcagacccuggagcugaacauggagagccugaacaugaccaugccccugagcugcaccaagaacaacagccaccacuacaucagagccggcaacaacaccggccuggagcugacccugaccaacaccagcaucaucagccacaaguucugcaaccugagcgacgcccacaagaagaaccuguacgaccacacccugaugagcaucaucaccaccuuccaccugagcauccccaacuucaaccaguacgaggccaugagcugcgacuucaacggcggcaagaucagcauccaguacaaccugagccacagcuacgccggcgacgccgcccagcacugcggcaccguggccaacggcgugcugcagaccuucaugagaauggccuggggcggcagcuaccuggcccuggacagcggcugcagaggcugggacugcaucaucagcagcuaccaguaccugaucauccagaacaccaccugggacgaccacugccaguucagcagacccagccccaucggcuaccugggcuucgugagccagaagaccagagacaucuacaucagcagaagacgccggggcaccuucaccuggacccugagcgacagcgagggccacgacaugcccggcggcuacugccugaccagauggaugcugaucgaggccgaccugaagugcuucggcaacaccgccguggccaagugcaacgagaagcacgacgaggaguucugcgacauguggagacuguucgacuucaacaagcaggccauccagagacugaaggcccccgcccagaugaacauccagcugaucaacaaggccgugaacgcccugaucaacgaccagcugaugaugaagaaccaccugagagacaucaugugcauccccuacugcaacuacagcaaguucugguaccugaacaacaccaccaccggcagaaccagccugcccagaugcuggcugaucagcaacggcagcuaccugaacgagacccacuucagcgacgacaucgagcagcaggccgacaacaugaucaccgagaugcugcagaaggaguacauggacagacagggcaagaccccccugggccugguggaccuguucguguucagcaccagcuucuaccugaucaccaucuuccugcaccuggugaagauccccacccacagacacaucgugggcaagcccugccccaagccccacagacugaaccacaugggcaucugcagcugcggccuguacaagcagcccggcgugcccgugagauggaagagaugaggacuaguaauaaggaaacuguaugaaugucugugggcaggaagugaagagauccuucuguaaagguuuuuggaauuaugucugcugaauaauaaacuuuuuugaaauaauaaaucugguagaaaaaugagaucuaaaaaaaaaaaaaaaaaaaaaaaaaaaaaaaaaaaaaaaaaaaaaaaaaaaaaaaaaaaaaaaaugcaucccccccccccccccccccccccccccccccaaaggcucuuuucagagccaccagaauu

SEQ ID NO: 6850 - RNA, 1813 nt, Artificial Sequence; identical to SEQ ID NO: 6844
  mRNA product Design b-4 comprising derived and/or modified sequence from LASV(Pinneo-NIG-1969;Clade I)__AIT17836__GPCstabilized (opt4)

SEQ ID NO: 6851 - RNA, 1813 nt, Artificial Sequence
  mRNA product Design b-4 comprising derived and/or modified sequence from LASV(ISTH0009-NIG-2011;Clade II)__AIT17404__GPCstabilized (opt4)
gggagagucccgcagucggcguccagcggcucugcuuguucgugugugugucguugcaggccuuauucaagcuuaccaugggccagaucaucaccuucuuccaggaggugccccacgugaucgaggaggugaugaacaucgugcugaucgcccugagccugcuggccauccugaagggcaucuacaacguggccaccugcggccuguucggccuggugagcuuccugcugcugugcggcagaagcugcagcaccaccuacaagggcguguacgagcugcagacccuggagcuggacauggccagccugaacaugaccaugccccugagcugcaccaagaacaacagccaccacuacaucauggugggcaacgagaccggccuggagcugacccugaccaacaccagcaucaucaaccacaaguucugcaaccugagcgacgcccacaagaagaaccuguacgaccacgcccugaugagcaucaucagcaccuuccaccugagcauccccaacuucaaccaguacgaggccaugagcugcgacuucaacggcggcaagaucagcgugcaguacaaccugagccacgccuacgccguggacgccgccaaccacugcggcaccaucgccaacggcgugcugcagaccuucaugagaauggccuggggcggcagcuacaucgcccuggacagcggcugcggcagcugggacugcaucaugaccagcuaccaguaccugaucauccagaacaccaccugggaggaccacugccaguucagcagacccagccccaucggcuaccugggccugcugagccagagaaccagagacaucuacaucagcagaagacgccggggcaccuucaccuggacccugagcgacagcgagggcaacgagacccccggcggcuacugccugaccagauggaugcugaucgaggccgagcugaagugcuucggcaacaccgccguggccaagugcaacgagaagcacgacgaggaguucugcgacaugcugagacuguucgacuucaacaagcaggccaucagaagacugaagacccccgcccagaugagcauccagcugaucaacaaggccgugaacgcccugaucaacgaccagcugaucaugaagaaccaccugagagacaucaugugcauccccuacugcaacuacagcaaguacugguaccugaaccacaccgugaccggcaagaccagccugcccagaugcuggcuggugagcaacggcagcuaccugaacgagacccacuucagcgacgacaucgagcagcaggccgacaacaugaucaccgagcugcugcagaaggaguacauggacagacagggcaagaccccccugggccugguggaccuguucguguucagcaccagcuucuaccugaucagcaucuuccugcaccugaucaagauccccacccacagacacaucaccggcaagcccugccccaagccccacagacugaaccacaugggcaucugcagcugcggccuguacaagcaccccggcgugcccgugaaguggaagagaugaggacuaguaauaaggaaacuguaugaaugucugugggcaggaagugaagagauccuucuguaaagguuuuuggaauuaugucugcugaauaauaaacuuuuuugaaauaauaaaucugguagaaaaaugagaucuaaaaaaaaaaaaaaaaaaaaaaaaaaaaaaaaaaaaaaaaaaaaaaaaaaaaaaaaaaaaaaaaugcaucccccccccccccccccccccccccccccccaaaggcucuuuucagagccaccagaauu

SEQ ID NO: 6852 - RNA, 1813 nt, Artificial Sequence
  mRNA product Design b-4 comprising derived and/or modified sequence from LASV(ISTH2010-NIG-2012;Clade II)__AIT17482__GPCstabilized (opt4)
gggagagucccgcagucggcguccagcggcucugcuuguucgugugugugucguugcaggccuuauucaagcuuaccaugggccagaucaucaccuucuuccaggaggugccccacgugaucgaggaggugaugaacaucgugcugaucgcccugagccugcuggccauccugaagggcaucuacaacguggccaccugcggccuguucggccuggugagcuuccugcugcugugcggcagaagcugcagcaccaccuacaagggcguguacgagcugcagacccuggagcuggacauggccagccugaacaugaccaugccccugagcugcaccaagaacaacagccaccacuacaucauggugggcaacgagaccggccuggagcugacccugaccaacaccagcaucaucaaccacaaguucugcaaccugagcgacgcccacaagaagaaccuguacgaccacgcccugaugagcaucaucagcaccuuccaccugagcauccccaacuucaaccaguacgaggccaugagcugcgacuucaacggcggcaagaucagcgugcaguacaaccugagccacgccuacgccguggacgccgccaaccacugcggcaccaucgccaacggcgugcugcagaccuucaugagaauggccuggggcggcagcuacaucgcccuggacagcggcugcggcagcugggacugcaucaugaccagcuaccaguaccugaucauccagaacaucaccugggaggaccacugccaguucagcagacccagccccaucggcuaccugggccugcugagccagagaaccagagacaucuacaucagcagaagacgccggggcaccuucaccuggacccugagcgacagcgagggcaacgagacccccggcggcuacugccugaccagauggaugcugaucgaggccgagcugaagugcuucggcaacaccgccguggccaagugcaacgagaagcacgacgaggaguucugcgacaugcugagacuguucgacuucaacaagcaggccaucagaagacugaagacccccgcccagaugagcauccagcugaucaacaaggccgugaacgcccugaucaacgaccagcugaucaugaagaaccaccugagagacaucaugugcauccccuacugcaacuacagcaaguacugguaccugaaccacaccgugaccggcaagaccagccugcccagaugcuggcuggugagcaacggcagcuaccugaacgagacccacuucagcgacgacaucgagcagcaggccgacaacaugaucaccgagcugcugcagaaggaguacaucgacagacagggcaagaccccccugggccugguggaccuguucguguucagcaccagcuucuaccugaucagcaucuuccugcaccuggugaagauccccacccacagacacguggugggcaagcccugccccaagccccacagacugaaccacaugggcaucugcagcugcggccuguacaagcaccccggcgugcccgugaaguggaagagaugaggacuaguaauaaggaaacuguaugaaugucugugggcaggaagugaagagauccuucuguaaagguuuuuggaauuaugucugcugaauaauaaacuuuuuugaaauaauaaaucugguagaaaaaugagaucuaaaaaaaaaaaaaaaaaaaaaaaaaaaaaaaaaaaaaaaaaaaaaaaaaaaaaaaaaaaaaaaaugcaucccccccccccccccccccccccccccccccaaaggcucuuuucagagccaccagaauu

SEQ ID NO: 6853 - RNA, 1813 nt, Artificial Sequence
  mRNA product Design b-4 comprising derived and/or modified sequence from LASV(Lassa virus/H.sapiens-wt/NGA/2015/ISTH_0543;Clade II)__AVO03639__GPCstabilized (opt4)
gggagagucccgcagucggcguccagcggcucugcuuguucgugugugugucguugcaggccuuauucaagcuuaccaugggccagaucaucaccuucuuccaggaggugccccacgugaucgaggaggugaugaacaucgugcugaucgcccugagccugcuggccauccugaagggcaucuacaacguggccaccugcggccuguucggccuggugagcuuccugcugcugugcggcagaagcugcagcaccaccuacaagggcguguacgagcugcagacccuggagcuggacauggccaaccugaacaugaccaugccccugagcugcaccaagaacaacagccaccacuacaucauggugggcaacgagaccggccuggagcugacccugaccaacaccagcaucaucaaccacaaguucugcaaccugagcgacgcccacaagaagaaccuguacgaccacgcccugaugagcaucaucagcaccuuccaccugagcauccccaacuucaaccaguacgaggccaugagcugcgacuucaacggcggcaagaucagcgugcaguacaaccugagccacaccuacgccguggacgccgccaaccacugcggcaccaucgccaacggcgugcugcagaccuucaugagaauggccuggggcggcagcuacaucgcccuggacagcggcugcggcagcugggacugcaucaugaccagcuaccaguaccuggugauccagaacaccaccugggaggaccacugccaguucagcagacccagccccaucggcuaccugggccugcugagccagagaaccagagacaucuacaucagcagaagacgccggggcaccuucaccuggacccugagcgacagcgagggcaacgagacccccggcggcuacugccugaccagauggaugcugaucgaggccgagcugaagugcuucggcaacaccgccguggccaagugcaacgagaagcacgacgaggaguucugcgacaugcugagacuguucgacuucaacaagcaggccaucagaagacugaagacccccgcccagaugagcauccagcugaucaacaaggccgugaacgcccugaucaacgaccagcugaucaugaagaaccaccugagagacaucaugugcauccccuacugcaacuacagcaaguacugguaccugaaccacaccgugaccggcaagaccagccugcccagaugcuggcuggugagcaacggcagcuaccugaacgagacccacuucagcgacgacaucgagcagcaggccgacaacaugaucaccgagcugcugcagaaggaguacaucgacagacagggcaagaccccccugggccugguggaccuguucguguucagcaccagcuucuaccugaucagcaucuuccugcaccuggugaagauccccacccacagacacaucaccggcaagcccugccccaagccccacagacugaaccacaugggcaucugcagcugcggccuguacaagcaccccggcgugcccgugaaguggaagagaugaggacuaguaauaaggaaacuguaugaaugucugugggcaggaagugaagagauccuucuguaaagguuuuuggaauuaugucugcugaauaauaaacuuuuuugaaauaauaaaucugguagaaaaaugagaucuaaaaaaaaaaaaaaaaaaaaaaaaaaaaaaaaaaaaaaaaaaaaaaaaaaaaaaaaaaaaaaaaugcaucccccccccccccccccccccccccccccccaaaggcucuuuucagagccaccagaauu

SEQ ID NO: 6854 - RNA, 1813 nt, Artificial Sequence
  mRNA product Design b-4 comprising derived and/or modified sequence from LASV(Lassa virus/H.sapiens-wt/NGA/2016/ISTH_0009;Clade II)__AVO03571__GPCstabilized (opt4)
gggagagucccgcagucggcguccagcggcucugcuuguucgugugugugucguugcaggccuuauucaagcuuaccaugggccagaucaucaccuucuuccaggaggugccccacgugaucgaggaggugaugaacaucgugcugaucgcccugagccugcuggccauccugaagggcaucuacaacguggccaccugcggccugcugggccuggugagcuuccugcugcugugcggcagaagcugcagcaccaccuacaagggcguguacgagcugcagacccuggagcuggacauggccagccugaacaugaccaugccccugagcugcaccaagaacaacagccaccacuacaucauggugggcaacgagaccggccuggagcugacccugaccaacaccagcaucaucaaccacaaguucugcaaccugagcgacgcccacaagaagaaccuguacgaccacgcccugaugagcaucaucagcaccuuccaccugagcauccccaacuucaaccaguacgaggccaugagcugcgacuucaacggcggcagaaucagcgugcaguacaaccugagccacagcuacgccguggacgccgccaaccacugcggcaccaucgccaacggcgugcugcagaccuucaugagaauggccuggggcggcagcuacaucgcccuggacagcggcugcggcagcugggacugcaucaugaccagcuaccaguaccugaucauccagaacaccaccugggaggaccacugccaguucagcagacccagccccaucggcuaccugggccugcugagccagagaaccagagacaucuacaucagcagaagacgccggggcaccuucaccuggacccugagcgacagcgagggcaacgagacccccggcggcuacugccugaccagauggaugcugaucgaggccgagcugaagugcuucggcaacaccgccguggccaagugcaacgagaagcacgacgaggaguucugcgacaugcugagacuguucgacuucaacaagcaggccaucagaagacugaagacccccgcccagaugagcauccagcugaucaacaaggccgugaacgcccugaucaacgaccagcugaucaugaagaaccaccugagagacaucaugugcauccccuacugcaacuacagcaaguacugguaccugaaccacaccgugaccggcaagaccagccugcccagaugcuggcuggugagcaacggcagcuaccugaacgagacccacuucagcgacgacaucgagcagcaggccgacaacaugaucaccgagcugcugcagaaggaguacaucgacagacagggcaagaccccccugggccugguggaccuguucguguucagcaccagcuucuaccugaucagcaucuuccugcaccuggugaagauccccacccacagacacaucaccggcaagcccugccccaagccccacagacugaaccacaugggcaucugcagcugcggccuguacaaccaccccggcgugcccgugaaguggaagagaugaggacuaguaauaaggaaacuguaugaaugucugugggcaggaagugaagagauccuucuguaaagguuuuuggaauuaugucugcugaauaauaaacuuuuuugaaauaauaaaucugguagaaaaaugagaucuaaaaaaaaaaaaaaaaaaaaaaaaaaaaaaaaaaaaaaaaaaaaaaaaaaaaaaaaaaaaaaaaugcaucccccccccccccccccccccccccccccccaaaggcucuuuucagagccaccagaauu

SEQ ID NO: 6855 - RNA, 1813 nt, Artificial Sequence
  mRNA product Design b-4 comprising derived and/or modified sequence from LASV(Lassa virus/H.sapiens-wt/NGA/2016/ISTH_0017;Clade II)__AVO03567__GPCstabilized (opt4)
gggagagucccgcagucggcguccagcggcucugcuuguucgugugugugucguugcaggccuuauucaagcuuaccaugggccagaucaucaccuucuuccaggaggugccccacgugaucgaggaggugaugaacaucgugcugaucgcccugagccugcuggccauccugaagggcaucuacaacguggccaccugcggccuguucggccuggugagcuuccugcugcugugcggcagaagcugcagcaccaccuacaagggcguguacgagcugcagacccuggagcuggacauggccagccugaacaugaccaugccccugagcugcaccaagaacaacagccaccacuacaucauggugggcaacgagaccggccuggagcugacccugaccaacaccagcaucaucaaccacaaguucugcaaccugagcgacgcccacaagaagaaccuguacgaccacgcccugaugagcaucaucagcaccuuccaccugagcauccccaacuucaaccaguacgaggccaugagcugcgacuucaacggcggcaagaucagcgugcaguacaaccugagccacaccuacgccaucgacgccgccaaccacugcggcaccaucgccaacggcgugcugcagaccuucaugagaauggccuggggcggcagcuacaucgcccuggacagcggcugcggcagcugggacugcaucaugaccagcuaccaguaccugaucauccagaacaccaccugggaggaccacugccaguucagcagacccagccccaucggcuaccugggccugcugagccagagaaccagagacaucuacaucagcagaagacgccggggcaccuucaccuggacccugagcgacagcgagggcaacgagacccccggcggcuacugccugaccagauggaugcugaucgaggccgagcugaagugcuucggcaacaccgccguggccaagugcaacgagaagcacgacgaggaguucugcgacaugcugagacuguucgacuucaacaagcaggccaucagaagacugaagacccccgcccagaugagcauccagcugaucaacaaggccgugaacgcccugaucaacgaccagcugaucaugaagaaccaccugagagacaucaugugcauccccuacugcaacuacagcaaguacugguaccugaaccacaccgugaccggcaagaccagccugcccagaugcuggcuggugagcaacggcagcuaccugaacgagacccacuucagcgacgacaucgagcagcaggccgacaacaugaucaccgagcugcugcagaaggaguacauggacagacagggcaagaccccccugggccugguggaccuguucguguucagcaccagcuucuaccugaucagcaucuuccugcaccuggugagaauccccacccacagacacgugaucggcaagcccugccccaagccccacagacugaaccacaugggcaucugcagcugcggccuguacaagcaccccggcgugcccgugaaguggaagagaugaggacuaguaauaaggaaacuguaugaaugucugugggcaggaagugaagagauccuucuguaaagguuuuuggaauuaugucugcugaauaauaaacuuuuuugaaauaauaaaucugguagaaaaaugagaucuaaaaaaaaaaaaaaaaaaaaaaaaaaaaaaaaaaaaaaaaaaaaaaaaaaaaaaaaaaaaaaaaugcaucccccccccccccccccccccccccccccccaaaggcucuuuucagagccaccagaauu

SEQ ID NO: 6856 - RNA, 1813 nt, Artificial Sequence
  mRNA product Design b-4 comprising derived and/or modified sequence from LASV(Lassa virus/H.sapiens-wt/NGA/2018/ISTH_0959;Clade II)__AVV65099__GPCstabilized (opt4)
gggagagucccgcagucggcguccagcggcucugcuuguucgugugugugucguugcaggccuuauucaagcuuaccaugggccagaucaucaccuucuuccaggaggugccccacgugaucgaggaggugaugaacaucgugcugaucgcccugagccugcuggccauccugaagggcaucuacaacguggugaccugcggccuguucggccuggugagcuuccugcugcugugcggcagaagcugcagcaccaccuacaagggcguguacgagcugcagacccuggagcuggacauggccagccugaacaugaccaugccccugagcugcaccaagaacaacagccaccacuacaucauggugggcaacgagaccggccuggagcugacccugaccaacaccagcaucaucaaccacaaguucugcaaccugagcgacgcccacaagaagaaccuguacgaccacgcccugaugagcaucaucagcaccuuccaccugagcauccccaacuucaaccaguacgaggccaugagcugcgacuucaacggcggcaagaucagcgugcaguacaaccugagccacgccuacgccaucgacgccgccaaccacugcggcaccaucgccaacggcgugcugcagaccuucaugagaauggccuggggcggcagcuacaucgcccuggacagcggcugcggcagcugggacugcaucaugaccagcuaccaguaccugaucauccagaacaccaccugggaggaccacugccaguucagcagacccagccccaucggcuaccugggccugcugagccagagaaccagagacaucuacaucagcagaagacgccggggcaccuucaccuggacccugagcgacagcgagggcaacgagacccccggcggcuacugccugaccagauggaugcugaucgaggccgagcugaagugcuucggcaacaccgccguggccaagugcaacgagaagcacgacgaggaguucugcgacaugcugagacuguucgacuucaacaagcaggccaucagaagacugaagacccccgcccagaugagcauccagcugaucaacaaggccgugaacgcccugaucaacgaccagcugaucaugaagaaccaccugagagacaucaugugcauccccuacugcaacuacagcaaguacugguaccugaaccacaccgugaccggcaagaccagccugcccagaugcuggcuggugagcaacggcagcuaccugaacgagacccacuucagcgacgacaucgagcagcaggccgacaacaugaucaccgagcugcugcagaaggaguacaucgacagacagggcaagaccccccugggccugguggaccuguucguguucagcaccagcuucuaccugaucagcaucuuccugcaccuggugaagauccccacccacagacacgugaucggcaagcccugccccaagccccacagacugaaccacaugggcaucugcagcugcggccuguacaagcaccccggcgugcccgugaaguggaagagaugaggacuaguaauaaggaaacuguaugaaugucugugggcaggaagugaagagauccuucuguaaagguuuuuggaauuaugucugcugaauaauaaacuuuuuugaaauaauaaaucugguagaaaaaugagaucuaaaaaaaaaaaaaaaaaaaaaaaaaaaaaaaaaaaaaaaaaaaaaaaaaaaaaaaaaaaaaaaaugcaucccccccccccccccccccccccccccccccaaaggcucuuuucagagccaccagaauu

SEQ ID NO: 6857 - RNA, 1813 nt, Artificial Sequence
  mRNA product Design b-4 comprising derived and/or modified sequence from LASV(LASV003-NIG-2008;Clade II)__AIT17580__GPCstabilized (opt4)
gggagagucccgcagucggcguccagcggcucugcuuguucgugugugugucguugcaggccuuauucaagcuuaccaugggccagaucaucaccuucuuccaggaggugccccacgugaucgaggaggugaugaacaucgugcugaucgcccugagccugcuggccauccugaagggcaucuacaacguggccaccugcggccuguucggccuggugagcuuccugcugcugugcggcagaagcugcagcaccaccuacaagggcguguacgagcugcagacccuggagcuggacauggccagccugaacaugaccaugccccugagcugcaccaagaacaacagccaccacuacaucauggugggcaacgagaccggccuggagcugacccugaccaacaccagcaucaucaaccacaaguucugcaaccugagcgacgcccacaagaagaaccuguacgaccacgcccugaugagcaucaucagcaccuuccaccugagcauccccaacuucaaccaguacgaggccaugagcugcgacuucaacggcggcaagaucagcgugcaguacaaccugagccacaccuacgccguggacgccgccaaccacugcggcaccaucgccaacggcgugcugcagaccuucaugagaauggccuggggcggcagcuacaucgcccuggacagcggcugcggcagcugggacugcaucaugaccagcuaccaguaccugaucauccagaacaccaccugggaggaccacugccaguucagcagacccagccccaucggcuaccugggccugcugagccagagaaccagagacaucuacaucagcagaagacgccggggcaccuucaccuggacccugagcgacagcgagagcaacgagacccccggcggcuacugccugaccagauggaugcugaucgaggccgagcugaagugcuucggcaacaccgccguggccaagugcaacgagaagcacgacgaggaguucugcgacaugcugagacuguucgacuucaacaagcaggccaucagaagacugaaggcccccgcccagaugagcauccagcugaucaacaaggccgugaacgcccugaucaacgaccagcugaucaugaagaaccaccugagagacaucaugugcauccccuacugcaacuacagcaaguacugguaccugaaccacaccgugaccggcagaaccagccugcccagaugcuggcuggugagcaacggcagcuaccugaacgagacccacuucagcgacgacaucgagcagcaggccgacaacaugaucaccgagcugcugcagaaggaguacauggacagacagggcaagaccccccugggccugguggaccuguucguguucagcaccagcuucuaccugaucagcaucuuccugcaccuggugaagauccccacccacagacacgugaucggcaagcccugccccaagccccacagacugaaccacaugggcaucugcagcugcggccuguacaagcaccccggcgugcccgugaaguggaagagaugaggacuaguaauaaggaaacuguaugaaugucugugggcaggaagugaagagauccuucuguaaagguuuuuggaauuaugucugcugaauaauaaacuuuuuugaaauaauaaaucugguagaaaaaugagaucuaaaaaaaaaaaaaaaaaaaaaaaaaaaaaaaaaaaaaaaaaaaaaaaaaaaaaaaaaaaaaaaaugcaucccccccccccccccccccccccccccccccaaaggcucuuuucagagccaccagaauu

SEQ ID NO: 6858 - RNA, 1813 nt, Artificial Sequence
  mRNA product Design b-4 comprising derived and/or modified sequence from LASV(LASV035-NIG-2009;Clade II)__AIT17588__GPCstabilized (opt4)
gggagagucccgcagucggcguccagcggcucugcuuguucgugugugugucguugcaggccuuauucaagcuuaccaugggccagaucaucaccuucuuccaggaggugccccacgugaucgaggaggugaugaacaucgugcugaucgcccugagccugcuggccauccugaagggcaucuacaacguggccaccugcggccuguucggccuggugagcuuccugcugcugugcggcagaagcugcagcaccaccuacaagggcguguacgagcugcagacccuggagcuggacauggccagccugaacaugaccaugccccugagcugcaccaagaacaacagccaccacuacaucauggugggcaacgagaccggccuggagcugacccugaccaacaccagcaucaucaaccacaaguucugcaaccugagcgacgcccacaagaagaaccuguacgaccacgcccugaugagcaucaucagcaccuuccaccugagcauccccaacuucaaccaguacgaggccaugagcugcgacuucaacggcggcaagaucagcgugcaguacaaccugagccacgccuacgccguggacgccgccaaccacugcggcaccaucgccaacggcgugcugcagaccuucaugagaauggccuggggcggcagcuacaucgcccuggacagcggcugcggcagcugggacugcaucaugaccagcuaccaguaccugaucauccagaacaccaccugggaggaccacugccaguucagcagacccagccccaucggcuaccugggccugcugagccagagaaccagagacaucuacaucagcagaagacgccggggcaccuucaccuggacccugagcgacagcgagggcaacgagacccccggcggcuacugccugaccagauggaugcugaucgaggccgagcugaagugcuucggcaacaccgccguggccaagugcaacgagaagcacgacgaggaguucugcgacaugcugagacuguucgacuucaacaagcaggccaucagaagacugaaggcccccgcccagaugagcauccagcugaucaacaaggccgugaacgcccugaucaacgaccagcugaucaugaagaaccaccugagagacaucaugugcauccccuacugcaacuacagcaaguacugguaccugaaccacaccgugaccggcaagaccagccugcccagaugcuggcuggugagcaacggcagcuaccugaacgagacccacuucagcgacgacaucgagcagcaggccgacaacaugaucaccgagcugcugcagaaggaguacaucgacagacagggcaagaccccccugggccugguggaccuguucguguucagcaccagcuucuaccugaucagcaucuuccugcaccuggugaagauccccacccacagacacgugaucggcaagcccugccccaagccccacagacugaaccacaugggcaucugcagcugcggccuguacaagcaccccggcgugcccgugaaguggaagagaugaggacuaguaauaaggaaacuguaugaaugucugugggcaggaagugaagagauccuucuguaaagguuuuuggaauuaugucugcugaauaauaaacuuuuuugaaauaauaaaucugguagaaaaaugagaucuaaaaaaaaaaaaaaaaaaaaaaaaaaaaaaaaaaaaaaaaaaaaaaaaaaaaaaaaaaaaaaaaugcaucccccccccccccccccccccccccccccccaaaggcucuuuucagagccaccagaauu

SEQ ID NO: 6859 - RNA, 1813 nt, Artificial Sequence
  mRNA product Design b-4 comprising derived and/or modified sequence from LASV(LASV1000-NIG-2009;Clade II)__AIT17782__GPCstabilized (opt4)
gggagagucccgcagucggcguccagcggcucugcuuguucgugugugugucguugcaggccuuauucaagcuuaccaugggccagaucaucaccuucuuccaggaggugccccacgugaucgaggaggugaugaacaucgugcugaucgcccugagccugcuggccauccugaagggcaucuacaacguggccaccugcggccuguucggccuggugagcuuccugcugcugugcggcagaagcugcagcaccaccuacaagggcguguacgagcugcagacccuggagcuggacauggccagccugaacaugaccaugccccugagcugcaccaagaacaacagccaccacuacaucauggugggcaacgagaccggccuggagcugacccugaccaacaccagcaucaucaaccacaaguucugcaaccugagcgacgcccacaagaagaaccuguacgaccacgcccugaugagcaucaucagcaccuuccaccugagcauccccaacuucaaccaguacgaggccaugagcugcgacuucaacggcggcaagaucagcgugcaguacaaccugagccacaccuacgccguggacgccgccaaccacugcggcaccaucgccaacggcgugcugcagaccuucaugagaauggccuggggcggcagcuacaucgcccuggacagcggcugcggcagcugggacugcaucaugaccagcuaccaguaccugaucauccagaacaccaccugggaggaccacugccaguucagcagacccagccccaucggcuaccugggccugcugagccagagaaccagagacaucuacaucagcagaagacgccggggcaccuucaccuggacccugagcgacagcgagggcaacgagacccccggcggcuacugccugaccagauggaugcugaucgaggccgagcugaagugcuucggcaacaccgccguggccaagugcaacgagaagcacgacgaggaguucugcgacaugcugagacuguucgacuucaacaagcaggccaucaagagacugaagacccccgcccagaugagcauccagcugaucaacaaggccgugaacgcccugaucaacgaccagcugaucaugaagaaccaccugagagacaucaugugcauccccuacugcaacuacagcaaguacugguaccugaaccacaccgugaccggcaagaccagccugcccagaugcuggcuggugagcaacggcagcuaccugaacgagacccacuucagcgacgacaucgagcagcaggccgacaacaugaucaccgagcugcugcagaaggaguacaucgacagacagggcaagaccccccugggccugguggaccuguucguguucagcaccagcuucuaccugaucagcaucuuccugcaccuggugaagauccccacccacagacacguggugggcaagcccugccccaagccccacagacugaaccacaugggcaucugcagcugcggccuguacaagcaccccggcgugcccgugaaguggaagagaugaggacuaguaauaaggaaacuguaugaaugucugugggcaggaagugaagagauccuucuguaaagguuuuuggaauuaugucugcugaauaauaaacuuuuuugaaauaauaaaucugguagaaaaaugagaucuaaaaaaaaaaaaaaaaaaaaaaaaaaaaaaaaaaaaaaaaaaaaaaaaaaaaaaaaaaaaaaaaugcaucccccccccccccccccccccccccccccccaaaggcucuuuucagagccaccagaauu

SEQ ID NO: 6860 - RNA, 1813 nt, Artificial Sequence
  mRNA product Design b-4 comprising derived and/or modified sequence from LASV(LASV221-NIG-2010;Clade II)__AIT17624__GPCstabilized (opt4)
gggagagucccgcagucggcguccagcggcucugcuuguucgugugugugucguugcaggccuuauucaagcuuaccaugggccagaucaucaccuucuuccaggaggugccccacgugaucgaggaggugaugaacaucgugcugaucgcccugagccugcuggccauccugaagggcaucuacaacguggccaccugcggccuguucggccuggugagcuuccugcugcugugcggcagaagcugcagcaccaccuacaagggcguguacgagcugcagacccuggagcuggacauggccagccugaacaugaccaugccccugagcugcaccaagaacaacagccaccacuacaucauggugggcaacgagaccggccuggagcugacccugaccaacaccagcaucaucaaccacaaguucugcaaccugagcgacgcccacaagaagaaccuguacgaccacgcccugaugagcaucaucagcaccuuccaccugagcauccccaacuucaaccaguacgaggccaugagcugcgacuucaacggcggcaagaucagcgugcaguacaaccugagccacaccuacgccaucgacgccgccaaccacugcggcaccaucgccaacggcgugcugcagaccuucaugagaauggccuggggcggcagcuacaucgcccuggacagcggcugcggcagcugggacugcaucaugaccagcuaccaguaccugaucauccagaacaccaccugggaggaccacugccaguucagcagacccagccccaucggcuaccugggccugcugagccagagaaccagagacaucuacaucagcagaagacgccggggcaccuucaccuggacccugagcgacagcgagggcaacgagacccccggcggcuacugccugaccagauggaugcugaucgaggccgagcugaagugcuucggcaacaccgccguggccaagugcaacgagaagcacgacgaggaguucugcgacaugcugagacuguucgacuucaacaagcaggccaucagaagacugaagacccccgcccagaugagcauccagcugaucaacaaggccgugaacgcccugaucaacgaccagcugaucaugaagaaccaccugagagacaucaugugcauccccuacugcaacuacagcaaguacugguaccugaaccacaccgugaccggcaagaccagccugcccagaugcuggcuggugagcaacggcagcuaccugaacgagacccacuucagcgacgacaucgagcagcaggccgacaacaugaucaccgagaugcugcagaaggaguacauggacagacagggcaagaccccccugggccugguggaccuguucguguucagcaccagcuucuaccugaucagcaucuuccugcaccuggugaagauccccacccacagacacgugaucggcaagcccugccccaagccccacagacugaaccacaugggcaucugcagcugcggccuguacaagcaccccggcgugcccgugaaguggaagagaugaggacuaguaauaaggaaacuguaugaaugucugugggcaggaagugaagagauccuucuguaaagguuuuuggaauuaugucugcugaauaauaaacuuuuuugaaauaauaaaucugguagaaaaaugagaucuaaaaaaaaaaaaaaaaaaaaaaaaaaaaaaaaaaaaaaaaaaaaaaaaaaaaaaaaaaaaaaaaugcaucccccccccccccccccccccccccccccccaaaggcucuuuucagagccaccagaauu

SEQ ID NO: 6861 - RNA, 1813 nt, Artificial Sequence
  mRNA product Design b-4 comprising derived and/or modified sequence from LASV(LASV237-NIG-2010;Clade II)__AIT17638__GPCstabilized (opt4)
gggagagucccgcagucggcguccagcggcucugcuuguucgugugugugucguugcaggccuuauucaagcuuaccaugggccagaucaucaccuucuuccaggaggugccccacgugaucgaggaggugaugaacaucgugcugaucgcccugagccugcuggccauccugaagggcaucuacaacguggccaccugcggccuguucggccuggugagcuuccugcugcugugcggcagaagcugcagcaccaccuacaagggcguguacgagcugcagacccuggagcuggacauggccagccugaacaugaccaugccccugagcugcaccaagaacaacagccaccacuacaucauggugggcaacgagaccggccuggagcugacccugaccaacaccagcaucaucaaccacaaguucugcaaccugagcgacgcccacaagaaggaccuguacgaccacgcccugaugagcaucaucagcaccuuccaccugagcauccccaacuucaaccaguacgaggccaugagcugcgacuucaacggcggcaagaucagcgugcaguacaaccugagccacaccuacgccguggacgccgccaaccacugcggcaccaucgccaacggcgugcugcagaccuucaugagaauggccuggggcggcagcuacaucgcccuggacagcggcugcggcagcugggacugcaucaugaccagcuaccaguaccugaucauccagaacaccaccugggaggaccacugccaguucagcagacccagccccaucggcuaccugggccugcugagccagagaaccagagacaucuacaucagcagaagacgccggggcaccuucaccuggacccugagcgacagcgagggcaacgagacccccggcggcuacugccugaccagauggaugcugaucgaggccgagcugaagugcuucggcaacaccgccguggccaagugcaacgagaagcacgacgaggaguucugcgacaugcugagacuguucgacuucaacaagcaggccaucagaagacugaagacccccgcccagaugagcauccagcugaucaacaaggccgugaacgcccugaucaacgaccagcugaucaugaagaaccaccugagagacaucaugugcauccccuacugcaacuacagcaaguacugguaccugaaccacaccgugaccggcaagaccagccugcccagaugcuggcuggugagcaacggcagcuaccugaacgagacccacuucagcgacgacaucgagcagcaggccgacaacaugaucaccgagcugcugcagaaggaguacauggacagacagggcaagaccccccugggccugguggaccuguucguguucagcaccagcuucuaccugaucagcaucuuccugcaccugaucaagauccccacccacagacacaucaccggcaagcccugccccaagccccacagacugaaccacaugggcaucugcagcugcggccuguacaagcaccccggcgugcccgugaaguggaagagaugaggacuaguaauaaggaaacuguaugaaugucugugggcaggaagugaagagauccuucuguaaagguuuuuggaauuaugucugcugaauaauaaacuuuuuugaaauaauaaaucugguagaaaaaugagaucuaaaaaaaaaaaaaaaaaaaaaaaaaaaaaaaaaaaaaaaaaaaaaaaaaaaaaaaaaaaaaaaaugcaucccccccccccccccccccccccccccccccaaaggcucuuuucagagccaccagaauu

SEQ ID NO: 6862 - RNA, 1813 nt, Artificial Sequence
  mRNA product Design b-4 comprising derived and/or modified sequence from LASV(LASV253-NIG-2011;Clade II)__AIT17670__GPCstabilized (opt4)
gggagagucccgcagucggcguccagcggcucugcuuguucgugugugugucguugcaggccuuauucaagcuuaccaugggccagaucaucaccuucuuccaggaggugccccacgugaucgaggaggugaugaacaucgugcugaucgcccugagccugcuggccauccugaagggcaucuacaacguggccaccugcggccuguucggccuggugagcuuccugcugcugugcggcagaagcugcagcaccaccuacaagggcguguacgagcugcagacccuggagcuggacauggccagccugaacaugaccaugccccugagcugcaccaagaacaacagccaccacuacaucauggugggcaacgagaccggccuggagcugacccugaccaacaccagcaucaucaaccacaaguucugcaaccugagcgacgcccacaagaagaaccuguacgaccacgcccugaugagcaucaucagcaccuuccaccugagcauccccaacuucaaccaguacgaggccaugagcugcgacuucaacggcggcaagaucagcgugcaguacaaccugagccacaccuacgccguggacgccgccaaccacugcggcaccaucgccaacggcgugcugcagaccuucaugagaauggccuggggcggcagcuacaucgcccuggacagcggcugcggcagcugggacugcaucaugaccagcuaccaguaccugaucauccagaacaccaccugggaggaccacugccaguucagcagacccagccccaucggcuaccugggccugcugagccagagaaccagagacaucuacaucagcagaagacgccggggcaccuucaccuggacccugagcgacagcgagggcaacgagacccccggcggcuacugccugaccagauggaugcugaucgaggccgagcugaagugcuucggcaacaccgccguggccaagugcaacgagaagcacgacgaggaguucugcgacaugcugagacuguucgacuucaacaagcaggccaucagaagacugaaggcccccgcccagaugagcauccagcugaucaacaaggccgugaacgcccugaucaacgaccagcugaucaugaagaaccaccugagagacaucaugugcauccccuacugcaacuacagcaaguacugguaccugaaccacaccgugaccggcagaaccagccugcccagaugcuggcuggugagcaacggcagcuaccugaacgagacccacuucagcgacgacaucgagcagcaggccgacaacaugaucaccgagcugcugcagaaggaguacaucgacagacagggcaagaccccccugggccugguggaccuguucguguucagcaccagcuucuaccugaucagcaucuuccugcaccuggugaagauccccacccacagacacaucaucggcaagcccugccccaagccccacagacugaaccacaugggcaucugcagcugcggccuguacaagcaccccggcgugcccgugaaguggaagagaugaggacuaguaauaaggaaacuguaugaaugucugugggcaggaagugaagagauccuucuguaaagguuuuuggaauuaugucugcugaauaauaaacuuuuuugaaauaauaaaucugguagaaaaaugagaucuaaaaaaaaaaaaaaaaaaaaaaaaaaaaaaaaaaaaaaaaaaaaaaaaaaaaaaaaaaaaaaaaugcaucccccccccccccccccccccccccccccccaaaggcucuuuucagagccaccagaauu

SEQ ID NO: 6863 - RNA, 1813 nt, Artificial Sequence
  mRNA product Design b-4 comprising derived and/or modified sequence from LASV(LASV254-NIG-2011;Clade II)__AIT17674__GPCstabilized (opt4)
gggagagucccgcagucggcguccagcggcucugcuuguucgugugugugucguugcaggccuuauucaagcuuaccaugggccagaucaucaccuucuuccaggaggugccccacgugaucgaggaggugaugaacaucgugcugaucgcccugagccugcuggccauccugaagggcaucuacaacguggccaccugcggccuguucggccuggugagcuuccugcugcugugcggcagaagcugcagcaccaccuacaagggcguguacgagcugcagacccuggagcuggacaugaccaaccugaacaugaccaugccccugagcugcaccaagaacaacagccaccacuacaucauggugggcaacgagaccggccuggagcugacccugaccaacaccagcaucaucaaccacaaguucugcaaccugagcgacgcccacaagaagaaccuguacaaccacgcccugaugagcaucaucagcaccuuccaccugagcauccccaacuucaaccaguacgaggccaugagcugcgacuucaacggcggcaagaucagcgugcaguacaaccugagccacagcuacgccguggacgccgccaaccacugcggcaccaucgccaacggcgugcugcagaccuucaugagaauggccuggggcggcagcuacaucgcccuggacagcggcugcggcaacugggacugcaucaugaccagcuaccaguaccugaucauccagaacaccaccugggaggaccacugccaguucagcagacccagccccaucggcuaccugggccugcugagccagagaaccagagacaucuacaucagcagaagacgccggggcaccuucaccuggacccugagcgacagcgagggcaacgagacccccggcggcuacugccugaccagauggaugcugaucgaggccgagcugaagugcuucggcaacaccgccguggccaagugcaacgagaagcacgacgaggaguucugcgacaugcugagacuguucgacuucaacaagcaggccaucagaagacugaagacccccgcccaggccaacauccagcugaucaacaaggccgugaacgcccugaucaacgaccagcugaucaugaagaaccaccugagagacaucaugugcauccccuacugcaacuacagcaaguacugguaccugaaccacaccgugaccggcaagaccagccugcccagaugcuggcuggugagcaacggcagcuaccugaacgagacccacuucagcgacgacaucgagcagcaggccgacaacaugaucaccgagcugcugcagaaggaguacauggacagacagggcaagaccccccugggccugguggaccuguucguguucagcaccagcuucuaccugaucagcaucuuccugcaccuggugaagauccccacccacagacacgugaucggcaagcccugccccaagccccacagacugaaccacaugggcaucugcagcugcggccuguacaagcaccccggcgugcccgugaaguggaagagaugaggacuaguaauaaggaaacuguaugaaugucugugggcaggaagugaagagauccuucuguaaagguuuuuggaauuaugucugcugaauaauaaacuuuuuugaaauaauaaaucugguagaaaaaugagaucuaaaaaaaaaaaaaaaaaaaaaaaaaaaaaaaaaaaaaaaaaaaaaaaaaaaaaaaaaaaaaaaaugcaucccccccccccccccccccccccccccccccaaaggcucuuuucagagccaccagaauu

SEQ ID NO: 6864 - RNA, 1813 nt, Artificial Sequence
  mRNA product Design b-4 comprising derived and/or modified sequence from LASV(Nig08-A19;Clade III)__ADU56618__GPCstabilized (opt4)
gggagagucccgcagucggcguccagcggcucugcuuguucgugugugugucguugcaggccuuauucaagcuuaccaugggccagaucgugaccuucuuccaggaggugccccacgugaucgaggaggugaugaacaucgugcugaucgcccugagcauccuggccauccugaagggccuguacaacaucgccaccugcggccugaucggccuggugaccuuccugcugcugagcggcagaagcugcagcaugaccuacaagggcguguacgagcugcagacccuggagcugaacaugaacacccugaacaugaccaugccccugagcugcaccaagaacaacagccaccacuacaucauggugggcaacgagaccggccuggagcugacccugaccaacaccagccugcugcaccacaaguucugcaaccugagcgacgcccacaagaagaaccuguacgaccacacccugaugagcaucaucagcaccuuccaccugagcauccccaacuucaaccaguacgaggccaugagcugcgacuucaacggcggcaagaucaccgugcaguacaaccugagccacagcuacgccaucgacgccgccaaccacugcggcaccguggccaacggcgugcugcagaccuucaugagaauggccuggggcggcagcuacaucgcccuggacagcggcugcggcaagugggacugcaucaugaccagcuaccaguaccugaucauccagaacaccaccugggaggaccacugccaguucagcagacccagccccaucggcuaccugggccugcugagccagagaaccagagacaucuacaucagcagaagacgccggggcaccuucaccuggacccugagcgacagcgagggcaacgagacccccggcggcuacugccugaccagauggaugcugaucgaggccgagcugaagugcuucggcaacaccgccguggccaagugcaacgagaagcacgacgaggaguucugcgacaugcugagacuguucgacuucaacaagcaggccaucagaagacugaaggcccccgcccagaugagcauccagcugaucaacaaggccgugaacgcccugaucaacgaccagcugaucaugaagaaccaccugagagacaucaugugcauccccuacugcaacuacagcaaguacugguaccugaaccacaccagcaccggcagaaccagccugcccagaugcuggcuggugagcaacggcagcuaccugaacgagacccacuucagcgacgacaucgagcagcaggccgacaacaugaucaccgagaugcugcagaaggaguaccuggacagacagggcaagaccccccugggccugguggaccuguucguguucagcaccagcuucuaccugaucagcaucuuccugcaccuggugaagauccccacccacagacacaucgugggcaagcccugccccaagccccacagacugaaccacaugggcaucugcagcugcggccuguacaagcagcccggcgugcccgugagauggaagagaugaggacuaguaauaaggaaacuguaugaaugucugugggcaggaagugaagagauccuucuguaaagguuuuuggaauuaugucugcugaauaauaaacuuuuuugaaauaauaaaucugguagaaaaaugagaucuaaaaaaaaaaaaaaaaaaaaaaaaaaaaaaaaaaaaaaaaaaaaaaaaaaaaaaaaaaaaaaaaugcaucccccccccccccccccccccccccccccccaaaggcucuuuucagagccaccagaauu

SEQ ID NO: 6865 - RNA, 1816 nt, Artificial Sequence
  mRNA product Design b-4 comprising derived and/or modified sequence from LASV(G1180-SLE-2010;Clade IV)__AIT17168__GPCstabilized (opt4)
gggagagucccgcagucggcguccagcggcucugcuuguucgugugugugucguugcaggccuuauucaagcuuaccaugggccagaucgugaccuucuuccaggaggugccccacgugaucgaggaggugaugaacaucgugcugaucgcccugagcauccuggccgugcugaagggccuguacaacuucgccaccugcggccuggugggccugcugaccuuccugcugcugugcggcagaagcugcaccgccagcagauacaagggcguguacgagcugcagacccuggagcugaacauggagacccugaacaugaccaugccccugagcugcaccaagaacaacagccaccacuacaucauggugggcaacgagaccggccuggagcugacccugaccaacaccagcaucaucaaccacaaguucugcaaccugagcgacgcccacaagaagaaccuguacgaccacgcccugaugagcaucaucagcaccuuccaccugagcauccccaacuucaaccaguacgaggccaugagcugcgacuucaacggcggcaagaucagcgugcaguacaaccugagccacagcuacgccggcgacgccgccaaccacugcggcaccguggccaacggcgugcugcagaccuucaugagaauggccuggggcggcagcuacaucgcccuggacagcggcugcggcagcugggacugcaucaugaccagcuaccaguaccugaucauccagaacaccaccugggaggaccacugccaguucagcagacccagccccaucggcuaccugggccugcugagccagagaaccagagacaucuacaucagcagaagacgccggggcaccuucaccuggacccugagcgacagcgagggcaaggacacccccggcggcuacugccugaccagauggaugcugaucgaggccgagcugaagugcuucggcaacaccgccguggccaagugcaacgagaagcacgacgaggaguucugcgacaugcugagacuguucgacuucaacaagcaggccauccagagacugaaggcccccgcccagaugagcauccagcugaucaacaaggccgugaacgcccugaucaacgaccagcugaucaugaagaaccaccugagagacaucaugugcauccccuacugcaacuacagcaaguacugguaccugaaccacaccaccaccggcaagaccagccugcccaagugcuggcuggugagcaacggcagcuaccugaacgagacccacuucagcgacgacaucgagcagcaggccgacaacaugaucaccgagaugcugcagaaggaguacauggagagacagggcaagaccccccugggccugguggaccuguucguguucagcaccagcuucuaccugaucagcaucuuccugcaccuggugaagauccccacccacagacacaucgugggcaagagcugccccaagccccacagacugaaccacaugggcaucugcagcugcggccuguacaagcagcccggcgugcccgugaaguggaagagaugaggacuaguaauaaggaaacuguaugaaugucugugggcaggaagugaagagauccuucuguaaagguuuuuggaauuaugucugcugaauaauaaacuuuuuugaaauaauaaaucugguagaaaaaugagaucuaaaaaaaaaaaaaaaaaaaaaaaaaaaaaaaaaaaaaaaaaaaaaaaaaaaaaaaaaaaaaaaaugcaucccccccccccccccccccccccccccccccaaaggcucuuuucagagccaccagaauu

SEQ ID NO: 6866 - RNA, 1816 nt, Artificial Sequence
  mRNA product Design b-4 comprising derived and/or modified sequence from LASV(G1442-SLE-2011;Clade IV)__AIT17180__GPCstabilized (opt4)
gggagagucccgcagucggcguccagcggcucugcuuguucgugugugugucguugcaggccuuauucaagcuuaccaugggccagaucgugaccuucuuccaggaggugccccacgugaucgaggaggugaugaacaucgugcugaucgcccugagcauccuggccgugcugaagggccuguacaacguggccaccugcggccugaucggccuggugaccuuccugcugcugugcggcagaagcugcaccaccacccuguacaagggcguguacgagcugcagacccuggagcugaacauggagacccugaacaugaccaugccccugagcugcaccaagaacaacagccaccacuacaucagagugggcaacgagaccggccuggagcugacccugaccaacaccagcaucaucaaccacaaguucugcaaccugagcgacgcccacaagaagaaccuguacgaccacgcccugaugagcaucaucagcaccuuccaccugagcauccccaacuucaaccaguacgaggccaugagcugcgacuucaacggcggcaagaucagcgugcaguacaaccugagccacagcuacgccggcgacgccgccaaccacugcggcaccguggccaacggcgugcugcagaccuucaugagaauggccuggggcggcagcuacaucgcccuggacagcggcugcggcaacugggacugcaucaugaccagcuaccaguaccugaucauccagaacaccaccugggacgaccacugccaguucagcagacccagccccaucggcuaccugggccugcugagccagagaaccagagacguguacaucagcagaagacgccggggcaccuucaccuggacccugagcgacagcgagggcaaggacacccccggcggcuacugccugaccagauggaugcugaucgaggccgagcugaagugcuucggcaacaccgccguggccaagugcaacgagaagcacgacgaggaguucugcgacaugcugagacuguucgacuucaacaagcaggccauccagagacugaaggcccccgcccagaugagcauccagcugaucaacaaggccgugaacgcccugaucaacgaccagcugaucaugaagaaccaccugagagacaucaugugcauccccuacugcaacuacagcaaguacugguaccugaacaacaccgccaccggcaagaccagccugcccaagugcuggcugaucagcaacggcagcuaccugaacgagacccacuucagcgacgacaucgagcaggaggccgacaacaugaucaccgagaugcugcagaaggaguacauggagagacagggcaagaccccccugggccugguggaccuguucguguucagcaccagcuucuaccugaucagcaucuuccugcaccuggugaagauccccacccacagacacaucgugggcaagagcugccccaagccccacagacugaaccacaugggcaucugcagcugcggccuguacaagcagcccggcgugcccgugagauggaagagaugaggacuaguaauaaggaaacuguaugaaugucugugggcaggaagugaagagauccuucuguaaagguuuuuggaauuaugucugcugaauaauaaacuuuuuugaaauaauaaaucugguagaaaaaugagaucuaaaaaaaaaaaaaaaaaaaaaaaaaaaaaaaaaaaaaaaaaaaaaaaaaaaaaaaaaaaaaaaaugcaucccccccccccccccccccccccccccccccaaaggcucuuuucagagccaccagaauu

SEQ ID NO: 6867 - RNA, 1816 nt, Artificial Sequence
  mRNA product Design b-4 comprising derived and/or modified sequence from LASV(G3010-SLE-2013;Clade IV)__AIT17344__GPCstabilized (opt4)
gggagagucccgcagucggcguccagcggcucugcuuguucgugugugugucguugcaggccuuauucaagcuuaccaugggccagaucgugaccuucuuccaggaggugccccacgugaucgaggaggugaugaacaucgugcugaucgcccugagcauccuggccgugcugaagggccuguacaacuucgccaccugcggccuggugggccuggugaccuuccugcugcugugcggcagaagcugcaccaccagccuguacaagggcguguacgagcugcagacccuggagcugaacauggagacccugaacaugaccaugccccugagcugcaccaagaacaacagccaccacuacaucauggugggcaacgagaccggccuggagcugacccugaccaacaccagcaucaucaaccacaaguucugcaaccugagcgacgcccacaagaagaaccuguacaaccacgcccugaugagcaucaucagcaccuuccaccugagcauccccaacuucaaccaguacgaggccaugagcugcgacuucaacggcggcaagaucagcgugcaguacaaccugagccacagcuacgccggcgacgccgccagccacugcggcaccguggccaacggcgugcugcagaccuucaugagaauggccuggggcggcagcuacaucgcccuggacagcggcugcggcaagugggacugcaucaugaccagcuaccaguaccugaucauccagaacaccaccugggaggaccacugccaguucagcagacccagccccaucggcuaccugggccugcugagccagagaaccagagacaucuacaucagcagaagacgccggggcaccuucaccuggacccugagcgacagcgagggcaaggacacccccggcggcuacugccugaccagauggaugcugaucgaggccgagcugaagugcuucggcaacaccgccguggccaagugcaacgagaagcacgacgaggaguucugcgacaugcugagacuguucgacuucaacaagcaggccauccagagacugaagacccccgcccagaugagcauccagcugaucaacaaggccgugaacgcccugaucaacgaccagcugaucaugaagaaccaccugagagacaucaugugcauccccuacugcaacuacagcaaguacugguaccugaaccacaccaccaccggcaagaccagccugcccaagugcuggcuggugagcaacggcagcuaccugaacgagacccacuucagcgacgacaucgagcagcaggccgacaacaugaucaccgagaugcugcagaaggaguacauggagagacagggcaagaccccccugggccugguggaccuguucguguucagcaccagcuucuaccugaucagcaucuuccugcaccuggugaagauccccacccacagacacaucgugggcaagagcugccccaagccccacagacugaaccacaugggcaucugcagcugcggccuguacaagcagcccggcgugcccgugagauggaagagaugaggacuaguaauaaggaaacuguaugaaugucugugggcaggaagugaagagauccuucuguaaagguuuuuggaauuaugucugcugaauaauaaacuuuuuugaaauaauaaaucugguagaaaaaugagaucuaaaaaaaaaaaaaaaaaaaaaaaaaaaaaaaaaaaaaaaaaaaaaaaaaaaaaaaaaaaaaaaaugcaucccccccccccccccccccccccccccccccaaaggcucuuuucagagccaccagaauu

SEQ ID NO: 6868 - RNA, 1816 nt, Artificial Sequence
  mRNA product Design b-4 comprising derived and/or modified sequence from LASV(G502-SLE-2009;Clade IV)__AIT17126__GPCstabilized (opt4)
gggagagucccgcagucggcguccagcggcucugcuuguucgugugugugucguugcaggccuuauucaagcuuaccaugggccagaucgugaccuucuuccaggaggugccccacgugaucgaggaggugaugaacaucgugcugaucgcccugagcauccuggccgugcugaagggccuguacaacuucgccaccugcggccuggugggccugcugaccuuccugcugcugugcggcagaagcugcaccaccggccuguacaagggcguguacgagcugcagacccuggagcugaacauggagacccugaacaugaccaugccccugagcugcaccaagaacaacagccaccacuacaucauggugggcaacgagaccggccuggagcugacccugaccaacaccagcaucaucaaccacaaguucugcaaccugagcgacgcccacaagaagaaccuguacgaccacgcccugaugagcaucaucagcaccuuccaccugagcauccccaacuucaaccaguacgaggccaugagcugcgacuucaacggcggcaagaucagcgugcaguacaaccugagccacagcuacgccggcgacgccgccgaccacugcggcaccguggccaacggcgugcugcagaccuucaugagaauggccuggggcggcagcuacaucgcccuggacagcggcugcggcagaugggacugcaucaugaccagcuaccaguaccugaucauccagaacaccaccugggaggaccacugccaguucagcagacccagccccaucggcuaccugggccugcugagccagagaaccagagacaucuacaucagcagaagacgccggggcaccuucaccuggacccugagcgacagcgagggcaaggacacccccggcggcuacugccugaccagauggaugcugaucgaggccgagcugaagugcuucggcaacaccgccguggccaagugcaacgagaagcacgacgaggaguucugcgacaugcugagacuguucgacuucaacaagcaggccauccagagacugaaggcccccgcccagaugagcauccagcugaucaacaaggccgugaacgcccugaucaacgaccagcuggugaugaagaaccaccugagagacaucaugugcauccccuacugcaacuacagcagauacugguaccugaaccacaccaccaccggcagaaccagccugcccaagugcuggcuggugagcaacggcagcuaccugaacgagacccacuucagcgacgacaucgagcagcaggccgacaacaugaucaccgagaugcugcagaaggaguacauggagagacagggcaagaccccccugggccugguggaccuguucguguucagcaccagcuucuaccugaucagcaucuuccugcaccuggugaagauccccacccacagacacaucgugggcaagagcugccccaagccccacagacugaaccacaugggcaucugcagcugcggccuguacaagcagcccggcgugcccgugaaguggaagagaugaggacuaguaauaaggaaacuguaugaaugucugugggcaggaagugaagagauccuucuguaaagguuuuuggaauuaugucugcugaauaauaaacuuuuuugaaauaauaaaucugguagaaaaaugagaucuaaaaaaaaaaaaaaaaaaaaaaaaaaaaaaaaaaaaaaaaaaaaaaaaaaaaaaaaaaaaaaaaugcaucccccccccccccccccccccccccccccccaaaggcucuuuucagagccaccagaauu

SEQ ID NO: 6869 - RNA, 1816 nt, Artificial Sequence
  mRNA product Design b-4 comprising derived and/or modified sequence from LASV(G733-SLE-2010;Clade IV)__AIT17154__GPCstabilized (opt4)
gggagagucccgcagucggcguccagcggcucugcuuguucgugugugugucguugcaggccuuauucaagcuuaccaugggccagaucgugaccuucuuccaggaggugccccacgugaucgaggaggugaugaacaucgugcugaucgcccugagcauccuggccgugcugaagggccuguacaacuucgccaccugcggcaucgugggccuggugagcuuccugcugcugugcggcagaagcugcaccaccagccuguacaagggcguguacgagcugcagacccuggagcugaacauggagacccugaacaugaccaugccccugagcugcaccaagaacaacagccaccacuacaucauggugggcaacgagaccggccuggagcugacccugaccaacaccagcaucaucaaccacaaguucugcaaccugagcgacgcccacaagaagaaccuguacgaccacgcccugaugagcaucaucagcaccuuccaccugagcauccccaacuucaaccaguacgaggccaugagcugcgacuucaacggcggcaagaucagcgugcaguacaaccugagccacagcuacgccggcgacgccgccaaccacugcggcaccaucgccaacggcgugcugcagaccuucaugagaauggccuggggcggcagcuacaucgcccuggacagcggcugcgacagaugggacugcaucaugaccagcuaccaguaccugaucauccagaacaccaccugggaggaccacugccaguucagcagacccagccccaucggcuaccugggccugcugagccagagaaccagagacaucuacaucagcagaagacgccggggcaccuucaccuggacccugagcgacagcgagggcaaggacacccccggcggcuacugccugaccagauggaugcugaucgaggccgagcugaagugcuucggcaacaccgccguggccaagugcaacgagaagcacgacgaggaguucugcgacaugcugagacuguucgacuucaacaagcaggccauccagagacugaaggcccccgcccagaugagcauccagcugaucaacaaggccgugaacgcccugaucaacgaccagcugaucaugaagaaccaccugagagacaucaugugcauccccuacugcaacuacagcaaguacugguaccugaaccacaccaccaccggcaagaccagccugcccaagugcuggcuggugagcaacggcagcuaccugaacgagacccacuucagcgacgacaucgagcagcaggccgacaacaugaucaccgagaugcugcagaaggaguacauggagagacagggcaagaccccccugggccugguggaccuguucguguucagcaccagcuucuaccugaucagcaucuuccugcaccuggugaagauccccacccacagacacguggugggcaagagcugccccaagccccacagacugaaccacaugggcaucugcagcugcggccuguacggccagcccggcgugcccgugaaguggaagagaugaggacuaguaauaaggaaacuguaugaaugucugugggcaggaagugaagagauccuucuguaaagguuuuuggaauuaugucugcugaauaauaaacuuuuuugaaauaauaaaucugguagaaaaaugagaucuaaaaaaaaaaaaaaaaaaaaaaaaaaaaaaaaaaaaaaaaaaaaaaaaaaaaaaaaaaaaaaaaugcaucccccccccccccccccccccccccccccccaaaggcucuuuucagagccaccagaauu

SEQ ID NO: 6870 - RNA, 1816 nt, Artificial Sequence
  mRNA product Design b-4 comprising derived and/or modified sequence from MOPV/LASV reassortant(IGS-1;Clade IV)__AFY05576__GPCstabilized (opt4)
gggagagucccgcagucggcguccagcggcucugcuuguucgugugugugucguugcaggccuuauucaagcuuaccaugggccagaucgugaccuucuuccaggaggugccccacgugaucgaggaggugaugaacaucgugcugaucgcccugagcgugcuggccgugcugaagggccuguacaacuucgccaccugcggccuggugggccuggugaccuuccugcugcugugcggcagaagcugcaccaccagccuguacaagggcguguacgagcugcagacccuggagcugaacauggagacccugaacaugaccaugccccugagcugcaccaagaacaacagccaccacuacaucauggugggcaacgagaccggccuggagcugacccugaccaacaccagcaucaucaaccacaaguucugcaaccugagcgacgcccacaagaagaaccuguacgaccacgcccugaugagcaucaucagcaccuuccaccugagcauccccaacuucaaccaguacgaggccaugagcugcgacuucaacggcggcaagaucagcgugcaguacaaccugagccacagcuacgccggcgacgccgccaaccacugcggcaccguggccaacggcgugcugcagaccuucaugagaauggccuggggcggcagcuacaucgcccuggacagcggcugcggcaacugggacugcaucaugaccagcuaccaguaccugaucauccagaacaccaccugggaggaccacugccaguucagcagacccagccccaucggcuaccugggccugcugagccagagaaccagagacaucuacaucagcagaagacgccggggcaccuucaccuggacccugagcgacagcgagggcgaggacacccccggcggcuacugccugaccagauggaugcugaucgaggccgagcugaagugcuucggcaacaccgccguggccaagugcaacgagaagcacgacgaggaguucugcgacaugcugagacuguucgacuucaacaagcaggccauccagagacugaaggcccccgcccagaugagcauccagcugaucaacaaggccgugaacgcccugaucaacgaccagcugaucaugaagaaccaccugagagacaucaugugcauccccuacugcaacuacagcaaguacugguaccugaaccacaccaccaccggcagaaccagccugcccaagugcuggcuggugagcaacggcagcuaccugaacgagacccacuucagcgacgacaucgagcagcaggccgacaacaugaucaccgagaugcugcagaaggaguacauggagagacagggcaagaccccccugggccugguggaccuguucguguucagcaccagcuucuaccugaucagcaucuuccugcaccuggugaagauccccacccacagacacaucgugggcaagagcugccccaagccccacagacugaaccacaugggcaucugcagcugcggccuguacaagcagcccggcgugcccgugaaguggaagagaugaggacuaguaauaaggaaacuguaugaaugucugugggcaggaagugaagagauccuucuguaaagguuuuuggaauuaugucugcugaauaauaaacuuuuuugaaauaauaaaucugguagaaaaaugagaucuaaaaaaaaaaaaaaaaaaaaaaaaaaaaaaaaaaaaaaaaaaaaaaaaaaaaaaaaaaaaaaaaugcaucccccccccccccccccccccccccccccccaaaggcucuuuucagagccaccagaauu

SEQ ID NO: 6871 - RNA, 1816 nt, Artificial Sequence
  mRNA product Design b-4 comprising derived and/or modified sequence from LASV(LM765-SLE-2012;Clade IV)__AIT17814__GPCstabilized (opt4)
gggagagucccgcagucggcguccagcggcucugcuuguucgugugugugucguugcaggccuuauucaagcuuaccaugggccagaucgugaccuucuuccaggaggugccccacgugaucgaggaggugaugaacaucgugcugaucgcccugagcauccuggccgugcugaagggccuguacaacuucgccaccugcggccuggugggccuggugaccuuccugcugcugugcggcagaagcugcaccaccagccuguacaagggcguguacgagcugcagacccuggagcugaacauggagacccugaacaugaccaugccccugagcugcaccaagaacaacagccaccacuacaucauggugggcaacgagaccggccuggagcugacccugaccaacaccagcaucaucgaccacaaguucugcaaccugagcgacgcccacagaaagaaccuguacgaccacgcccugaugagcaucaucagcaccuuccaccugagcauccccaacuucaaccaguacgaggccaugagcugcgacuucaacggcggcaagaucagcgugcaguacaaccugagccacagcuacgccaaggacgccgccgaccacugcggcaccguggccaacggcgugcugcagaccuucaugagaauggccuggggcggcagcuacaucgcccuggacagcggcugcggcagaugggacugcaucaugaccagcuaccaguaccugaucauccagaacaccaccugggaggaccacugccaguucagcagacccagccccaucggcuaccugggccugcugagccagagaaccagagacaucuacaucagcagaagacgccggggcaccuucaccuggacccugagcgacagcgagggcaaggacacccccggcggcuacugccugaccagauggaugcugaucgaggccgagcugaagugcuucggcaacaccgccguggccaagugcaacgagaagcacgacgaggaguucugcgacaugcugagacuguucgacuucaacaagcaggccauccagagacugaaggcccccgcccagaugagcauccagcugaucaacaaggccgugaacgcccugaucaacgaccagcugaucaugaagaaccaccugagagacaucaugugcauccccuacugcaacuacagcaaguacugguaccugaaccacaccaccaccggcaagaccagccugcccaagugcuggcuggugagcaacggcagcuaccugaacgagacccacuucagcgacgacaucgagcagcaggccgacaacaugaucaccgagaugcugcagaaggaguacauggagagacagggcaagaccccccugggccugguggaccuguucguguucagcaccagcuucuaccugaucagcaucuuccugcaccuggugaagauccccacccacagacacaucgugggcaagcccugccccaagccccacagacugaaccacaugggcaucugcagcugcggccuguacaagcagcccggcgugcccgugaaguggaagagaugaggacuaguaauaaggaaacuguaugaaugucugugggcaggaagugaagagauccuucuguaaagguuuuuggaauuaugucugcugaauaauaaacuuuuuugaaauaauaaaucugguagaaaaaugagaucuaaaaaaaaaaaaaaaaaaaaaaaaaaaaaaaaaaaaaaaaaaaaaaaaaaaaaaaaaaaaaaaaugcaucccccccccccccccccccccccccccccccaaaggcucuuuucagagccaccagaauu

SEQ ID NO: 6872 - RNA, 1816 nt, Artificial Sequence
  mRNA product Design b-4 comprising derived and/or modified sequence from LASV(LM776-SLE-2012;Clade IV)__AIT17824__GPCstabilized (opt4)
gggagagucccgcagucggcguccagcggcucugcuuguucgugugugugucguugcaggccuuauucaagcuuaccaugggccagaucgugaccuucuuccaggaggugccccacgugaucgaggaggugaugaacaucgugcugaucgcccugagcauccuggccgugcugaagggccuguacaacuucgccaccugcggccuggugggccuggugaccuuccugcugcugugcggcagaagcugcaccaccagcguguacaagggcguguacgagcugcagacccuggagcugaacauggagacccugaacaugaccaugccccugagcugcaccaagaacaacagccaccacuacaucauggugggcaacgagaccggccuggagcugacccugaccaacaccagcaucaucaaccacaaguucugcaaccugagcgacgcccacaagaagaaccuguacgaccacgcccugaugagcaucaucagcaccuuccaccugagcauccccaacuucaaccaguacgaggccaugagcugcgacuucaacggcggcaagaucagcgugcaguacaaccugagccacagcuacgccggcgacgccgccaaccacugcggcaccguggccaacggcgugcugcagaccuucaugagaauggccuggggcggcagcuacaucgcccuggacagcggcugcggcaagugggacugcaucaugaccagcuaccaguaccugaucauccagaacaccaccugggaggaccacugccaguucagcagacccagccccaucggcuaccugggccugcugagccagagaaccagagacaucuacaucagcagaagacgccggggcaccuucaccuggacccugagcgacagcgagggcaaggacacccccggcggcuacugccugaccagauggaugcugaucgaggccgagcugaagugcuucggcaacaccgccguggccaagugcaacgagaagcacgacgaggaguucugcgacaugcugagacuguucgacuucaacaagcaggccauccagagacugaaggcccccgcccagaugagcauccagcugaucaacaaggccgugaacgcccugaucaacgaccagcugaucaugaagaaccaccugagagacaucaugugcauccccuacugcaacuacagcaaguacugguaccugaaccacaccaccaccggcaagaccagccugcccaagugcuggcuggugagcaacggcagcuaccugaacgagacccacuucagcgacgacaucgagcagcaggccgacaacaugaucaccgagaugcugcagaaggaguacauggagagacagggcaagaccccccugggccugguggaccuguucguguucagcaccagcuucuaccugaucagcaucuuccugcaccuggugaagauccccacccacagacacaucgugggcaagagcugccccaagccccacagacugaaccacaugggcaucugcagcugcggccuguacaagcagcccggcgugcccgugagauggaagagaugaggacuaguaauaaggaaacuguaugaaugucugugggcaggaagugaagagauccuucuguaaagguuuuuggaauuaugucugcugaauaauaaacuuuuuugaaauaauaaaucugguagaaaaaugagaucuaaaaaaaaaaaaaaaaaaaaaaaaaaaaaaaaaaaaaaaaaaaaaaaaaaaaaaaaaaaaaaaaugcaucccccccccccccccccccccccccccccccaaaggcucuuuucagagccaccagaauu

SEQ ID NO: 6873 - RNA, 1816 nt, Artificial Sequence
  mRNA product Design b-4 comprising derived and/or modified sequence from LASV(Mad39;Clade IV)__ANH09722__GPCstabilized (opt4)
gggagagucccgcagucggcguccagcggcucugcuuguucgugugugugucguugcaggccuuauucaagcuuaccaugggccagaucgugaccuucuuccaggaggugccccacgugaucgaggaggugaugaacaucgugcugaucgcccugagcauccuggccgugcugaagggccuguacaacguggccaccugcggccugaucggccuggugaccuuccugcugcugugcggcagaagcugcaccaccacccuguacaagggcguguacgagcugcaggcccuggagcugaacauggagacccugaacaugaccaugccccugagcugcaccaagaacaacagccaccacuacaucagagugggcaacgagaccggccuggagcugacccugaccaacaccagccugaucaaccacaaguucugcaaccugagcgacgcccacaagaagaaccuguacgaccacgcccugaugagcaucaucagcaccuuccaccugagcauccccaacuucaaccaguacgaggccaugagcugcgacuucaacgacggcaagaucagcgugcaguacaaccugagccacaccuacgccggcgacaccgccaaccacugcggcaccguggccaacggcgugcugcagaccuucaugagaauggccuggggcggcagcuacaucgcccuggacagcggcugcggcggcugggacugcaucaugaccagcuaccaguaccugaucauccagaacaccaccugggaggaccacugccaguucagcagacccagccccaucggcuaccugggccugcugagccagagaaccagagacaucuacaucagcagaagacgccggggcaccuucaccuggacccugagcgacagcgagggcaaggacacccccggcggcuacugccugaccagauggaugcugaucgaggccgagcugaagugcuucggcaacaccgccguggccaagugcaacgagaagcacgacgaggaguucugcgacaugcugagacuguucgacuucaacaagcaggccauccagagacugaaggcccccgcccagaugagcauccagcugaucaacaaggccgugaacgcccugaucaacgaccagcugaucaugaagaaccaccugagagacaucaugugcauccccuacugcaacuacagcaaguacugguaccugaaccacaccgugaccggcaagaccagccugcccaagugcuggcuggugagcaacggcagcuaccugaacgagacccacuucagcgacgacaucgagcagcaggccgacaacaugaucaccgagaugcugcagaaggaguacauggagagacagggcaagaccccccugggccugguggaccuguucguguucagcaccagcuucuaccugaucagcaucuuccugcaccuggugaagauccccacccacagacacguggugggcaagcccugccccaagccccacagacugaaccacaugggcaucugcagcugcggcuucuacaagcagcccggcgugcccgugagauggaagagaugaggacuaguaauaaggaaacuguaugaaugucugugggcaggaagugaagagauccuucuguaaagguuuuuggaauuaugucugcugaauaauaaacuuuuuugaaauaauaaaucugguagaaaaaugagaucuaaaaaaaaaaaaaaaaaaaaaaaaaaaaaaaaaaaaaaaaaaaaaaaaaaaaaaaaaaaaaaaaugcaucccccccccccccccccccccccccccccccaaaggcucuuuucagagccaccagaauu

SEQ ID NO: 6874 - RNA, 1816 nt, Artificial Sequence
  mRNA product Design b-4 comprising derived and/or modified sequence from LASV(Z0947-SLE-2011;Clade IV)__AIT17840__GPCstabilized (opt4)
gggagagucccgcagucggcguccagcggcucugcuuguucgugugugugucguugcaggccuuauucaagcuuaccaugggccagaucgugaccuucuuccaggaggugccccacgugaucgaggaggugaugaacaucgugcugaucgcccugagcauccuggccgugcugaagggccuguacaacuucgccaccugcggccuggugggccuggugaccuuccugcugcugugcggcagaagcugcaccaucagccuguacaagggcguguacgagcugcagacccuggagcugaacauggagacccugaacaugaccaugccccugagcugcaccaagaacaacagccaccacuacaucauggugggcaacgagaccggccuggagcugacccugaccaacaccagcaucaucaaccacaaguucugcaaccugagcgacgcccacaagaagaaccuguacgaccacgcccugaugagcaucaucagcaccuuccaccugagcauccccaacuucaaccaguacgaggccaugagcugcgacuucaacggcggcaagaucagcgugcaguacaaccugagccacagcuacgccggcgacgccgccaaccacugcggcaccguggccaacggcgugcugcagaccuucaugagaauggccuggggcggcagcuacaucgcccuggacagcggcugcgacagaugggacugcaucaugaccagcuaccaguaccugaucauccagaacaccaccugggaggaccacugccaguucagcagacccagccccaucggcuaccugggccugcugagccagagaaccagagacaucuacaucagcagaagacgccggggcaccuucaccuggacccugagcgacagcgagggcaaggacacccccggcggcuacugccugaccagauggaugcugaucgaggccgagcugaagugcuucggcaacaccgccguggccaagugcaacgagaagcacgacgaggaguucugcgacaugcugagacuguucgacuucaacaagcaggccauccagagacugaaggcccccgcccagaugagcauccagcugaucaacaaggccgugaacgcccugaucaacgaccagcugaucaugaagaaccaccugagagacaucaugugcauccccuacugcaacuacagcaaguacugguaccugaaccacaccaccaccggcaagaccagccugcccaagugcuggcuggugagcaacggcagcuaccugaacgagacccacuucagcgacgacaucgagcagcaggccgacaacaugaucaccgagaugcugcagaaggaguacauggagagacagggcaagaccccccugggccugguggaccuguucguguucagcaccagcuucuaccugaucagcaucuuccugcaccuggugaagauccccacccacagacacaucgugggcaagcccugccccaagccccacagacugaaccacaugggcaucugcagcugcggccuguacaagcagcccggcgugcccgugaaguggaagagaugaggacuaguaauaaggaaacuguaugaaugucugugggcaggaagugaagagauccuucuguaaagguuuuuggaauuaugucugcugaauaauaaacuuuuuugaaauaauaaaucugguagaaaaaugagaucuaaaaaaaaaaaaaaaaaaaaaaaaaaaaaaaaaaaaaaaaaaaaaaaaaaaaaaaaaaaaaaaaugcaucccccccccccccccccccccccccccccccaaaggcucuuuucagagccaccagaauu

SEQ ID NO: 6875 - RNA, 1816 nt, Artificial Sequence
  mRNA product Design b-4 comprising derived and/or modified sequence from LASV(Josiah;Clade IV)__NP_694870__GPCstabilized (opt5)
gggagagucccgcagucggcguccagcggcucugcuuguucgugugugugucguugcaggccuuauucaagcuuaccaugggccagaucgugaccuucuuucaagaggucccccacguuauugaagaggugaugaacaucgugcugauugcccucagcguccuggcugugcuuaaggggcuguacaauuucgccacaugcggacucguuggccuggugacguuucuucugcucugugggagauccugcaccacaucucuguauaaaggagucuacgaacugcagacccucgagcugaacauggaaacacuuaauaugaccaugccucugagcuguacaaagaacaauucccaucacuauaucauggugggcaacgagaccgggcucgagcugacgcuuaccaauacaucuauuaucaaccauaaauucugcaaucugagcgacgcgcacaagaaaaaccucuacgaucaugcucugauguccaucauuucuaccuuucaccugagcaucccgaauuucaaccaguaugaagccauguccugugacuuuaauggaggcaagauuagcguucaguacaaccucucucacuccuaugccggcgaugcugccaaucauugcgggacaguggcuaacggaguccugcaaaccuucaugcggauggccuggggcgggagcuacaucgcgcuugacucuggaugcggcaacugggauuguauuaugacguccuaccaguaucugaucauucagaauacaaccugggaggaccacugccaguuuagcagacccucuccuaucggguaccucggacugcuuucccaacggacacgcgauaucuauauuagcagacggcgccggggcaccuucaccuggacacuguccgacucugaaggcaaggauacgcccgggggauacugucugacccgcuggaugcucaucgaggccgagcugaaaugcuuuggcaacacagcuguggccaaguguaaugaaaaacaugacgaggaguucugcgauaugcuuagacuguuugacuucaacaagcaggcuauucagcggcucaaagcccccgcgcagaugagcauccaacugauuaauaaggccgugaacgcucuuaucaaugaucagcugaucaugaagaaccaccuccgcgacauuaugugcaucccuuauugcaauuacuccaaauauugguaccugaaccacaccacaaccggaagaacgagccugcccaaguguuggcucgucucuaauggcuccuaccugaacgaaacacauuucagcgacgauauugagcagcaagccgacaauaugaucaccgagaugcuucagaaagaauauauggagcggcaggggaagaccccucugggacucguugaucuguuuguguucucuaccagcuuuuaccugauuuccaucuuccuucaccucgugaaaaucccgacacaucgccacauugucggcaagucuugccccaaaccucauagacugaaccacaugggcaucuguagcugcgggcuguauaagcagcccggagugccuguuaaguggaaacggugaggacuaguaauaaggaaacuguaugaaugucugugggcaggaagugaagagauccuucuguaaagguuuuuggaauuaugucugcugaauaauaaacuuuuuugaaauaauaaaucugguagaaaaaugagaucuaaaaaaaaaaaaaaaaaaaaaaaaaaaaaaaaaaaaaaaaaaaaaaaaaaaaaaaaaaaaaaaaugcaucccccccccccccccccccccccccccccccaaaggcucuuuucagagccaccagaauu

SEQ ID NO: 6876 - RNA, 1813 nt, Artificial Sequence
  mRNA product Design b-4 comprising derived and/or modified sequence from LASV(LP;Clade I)__AAF86701__GPCstabilized (opt5)
gggagagucccgcagucggcguccagcggcucugcuuguucgugugugugucguugcaggccuuauucaagcuuaccaugggccagaucauuaccuucuuucaagaggugccccacgucaucgaagagguuaugaacauugugcugaucgcccucagccugcuugcuauucugaaggggcucuacaauaucgccacaugcggaaucauuggccugguggcguuccuuuuucugugugggaaauccugcucucucacgcugaagggaggcuaugaacugcagacccucgagcugaacauggaaacacuuaauaugaccaugccucugagcuguaccaaaaacuccucucaucacuacaucagagucgggaaugagacaggacucgagcugacacuuaccaacacgagcauuaucaaucauaaguucugcaaccuguccgacgcucacaaaaagaaucucuaugaucaugcccugaugucuauuaucagcaccuuucaccuguccauuccgaacuucaaucaguacgaagccaugagcugugacuuuaacggcggcaagaucucugugcaguauaaucucucccacagcuacgcuggggaugccgcugagcauugcggaacaguugccaacggcgugcugcaaaccuucaugcggauggcguggggagggcgcuauaucgcccuugacucuggcugcgggaauugggauuguauuaugacauccuaccaguaccugaucauucagaacaccacgugggaagaccacugccaguuuagcagacccucuccuaucggauaucucggccugcuuucccaacggacacgcgauauuuacaucagcagacggcgccggggcaccuucacauggacccuguccgacucugaggggaacgagacccccggaggcuauugucugacacgcuggaugcucaucgaagcugagcugaagugcuuugggaauacggccgucgcuaaauguaacgaaaagcaugaugaggaguucugcgacaugcuuagacuguuugauuucaauaaacaggccauucggcgccucaaggcgcccgcccagaugagcauccagcugauuaacaaggcugugaaugcccuuaucaacgaccaacugauuaugaaaaaucaccucagagauaucaugugcaucccuuacugcaacuauuccaaguacugguaucugaaucacaccagcucuggccggacaucccugcccaaauguuggcucauuagcaacgggucuuaccugaaugagacccaguucagcgacgacaucgaacagcaagcugauaacaugauuacagagaugcuucagaaggaauacaucgagcgccagggaaaaaccccucugggccucguugacauuuuuaucuucuccacgucuuuuuaucugauuagcaucuuccugcaucuuaucaagauuccgacacacagacauaucgugggcaaacccugcccuaagccccaccggcucaaucauaugggggucuguuccugcggacuguacaagcacccuggcgugcccaccaaauggaagcgcugaggacuaguaauaaggaaacuguaugaaugucugugggcaggaagugaagagauccuucuguaaagguuuuuggaauuaugucugcugaauaauaaacuuuuuugaaauaauaaaucugguagaaaaaugagaucuaaaaaaaaaaaaaaaaaaaaaaaaaaaaaaaaaaaaaaaaaaaaaaaaaaaaaaaaaaaaaaaaugcaucccccccccccccccccccccccccccccccaaaggcucuuuucagagccaccagaauu

SEQ ID NO: 6877 - RNA, 1813 nt, Artificial Sequence
  mRNA product Design b-4 comprising derived and/or modified sequence from LASV(803213;Clade II)__AAF86703__GPCstabilized (opt5)
gggagagucccgcagucggcguccagcggcucugcuuguucgugugugugucguugcaggccuuauucaagcuuaccaugggccagaucauuaccuucuuucaagaggugccccacgucaucgaagagguuaugaacauugugcugaucgcccucagccugcuugcuauucugaaggggaucuacaauguggccacaugcggacucuucggccugaucuccuuucuucugcucugugggagaucuugcagcgucacguauaaaggaguguacgaacugcagacccuggagcucaacauggcgaaucugaacaugacaaugccucuuuccuguaccaagaauaacucucaucacuauauuaugguuggcaaugaaacagggcuggagcucacccugacaaacaccagcaucauuaaucauaaauucugcaaccuuuccgacgcucacaagaaaaaucuguacgaucaugcccucaugucuaucauuagcacguuucaccuguccaucccgaacuucaaucaguaugaggccaugagcugugacuuuaacggaggcaagauuucugugcaguacaaucugucccacagcuucgcugucgaugccgcuaaccauugcggcaccaucgccaacggggugcuccaaacauuuaugcggauggcguggggaggcucuuauaucgcccuggacuccgggugcggaaauugggauuguauuaugaccagcuaccaguaccuuaucauucagaacacaaccugggaagaccacugccaguucucucgccccuccccuaucggcuaucuggggcuccugagccaaagaacgcgggauauuuacaucucccgcagacgccggggaacauuuaccuggacacucucugacagcgagggcaaugaagcucccggcggguauugucugacccgguggaugcugaucgaggccgagcucaaaugcuucggaaacaccgcuguugccaaguguaaugaaaaacaugaugaggaauuuugcgacaugcugcgccuuuucgauuucaacaagcaggcgauuaaaagacugaagacacccgcccagauguccauccagcucauuaauaaggcugugaacgcccugaucaaugaccaacuuauuaugaaaaaccaucugcgggauaucaugugcaucccuuacugcaauuauagccgcuacugguaucucaaccacacggucaccgggaagacaucucugcccagauguuggcugguguccaauggaagcuaccucaacgaaacccacuuuucugacgacauugagcagcaggcugauaauaugaucacagagaugcugcaaaaagaauacauggaccggcagggcaagaccccucuugggcugguggaucucuucgucuuuagcacguccuucuaucugauuucuaucuuucugcaccuuguuaaaauuccgacacaucgccacaucgugggaaagcccugcccuaaaccccauagacucaaccacaugggcauuuguagcugcggccuguacaagcacccuggggugcccgucaaguggaaacggugaggacuaguaauaaggaaacuguaugaaugucugugggcaggaagugaagagauccuucuguaaagguuuuuggaauuaugucugcugaauaauaaacuuuuuugaaauaauaaaucugguagaaaaaugagaucuaaaaaaaaaaaaaaaaaaaaaaaaaaaaaaaaaaaaaaaaaaaaaaaaaaaaaaaaaaaaaaaaugcaucccccccccccccccccccccccccccccccaaaggcucuuuucagagccaccagaauu

SEQ ID NO: 6878 - RNA, 1813 nt, Artificial Sequence
  mRNA product Design b-4 comprising derived and/or modified sequence from LASV(GA391;Clade III)__CAA36645__GPCstabilized (opt5)
gggagagucccgcagucggcguccagcggcucugcuuguucgugugugugucguugcaggccuuauucaagcuuaccaugggccagaucgugaccuucuuucaagaggucccccacguuauugaagaggugaugaacaucgugcugauugcccucagcauccuggcuauucuuaaggggcuguacaaugucgccacaugcggacucaucggccuggugacguuccuucugcucuccgggagaucuuguagccugaucuauaaaggaaccuacgaacugcagacacucgagcugaacauggaaacccuuaauaugacaaugccucuguccugcaccaagaacaauucucaucacuauauucggguuggcaacgagacagggcucgagcugacccuuacgaauaccagcauccugaaccauaaauuuuguaaucucuccgacgcgcacaagcgcaaccuguacgaucauucucugaugagcauuaucuccacauuccaccucagcauuccgaauuuuaaccaguaugaagcuaugucuugcgacuucaauggaggcaaaaucaccgugcaguacaaccugucccacagcuuugccgucgaugccgcuggccauugugggacacuugccaauggagugcugcaaaccuucaugagaauggcuuggggcgggucuuauauugcccucgacuccggaugcggcaacugggauugcaucaugacgagcuaccaguaccugaucauucagaacacaaccugggacgaucacugucaguuuucucgccccuccccuaucggguaucuuggacugcucagccaaagaacacgggacauuuacaucucccgcagacgccggggcaccuucaccuggacacucucugauagcgagggcaaugaaacgcccgggggauauugccugacccgguggaugcuuauugaggcggagcugaaguguuuuggcaacacagccguugcuaagugcaaugaaaaacaugacgaggaguucugugauaugcuccgccuguuugacuucaacaagcaggccaucagacggcuuaaaacccccgcucagauguccauccagcugauuaauaaggccgugaacgcgcucaucaaugaucaacugauuaugaaaaaccaucugcgcgacaucaugugcauuccuuacugcaauuauagcagauacugguaucucaaccacacaucuaccggaaagacgucccugccccggugcuggcuuaucagcaauggcucuuaccugaacgaaacaaaguucagcgacgauaucgagcagcaggccgacaauaugauuaccgagaugcuccaaaaagaauacaucgaucgccaggggaagaccccucugggacuggucgaccuuuuuguguucuccacaucuuuuuaucucauuagcaucuuccugcaccuggugaaaauuccgacccacagacauaucgucggcaagcccuguccuaaaccccaccggcucaaccauaugggcauuugcuccugugggcuguacaagcagccuggaguucccgugagauggaaacgcugaggacuaguaauaaggaaacuguaugaaugucugugggcaggaagugaagagauccuucuguaaagguuuuuggaauuaugucugcugaauaauaaacuuuuuugaaauaauaaaucugguagaaaaaugagaucuaaaaaaaaaaaaaaaaaaaaaaaaaaaaaaaaaaaaaaaaaaaaaaaaaaaaaaaaaaaaaaaaugcaucccccccccccccccccccccccccccccccaaaggcucuuuucagagccaccagaauu

SEQ ID NO: 6879 - RNA, 1816 nt, Artificial Sequence
  mRNA product Design b-4 comprising derived and/or modified sequence from LASV(AV;Clade V)__CCA30314__GPCstabilized (opt5)
gggagagucccgcagucggcguccagcggcucugcuuguucgugugugugucguugcaggccuuauucaagcuuaccaugggccagaucgugaccuucuuucaagaggucccccacguuauugaagaggugaugaacaucgugcugauugcccucagcauccuggcuguccuuaaggggcuguacaauauugccacaugcggacucaucggccugaucacguuccuucugcucugugggagauccugcucuagcaaccuguauaaaggaguguacgaacugcagucccucgaccugaauauggagacccuuaacaugacaaugccucugucuuguaccaagaauaacagccaucacuauauucggguuggcaaugauacagggcucgaacugacccuuacaaacaccuccauccugaaucauaaauuuugcaaccucucugacgcgcacaagaaagaucuguacgaccaugcucugaugagcauuaucuccacguuccaccucagcauuccgaauuuuaaccaguaugaggccaugucuugugauuucaauggaggcaagaucuccgugcaguacaaccugagccacucuuaugccauugacgcugccaaucauugcggcaccgucgcuaacgggauccuucaaacauuuaugcgcauggccuggggaggcuccuacaucgcgcuggauagcgggugcggaaacugggacuguauuaugaccucuuaccaguaucucaucauucagaauacaaccugggagaaccacugccaguucucccggcccagcccuaucggcuaccuggggcuucugucccaacgcacgagagauauuuauaucucucggcgccgccggggaacauuuaccuggacacugagcgacuccgaaggcaaugccacccccggcggguacugucucaccagauggaugcugaucgaggcugaacuuaagugcuucggaaacacagccguggcuaaauguaaugagaagcaugaugaggaauuuugcgacaugcugcgccucuucgauuuuaacaaacaggccauuagccggcugaagucucccgcgcagauguccauccagcuuauuaauaaagccguuaacgcucugaucaaugaccaacucauuaugaagaaccaccugagagacaucaugugcaucccuuauugcaauuacagcaaguauugguaccugaaccacacgauuaccgggaaaacaucucuccccaaguguuggcuggugagcaauggauccuaccuuaacgaaacccauuucucugaugacaucgagcagcaggccgauaauaugauuacagaaaugcugcaaaaagaguauauggagcggcagggcaagaccccucucgggcuggucgaccuguucguguuuagcacguccuucuaccuuaucagcauuuuucuccgccuggugaaaaucccgacacacagacauauugucggaaagcccugcccuaaaccccaccggcugaaccauaugggcaucuguucuugcggccucuauaagcagccugggguucccgugcgcuggaagagaugaggacuaguaauaaggaaacuguaugaaugucugugggcaggaagugaagagauccuucuguaaagguuuuuggaauuaugucugcugaauaauaaacuuuuuugaaauaauaaaucugguagaaaaaugagaucuaaaaaaaaaaaaaaaaaaaaaaaaaaaaaaaaaaaaaaaaaaaaaaaaaaaaaaaaaaaaaaaaugcaucccccccccccccccccccccccccccccccaaaggcucuuuucagagccaccagaauu

SEQ ID NO: 6880 - RNA, 1813 nt, Artificial Sequence
  mRNA product Design b-4 comprising derived and/or modified sequence from LASV(Togo/2016/7082;Clade VI)__AMR44577__GPCstabilized (opt5)
gggagagucccgcagucggcguccagcggcucugcuuguucgugugugugucguugcaggccuuauucaagcuuaccaugggccagaucauuaccuucuuucaagaggugccccacgucaucgaagagguuaugaacauugugcugaucgcccucagccugcuugcuauucugaaggggguguacaaugucgccacaugcggaaucaucggccucgugacguuccuguuucuuugugggagauccugcucucugauuuauaaaggaagcuacgaacuccagacccuggagcugaacauggaaacacucaauaugaccaugccucuguccuguacaaagaacucuagccaucacuauauccggguuggcaaugagaccgggcuugagcugacacucaccaacacguccauuaucaaucauaaauucugcaaccugucugacgcgcacaagcgcaaucuuuacgaucaugcucugaugagcauucucuccaccuuucaccugagcaucccgaacuucaaucaguaugaagccaugucuugugacuuuaacggaggcaaaauuuccgugcaguacaaucugagccacgccuaugcugucgaugccgcugagcauugcggcacaguggccaacgggguucuccaaaccuucaugagaauggcguggggaggcucuuacaucgcccuggacuccgggugcggaaauugggauuguaucaugacaagcuaccaguaucuuauuauccagaacaccacgugggaagaccacugccaguuuucucgccccuccccuauuggcuaccuggggcuccugagccaaagaacacgggauaucuauauuucccgcagacgccggggaaccuucacauggacccucucugacagcgagggcaacgagacccccggcggguacugucugacacgguggaugcugaucgaagcugagcucaagugcuuuggaaauacggccguggcuaaguguaacgaaaaacaugaugaggaguucugcgacaugcugcgccuuuuugauuucaauaagcaggccauccagagacugaaaucccccgcgcagaugagcauucaacucaucaacaaggccgucaaugcucugauuaacgaccagcuuaucaugaaaaaucaucugcgggauaugaugugcauuccuuauugcaacuacucuaaguauugguaccucaaucacaccuccagcgggcgcacaucucugcccaaguguuggcuggugagcaacggauccuaccucaaugagacccacuucucugacgacaucgaacagcaagccgauaacaugaucacagagaugcugcagaaagaauauauugacagacagggcaagaccccucuugggcugguggaucucuuugucuucagcacguccuuuuaccugaucagcauuuuccugcaccuuaucaaaauuccgacacaucggcacaucguuggaaagcccugcccuaaaccccaucgccucaaucacaugggcauuuguucuugcggccuguauaagcagccuggggugcccaccagauggaaacggugaggacuaguaauaaggaaacuguaugaaugucugugggcaggaagugaagagauccuucuguaaagguuuuuggaauuaugucugcugaauaauaaacuuuuuugaaauaauaaaucugguagaaaaaugagaucuaaaaaaaaaaaaaaaaaaaaaaaaaaaaaaaaaaaaaaaaaaaaaaaaaaaaaaaaaaaaaaaaugcaucccccccccccccccccccccccccccccccaaaggcucuuuucagagccaccagaauu

SEQ ID NO: 6881 - RNA, 1813 nt, Artificial Sequence
  mRNA product Design b-4 comprising derived and/or modified sequence from LASV(KAK-428;Clade n.d. (VII))__ANH09740__GPCstabilized (opt5)
gggagagucccgcagucggcguccagcggcucugcuuguucgugugugugucguugcaggccuuauucaagcuuaccaugggccagaucgugaccuucuuucaagaggucccccacguuauugaagaggugaugaacaucgugcugauugcccucagccugcuugcuauccugaaggggcucuacaauuucgccacaugcggagucauuggccugaucacguuucuucugcucugugggagauccugcucugcgaccuauaaaggacaguacgaacugcagacacuggagcucaacauggaaagccugaauaugaccaugccucuuuccuguacaaagaacaauucucaucacuauauccgggcuggcaacaauaccgggcuggagcucacacugaccaacacgagcauuaucucccauaaauucugcaaucuuucugacgcccacaagaaaaaccuguacgaucauacccucaugagcauuaucacaaccuuucaccuguccauuccgaauuucaaccaguaugaggccaugagcugugacuuuaauggaggcaagaucucuauucaauacaaccugucccacagcuaugcuggcgaugccgcucagcauugcgggacaguggccaauggaguucuccagaccuucaugcgcauggcguggggcgggucuuaccuggcccuugacuccggaugccggggcugggauuguaucaucagcucuuaccaguaucugauuauccaaaacacgacaugggacgaucacugccaguuuucccgccccagcccuauuggguaccucggauucgugucccagaagaccagagacaucuauauuucucggcgccgccggggcacauuuaccuggacccugagcgauuccgaaggccaugacaugcccgggggauacugucucacaagauggaugcugaucgaggcugaucugaaaugcuucggcaacacggccgucgcuaaguguaaugaaaaacacgacgaggaguuuugcgauauguggcgccucuucgacuucaacaagcaggccauccaacggcugaaagcgcccgcccagaugaauauucagcuuaucaacaaggcugugaaugcccugauuaacgaccaacucaugaugaagaaucaccugagagauaucaugugcauuccuuauugcaacuacagcaaauuuugguaucuuaauaacaccacaaccggacggacaucucugccccgcuguuggcucaucuccaauggcagcuaccugaacgagacccauuucucugacgauaucgaacagcaggcugacaauaugauuacggagaugcugcagaaggaauacauggauagacaagggaaaacaccucucggacugguugaccuuuuuguguucagcaccuccuuuuaucugaucaccauuuuccuccaccuggucaagaucccgacacaucggcacauugugggcaaacccugcccuaagccccaucgccugaaccacaugggcaucuguucuugcgggcuuuacaaacagccuggagugcccgucagauggaagcggugaggacuaguaauaaggaaacuguaugaaugucugugggcaggaagugaagagauccuucuguaaagguuuuuggaauuaugucugcugaauaauaaacuuuuuugaaauaauaaaucugguagaaaaaugagaucuaaaaaaaaaaaaaaaaaaaaaaaaaaaaaaaaaaaaaaaaaaaaaaaaaaaaaaaaaaaaaaaaugcaucccccccccccccccccccccccccccccccaaaggcucuuuucagagccaccagaauu

SEQ ID NO: 6882 - RNA, 1813 nt, Artificial Sequence; identical to SEQ ID NO: 6876
  mRNA product Design b-4 comprising derived and/or modified sequence from LASV(Pinneo-NIG-1969;Clade I)__AIT17836__GPCstabilized (opt5)

SEQ ID NO: 6883 - RNA, 1813 nt, Artificial Sequence
  mRNA product Design b-4 comprising derived and/or modified sequence from LASV(ISTH0009-NIG-2011;Clade II)__AIT17404__GPCstabilized (opt5)
gggagagucccgcagucggcguccagcggcucugcuuguucgugugugugucguugcaggccuuauucaagcuuaccaugggccagaucauuaccuucuuucaagaggugccccacgucaucgaagagguuaugaacauugugcugaucgcccucagccugcuugcuauucugaaggggaucuacaauguggccacaugcggacucuucggccuggucuccuuucuucugcucugugggagaucuugcagcacgaccuauaaaggaguguacgaacugcagacacuggagcucgacauggcgucccugaacaugaccaugccucuuucuuguacaaagaauaacagccaucacuauaucaugguuggcaaugaaaccgggcuggagcucacacugaccaacacguccauuaucaaucauaaauucugcaaccuuucugaugcucacaagaaaaaucuguacgaccaugcccucaugagcauuaucuccaccuuucaccugagcauuccgaacuucaaucaguaugaggccaugucuugugauuuuaacggaggcaagaucuccgugcaguacaaucugagccacgcuuaugccgucgacgcugccaaccauugcggcacaauugcgaauggggugcuccaaaccuucaugcggauggccuggggaggcucuuacaucgcucuggauuccgggugcggaagcugggacuguaucaugacaucuuaccaguaucuuauuauccagaacaccacgugggaagaucacugccaguuuucccgccccagcccuauuggcuaccuggggcuccugucccaaagaacacgggacaucuauauuucucgcagacgccggggaaccuucacauggacccucagcgauuccgagggcaacgaaacccccggcggguacugucugacacgguggaugcugaucgaggccgagcucaaaugcuuuggaaauacggcuguugccaaguguaacgaaaaacaugacgaggaguucugcgauaugcugcgccuuuuugacuucaauaagcaggcgaucagacggcugaaaacccccgcccagaugagcauucagcucaucaacaaggcugugaaugcccugauuaacgaucaacuuaucaugaagaaucaucugcgcgacauuaugugcaucccuuauugcaacuacucuaaauauugguaccucaaucacacagucaccgggaagacaucccugcccagauguuggcuggugagcaacggaucuuaccucaaugaaacccacuucagcgacgauaucgagcagcaggcugacaacaugauuacggagcugcuucaaaaagaauauauggaucggcagggcaagacaccucuggggcucguggaccuguuugucuucuccaccucuuuuuaccugaucagcauuuuccuucaccucaucaaaauuccgacccaucgccacaucacaggaaagcccugcccuaaaccccauagacugaaucacaugggcauuuguuccugcggccuguauaagcacccugggguucccgugaaguggaaacggugaggacuaguaauaaggaaacuguaugaaugucugugggcaggaagugaagagauccuucuguaaagguuuuuggaauuaugucugcugaauaauaaacuuuuuugaaauaauaaaucugguagaaaaaugagaucuaaaaaaaaaaaaaaaaaaaaaaaaaaaaaaaaaaaaaaaaaaaaaaaaaaaaaaaaaaaaaaaaugcaucccccccccccccccccccccccccccccccaaaggcucuuuucagagccaccagaauu

SEQ ID NO: 6884 - RNA, 1813 nt, Artificial Sequence
  mRNA product Design b-4 comprising derived and/or modified sequence from LASV(ISTH2010-NIG-2012;Clade II)__AIT17482__GPCstabilized (opt5)
gggagagucccgcagucggcguccagcggcucugcuuguucgugugugugucguugcaggccuuauucaagcuuaccaugggccagaucauuaccuucuuucaagaggugccccacgucaucgaagagguuaugaacauugugcugaucgcccucagccugcuugcuauucugaaggggaucuacaauguggccacaugcggacucuucggccuggucuccuuucuucugcucugugggagaucuugcagcacgaccuauaaaggaguguacgaacugcagacacuggagcucgacauggcgucccugaacaugaccaugccucuuucuuguacaaagaauaacagccaucacuauaucaugguuggcaaugaaaccgggcuggagcucacacugaccaacacguccauuaucaaucauaaauucugcaaccuuucugaugcucacaagaaaaaucuguacgaccaugcccucaugagcauuaucuccaccuuucaccugagcauuccgaacuucaaucaguaugaggccaugucuugugauuuuaacggaggcaagaucuccgugcaguacaaucugagccacgcuuaugccgucgacgcugccaaccauugcggcacaauugcgaauggggugcuccaaaccuucaugcggauggccuggggaggcucuuacaucgcucuggauuccgggugcggaagcugggacuguaucaugacaucuuaccaguaucuuauuauccagaacauuaccugggaagaucacugccaguuuucccgccccagcccuaucggcuaccuggggcuccugucccaaagaacgcgggacauuuauaucucucgcagacgccggggaacauucaccuggacacucagcgauuccgagggcaacgaaacccccggcggguacugucugacccgguggaugcugaucgaggccgagcucaaaugcuuuggaaauacagcuguugccaaguguaacgaaaaacaugacgaggaguucugcgauaugcugcgccuuuuugacuucaauaagcaggcgauuagacggcugaaaacgcccgcccagaugagcauccagcucauuaacaaggcugugaaugcccugaucaacgaucaacuuauuaugaagaaucaucugcgcgacaucaugugcaucccuuauugcaacuacucuaaauauugguaccucaaucacaccgucacagggaagaccucccugcccagauguuggcuggugagcaacggaucuuaccucaaugaaacacacuucagcgacgauauugagcagcaggcugacaacaugaucaccgagcugcuucaaaaagaauauauugaucggcagggcaagacgccucuggggcucguggaccuguuugucuucuccacaucuuuuuaccugaucagcauuuuccuucaccucguuaaaaucccgacccaucgccacguggugggaaagcccugcccuaaaccccauagacugaaucacaugggcauuuguuccugcggccuguauaagcacccugggguccccgugaaguggaaacggugaggacuaguaauaaggaaacuguaugaaugucugugggcaggaagugaagagauccuucuguaaagguuuuuggaauuaugucugcugaauaauaaacuuuuuugaaauaauaaaucugguagaaaaaugagaucuaaaaaaaaaaaaaaaaaaaaaaaaaaaaaaaaaaaaaaaaaaaaaaaaaaaaaaaaaaaaaaaaugcaucccccccccccccccccccccccccccccccaaaggcucuuuucagagccaccagaauu

SEQ ID NO: 6885 - RNA, 1813 nt, Artificial Sequence
  mRNA product Design b-4 comprising derived and/or modified sequence from LASV(Lassa virus/H.sapiens-wt/NGA/2015/ISTH_0543;Clade II)__AVO03639__GPCstabilized (opt5)
gggagagucccgcagucggcguccagcggcucugcuuguucgugugugugucguugcaggccuuauucaagcuuaccaugggccagaucauuaccuucuuucaagaggugccccacgucaucgaagagguuaugaacauugugcugaucgcccucagccugcuugcuauucugaaggggaucuacaauguggccacaugcggacucuucggccuggucuccuuucuucugcucugugggagaucuugcagcacgaccuauaaaggaguguacgaacugcagacacuggagcucgacauggcgaaccugaauaugaccaugccucuuuccuguacaaagaacaauucucaucacuauaucaugguuggcaacgaaaccgggcuggagcucacacugaccaauacgagcauuaucaaccauaaauucugcaaucuuuccgaugcucacaagaaaaaccuguacgaccaugcccucaugucuauuaucagcaccuuucaccuguccauuccgaauuucaaccaguaugaggccaugagcugugauuuuaauggaggcaagaucucugugcaguacaaccugucccacacauaugcugucgacgccgcuaaucauugcggcaccauugccaacggggugcuccaaacauucaugcggauggcguggggaggcagcuacaucgcccuggauucugggugcggauccugggacuguaucaugaccagcuaccaguaucuuguuauucagaacacgacaugggaagaucacugccaguuuucucgccccuccccuaucggcuaccuggggcuccugagccaaagaacccgggacauuuauaucucccgcagacgccggggaacauucaccuggacccucucugauagcgagggcaaugaaacacccggcggguacugucugacgcgguggaugcugauugaggcugagcucaaaugcuuuggaaacaccgccguggcuaaguguaaugaaaaacaugacgaggaguucugcgauaugcugcgccuuuuugacuucaacaagcaggccaucagacggcugaaaacacccgcgcagauguccauccagcucauuaauaaggccgucaacgcucugaucaaugaucaacuuauuaugaagaaccaucugcgcgacaucaugugcauuccuuauugcaauuacagcaaauauugguaccucaaccacaccgugacagggaagaccucucugcccagauguuggcugguguccaauggaagcuaccucaacgaaacgcacuucucugacgauaucgagcagcaggccgacaauaugaucacagagcugcuucaaaaagaauauauugaucggcagggcaagaccccucuggggcucgucgaccuguuuguuuucagcaccuccuuuuaccugaucucuauuuuccuucaccucgugaaaaucccgacacaucgccacauuaccggaaagcccugcccuaaaccccauagacugaaccacaugggcaucuguagcugcggccuguauaagcacccuggggugcccgucaaguggaaacggugaggacuaguaauaaggaaacuguaugaaugucugugggcaggaagugaagagauccuucuguaaagguuuuuggaauuaugucugcugaauaauaaacuuuuuugaaauaauaaaucugguagaaaaaugagaucuaaaaaaaaaaaaaaaaaaaaaaaaaaaaaaaaaaaaaaaaaaaaaaaaaaaaaaaaaaaaaaaaugcaucccccccccccccccccccccccccccccccaaaggcucuuuucagagccaccagaauu

SEQ ID NO: 6886 - RNA, 1813 nt, Artificial Sequence
  mRNA product Design b-4 comprising derived and/or modified sequence from LASV(Lassa virus/H.sapiens-wt/NGA/2016/ISTH_0009;Clade II)__AVO03571__GPCstabilized (opt5)
gggagagucccgcagucggcguccagcggcucugcuuguucgugugugugucguugcaggccuuauucaagcuuaccaugggccagaucauuaccuucuuucaagaggugccccacgucaucgaagagguuaugaacauugugcugaucgcccucagccugcuugcuauucugaaggggaucuacaauguggccacaugcggacuccugggccuugucuccuuccugcuccugugugggagaucuugcagcacgaccuauaaaggaguguacgaacugcagacacucgagcuggacauggcgucccuuaacaugaccaugccucugucuuguacaaagaauaacagccaucacuauaucaugguuggcaaugaaaccgggcucgagcugacacuuaccaacacguccauuaucaaucauaaauuuugcaaccugucugaugcucacaagaaaaaucucuacgaccaugcccugaugagcauuaucuccaccuuccaccugagcauuccgaacuuuaaucaguaugaggccaugucuugugauuucaacggaggccggaucuccgugcaguacaaucucagccacucuuaugcugucgacgccgcuaaccauugcggcacaauugccaauggggugcugcaaaccuuuaugcgcauggcguggggaggcuccuacaucgcccuugauagcgggugcggaucuugggacuguaucaugacauccuaccaguaucugauuauccagaacaccacgugggaagaucacugccaguucagcagacccuccccuauuggcuaccucgggcugcuuucucaacggacacgcgacaucuauauuagcagacggcgccggggaaccuuuacauggacccuguccgauagcgagggcaacgaaacccccggcggguacugucugacacgcuggaugcucaucgaggcugagcugaagugcuucggaaauacggccguugcuaaauguaacgaaaagcaugacgaggaauuuugcgauaugcuuagacuguucgacuuuaauaaacaggccauccggcgccucaagacccccgcgcagaugucuauucagcugaucaacaaagccgugaaugcucuuauuaacgaucaacugaucaugaagaaucaccucagagacauuaugugcaucccuuauugcaacuacuccaaguauugguaccugaaucacacagucaccgggaaaacaagccugccccgguguuggcucgugucuaacggaagcuaccugaaugaaacccauuucuccgacgauaucgagcagcaggccgacaacaugauuacggagcuucugcaaaaggaauauaucgaucgccagggcaaaacaccucucgggcugguggaccuguucgucuuuucuaccagcuucuaccuuauuuccaucuuucuccaccugguuaagauuccgacccauagacacaucacaggaaaacccugcccuaagccccaucggcugaaucacaugggcauuuguagcugcggccucuauaaccacccuggggugcccgugaaauggaagcgcugaggacuaguaauaaggaaacuguaugaaugucugugggcaggaagugaagagauccuucuguaaagguuuuuggaauuaugucugcugaauaauaaacuuuuuugaaauaauaaaucugguagaaaaaugagaucuaaaaaaaaaaaaaaaaaaaaaaaaaaaaaaaaaaaaaaaaaaaaaaaaaaaaaaaaaaaaaaaaugcaucccccccccccccccccccccccccccccccaaaggcucuuuucagagccaccagaauu

SEQ ID NO: 6887 - RNA, 1813 nt, Artificial Sequence
  mRNA product Design b-4 comprising derived and/or modified sequence from LASV(Lassa virus/H.sapiens-wt/NGA/2016/ISTH_0017;Clade II)__AVO03567__GPCstabilized (opt5)
gggagagucccgcagucggcguccagcggcucugcuuguucgugugugugucguugcaggccuuauucaagcuuaccaugggccagaucauuaccuucuuucaagaggugccccacgucaucgaagagguuaugaacauugugcugaucgcccucagccugcuugcuauucugaaggggaucuacaauguggccacaugcggacucuucggccuggucuccuuucuucugcucugugggagaucuugcagcacgaccuauaaaggaguguacgaacugcagacacuggagcucgacauggcgucccugaacaugaccaugccucuuucuuguacaaagaauaacagccaucacuauaucaugguuggcaaugaaaccgggcuggagcucacacugaccaacacguccauuaucaaucauaaauucugcaaccuuucugaugcucacaagaaaaaucuguacgaccaugcccucaugagcauuaucuccaccuuucaccugagcauuccgaacuucaaucaguaugaggccaugucuugugauuuuaacggaggcaagaucuccgugcaguacaaucugagccacacauaugcuauugacgccgcuaaccauugcggcaccaucgccaaugggguccuccaaacauucaugcggauggcguggggaggcucuuacaucgcccuggauuccgggugcggaagcugggacuguauuaugaccucuuaccaguaucuuaucauucagaacacgacaugggaagaucacugccaguuuucccgccccagcccuaucggcuaccuggggcuccugucccaaagaacccgggacauuuauaucucucgcagacgccggggaacauucaccuggacccucagcgauuccgagggcaacgaaacacccggcggguacugucugacgcgguggaugcugaucgaggcugagcucaaaugcuuuggaaauaccgccguggcuaaguguaacgaaaaacaugacgaggaguucugcgauaugcugcgccuuuuugacuucaauaagcaggccauuagacggcugaaaacacccgcgcagaugagcauccagcucauuaacaaggccguuaaugcucugaucaacgaucaacuuauuaugaagaaucaucugcgcgacaucaugugcaucccuuauugcaacuacucuaaauauugguaccucaaucacaccgugacagggaagaccucccugcccagauguuggcuggucagcaacggaucuuaccucaaugaaacgcacuucagcgacgauauugagcagcaggccgacaacaugaucacagagcugcuucaaaaagaauauauggaucggcagggcaagaccccucuggggcucguggaccuguuuguguucuccaccucuuuuuaccugauuagcaucuuccuucaccucguccgcauuccgacacauagacacguuaucggaaaacccugcccuaagccccaucggcugaaucacaugggcauuuguuccugcggccuguauaaacacccuggggugcccgugaaguggaagcgcugaggacuaguaauaaggaaacuguaugaaugucugugggcaggaagugaagagauccuucuguaaagguuuuuggaauuaugucugcugaauaauaaacuuuuuugaaauaauaaaucugguagaaaaaugagaucuaaaaaaaaaaaaaaaaaaaaaaaaaaaaaaaaaaaaaaaaaaaaaaaaaaaaaaaaaaaaaaaaugcaucccccccccccccccccccccccccccccccaaaggcucuuuucagagccaccagaauu

SEQ ID NO: 6888 - RNA, 1813 nt, Artificial Sequence
  mRNA product Design b-4 comprising derived and/or modified sequence from LASV(Lassa virus/H.sapiens-wt/NGA/2018/ISTH_0959;Clade II)__AVV65099__GPCstabilized (opt5)
gggagagucccgcagucggcguccagcggcucugcuuguucgugugugugucguugcaggccuuauucaagcuuaccaugggccagaucauuaccuucuuucaagaggugccccacgucaucgaagagguuaugaacauugugcugaucgcccucagccugcuugcuauucugaaggggaucuacaauguggucacaugcggacucuucggccugguguccuuucuucugcucugugggagaucuugcagcacgaccuauaaaggaguuuacgaacugcagacacuggagcucgacauggccucccugaacaugaccaugccucuuucuuguacaaagaauaacagccaucacuauaucauggugggcaaugaaaccgggcuggagcucacacugaccaacacguccauuaucaaucauaaauucugcaaccuuucugaugcgcacaagaaaaaucuguacgaccaugcucucaugagcauuaucuccaccuuucaccugagcauuccgaacuucaaucaguaugaggccaugucuugugauuuuaacggaggcaagaucuccguccaguacaaucugagccacgccuaugcuauugacgccgcuaaccauugcggcacaaucgccaauggggugcuccaaaccuucaugcggauggcguggggaggcucuuacaucgcccuggauuccgggugcggaagcugggacuguauuaugacaucuuaccaguaucuuaucauucagaacaccacgugggaagaucacugccaguuuucccgccccagcccuaucggcuaccuggggcuccugucccaaagaacacgggacauuuauaucucucgcagacgccggggaaccuucacauggacccucagcgauuccgagggcaacgaaacccccggcggguacugucugacacgguggaugcugaucgaggcugagcucaaaugcuuuggaaauacggccguugcuaaguguaacgaaaaacaugacgaggaguucugcgauaugcugcgccuuuuugacuucaauaagcaggccauuagacggcugaaaacccccgcgcagaugagcauccagcucauuaacaaggccgugaaugcucugaucaacgaucaacuuauuaugaagaaucaucugcgcgacaucaugugcaucccuuauugcaacuacucuaaauauugguaccucaaucacacagucaccgggaagacaucccugcccagauguuggcuggugagcaacggaucuuaccucaaugaaacccacuucagcgacgauauugagcagcaggccgacaacaugaucacggagcugcuucaaaaagaauauauugaucggcagggcaagacaccucuggggcucguggaccuguuugucuucuccaccucuuuuuaccugaucagcauuuuccuucaccucguuaaaaucccgacccaucgccacgugauuggaaagcccugcccuaaaccccauagacugaaucacaugggcaucuguuccugcggccuguauaagcacccuggggugcccgucaaguggaaacggugaggacuaguaauaaggaaacuguaugaaugucugugggcaggaagugaagagauccuucuguaaagguuuuuggaauuaugucugcugaauaauaaacuuuuuugaaauaauaaaucugguagaaaaaugagaucuaaaaaaaaaaaaaaaaaaaaaaaaaaaaaaaaaaaaaaaaaaaaaaaaaaaaaaaaaaaaaaaaugcaucccccccccccccccccccccccccccccccaaaggcucuuuucagagccaccagaauu

SEQ ID NO: 6889 - RNA, 1813 nt, Artificial Sequence
  mRNA product Design b-4 comprising derived and/or modified sequence from LASV(LASV003-NIG-2008;Clade II)__AIT17580__GPCstabilized (opt5)
gggagagucccgcagucggcguccagcggcucugcuuguucgugugugugucguugcaggccuuauucaagcuuaccaugggccagaucauuaccuucuuucaagaggugccccacgucaucgaagagguuaugaacauugugcugaucgcccucagccugcuugcuauucugaaggggaucuacaauguggccacaugcggacucuucggccuggucuccuuucuucugcucugugggagaucuugcagcacgaccuauaaaggaguguacgaacugcagacacuggagcucgacauggcgucccugaacaugaccaugccucuuucuuguacaaagaauaacagccaucacuauaucaugguuggcaaugaaaccgggcuggagcucacacugaccaacacguccauuaucaaucauaaauucugcaaccuuucugaugcucacaagaaaaaucuguacgaccaugcccucaugagcauuaucuccaccuuucaccugagcauuccgaacuucaaucaguaugaggccaugucuugugauuuuaacggaggcaagaucuccgugcaguacaaucugagccacacauaugcugucgacgccgcuaaccauugcggcaccauugccaauggggugcuccaaacauucaugcggauggcguggggaggcucuuacaucgcccuggauuccgggugcggaagcugggacuguaucaugaccucuuaccaguaucuuauuauccagaacacgacaugggaagaucacugccaguuuucccgccccagcccuauuggcuaccuggggcuccugucccaaagaacccgggacaucuauauuucucgcagacgccggggaacauucaccuggacccucagcgauuccgagagcaacgaaacacccggcggcuacugucugacgcgguggaugcugaucgaggcugagcucaaaugcuuugggaauaccgccguugcuaaguguaacgaaaaacaugacgaggaguucugcgauaugcugcgccuuuuugacuucaauaagcaggccaucagacggcugaaagcgcccgcccagaugucuauucagcucaucaacaaggcugugaaugcccugauuaacgaucaacuuaucaugaagaaucaucugcgcgacauuaugugcaucccuuauugcaacuacuccaaauauugguaccucaaucacacagucaccggcagaacaagccugccccgguguuggcuggugucuaacgggagcuaccucaaugaaacccacuucuccgacgauaucgagcagcaggcugacaacaugauuacggagcugcuucaaaaggaauauauggaucgccagggaaaaacaccucugggccucguggaccuguuugucuucucuaccagcuuuuaccugaucuccauuuuccuucaccucguuaagaucccgacccauagacacgugauugggaaacccugcccuaagccccaucggcugaaucacaugggaaucuguagcugcggccuguauaaacacccuggcgugcccgucaaguggaagcgcugaggacuaguaauaaggaaacuguaugaaugucugugggcaggaagugaagagauccuucuguaaagguuuuuggaauuaugucugcugaauaauaaacuuuuuugaaauaauaaaucugguagaaaaaugagaucuaaaaaaaaaaaaaaaaaaaaaaaaaaaaaaaaaaaaaaaaaaaaaaaaaaaaaaaaaaaaaaaaugcaucccccccccccccccccccccccccccccccaaaggcucuuuucagagccaccagaauu

SEQ ID NO: 6890 - RNA, 1813 nt, Artificial Sequence
  mRNA product Design b-4 comprising derived and/or modified sequence from LASV(LASV035-NIG-2009;Clade II)__AIT17588__GPCstabilized (opt5)
gggagagucccgcagucggcguccagcggcucugcuuguucgugugugugucguugcaggccuuauucaagcuuaccaugggccagaucauuaccuucuuucaagaggugccccacgucaucgaagagguuaugaacauugugcugaucgcccucagccugcuugcuauucugaaggggaucuacaauguggccacaugcggacucuucggccuggucuccuuucuucugcucugugggagaucuugcagcacgaccuauaaaggaguguacgaacugcagacacuggagcucgacauggcgucccugaacaugaccaugccucuuucuuguacaaagaauaacagccaucacuauaucaugguuggcaaugaaaccgggcuggagcucacacugaccaacacguccauuaucaaucauaaauucugcaaccuuucugaugcucacaagaaaaaucuguacgaccaugcccucaugagcauuaucuccaccuuucaccugagcauuccgaacuucaaucaguaugaggccaugucuugugauuuuaacggaggcaagaucuccgugcaguacaaucugagccacgcuuaugccgucgacgcugccaaccauugcggcacaauugcgaauggggugcuccaaaccuucaugcggauggccuggggaggcucuuacaucgcucuggauuccgggugcggaagcugggacuguaucaugacaucuuaccaguaucuuauuauccagaacaccacgugggaagaucacugccaguuuucccgccccagcccuauuggcuaccuggggcuccugucccaaagaacacgggacaucuauauuucucgcagacgccggggaaccuucacauggacccucagcgauuccgagggcaacgaaacccccggcggguacugucugacacgguggaugcugaucgaggccgagcucaaaugcuuuggaaauacggcuguugccaaguguaacgaaaaacaugacgaggaguucugcgauaugcugcgccuuuuugacuucaauaagcaggcgaucagacggcugaaagcccccgcucagaugagcauucagcucaucaacaaggccgugaaugcucugauuaacgaucaacuuaucaugaagaaucaucugcgcgacauuaugugcaucccuuauugcaacuacucuaaauauugguaccucaaucacaccgucacagggaagaccucccugcccagauguuggcuggugagcaacggaucuuaccucaaugaaacacacuucagcgacgauaucgagcagcaggccgacaacaugauuaccgagcugcuucaaaaagaauauaucgaucggcagggcaagacgccucuggggcucguggaccuguuugucuucuccacaucuuuuuaccugauuagcaucuuccuucaccucguuaaaauuccgacccaucgccacgugaucggaaagcccugcccuaaaccccauagacugaaucacaugggcauuuguuccugcggccuguauaagcacccuggggugcccgucaaguggaaacggugaggacuaguaauaaggaaacuguaugaaugucugugggcaggaagugaagagauccuucuguaaagguuuuuggaauuaugucugcugaauaauaaacuuuuuugaaauaauaaaucugguagaaaaaugagaucuaaaaaaaaaaaaaaaaaaaaaaaaaaaaaaaaaaaaaaaaaaaaaaaaaaaaaaaaaaaaaaaaugcaucccccccccccccccccccccccccccccccaaaggcucuuuucagagccaccagaauu

SEQ ID NO: 6891 - RNA, 1813 nt, Artificial Sequence
  mRNA product Design b-4 comprising derived and/or modified sequence from LASV(LASV1000-NIG-2009;Clade II)__AIT17782__GPCstabilized (opt5)
gggagagucccgcagucggcguccagcggcucugcuuguucgugugugugucguugcaggccuuauucaagcuuaccaugggccagaucauuaccuucuuucaagaggugccccacgucaucgaagagguuaugaacauugugcugaucgcccucagccugcuugcuauucugaaggggaucuacaauguggccacaugcggacucuucggccuggucuccuuucuucugcucugugggagaucuugcagcacgaccuauaaaggaguguacgaacugcagacacuggagcucgacauggcgucccugaacaugaccaugccucuuucuuguacaaagaauaacagccaucacuauaucaugguuggcaaugaaaccgggcuggagcucacacugaccaacacguccauuaucaaucauaaauucugcaaccuuucugaugcucacaagaaaaaucuguacgaccaugcccucaugagcauuaucuccaccuuucaccugagcauuccgaacuucaaucaguaugaggccaugucuugugauuuuaacggaggcaagaucuccgugcaguacaaucugagccacacauaugcugucgacgccgcuaaccauugcggcaccauugccaauggggugcuccaaacauucaugcggauggcguggggaggcucuuacaucgcccuggauuccgggugcggaagcugggacuguaucaugaccucuuaccaguaucuuauuauccagaacacgacaugggaagaucacugccaguuuucccgccccagcccuauuggcuaccuggggcuccugucccaaagaacccgggacaucuauauuucucgcagacgccggggaacauucaccuggacccucagcgauuccgagggcaacgaaacacccggcggguacugucugacgcgguggaugcugaucgaggcugagcucaaaugcuuuggaaauaccgccguugcuaaguguaacgaaaaacaugacgaggaguucugcgauaugcugcgccuuuuugacuucaauaagcaggccaucaaaagacugaagacacccgcgcagaugagcauucagcucaucaacaaggccgugaaugcucugauuaacgaucaacuuaucaugaaaaaucaucugcgggacauuaugugcaucccuuauugcaacuacucuaaguauugguaccucaaucacaccgucacagggaaaaccucccugccccgcuguuggcuggugagcaacggaucuuaccucaaugaaacgcacuucagcgacgauaucgagcagcaggccgacaacaugauuacagagcugcuucaaaaggaauauaucgauagacagggcaaaaccccucuggggcucguggaccuguuugucuucuccaccucuuuuuaccugauuagcaucuuccuucaccucguuaagauuccgacacaucggcacguggugggaaaacccugcccuaagccccaucgccugaaucacaugggcaucuguuccugcggccuguauaagcacccugggguccccgugaaauggaagagaugaggacuaguaauaaggaaacuguaugaaugucugugggcaggaagugaagagauccuucuguaaagguuuuuggaauuaugucugcugaauaauaaacuuuuuugaaauaauaaaucugguagaaaaaugagaucuaaaaaaaaaaaaaaaaaaaaaaaaaaaaaaaaaaaaaaaaaaaaaaaaaaaaaaaaaaaaaaaaugcaucccccccccccccccccccccccccccccccaaaggcucuuuucagagccaccagaauu

SEQ ID NO: 6892 - RNA, 1813 nt, Artificial Sequence
  mRNA product Design b-4 comprising derived and/or modified sequence from LASV(LASV221-NIG-2010;Clade II)__AIT17624__GPCstabilized (opt5)
gggagagucccgcagucggcguccagcggcucugcuuguucgugugugugucguugcaggccuuauucaagcuuaccaugggccagaucauuaccuucuuucaagaggugccccacgucaucgaagagguuaugaacauugugcugaucgcccucagccugcuugcuauucugaaggggaucuacaauguggccacaugcggacucuucggccuggucuccuuucuucugcucugugggagaucuugcagcacgaccuauaaaggaguguacgaacugcagacacuggagcucgacauggcgucccugaacaugaccaugccucuuucuuguacaaagaauaacagccaucacuauaucaugguuggcaaugaaaccgggcuggagcucacacugaccaacacguccauuaucaaucauaaauucugcaaccuuucugaugcucacaagaaaaaucuguacgaccaugcccucaugagcauuaucuccaccuuucaccugagcauuccgaacuucaaucaguaugaggccaugucuugugauuuuaacggaggcaagaucuccgugcaguacaaucugagccacacauaugcuauugacgccgcuaaccauugcggcaccaucgccaaugggguccuccaaacauucaugcggauggcguggggaggcucuuacaucgcccuggauuccgggugcggaagcugggacuguauuaugaccucuuaccaguaucuuaucauucagaacacgacaugggaagaucacugccaguuuucccgccccagcccuaucggcuaccuggggcuccugucccaaagaacccgggacauuuauaucucucgcagacgccggggaacauucaccuggacccucagcgauuccgagggcaacgaaacacccggcggguacugucugacgcgguggaugcugaucgaggcugagcucaaaugcuuuggaaauaccgccguggcuaaguguaacgaaaaacaugacgaggaguucugcgauaugcugcgccuuuuugacuucaauaagcaggccauuagacggcugaaaacacccgcgcagaugagcauccagcucauuaacaaggccguuaaugcucugaucaacgaucaacuuauuaugaagaaucaucugcgcgacaucaugugcaucccuuauugcaacuacucuaaauauugguaccucaaucacaccgugacagggaagaccucccugcccagauguuggcuggucagcaacggaucuuaccucaaugaaacgcacuucagcgacgauauugagcagcaggccgacaacaugaucacagagaugcugcaaaaagaauauauggaucggcagggcaagaccccucuugggcugguggaccucuuuguguucuccaccucuuuuuaccugauuagcaucuuccugcaccuugucaaaauuccgacacaucgccacguuaucggaaagcccugcccuaaaccccauagacucaaucacaugggcauuuguuccugcggccuguauaagcacccuggggugcccgugaaguggaaacggugaggacuaguaauaaggaaacuguaugaaugucugugggcaggaagugaagagauccuucuguaaagguuuuuggaauuaugucugcugaauaauaaacuuuuuugaaauaauaaaucugguagaaaaaugagaucuaaaaaaaaaaaaaaaaaaaaaaaaaaaaaaaaaaaaaaaaaaaaaaaaaaaaaaaaaaaaaaaaugcaucccccccccccccccccccccccccccccccaaaggcucuuuucagagccaccagaauu

SEQ ID NO: 6893 - RNA, 1813 nt, Artificial Sequence
  mRNA product Design b-4 comprising derived and/or modified sequence from LASV(LASV237-NIG-2010;Clade II)__AIT17638__GPCstabilized (opt5)
gggagagucccgcagucggcguccagcggcucugcuuguucgugugugugucguugcaggccuuauucaagcuuaccaugggccagaucauuaccuucuuucaagaggugccccacgucaucgaagagguuaugaacauugugcugaucgcccucagccugcuugcuauucugaaggggaucuacaauguggccacaugcggacucuucggccuggucuccuuucuucugcucugugggagaucuugcagcacgaccuauaaaggaguguacgaacugcagacacuggagcucgacauggcgucccugaacaugaccaugccucuuucuuguacaaagaauaacagccaucacuauaucaugguuggcaaugaaaccgggcuggagcucacacugaccaacacguccauuaucaaucauaaauucugcaaccuuucugaugcucacaagaaagaccuguacgaucaugcccucaugagcauuaucuccaccuuucaccugagcauuccgaauuucaaccaguaugaggccaugucuugugacuuuaauggaggcaagaucuccgugcaguacaaccugagccacacauaugcugucgaugccgcuaaucauugcggcaccauugccaacggggugcuccaaacauucaugcggauggcguggggaggcucuuacaucgcccuggacuccgggugcggaagcugggauuguaucaugaccucuuaccaguaucuuauuauccagaauacgacaugggaagaccacugccaguuuucccgccccagcccuauuggcuaccuggggcuccugucccaaagaacccgggauaucuauauuucucgcagacgccggggaacauucaccuggacccucagcgacuccgagggcaacgaaacacccggcggguacugucugacgcgguggaugcugaucgaggcugagcucaaaugcuuuggaaacaccgccguugcuaaguguaaugaaaaacaugaugaggaguucugcgacaugcugcgccuuuuugauuucaacaagcaggccaucagacggcugaaaacacccgcgcagaugagcauucagcucaucaauaaggccgugaacgcucugauuaaugaccaacuuaucaugaagaaccaucugcgcgacauuaugugcaucccuuauugcaauuacucuaaauauugguaccucaaccacaccgucacagggaagaccucccugcccagauguuggcuggugagcaauggaucuuaccucaacgaaacgcacuucagcgaugacaucgagcagcaggccgauaauaugauuacagagcugcuucaaaaagaauauauggaccggcagggcaagaccccucuggggcucguggaucuguuugucuucuccaccucuuuuuaccugaucagcauuuuccuucaccucaucaaaauuccgacacaucgccacaucaccggaaagcccugcccuaaaccccauagacugaaccacaugggcauuuguuccugcggccuguauaagcacccugggguucccgugaaguggaaacggugaggacuaguaauaaggaaacuguaugaaugucugugggcaggaagugaagagauccuucuguaaagguuuuuggaauuaugucugcugaauaauaaacuuuuuugaaauaauaaaucugguagaaaaaugagaucuaaaaaaaaaaaaaaaaaaaaaaaaaaaaaaaaaaaaaaaaaaaaaaaaaaaaaaaaaaaaaaaaugcaucccccccccccccccccccccccccccccccaaaggcucuuuucagagccaccagaauu

SEQ ID NO: 6894 - RNA, 1813 nt, Artificial Sequence
  mRNA product Design b-4 comprising derived and/or modified sequence from LASV(LASV253-NIG-2011;Clade II)__AIT17670__GPCstabilized (opt5)
gggagagucccgcagucggcguccagcggcucugcuuguucgugugugugucguugcaggccuuauucaagcuuaccaugggccagaucauuaccuucuuucaagaggugccccacgucaucgaagagguuaugaacauugugcugaucgcccucagccugcuugcuauucugaaggggaucuacaauguggccacaugcggacucuucggccuggucuccuuucuucugcucugugggagaucuugcagcacgaccuauaaaggaguguacgaacugcagacacuggagcucgacauggcgucccugaacaugaccaugccucuuucuuguacaaagaauaacagccaucacuauaucaugguuggcaaugaaaccgggcuggagcucacacugaccaacacguccauuaucaaucauaaauucugcaaccuuucugaugcucacaagaaaaaucuguacgaccaugcccucaugagcauuaucuccaccuuucaccugagcauuccgaacuucaaucaguaugaggccaugucuugugauuuuaacggaggcaagaucuccgugcaguacaaucugagccacacauaugcugucgacgccgcuaaccauugcggcaccauugccaauggggugcuccaaacauucaugcggauggcguggggaggcucuuacaucgcccuggauuccgggugcggaagcugggacuguaucaugaccucuuaccaguaucuuauuauccagaacacgacaugggaagaucacugccaguuuucccgccccagcccuauuggcuaccuggggcuccugucccaaagaacccgggacaucuauauuucucgcagacgccggggaacauucaccuggacccucagcgauuccgagggcaacgaaacacccggcggguacugucugacgcgguggaugcugaucgaggcugagcucaaaugcuuuggaaauaccgccguugcuaaguguaacgaaaaacaugacgaggaguucugcgauaugcugcgccuuuuugacuucaauaagcaggccaucagacggcugaaagcgcccgcccagaugagcauucagcucaucaacaaggcugugaaugcccugauuaacgaucaacuuaucaugaagaaucaucugcgcgacauuaugugcaucccuuauugcaacuacucuaaauauugguaccucaaucacacagucaccgggagaacaucccugccccgguguuggcuggugagcaacggaucuuaccucaaugaaacccacuucagcgacgauaucgagcagcaggcugacaacaugauuacggagcugcuucaaaaggaauauaucgaucgccagggcaaaacaccucuggggcucguggaccuguuugucuucuccaccucuuuuuaccugauuagcaucuuccuucaccucguuaagauuccgacccauagacacaucauuggaaaacccugcccuaagccccaucggcugaaucacaugggcaucuguuccugcggccuguauaaacacccuggggugcccgugaaguggaagcgcugaggacuaguaauaaggaaacuguaugaaugucugugggcaggaagugaagagauccuucuguaaagguuuuuggaauuaugucugcugaauaauaaacuuuuuugaaauaauaaaucugguagaaaaaugagaucuaaaaaaaaaaaaaaaaaaaaaaaaaaaaaaaaaaaaaaaaaaaaaaaaaaaaaaaaaaaaaaaaugcaucccccccccccccccccccccccccccccccaaaggcucuuuucagagccaccagaauu

SEQ ID NO: 6895 - RNA, 1813 nt, Artificial Sequence
  mRNA product Design b-4 comprising derived and/or modified sequence from LASV(LASV254-NIG-2011;Clade II)__AIT17674__GPCstabilized (opt5)
gggagagucccgcagucggcguccagcggcucugcuuguucgugugugugucguugcaggccuuauucaagcuuaccaugggccagaucauuaccuucuuucaagaggugccccacgucaucgaagagguuaugaacauugugcugaucgcccucagccugcuugcuauucugaaggggaucuacaauguggccacaugcggacucuucggccuggucuccuuucuucugcucugugggagaucuugcagcacgaccuauaaaggaguguacgaacugcagacacuggagcucgacaugaccaaccugaauaugacaaugccucuuuccuguaccaagaacaauucucaucacuauaucaugguuggcaacgaaacagggcuggagcucacccugacgaauaccagcauuaucaaccauaaauucugcaaucuuuccgaugcgcacaagaaaaaccuguacaaucaugcucucaugucuauuaucagcacauuucaccuguccauuccgaacuucaaucaguaugaggccaugagcugugacuuuaacggaggcaagaucucugugcaguacaaucugucccacagcuaugccgucgaugcugccaaccauugcggcaccauugcuaacggggugcuccaaacauucaugcggauggccuggggaggcucuuacaucgcgcuggacuccgggugcggaaauugggauuguaucaugaccagcuaccaguaucuuauuauccagaacacgacaugggaagaccacugccaguuuucucgccccuccccuauuggcuaccuggggcuccugagccaaagaacccgggauaucuauauuucccgcagacgccggggaacauucaccuggacccucucugacagcgagggcaaugaaacacccggcggguacugucugacgcgguggaugcugaucgaggccgagcucaaaugcuuuggaaacaccgcuguugccaaguguaaugaaaaacaugaugaggaguucugcgacaugcugcgccuuuuugauuucaacaagcaggcuaucagacggcugaaaacacccgcccaggcgaauauucagcucaucaacaaggccgugaaugcucugauuaacgaccaacuuaucaugaagaaucaucugcgcgauauuaugugcaucccuuauugcaacuacuccaaauauugguaccucaaucacaccgucacagggaagaccagccugcccagauguuggcuggugucuaacggauccuaccucaaugaaacgcacuucagcgacgacaucgagcagcaggccgauaacaugauuacagagcugcuucaaaaagaauauauggaccggcagggcaagaccccucuggggcucguggaucuguuugucuucucuaccagcuuuuaccugaucuccauuuuccuucaccucguuaaaaucccgacacaucgccacgugauuggaaagcccugcccuaaaccccauagacugaaccacaugggcaucuguucuugcggccuguauaagcacccuggggugcccgucaaguggaaacggugaggacuaguaauaaggaaacuguaugaaugucugugggcaggaagugaagagauccuucuguaaagguuuuuggaauuaugucugcugaauaauaaacuuuuuugaaauaauaaaucugguagaaaaaugagaucuaaaaaaaaaaaaaaaaaaaaaaaaaaaaaaaaaaaaaaaaaaaaaaaaaaaaaaaaaaaaaaaaugcaucccccccccccccccccccccccccccccccaaaggcucuuuucagagccaccagaauu

SEQ ID NO: 6896 - RNA, 1813 nt, Artificial Sequence
  mRNA product Design b-4 comprising derived and/or modified sequence from LASV(Nig08-A19;Clade III)__ADU56618__GPCstabilized (opt5)
gggagagucccgcagucggcguccagcggcucugcuuguucgugugugugucguugcaggccuuauucaagcuuaccaugggccagaucgugaccuucuuucaagaggucccccacguuauugaagaggugaugaacaucgugcugauugcccucagcauccuggcuauucuuaaggggcuguacaauaucgccacaugcggacucaucggccuggucacguuccuucugcucuccgggagaucuuguagcaugaccuauaaaggaguguacgaacugcagacacuggagcucaacaugaauacccugaacaugacaaugccucuuuccugcaccaagaauaacucucaucacuauauuaugguuggcaaugaaacagggcuggagcucacccugacgaacaccagccuucugcaucacaaauuuuguaaucucuccgacgcgcauaagaaaaaccuguacgaucacacacugaugucuaucauuagcaccuuccaccucuccaucccgaauuuuaaccaguaugaggcuaugagcugcgacuucaauggaggcaagauuacagugcaguacaaccugucucauuccuaugccaucgaugccgcuaaucacuguggcaccgucgccaacggggugcuucaaacguuuaugcggauggcuuggggaggcagcuacauugcccuggacucugggugcggaaagugggauugcaucaugacauccuaccaguaucucaucauucagaacaccacaugggaagaccauugucaguucagcagacccucuccuaucggcuaccuggggcuucugucccaacggacccgcgauauuuauaucagcagacggcgccggggaaccuuuacauggacgcuguccgacucugagggcaaugaaacccccggcggguacugccucacacgcuggaugcugauugaggcggagcuuaaauguuucggaaacaccgccguugcuaagugcaaugaaaaacacgaugaggaauuuugugacaugcugagacucuucgauuuuaacaagcaggccauccggcgccugaaagcucccgcccagaugagcauccagcuuauuaauaaggcggugaacgcccugaucaaugaccaacucauuaugaagaaccaccugagagauaucaugugcauuccuuauugcaauuacuccaaauauugguaccugaaccauacaagcaccgggcggacgucucucccccgcugcuggcuggucuccaauggaagcuaccuuaacgaaacacacuucucugacgacaucgagcagcaggcugauaauaugaucaccgagaugcugcaaaaggaauaucucgacagacagggcaaaaccccucuggggcugguggaucuuuucguguuuagcacauccuucuaccucauuucuaucuuucugcaucuggucaagauuccgacccaccggcauaucguuggaaaacccuguccuaagccccaccgccucaaccacaugggcauuugcagcuguggccuguauaaacagccuggggugcccgugagauggaagcggugaggacuaguaauaaggaaacuguaugaaugucugugggcaggaagugaagagauccuucuguaaagguuuuuggaauuaugucugcugaauaauaaacuuuuuugaaauaauaaaucugguagaaaaaugagaucuaaaaaaaaaaaaaaaaaaaaaaaaaaaaaaaaaaaaaaaaaaaaaaaaaaaaaaaaaaaaaaaaugcaucccccccccccccccccccccccccccccccaaaggcucuuuucagagccaccagaauu

SEQ ID NO: 6897 - RNA, 1816 nt, Artificial Sequence
  mRNA product Design b-4 comprising derived and/or modified sequence from LASV(G1180-SLE-2010;Clade IV)__AIT17168__GPCstabilized (opt5)
gggagagucccgcagucggcguccagcggcucugcuuguucgugugugugucguugcaggccuuauucaagcuuaccaugggccagaucgugaccuucuuucaagaggucccccacguuauugaagaggugaugaacaucgugcugauugcccucagcauccuggcuguccuuaaggggcuguacaauuucgccacaugcggacucgugggccugcuuacguuucugcuccugugugggagauccugcaccgcgucucgguauaaaggaguuuacgaacugcagacacucgagcugaacauggaaacccuuaauaugacaaugccucugagcuguaccaagaacaauucccaucacuauauuauggugggcaacgagacagggcucgagcugacccuuacgaauaccucuaucaucaaccauaaauucugcaaucugagcgacgcucacaagaaaaaccucuacgaucaugcccugauguccauuaucucuacauuucaccugagcauuccgaauuucaaccaguaugaagccauguccugugacuuuaauggaggcaagaucagcguccaguacaaccucucucacuccuaugcuggcgaugccgcuaaucauugcgggaccguggccaacggaguucugcaaacauucaugcgcauggcguggggcgggagcuacauugcccuugacucuggaugcggcuccugggauuguaucaugaccagcuaccaguaucugauuauccagaacacgacaugggaggaccauugccaguuuucuagacccuccccuaucggguaccucggacugcuuagccaacggacccgcgauauuuauaucuccagacggcgccggggcacauucaccuggacccugucugacagcgaaggcaaggauacacccgggggauacugucugacgcgcuggaugcucauugaggcugagcugaaaugcuuuggcaauaccgccguggcuaaguguaacgaaaaacacgacgaggaguucugcgauaugcuuagacuguuugacuucaauaagcaggccauccagcggcucaaagcgcccgcccagauguccauucaacugaucaacaaggcugucaaugcccuuaucaacgaucagcugauuaugaagaaucaccuccgcgacaucaugugcauuccuuauugcaacuacagcaaauauugguaccugaaucauacaaccacaggaaagaccucucugcccaaauguuggcucguguccaacggcagcuaccugaaugaaacgcacuucucugacgauaucgagcagcaagcugacaacaugauuacagagaugcuucagaaggaauauauggagagacaggggaaaaccccucugggacucguggaucuguuugucuucagcaccuccuuuuaccugaucucuaucuuccuucaucucguuaagauuccgacacaccggcauaucgugggcaaaagcugccccaagccucaccgccugaaucacaugggcauuuguuccugcgggcuguauaagcagcccggagugccugucaaauggaagagaugaggacuaguaauaaggaaacuguaugaaugucugugggcaggaagugaagagauccuucuguaaagguuuuuggaauuaugucugcugaauaauaaacuuuuuugaaauaauaaaucugguagaaaaaugagaucuaaaaaaaaaaaaaaaaaaaaaaaaaaaaaaaaaaaaaaaaaaaaaaaaaaaaaaaaaaaaaaaaugcaucccccccccccccccccccccccccccccccaaaggcucuuuucagagccaccagaauu

SEQ ID NO: 6898 - RNA, 1816 nt, Artificial Sequence
  mRNA product Design b-4 comprising derived and/or modified sequence from LASV(G1442-SLE-2011;Clade IV)__AIT17180__GPCstabilized (opt5)
gggagagucccgcagucggcguccagcggcucugcuuguucgugugugugucguugcaggccuuauucaagcuuaccaugggccagaucgugaccuucuuucaagaggucccccacguuauugaagaggugaugaacaucgugcugauugcccucagcauccuggcuguccuuaaggggcuguacaauguggccacaugcggacucauuggccugguuacguuccuucugcucugugggagauccugcaccacaacccuguauaaaggaguguacgaacugcagacacucgagcugaacauggaaacccuuaauaugacaaugccucugucuuguaccaagaacaauagccaucacuauauccgggucggcaacgagacggggcucgagcugacccuuacaaauaccuccaucauuaaccauaaauuuugcaaucugucugacgcgcacaagaaaaaccucuacgaucaugcucugaugagcaucauuuccacauuccaccugucuaucccgaauuuuaaccaguaugaagccaugagcugugacuucaauggaggcaagauuuccgugcaguacaaccucagccacucuuaugccggcgaugcugccaaucauugcgggaccguugcuaacggagugcugcaaacguuuaugcgcauggccuggggcggguccuacaucgcgcuugacagcggaugcggcaacugggauuguauuaugacaucuuaccaguaucugaucauccagaauaccacaugggacgaucacugccaguucucccggcccagcccuauuggguaccucggacugcuuucucaacgcaccagagacgucuauaucucccggcgccgccggggcaccuuuacauggacgcugagcgauuccgagggcaaggacacccccgggggauacugucugacaagauggaugcucauugaagccgagcugaaaugcuucggcaacaccgcuguggccaaguguaaugagaaacaugaugaagaguuuugcgacaugcuucggcuguucgauuuuaacaagcaggcuauccagcgccucaaagcccccgcgcagaugucuauucaacugaucaauaaggccgugaacgcucuuaucaaugaccagcugauuaugaagaaccaccucagagacaucaugugcauuccuuauugcaauuacagcaaauauugguaccugaacaauacagccaccggaaagacgucccugcccaaauguuggcucaucagcaacggcucuuaccugaaugagacacacuucuccgaugacauugaacaggaggcugauaacaugaucaccgagaugcuucaaaaggaauauauggagcggcaggggaaaaccccucugggacucgucgaccuguucguuuuuagcacaucuuucuaccugaucagcauuuuucuucaucucgugaagaucccgacccaccgccauauugugggcaaauccugccccaagccucacagacugaaucauaugggcaucuguucuugcgggcuguauaagcagcccggagucccugugcgguggaaacgcugaggacuaguaauaaggaaacuguaugaaugucugugggcaggaagugaagagauccuucuguaaagguuuuuggaauuaugucugcugaauaauaaacuuuuuugaaauaauaaaucugguagaaaaaugagaucuaaaaaaaaaaaaaaaaaaaaaaaaaaaaaaaaaaaaaaaaaaaaaaaaaaaaaaaaaaaaaaaaugcaucccccccccccccccccccccccccccccccaaaggcucuuuucagagccaccagaauu

SEQ ID NO: 6899 - RNA, 1816 nt, Artificial Sequence
  mRNA product Design b-4 comprising derived and/or modified sequence from LASV(G3010-SLE-2013;Clade IV)__AIT17344__GPCstabilized (opt5)
gggagagucccgcagucggcguccagcggcucugcuuguucgugugugugucguugcaggccuuauucaagcuuaccaugggccagaucgugaccuucuuucaagaggucccccacguuauugaagaggugaugaacaucgugcugauugcccucagcauccuggcuguccuuaaggggcuguacaauuucgccacaugcggacucgugggccugguuacguuucuucugcucugugggagauccugcaccacaucucuguauaaaggaguguacgaacugcagacccucgagcugaacauggaaacacuuaauaugaccaugccucugagcuguacaaagaacaauucccaucacuauauuauggucggcaacgagaccgggcucgagcugacgcuuaccaauacaucuaucaucaaccauaaauucugcaaucugagcgacgcgcacaagaaaaaccucuacaaucaugcucugauguccauuaucucuaccuuucaccugagcauuccgaacuucaaucaguaugaagccauguccugugauuuuaacggaggcaagaucagcgugcaguacaaucucucucacuccuaugccggcgacgcugccagccauugcgggacaguugcuaacggagugcugcaaaccuucaugcggauggccuggggcgggucuuacauugcgcuugauuccggaugcggcaagugggacuguaucaugacgagcuaucaguaccugauuauccagaacacaaccugggaggaucacugccaguuuucucgccccuccccuaucggguaucucggacugcuuagccaaagaacacgggacauuuacaucucccgcagacgccggggcaccuucaccuggacacugucugauagcgaaggcaaagacacgcccgggggauauugucugacccgguggaugcucauugaggccgagcugaagugcuuuggcaauacagcugucgccaaauguaacgaaaagcaugaugaggaguucugcgacaugcuucgccuguuugauuucaauaaacaggcuauccagagacucaagacccccgcccagauguccauucaacugaucaacaaggcggugaaugcccuuaucaacgaccagcugauuaugaaaaaucaccuccgggauaucaugugcauuccuuacugcaacuauagcaaguacugguaccugaaucacacaaccacgggaaaaacaucucugcccaaguguuggcucguguccaacggcagcuaucugaaugaaacccauuucucugacgacaucgagcagcaagcugauaacaugauuaccgagaugcuucagaaagaauacauggagcgccaggggaagacaccucugggacucgucgaccuguuuguuuucagcaccuccuuuuaucugaucucuaucuuccuucaccucgugaaaauuccgacacauagacacaucgugggcaagagcugccccaagccucaucggcugaaucacaugggcauuuguuccugcgggcuguacaaacagcccggagucccugugcgcuggaagagaugaggacuaguaauaaggaaacuguaugaaugucugugggcaggaagugaagagauccuucuguaaagguuuuuggaauuaugucugcugaauaauaaacuuuuuugaaauaauaaaucugguagaaaaaugagaucuaaaaaaaaaaaaaaaaaaaaaaaaaaaaaaaaaaaaaaaaaaaaaaaaaaaaaaaaaaaaaaaaugcaucccccccccccccccccccccccccccccccaaaggcucuuuucagagccaccagaauu

SEQ ID NO: 6900 - RNA, 1816 nt, Artificial Sequence
  mRNA product Design b-4 comprising derived and/or modified sequence from LASV(G502-SLE-2009;Clade IV)__AIT17126__GPCstabilized (opt5)
gggagagucccgcagucggcguccagcggcucugcuuguucgugugugugucguugcaggccuuauucaagcuuaccaugggccagaucgugaccuucuuucaagaggucccccacguuauugaagaggugaugaacaucgugcugauugcccucagcauccuggcuguccuuaaggggcuguacaauuucgccacaugcggacucgugggccugcuuacguuucugcuccugugugggagauccugcaccacaggacuguauaaaggcguuuacgaacuccagacccuggagcuuaacauggaaacacugaauaugaccaugccucucucuuguacaaagaacaauagccaucacuauauuaugguggggaacgagaccggacuggagcuuacgcugaccaauacauccaucaucaaccauaaauucugcaaucucucugacgcgcacaagaaaaaccuguacgaucaugcucugaugagcauuaucuccaccuuucaccucucuauuccgaauuucaaccaguaugaagccaugagcugugacuuuaauggcggcaagaucuccguccaguacaaccugagccacucuuaugccggggaugcugccgaccauugcggaacaguggcuaauggcguucuucaaaccuucaugcggauggccuggggaggguccuacauugcgcuggauagcggcugcgggagaugggacuguaucaugacgucuuaccaguaucucauuauccagaacacaaccugggaggaucacugccaguuuucccggcccagcccuaucggauaccugggccuucugucucaacgcacaagagacauuuauaucucccggcgccgccggggcaccuucaccuggacacugagcgauuccgaagggaaggacacgcccggaggcuacugucucaccagauggaugcugauugaggccgagcuuaaaugcuuugggaacacagcuguggccaaguguaaugaaaaacaugaugaggaguucugcgacaugcugcggcucuuugauuucaacaagcaggcuauccagcgccugaaagcccccgcgcagaugucuauucaacuuaucaauaaggccgucaacgcucugaucaaugaccagcucgugaugaagaaccaccugagagacauuaugugcaucccuuauugcaauuacagccgguauugguaccugaaccacaccacaaccggccgcacgucccuccccaaauguuggcuggugagcaaugggucuuaccuuaacgaaacacauuucuccgaugacauugagcagcaagccgauaauaugaucaccgagaugcugcagaaggaauauauggagagacagggaaaaaccccucucggccuggucgaccuguuuguuuucagcacaucuuuuuaccuuauuagcaucuuccuccaccuggugaagaucccgacccaucggcacauugugggcaaauccugccccaagccucaucgccugaaccacauggggaucuguucuugcggacucuauaaacagcccggcgucccugugaaguggaagagaugaggacuaguaauaaggaaacuguaugaaugucugugggcaggaagugaagagauccuucuguaaagguuuuuggaauuaugucugcugaauaauaaacuuuuuugaaauaauaaaucugguagaaaaaugagaucuaaaaaaaaaaaaaaaaaaaaaaaaaaaaaaaaaaaaaaaaaaaaaaaaaaaaaaaaaaaaaaaaugcaucccccccccccccccccccccccccccccccaaaggcucuuuucagagccaccagaauu

SEQ ID NO: 6901 - RNA, 1816 nt, Artificial Sequence
  mRNA product Design b-4 comprising derived and/or modified sequence from LASV(G733-SLE-2010;Clade IV)__AIT17154__GPCstabilized (opt5)
gggagagucccgcagucggcguccagcggcucugcuuguucgugugugugucguugcaggccuuauucaagcuuaccaugggccagaucgugaccuucuuucaagaggucccccacguuauugaagaggugaugaacaucgugcugauugcccucagcauccuggcuguccuuaaggggcuguacaauuucgccacaugcggaauugugggccucguuuccuuucugcuucugugugggagaucuugcacgaccagccucuauaaaggaguguacgaacugcagacacuggagcucaacauggaaacccugaauaugacaaugccucuuuccuguaccaagaacaauucucaucacuauaucauggucggcaacgagacagggcuggagcucacccugacgaauaccagcaucauuaaccauaaauucugcaaucuuuccgacgcgcacaagaaaaaccuguacgaucaugcucucaugucuaucauuagcacauuucaccuguccaucccgaauuucaaccaguaugaagccaugagcugugacuuuaauggaggcaagauuucugugcaguacaaccugucccacagcuaugccggcgaugcugccaaucauugcgggaccaucgcuaacggaguucuccaaacauucaugcggauggccuggggcgggucuuacauugcgcuggacuccggaugcgauagaugggacuguaucaugaccagcuaccaguaucuuaucauucagaacacgacaugggaggaucacugccaguuuucucggcccuccccuaucggcuaccuggggcuccugagccaacgcaccagagacauuuauaucucccggcgccgccggggaacauucaccuggacccucucugauagcgaaggcaaggacacacccggcggguacugucugacgagauggaugcugauugaggccgagcucaaaugcuuuggaaauaccgcuguggccaaguguaacgaaaaacaugaugaggaguucugcgacaugcugcggcuuuuugauuucaauaagcaggcuauccagcgccugaaagcccccgcgcagauguccauccaacucauuaacaaggccgucaaugcucugaucaacgaccagcuuauuaugaagaaucaccugagagacaucaugugcauuccuuauugcaacuacagcaaauauugguaccucaaucacacaaccacagggaagaccucucugcccaaauguuggcugguguccaacggaagcuaccucaaugaaacgcauuucucugaugacaucgagcagcaagccgauaacaugaucacagagaugcugcagaaggaauauauggagcggcagggcaaaaccccucuugggcugguggaccucuuugucuucagcaccuccuuuuaccugauuucuaucuuccugcaccuuguuaagauuccgacacaucgccacguggugggaaaaagcugccccaagccucauagacucaaucacaugggcaucuguuccugcggccuguaugggcagcccggagucccugugaaguggaaacggugaggacuaguaauaaggaaacuguaugaaugucugugggcaggaagugaagagauccuucuguaaagguuuuuggaauuaugucugcugaauaauaaacuuuuuugaaauaauaaaucugguagaaaaaugagaucuaaaaaaaaaaaaaaaaaaaaaaaaaaaaaaaaaaaaaaaaaaaaaaaaaaaaaaaaaaaaaaaaugcaucccccccccccccccccccccccccccccccaaaggcucuuuucagagccaccagaauu

SEQ ID NO: 6902 - RNA, 1816 nt, Artificial Sequence
  mRNA product Design b-4 comprising derived and/or modified sequence from MOPV/LASV reassortant(IGS-1;Clade IV)__AFY05576__GPCstabilized (opt5)
gggagagucccgcagucggcguccagcggcucugcuuguucgugugugugucguugcaggccuuauucaagcuuaccaugggccagaucgugaccuucuuucaagaggucccccacguuauugaagaggugaugaacaucgugcugauugcccucagcguccuggcugugcuuaaggggcuguacaauuucgccacaugcggacucguuggccuggugacguuucuucugcucugugggagauccugcaccacaucucuguauaaaggagucuacgaacugcagacccucgagcugaacauggaaacacuuaauaugaccaugccucugagcuguacaaagaacaauucccaucacuauaucauggugggcaacgagaccgggcucgagcugacgcuuaccaauacaucuauuaucaaccauaaauucugcaaucugagcgacgcgcacaagaaaaaccucuacgaucaugcucugauguccaucauuucuaccuuucaccugagcaucccgaauuucaaccaguaugaagccauguccugugacuuuaauggaggcaagauuagcguucaguacaaccucucucacuccuaugccggcgaugcugccaaucauugcgggacaguggcuaacggaguccugcaaaccuucaugcggauggccuggggcgggagcuacaucgcgcuugacucuggaugcggcaacugggauuguauuaugacguccuaccaguaucugaucauucagaauacaaccugggaggaccacugccaguuuagcagacccucuccuaucggguaccucggacugcuuucccaacggacacgcgauaucuauauuagcagacggcgccggggcaccuucaccuggacacuguccgacucugaaggcgaggauacgcccgggggauacugucugacccgcuggaugcucaucgaggccgaacugaagugcuuuggcaacacagcuguggccaaauguaaugagaagcaugacgaagaguucugcgauaugcuuagacuguuugacuucaacaaacaggcuauucagcggcucaaggcccccgcgcagaugagcauccaacugauuaauaaagccgugaacgcucuuaucaaugaucagcugaucaugaagaaccaccuccgcgacauuaugugcaucccuuauugcaauuacuccaaguauugguaccugaaccacaccacaaccggaagaacgagccugcccaaauguuggcucgucucuaauggcuccuaccugaacgagacacauuucagcgacgauauugagcagcaagccgacaauaugaucaccgaaaugcuucagaaggaguauauggaacggcaggggaaaaccccucugggacucguugaucuguuuguguucucuaccagcuuuuaccugauuuccaucuuccuucaccucgugaagaucccgacacaucgccacauugucggcaaaucuugccccaagccucauagacugaaccacaugggcaucuguagcugcgggcuguauaaacagcccggagugccuguuaaguggaagcggugaggacuaguaauaaggaaacuguaugaaugucugugggcaggaagugaagagauccuucuguaaagguuuuuggaauuaugucugcugaauaauaaacuuuuuugaaauaauaaaucugguagaaaaaugagaucuaaaaaaaaaaaaaaaaaaaaaaaaaaaaaaaaaaaaaaaaaaaaaaaaaaaaaaaaaaaaaaaaugcaucccccccccccccccccccccccccccccccaaaggcucuuuucagagccaccagaauu

SEQ ID NO: 6903 - RNA, 1816 nt, Artificial Sequence
  mRNA product Design b-4 comprising derived and/or modified sequence from LASV(LM765-SLE-2012;Clade IV)__AIT17814__GPCstabilized (opt5)
gggagagucccgcagucggcguccagcggcucugcuuguucgugugugugucguugcaggccuuauucaagcuuaccaugggccagaucgugaccuucuuucaagaggucccccacguuauugaagaggugaugaacaucgugcugauugcccucagcauccuggcuguccuuaaggggcuguacaauuucgccacaugcggacucgugggccugguuacguuucuucugcucugugggagauccugcaccacaucucuguauaaaggaguguacgaacugcagacccucgagcugaacauggaaacacuuaauaugaccaugccucugagcuguacaaagaacaauucccaucacuauauuauggucggcaacgagaccgggcucgagcugacgcuuaccaauacaucuaucaucgaccauaaauucugcaaccugagcgaugcgcaccggaagaaucucuacgaccaugcucugauguccauuaucucuaccuuucaccugagcauuccgaacuucaaucaguaugaagccauguccugugauuuuaacggaggcaaaaucagcgugcaguacaaucucucucacuccuaugccaaggacgcugccgaucauugcggcacaguugcuaacggggugcugcaaaccuucaugcgcauggccuggggaggcagcuacauugcgcuugacucugggugcggacggugggauuguaucaugacguccuaccaguaucugauuauccagaauacaaccugggaggaccacugccaguuuagccgccccucuccuaucggcuaccucgggcugcuuucccaaagaacacgggauauuuauaucagccgcagacgccggggaaccuucaccuggacacuguccgacucugaaggcaaggauacgcccggcggguacugucugacccgguggaugcucauugaggccgagcugaaaugcuuuggaaacacagcugucgccaaguguaacgaaaaacaugacgaggaguucugcgauaugcuucgccuguuugacuucaauaagcaggcuauccagagacucaaagcccccgcgcagaugagcauucaacugaucaacaaggccgugaaugcucuuaucaacgaccagcugauuaugaagaaucaccuccgggauaucaugugcauuccuuauugcaacuacuccaaauauugguaccugaaucacaccacaaccgggaagacgagccugcccaaauguuggcucgugucuaacggauccuaccugaaugaaacacauuucagcgacgauaucgagcagcaagccgacaacaugauuaccgagaugcuucagaaggaauauauggagcgccagggcaaaaccccucuggggcucgucgaucuguuuguuuucucuaccagcuuuuaccugaucuccaucuuccuucaccucgugaagauuccgacacauagacacaucgugggaaaacccugcccuaagccccaucggcugaaucacaugggcauuuguucuugcggccuguauaagcagccugggguccccgugaaauggaagcgcugaggacuaguaauaaggaaacuguaugaaugucugugggcaggaagugaagagauccuucuguaaagguuuuuggaauuaugucugcugaauaauaaacuuuuuugaaauaauaaaucugguagaaaaaugagaucuaaaaaaaaaaaaaaaaaaaaaaaaaaaaaaaaaaaaaaaaaaaaaaaaaaaaaaaaaaaaaaaaugcaucccccccccccccccccccccccccccccccaaaggcucuuuucagagccaccagaauu

SEQ ID NO: 6904 - RNA, 1816 nt, Artificial Sequence
  mRNA product Design b-4 comprising derived and/or modified sequence from LASV(LM776-SLE-2012;Clade IV)__AIT17824__GPCstabilized (opt5)
gggagagucccgcagucggcguccagcggcucugcuuguucgugugugugucguugcaggccuuauucaagcuuaccaugggccagaucgugaccuucuuucaagaggucccccacguuauugaagaggugaugaacaucgugcugauugcccucagcauccuggcuguccuuaaggggcuguacaauuucgccacaugcggacucgugggccugguuacguuucuucugcucugugggagauccugcaccacaucuguguauaaaggagucuacgaacugcagacccuggagcucaacauggaaacacugaauaugaccaugccucuuagcuguacaaagaacaauucccaucacuauauuauggugggcaacgagaccgggcuggagcucacgcugaccaauacaucuaucaucaaccauaaauucugcaaucuuagcgacgcgcacaagaaaaaccuguacgaucaugcucucauguccauuaucucuaccuuucaccugagcauuccgaauuucaaccaguaugaagccauguccugugacuuuaauggaggcaagaucagcguucaguacaaccugucucacuccuaugccggcgaugcugccaaucauugcgggacaguggcuaacggaguccuccaaaccuucaugcggauggccuggggcgggagcuacauugcgcuggacucuggaugcggcaagugggauuguaucaugacguccuaccaguaucuuauuauccagaacacaaccugggaggaccauugccaguuuagccgccccucuccuaucggguaccugggacuccugucccaaagaacacgggauauuuauaucagccgcagacgccggggcaccuucaccuggacacucuccgacucugaaggcaaagauacgcccgggggauacugucugacccgguggaugcugauugaggccgagcucaagugcuuuggcaauacagcuguggccaaauguaacgaaaagcacgacgaggaguucugcgauaugcugcgccuuuuugacuucaauaaacaggcuauccagagacugaaggcccccgcgcagaugagcauucaacucaucaacaaggccgugaaugcucugaucaacgaucagcuuauuaugaaaaaucaucugcgggacaucaugugcauuccuuauugcaacuacuccaaguauugguaccucaaucacaccacaaccggaaaaacgagccugcccaaguguuggcuggucucuaacggcuccuaccucaaugaaacacacuucagcgacgauaucgagcagcaagccgacaacaugauuaccgagaugcugcagaaagaauauauggagcgccaggggaagaccccucuuggacugguugaucucuuuguguucucuaccagcuuuuaccugaucuccaucuuccugcaucuugugaaaauuccgacacacagacauaucgucggcaagucuugccccaagccucaccggcucaaucacaugggcauuuguagcugcgggcuguauaaacagcccggagugccuguucgcuggaagagaugaggacuaguaauaaggaaacuguaugaaugucugugggcaggaagugaagagauccuucuguaaagguuuuuggaauuaugucugcugaauaauaaacuuuuuugaaauaauaaaucugguagaaaaaugagaucuaaaaaaaaaaaaaaaaaaaaaaaaaaaaaaaaaaaaaaaaaaaaaaaaaaaaaaaaaaaaaaaaugcaucccccccccccccccccccccccccccccccaaaggcucuuuucagagccaccagaauu

SEQ ID NO: 6905 - RNA, 1816 nt, Artificial Sequence
  mRNA product Design b-4 comprising derived and/or modified sequence from LASV(Mad39;Clade IV)__ANH09722__GPCstabilized (opt5)
gggagagucccgcagucggcguccagcggcucugcuuguucgugugugugucguugcaggccuuauucaagcuuaccaugggccagaucgugaccuucuuucaagaggucccccacguuauugaagaggugaugaacaucgugcugauugcccucagcauccuggcuguccuuaaggggcuguacaauguggccacaugcggacucauuggccugguuacguuccuucugcucugugggagauccugcaccacaacccuguauaaaggaguguacgaacugcaggcgcucgagcugaacauggaaacacuuaauaugaccaugccucugucuuguacaaagaacaauagccaucacuauauccgggucggcaacgagaccgggcucgagcugacgcuuaccaauacaucccugaucaaccauaaauuuugcaaucucucugacgcucacaagaaaaaccuguacgaucaugcccugaugagcauuaucuccaccuuccaccucucuauuccgaauuuuaaccaguaugaagccaugagcugugacuucaaugauggaaagaucuccgugcaguacaaccugagccacacauaugcuggcgacaccgccaaucauugcggcacgguugcuaacggggugcuucaaacauuuaugcgcauggccuggggaggcucuuacauugcgcuggauuccgggugcggaggcugggacuguaucaugaccagcuaccaguaucucauuauccagaacacaaccugggaggaucacugccaguucucucggcccuccccuaucggguaccugggacuucugagccaacgcaccagagacauuuauaucucucggcgccgccggggcacauuuacguggacccuguccgauagcgaaggcaaggacacacccgggggauacugucucaccagauggaugcugauugaggccgagcuuaaaugcuucggcaauacagcugucgccaaguguaacgaaaaacaugaugaggaauuuugcgacaugcugcgccucuucgauuuuaauaagcaggcuauccagcggcugaaagcccccgcgcagauguccauucaacuuaucaacaaggccgugaaugcucugaucaacgaccagcucauuaugaagaaucaccugagagacaucaugugcauuccuuauugcaacuacucuaaauauugguaccugaaucacaccgugacgggaaagacaagccuccccaaauguuggcuggucuccaacggcagcuaccuuaaugaaacccauuucucugaugacaucgagcagcaagccgauaacaugauuaccgagaugcugcagaaggaauauauggagcggcaggggaaaacaccucucggacugguugaccuguucguguuuuccaccagcuucuaccuuaucucuaucuuucuccaccuggugaagauuccgacacaucgccacgucgugggcaaacccugcccuaagccccauagacugaaucacaugggcaucuguagcugcggguucuauaagcagccuggaguucccgugcgguggaaacgcugaggacuaguaauaaggaaacuguaugaaugucugugggcaggaagugaagagauccuucuguaaagguuuuuggaauuaugucugcugaauaauaaacuuuuuugaaauaauaaaucugguagaaaaaugagaucuaaaaaaaaaaaaaaaaaaaaaaaaaaaaaaaaaaaaaaaaaaaaaaaaaaaaaaaaaaaaaaaaugcaucccccccccccccccccccccccccccccccaaaggcucuuuucagagccaccagaauu

SEQ ID NO: 6906 - RNA, 1816 nt, Artificial Sequence
  mRNA product Design b-4 comprising derived and/or modified sequence from LASV(Z0947-SLE-2011;Clade IV)__AIT17840__GPCstabilized (opt5)
gggagagucccgcagucggcguccagcggcucugcuuguucgugugugugucguugcaggccuuauucaagcuuaccaugggccagaucgugaccuucuuucaagaggucccccacguuauugaagaggugaugaacaucgugcugauugcccucagcauccuggcuguccuuaaggggcuguacaauuucgccacaugcggacucgugggccugguuacguuucuucugcucugugggagauccugcaccauuucucuguauaaaggaguguacgaacugcagacacucgagcugaacauggaaacccuuaauaugacaaugccucugagcuguaccaagaacaauucccaucacuauaucauggucggcaacgagacagggcucgagcugacccuuacgaauaccucuaucauuaaccauaaauucugcaaucugagcgacgcgcacaagaaaaaccucuacgaucaugcucugauguccaucauuucuacauuucaccugagcaucccgaauuucaaccaguaugaagccauguccugugacuuuaauggaggcaagauuagcgugcaguacaaccucucucacuccuaugccggcgaugcugccaaucauugcgggaccguugcuaacggagugcugcaaacauucaugcggauggccuggggcgggagcuacaucgcgcuugacucuggaugcgauagaugggacuguauuaugaccuccuaccaguaucugaucauccagaacacgacaugggaggaucacugccaguuuagccggcccucuccuauuggcuaccucgggcugcuuucccaacgcaccagagacaucuauauuagccggcgccgccggggaacauucaccuggacccuguccgauucugaaggcaaggacacacccggcggguacugucugacgagauggaugcucaucgaggccgagcugaaaugcuuuggaaauaccgcugucgccaaguguaacgaaaaacaugaugaggaguucugcgacaugcuucggcuguuugauuucaauaagcaggcuauucagcgccucaaagcccccgcgcagaugagcauccaacugaucaacaaggccgugaaugcucuuauuaacgaccagcugaucaugaagaaucaccucagagacauuaugugcaucccuuauugcaacuacuccaaauauugguaccugaaucacacaaccacagggaagaccagccugcccaaauguuggcucgugucuaacggauccuaccugaaugaaacgcauuucagcgaugacauugagcagcaagccgauaacaugaucacagagaugcuucagaaggaauauauggagcggcagggcaaaaccccucuggggcucgucgaccuguuuguuuucucuaccagcuuuuaccugaucuccauuuuccuucaccucgugaagaucccgacacaucgccacauugugggaaaacccugcccuaagccccauagacugaaucacaugggcaucuguucuugcggccuguauaagcagccugggguccccgugaaauggaagcggugaggacuaguaauaaggaaacuguaugaaugucugugggcaggaagugaagagauccuucuguaaagguuuuuggaauuaugucugcugaauaauaaacuuuuuugaaauaauaaaucugguagaaaaaugagaucuaaaaaaaaaaaaaaaaaaaaaaaaaaaaaaaaaaaaaaaaaaaaaaaaaaaaaaaaaaaaaaaaugcaucccccccccccccccccccccccccccccccaaaggcucuuuucagagccaccagaauu

SEQ ID NO: 6907 - RNA, 1816 nt, Artificial Sequence
  mRNA product Design b-4 comprising derived and/or modified sequence from LASV(Josiah;Clade IV)__NP_694870__GPCstabilized (opt6)
gggagagucccgcagucggcguccagcggcucugcuuguucgugugugugucguugcaggccuuauucaagcuuaccaugggacaaaucguuacauucuuucaagaaguaccccacguaauagaagaagucaugaacauaguacuaauagcacuaucaguucucgcaguacuaaaaggucuauauaauuuugcuacauguggcuuagucggccuaguaaccuuccuacuccuaugcggaagaucaugcaccacuucacucuacaaaggaguauacgaauuacaaacccuagaacuaaacauggaaacacuaaauaugacaaugccacuuucauguaccaaaaacaacagccaccacuauauaaugguaggaaaugaaacaggacuugaauuaacauuaaccaacacaucuauaaucaaucauaaauucugcaaccuaucagaugcacauaagaaaaauuuauacgaucacgcauuaaugucaauaauauccacauuccaccuaucaauaccaaacuuuaaucaauacgaagcaaugucuugcgauuucaacggaggaaaaauaucaguacaauacaaccuuucacacucuuaugcuggagacgcagcaaaucacuguggaacagucgcaaacggagucuuacaaacauuuaugagaauggcauggggaggaucuuacauagcacuagauucaggaugcggaaacugggacugcauaaugacaucauaccaauauuuaaucauacaaaacacaacaugggaagaccacugccaauucucaagaccaucaccuauaggauaccuaggacuuuuaucacaaagaacacgcgacauuuacauauccagaagaagaagaggcacuuucaccuggacacuaucagacucagaaggcaaagacacaccaggaggauacugcuuaacgagauggaugcuaauagaagcagaacuaaaaugcuucggcaacacagcaguagcaaaauguaacgaaaaacaugaugaagaauuuugcgacaugcucagacuauucgauuucaacaaacaagccauacaaagacuaaaagcuccugcacaaaugucaauacaacuaauaaauaaagcaguaaacgcacuaauaaacgaucaacuaauaaugaaaaaccaccuaagagacauaauguguaucccauacugcaacuauucaaaauacugguaccuaaaccacaccacaacaggaagaacaagccuaccaaaaugcuggcuaguaucaaacggaucauauuuaaaugaaacccacuucuccgaugauauagaacaacaagcagauaacaugauaacagaaaugcuacaaaaagaauacauggaacgacaaggaaaaacaccucugggccuaguagaccuauucguauucuccacaucauucuaccuaauauccauauucuuacaccuagucaaaauaccaacacacagacacauaguaggaaaauccugcccaaaaccccauagacucaaucauaugggaauaugcuccuguggacuauacaaacaaccgggaguaccaguaaaauggaaaagauaaggacuaguaauaaggaaacuguaugaaugucugugggcaggaagugaagagauccuucuguaaagguuuuuggaauuaugucugcugaauaauaaacuuuuuugaaauaauaaaucugguagaaaaaugagaucuaaaaaaaaaaaaaaaaaaaaaaaaaaaaaaaaaaaaaaaaaaaaaaaaaaaaaaaaaaaaaaaaugcaucccccccccccccccccccccccccccccccaaaggcucuuuucagagccaccagaauu

SEQ ID NO: 6908 - RNA, 1813 nt, Artificial Sequence
  mRNA product Design b-4 comprising derived and/or modified sequence from LASV(LP;Clade I)__AAF86701__GPCstabilized (opt6)
gggagagucccgcagucggcguccagcggcucugcuuguucgugugugugucguugcaggccuuauucaagcuuaccaugggacagauaauaacuuucuuccaagaaguaccucacguaauagaagaaguaaugaacauaguauuaauugcacucucacuacucgccauacuaaaaggacuauacaauauugcuaccugcgguauaauuggauuaguagcauucuuauuccuaugcggaaaaucaugcucacuaacauuaaaaggaggauacgaacuacaaacacuagaacuaaauauggaaacacuaaauaugacaaugccacuaucauguacuaaaaacucaucacaccacuacauuagaguaggcaacgaaacgggacuagaauuaacccuuacgaauacaucuauaauaaaucauaaauuuugcaacuuaucagacgcacacaagaaaaaucuauacgaccacgcccuaaugucaauuauuucaacguuccaccuauccauaccaaacuucaaccaauacgaagcaaugucaugugacuucaaugguggcaaaaucuccguacaauacaauuuaucacacuccuacgcaggagaugcagcagaacauugcggcacaguagccaacggaguacuacaaacauuuaugagaauggcauggggcggcagauacauagcauuagauucaggaugcggcaauugggacugcauaaugacuucauaccaauaccuaauaauacaaaacacaacaugggaagaccacugucaauucucaagaccauccccaauaggauaccuaggacugcuuucccaaagaacaagagauauauauauaucacgacgaagacguggaacauucacauggacauuaucagacucagaaggaaacgaaacaccaggaggcuacugucuaacaagauggaugcuuauagaagcagaacuaaaaugcuucggaaauacagccguagcuaaaugcaacgaaaaacacgaugaagaauuuugcgacauguuaagacuuuucgacuucaauaaacaggcuauccgaagacuaaaagcucccgcacaaaugucaauccaacuaauaaacaaagccguaaacgcacuaauaaacgaccaacuaaucaugaaaaaccacuuaagagauauaaugugcauaccauauugcaauuacucuaaauacugguaccucaaucacacaucaucaggacgaacaucauuaccaaaauguuggcuaaucaguaacggaucauaccuuaaugaaacccaauuuucagacgacauagaacaacaagccgauaacaugaucacagaaaugcuacaaaaagaauauauagaacgacaaggaaaaaccccacucggucuaguagacauauucaucuuuucaacaucauucuaccuaauuuccauuuuccuacaccuaaucaaaauaccuacacaccgacacauaguaggaaaaccauguccaaaaccacauagacuaaaccacaugggaguaugcucaugcggauuauacaaacacccuggaguaccaacaaaauggaaaagauaaggacuaguaauaaggaaacuguaugaaugucugugggcaggaagugaagagauccuucuguaaagguuuuuggaauuaugucugcugaauaauaaacuuuuuugaaauaauaaaucugguagaaaaaugagaucuaaaaaaaaaaaaaaaaaaaaaaaaaaaaaaaaaaaaaaaaaaaaaaaaaaaaaaaaaaaaaaaaugcaucccccccccccccccccccccccccccccccaaaggcucuuuucagagccaccagaauu

SEQ ID NO: 6909 - RNA, 1813 nt, Artificial Sequence
  mRNA product Design b-4 comprising derived and/or modified sequence from LASV(803213;Clade II)__AAF86703__GPCstabilized (opt6)
gggagagucccgcagucggcguccagcggcucugcuuguucgugugugugucguugcaggccuuauucaagcuuaccaugggacaaauaauaacauucuuucaagaagucccacacguaauugaagaaguuaugaauauaguacuaaucgcacuaucgcuauuagcaauacuaaaaggaaucuacaacguagcaacaugcggacuauuuggacucauauccuuucugcuauuaugcggcagauccugcucagucaccuauaaaggaguauaugaacuacaaacacuagaacuaaauauggcuaaucuuaauaugacaaugccacuaucaugcacaaaaaacaacucucaccacuauauaaugguaggaaaugaaaccggacuagagcuuacacuaacaaauaccuccauaauaaaccacaaauuuuguaacuuaucagacgcacacaaaaaaaacuuauacgaccacgcacuaaugucuauaauuagcacauuucacuuauccauaccuaacuuuaaccaauaugaagcaaugucaugcgauuuuaacggcggcaaaaucagcguacaauacaacuuaucccauucauuugccguagaugcagcuaaccacugcggaacaaucgcaaauggcguacuacaaacauucaugagaauggcauggggaggaucuuacauugcacuugauucagguugcggaaauugggacuguaucaugacaucauaucaauaucuaauaauacaaaacaccacaugggaagaccacugccaauucucaagaccaucaccaaucggauaccuaggacuauuaucacaaagaacaagagauauauacauaucaagaagacgaagaggaaccuuuaccuggacauuaucagauucagaaggaaacgaagcccccggaggauacugucucacaagauggaugcuuauagaagcagaacuaaaaugcuuuggaaauaccgccguagcaaaaugcaacgaaaaacacgaugaagaauucugugacaugcuacgacuauucgacuucaacaaacaagcuauaaaaagacuaaaaacaccagcacaaaugucaauccaacuaaucaauaaagcaguaaacgcacuaauaaacgaucaacucauaaugaaaaaccaccuaagagauauaauguguaucccauacuguaacuacuccagauacugguaccuaaaucacacaguaacaggaaaaacaucacuaccacgaugcuggcuaguaucuaacggaaguuacuuaaacgaaacacacuucucugacgauauagaacaacaagcagacaacaugauuacugaaaugcuacaaaaagaauacauggacagacaaggaaaaacaccauuaggacuaguagacuuauucguauucuccaccuccuucuaucuaauauccauauuccuccacuuaguaaaaauacccacacauagacacaucgucggaaaaccauguccaaaaccucaccgccucaaccacaugggaauauguuccugcggauuauacaaacaucccggcguaccagucaaauggaaaagauaaggacuaguaauaaggaaacuguaugaaugucugugggcaggaagugaagagauccuucuguaaagguuuuuggaauuaugucugcugaauaauaaacuuuuuugaaauaauaaaucugguagaaaaaugagaucuaaaaaaaaaaaaaaaaaaaaaaaaaaaaaaaaaaaaaaaaaaaaaaaaaaaaaaaaaaaaaaaaugcaucccccccccccccccccccccccccccccccaaaggcucuuuucagagccaccagaauu

SEQ ID NO: 6910 - RNA, 1813 nt, Artificial Sequence
  mRNA product Design b-4 comprising derived and/or modified sequence from LASV(GA391;Clade III)__CAA36645__GPCstabilized (opt6)
gggagagucccgcagucggcguccagcggcucugcuuguucgugugugugucguugcaggccuuauucaagcuuaccaugggccaaauaguaacauuuuuccaagaaguaccacacguaauagaagaaguaaugaauaucguccuaauagcacucagcauauuagcaauauuaaaaggacuauauaaugucgcaacauguggacuaauaggucuagucacauuucucuuacuaucaggaagauccugcucccucauauacaaaggaacuuacgaauuacaaacucuagaauuaaacauggaaacacuaaacaugacaaugccacuaucauguaccaaaaacaauucacaccacuacauacgaguaggcaacgaaacaggccuagaauuaacauuaacaaacacaucuauacuaaaccauaaauuuuguaaccuauccgacgcacacaaaaggaaucuauacgaccauucacuaaugagcauaauaucuaccuuccaucuuucuauuccaaacuucaaccaauacgaagccaugucaugcgacuucaacggcggaaaaauaacaguacaauacaacuuaucacacucauucgcaguagaugcagcaggacacugcggaacacuagccaacggaguauuacaaacauucaugagaauggcauggggaggaucuuacauagcacuagacucuggaugcgguaacugggacugcauuaugacaucauaucaauaucuaauaauacaaaauacaacuugggacgaucauugccaauucucacguccaucacccauaggcuauuuaggucuacuaucacaaagaacaagagacauauacauuucgagacgaagaagagguacauucacauggaccuuaucagacucagaagguaacgaaaccccuggaggauacugccuaacaagauggauguuaauagaagccgaacuaaaaugcuucggaaauacagcaguagcaaaauguaacgaaaaacaugacgaagaauuuugcgacaugcuacgacucuucgauuucaacaaacaagcaauaagaagacuaaaaacacccgcacaaauguccauacaacucauaaacaaagcaguaaacgcacucauaaacgaccaacuaauaaugaaaaaucaccuccgagacauaauguguauucccuacugcaacuacucaagauacugguaccuaaaucacacaucaacaggaaaaacuucacuaccaagaugcuggcuuauaucuaacggaucauaccuaaacgaaacaaaauuuagcgacgauauagaacaacaagcagacaacaugauaacagaaauguuacaaaaagaauacauagaucgacaaggaaaaacuccucuaggucuaguagaccuauucguauucucuacaucauucuauuuaauaagcauauuccuacauuuaguaaaaauacccacacaccgccauauaguaggaaaaccauguccaaaaccccacagauuaaaccacauggguauauguucauguggauuauauaaacaaccaggagucccagucagauggaaaagauaaggacuaguaauaaggaaacuguaugaaugucugugggcaggaagugaagagauccuucuguaaagguuuuuggaauuaugucugcugaauaauaaacuuuuuugaaauaauaaaucugguagaaaaaugagaucuaaaaaaaaaaaaaaaaaaaaaaaaaaaaaaaaaaaaaaaaaaaaaaaaaaaaaaaaaaaaaaaaugcaucccccccccccccccccccccccccccccccaaaggcucuuuucagagccaccagaauu

SEQ ID NO: 6911 - RNA, 1816 nt, Artificial Sequence
  mRNA product Design b-4 comprising derived and/or modified sequence from LASV(AV;Clade V)__CCA30314__GPCstabilized (opt6)
gggagagucccgcagucggcguccagcggcucugcuuguucgugugugugucguugcaggccuuauucaagcuuaccauggggcaaaucguaacauucuuccaagaaguuccacacguaauagaagaaguaaugaauauaguauuaaucgcauuaucaauacuagcaguauuaaaaggacuauauaauauagcaacaugcggccucaucggacuaauaacauuccucuuacuaugcggaagaagcuguucaucaaaucuuuacaaaggaguuuacgaauuacaaucauuagacuuaaacauggaaacacuaaacaugacuaugccauuaucauguacaaaaaacaauucacaccauuauauaagaguaggcaaugacacaggacuagaauuaacacuaacaaacaccucaauacuaaaccacaaauucugcaacuuaucagacgcccacaaaaaagauuuauacgaccacgcacuaauguccauaauaucaaccuuccaccuaucaauaccuaacuucaaucaauaugaagcaaugucaugugacuucaauggaggaaaaauuucuguacaauacaacuuaucucacucauacgcaauagacgcagccaaccacugcggaacgguugcaaacggcauacuacaaacuuucaugagaauggcuugggguggaucauauaucgcucuagauucuggaugcggcaacugggacugcauaaugacauccuaccaauaccuaauuauacaaaacaccacaugggaaaaccacugccaauucagccgaccaucuccaauuggauaccuaggauuauuaucucaacgaacaagagauauauauaucucaagaagaagaagaggcacauucacuuggacacuaagcgacucugaaggaaacgcaaccccaggcgguuauuguuuaacacguuggaugcuaauagaagcagaauuaaaauguuucggaaacacagcaguagcaaaaugcaacgaaaaacacgacgaagaauuuugugacauguuaagauuauucgacuucaacaaacaagcaauaucacgauuaaaaagcccugcacaaauguccauccaauuaauaaauaaagcuguuaaugcacuaauaaacgaccaauuaauaaugaaaaaccacuuaagagacauaauguguauaccauacugcaacuacucaaaauauugguaucucaaccacacuauaacuggaaaaacaucucuaccaaaaugcuggcucguaucaaacggaucauacuuaaaugaaacccacuucucagacgauauagaacaacaagccgacaauaugaucaccgaaaugcuccaaaaagaauacauggaaagacaaggaaaaacaccacuuggauuagucgaccuauucgucuucucaacaucauucuaccuaauauccauauucuuaagacucguaaaaauacccacacauagacauauaguaggaaaaccaugccccaaaccccacagacuaaaccacaugggaauaugcagcuguggacuauacaaacaaccaggaguacccguaagauggaaacgguagggacuaguaauaaggaaacuguaugaaugucugugggcaggaagugaagagauccuucuguaaagguuuuuggaauuaugucugcugaauaauaaacuuuuuugaaauaauaaaucugguagaaaaaugagaucuaaaaaaaaaaaaaaaaaaaaaaaaaaaaaaaaaaaaaaaaaaaaaaaaaaaaaaaaaaaaaaaaugcaucccccccccccccccccccccccccccccccaaaggcucuuuucagagccaccagaauu

SEQ ID NO: 6912 - RNA, 1813 nt, Artificial Sequence
  mRNA product Design b-4 comprising derived and/or modified sequence from LASV(Togo/2016/7082;Clade VI)__AMR44577__GPCstabilized (opt6)
gggagagucccgcagucggcguccagcggcucugcuuguucgugugugugucguugcaggccuuauucaagcuuaccaugggacaaauaaucacauuuuuccaagaaguaccacauguaauagaagaagucaugaacauaguacuaauagcacucucauuauuagcaauacucaaaggcguauacaauguagcaacuuguggaauaauaggucuagucacauuucuauuucuaugcggacgaucaugcucacuaauauauaaaggauccuacgaauuacaaacauuagaauuaaacauggaaacacucaauaugaccaugccacuauccuguaccaaaaacucaucacaccauuacauaagaguaggaaaugaaacaggauuagaauuaacauuaacaaauacaucuauaauaaaucauaaauucugcaaucucuccgacgcccauaaaagaaacuuauacgaccacgcacuaaugucaauacuaucaaccuuccaccuaucaauuccaaacuuuaaccaauaugaagccauguccugcgauuuuaacggaggaaaaauaagcguucaauacaaccuaucccacgcauacgcuguagacgcagcagaacacugcgguaccguagcaaacggaguacuacaaaccuuuaugagaauggccuggggaggaucauauauagcauuagauucaggaugcggcaacugggacugcauuaugaccucuuaccaauaucuaauaauacaaaacacaaccugggaagaucacugccaauucucaagaccaucaccaauaggcuauuuagguuuauuaucacaaagaacuagagauauauauaucucaagaagaagacgcggaacauuuacuuggacauuaucagacuccgaaggcaaugaaacaccaggaggcuacugucuaacacgauggaugcuaauagaagcagaauuaaaauguuuuggaaacacagccguagccaaaugcaacgaaaaacaugacgaagaauuuugcgacaugcuaagacuauucgacuucaacaaacaagcaauccaaagacuaaaaucaccagcacaaaugucuauacaacuaauuaacaaagcagugaaugccuuaauaaacgaucaacucaucaugaaaaaccaucuuagagauaugauguguauaccauauuguaacuauucuaaauacugguaccucaaucauacaucaucaggacgaacaucccuaccuaaauguuggcucguaucuaacggaucauaccuuaaugaaacccacuucagcgacgacauagaacaacaagccgauaacaugauaacagaaauguuacaaaaagaauauauagauagacaaggaaaaacaccacucggauuagucgaucucuucguauucuccacaucuuucuauuuaauuucuauauuuuuacaccuaauaaaaauacccacacacagacauauaguaggaaaaccauguccaaaaccacacagacuaaaucacaugggcauaugcucauguggauuauacaaacaaccuggagucccaacuagauggaaacgauaaggacuaguaauaaggaaacuguaugaaugucugugggcaggaagugaagagauccuucuguaaagguuuuuggaauuaugucugcugaauaauaaacuuuuuugaaauaauaaaucugguagaaaaaugagaucuaaaaaaaaaaaaaaaaaaaaaaaaaaaaaaaaaaaaaaaaaaaaaaaaaaaaaaaaaaaaaaaaugcaucccccccccccccccccccccccccccccccaaaggcucuuuucagagccaccagaauu

SEQ ID NO: 6913 - RNA, 1813 nt, Artificial Sequence
  mRNA product Design b-4 comprising derived and/or modified sequence from LASV(KAK-428;Clade n.d. (VII))__ANH09740__GPCstabilized (opt6)
gggagagucccgcagucggcguccagcggcucugcuuguucgugugugugucguugcaggccuuauucaagcuuaccaugggacaaauaguuacauucuuccaagaaguaccacacguaauugaagaagucaugaauauaguauuaaucgcacuuucacuacuagccauacucaaaggauuauacaacuucgcaacaugcggaguuaucggauuaauaacauucuuacucuuaugcggacgaucauguucagcaacauacaaaggccaauacgaacuacaaacacuagaauuaaacauggaauccuuaaacaugacaaugcccuuaucauguaccaaaaacaacucacaucacuauauacgagcagguaauaauaccggacuugaacucacauuaacaaacacuucgaucauaucacacaaauucugcaacuuaucagacgcacacaaaaaaaauuuauacgaccauacuuuaaugucuauaauaaccacauuccacuuaucuauaccaaacuucaaucaauacgaagcaaugucuugcgauuucaacggaggaaaaauaaguauacaauauaaccuaucacacucauacgcaggagacgcagcacaacacuguggaacaguagcaaacggaguacuacaaaccuuuaugagaauggccuggggaggaucuuauuuagcuuuagauucaggaugccgaggaugggauugcauaauaucaucauaccaauacuuaauaauacaaaacaccaccugggacgaccacugccaauucuccagacccaguccuauaggauaccucggauuuguaucacaaaaaaccagagacaucuacauaucaagaagaagacgaggaacauucacauggacacuuucagauagugaaggacacgacaugccaggaggauauugccuaacaagauggauguuaauagaagcagacuuaaaauguuucggaaacacagcaguagcaaaaugcaacgaaaaacacgacgaagaauuuugcgacauguggcgauuauucgauuucaacaaacaagcaauacaaagauuaaaagcacccgcacaaaugaauauacaauuaaucaacaaagccguuaacgcacucauaaacgaccaacuaaugaugaaaaaccauuuacgagacauaaugugcauaccauacugcaacuacuccaaauucugguaccuaaauaacacaacaacaggaagaacaucccuaccucguugcuggcuaaucagcaauggauccuaccuaaaugaaacacacuucucagaugacauagaacaacaagcugauaacaugaucacagaaaugcuacaaaaagaauauauggaucgacaaggaaaaacaccuuuaggauuaguagaccuuuucgucuucucaacuucuuucuaccuaaucacaaucuucuuacauuuaguaaagaucccuacccacagacacauaguuggaaaacccugcccaaaaccacacagacuaaaucacaugggaaucugcucaugcggauuauacaaacaaccagguguaccuguaagauggaaacgauaaggacuaguaauaaggaaacuguaugaaugucugugggcaggaagugaagagauccuucuguaaagguuuuuggaauuaugucugcugaauaauaaacuuuuuugaaauaauaaaucugguagaaaaaugagaucuaaaaaaaaaaaaaaaaaaaaaaaaaaaaaaaaaaaaaaaaaaaaaaaaaaaaaaaaaaaaaaaaugcaucccccccccccccccccccccccccccccccaaaggcucuuuucagagccaccagaauu

SEQ ID NO: 6914 - RNA, 1813 nt, Artificial Sequence
  mRNA product Design b-4 comprising derived and/or modified sequence from LASV(Pinneo-NIG-1969;Clade I)__AIT17836__GPCstabilized (opt6)
gggagagucccgcagucggcguccagcggcucugcuuguucgugugugugucguugcaggccuuauucaagcuuaccaugggacaaauuauuacauucuuccaagaaguaccucacguaauagaagaaguaaugaacaucguacuaauagcauuaucacuacuagccauacuaaaaggacuauacaacauagcaacauguggaauaauaggccuuguagccuuccuauuccuaugcggaaaauccugcucacuaacacuaaaagguggcuacgaauuacaaacauuagaacuaaacauggaaacuuuaaauaugacaaugccacucuccugcaccaaaaauucaagucaucacuacaucagaguaggaaacgaaacaggauuagaacuaacauuaaccaauacauccaucauaaaccauaaauucuguaaccuaucagaugcacacaaaaaaaacuuauaugaccacgcauuaaugagcauuauaagcaccuuucaccuaucaauaccaaacuucaaccaauaugaagcaaugucaugugacuuuaacgguggaaaaauaucaguacaauauaaccuaucacauucauacgccggugacgcagccgaacacugcggaacaguagcaaacggaguacuacaaacauuuaugcgcauggccuggggaggacgcuacauagcacuagauucaggaugcggaaauugggacuguaucaugacuuccuaccaauauuuaauaauacaaaacacaaccugggaagaucacugucaauuuucccgaccaucaccaauaggauauuuaggacuacuaagucaaagaacaagggauauauacaucucuagaagaaggagaggaacauuuacauggacccuaucugacuccgaaggaaacgaaacaccaggaggauacugcuuaacacgauggauguuaauagaagcagaacucaaaugcuucggaaacacagccguagcaaaauguaacgaaaaacacgaugaagaauucugugacaugcuacgauuauuugauuucaacaaacaagcaauaagacgacucaaagcaccagcacaaaugucaauacaacuaauaaacaaagcaguaaacgcauuaauaaaugaccaacucauaaugaaaaaucaccuaagagauauaaugugcauaccauauugcaauuacucaaaauacugguacuuaaaccacaccucauccggacgaacaucauuaccaaaaugcuggcuaauaucaaauggaaguuaccuaaacgaaacacaauucucagacgacauugagcaacaagccgauaacaugauuacagaaauguuacaaaaagaauacauagaaagacaaggcaaaacucccuuaggccuuguagacauauucauauuuucuacaucauuuuaccuaauaucaauauuucuacacuuaauuaaaauaccaacgcauagacauaucgucggaaaaccaugcccaaaaccacauagauuaaaucacaugggaguaugcucaugcggauuauacaaacacccuggaguaccaacaaaauggaaacgauaaggacuaguaauaaggaaacuguaugaaugucugugggcaggaagugaagagauccuucuguaaagguuuuuggaauuaugucugcugaauaauaaacuuuuuugaaauaauaaaucugguagaaaaaugagaucuaaaaaaaaaaaaaaaaaaaaaaaaaaaaaaaaaaaaaaaaaaaaaaaaaaaaaaaaaaaaaaaaugcaucccccccccccccccccccccccccccccccaaaggcucuuuucagagccaccagaauu

SEQ ID NO: 6915 - RNA, 1813 nt, Artificial Sequence
  mRNA product Design b-4 comprising derived and/or modified sequence from LASV(ISTH0009-NIG-2011;Clade II)__AIT17404__GPCstabilized (opt6)
gggagagucccgcagucggcguccagcggcucugcuuguucgugugugugucguugcaggccuuauucaagcuuaccaugggacaaauaaucacauuuuuccaagaaguaccccacgucauagaagaaguuaugaacauaguacucauagcauuaagccuacuagcaauauuaaaaggcauauacaacguagcaaccugcggauuauucggacuuguaucuuuccuuuuacucuguggaagaucaugcucuacaacauacaagggcgucuacgaacuacaaacauuagaacuugacauggcaucacucaacaugacaaugccacuaucaugcaccaaaaauaacucacaucauuacauaaugguaggaaacgaaacuggacuugaacuaacacuaaccaacacuucaauaaucaaucauaaauucugcaaccuaucagaugcccacaagaaaaaucuauaugaccaugcauuaaugucuauaauaucuaccuuccaccucuccauaccaaauuuuaaccaauaugaagcaaugucaugugauuucaacggaggaaaaaucucuguacaauacaaccuaucucacgcauacgcaguagacgccgcaaaccauugcggaacaauagccaacggagucuuacaaacauucaugcgaauggcauggggaggaucuuauauagcacuggacucaggauguggaucaugggacugcauaaugacaucauaucaauacuuaaucauacaaaauacaacuugggaagaccacugccaauucucacgaccaucacccauaggauaccuaggacuucuaucacaaagaaccagagacauauacauaucuagacguagaagaggaacauucaccuggacacuaucagacucugaaggcaacgaaacacccggaggcuauugccuaacaagauggaugcuaauagaagcagaacuaaaaugcuuuggaaacaccgcaguagcaaaaugcaaugaaaaacacgacgaagaauuuugcgauaugcuaagauuauucgacuuuaacaaacaagcaauacgacgccuaaaaacucccgcccaaauguccauccaacuaauaaacaaagcaguaaacgcauuaauaaaugaccaacuaauaaugaaaaaucaccuaagagauauaaugugcauaccauacuguaauuacuccaaauacugguaccucaaucauaccguaaccggaaaaacaucauuaccccgaugcuggcuaguaucuaauggcucauaccuaaacgaaacacauuucucagacgacaucgaacaacaagcagacaauaugauaacagaacuauuacaaaaagaauacauggacagacaaggaaaaacuccacuaggcuuaguagacuuauucgucuuuucaaccucauucuacuuaauaucaauauuccuccaucuaauaaaaauacccacacaccgacacauaacaggaaaaccaugcccaaaaccacacagauuaaaccacaugggcauauguaguugugguuuauauaaacacccaggaguaccaguuaaauggaaacguuaaggacuaguaauaaggaaacuguaugaaugucugugggcaggaagugaagagauccuucuguaaagguuuuuggaauuaugucugcugaauaauaaacuuuuuugaaauaauaaaucugguagaaaaaugagaucuaaaaaaaaaaaaaaaaaaaaaaaaaaaaaaaaaaaaaaaaaaaaaaaaaaaaaaaaaaaaaaaaugcaucccccccccccccccccccccccccccccccaaaggcucuuuucagagccaccagaauu

SEQ ID NO: 6916 - RNA, 1813 nt, Artificial Sequence
  mRNA product Design b-4 comprising derived and/or modified sequence from LASV(ISTH2010-NIG-2012;Clade II)__AIT17482__GPCstabilized (opt6)
gggagagucccgcagucggcguccagcggcucugcuuguucgugugugugucguugcaggccuuauucaagcuuaccaugggacaaauaaucacauucuuccaagaaguuccacacgucauagaagaaguaaugaacauaguucuaauugcccuaucacuacuugcaauacuaaaaggaauauacaacguagcaacaugcggucuuuucggccuaguaucauuccuauuauuaugcggaagaucaugcucaacaacauauaaaggaguauacgaauuacaaacgcucgaacuagauauggcaucauuaaauaugacaaugccacuaucuugcaccaaaaacaacucucaccacuacauaaugguaggaaacgaaaccggccuagaauuaacauuaacuaauacaucaaucauaaaccacaaauucugcaacuuauccgacgcucacaagaaaaaccuauaugaucaugcauuaaugagcauuauaucaacauuccaccuaucuauaccuaacuucaaucaguaugaagcaaugaguugcgacuucaacggaggcaaaauauccguccaauauaacuuaucccaugcauacgcagucgaugcagcaaaccacugcggaaccauagcaaacggaguauuacaaaccuucaugagaauggccuggggaggaucauacauagcacuagacucuggaugcggcuccugggauuguauaaugacauccuaccaauaccucauaauccaaaacauaacaugggaagaucauugccaauucucacgaccaucaccaauaggauaccucggacuauuaucccaaagaacuagagacauauacaucucccgcagaagacgagguacauuuacauggacccucucagacucagaaggaaacgaaacaccaggcggauacugcuuaacacgauggauguuaauagaagcagagcuaaaaugcuucggaaauacugcaguagccaaaugcaacgaaaaacacgacgaagaauuuugcgacauguuaagacuauucgauuucaacaaacaagcaauaagaagacucaaaacaccagcccaaaugucaauacaacuaauaaauaaagcaguaaaugccuuaauuaaugaccaacuaauaaugaaaaaccaucuaagagauauaaugugcauaccuuauugcaacuacaguaaauacugguaccuaaaccauacagucaccggaaaaacuucacuaccaagaugcuggcuaguauccaauggaucauaucuaaacgaaacacacuuuucagacgauaucgaacaacaagcagacaacaugaucacagaacucuuacaaaaagaauacauagauagacaaggcaaaacaccacuaggucuaguagaccuauuuguauucucaacaucauucuaccucauaucaauauuccuccaucuaguaaaaauaccaacucaucgacacguaguaggaaaaccaugucccaaaccccacagauuaaaucauaugggaauaugcucaugcggauuauacaaacauccaggcgucccaguaaaauggaaaagauaaggacuaguaauaaggaaacuguaugaaugucugugggcaggaagugaagagauccuucuguaaagguuuuuggaauuaugucugcugaauaauaaacuuuuuugaaauaauaaaucugguagaaaaaugagaucuaaaaaaaaaaaaaaaaaaaaaaaaaaaaaaaaaaaaaaaaaaaaaaaaaaaaaaaaaaaaaaaaugcaucccccccccccccccccccccccccccccccaaaggcucuuuucagagccaccagaauu

SEQ ID NO: 6917 - RNA, 1813 nt, Artificial Sequence
  mRNA product Design b-4 comprising derived and/or modified sequence from LASV(Lassa virus/H.sapiens-wt/NGA/2015/ISTH_0543;Clade II)__AVO03639__GPCstabilized (opt6)
gggagagucccgcagucggcguccagcggcucugcuuguucgugugugugucguugcaggccuuauucaagcuuaccaugggacaaauaauaacauucuuccaagaagucccccaugucauagaagaaguaaugaacauaguauuaauugcauuaucauuacuagcuauacuaaaaggaauauacaacguagccaccugcggacuauucggcuuaguaucauuucuauuacuaugcggaagaucuugcucaacaaccuacaaaggcguauacgaacuucaaacauuagaacucgauauggcaaacuuaaacaugacaaugccauuaucauguacaaaaaacaauucucaccacuacauaaugguaggaaaugaaacagguuuagaacuaacauuaacaaauacaucaaucaucaaucauaaauuuuguaaccuaagcgaugcacacaaaaaaaaccuauaugaucacgcauuaaugucaauaauauccacuuuucacuuaucaauaccaaacuucaaccaauaugaagcaauguccugcgacuuuaauggaggcaaaauaucaguacaauacaacuuaucacacacauacgcaguagacgccgcaaaccacuguggaacaauagcaaacggaguacuacaaacguucaugcgcauggcuuggggaggaucauacauagcauuagacucaggaugcggaucuugggacuguauaaugacaucauaccaauauuuagucauucaaaauacaacaugggaagaccacugccaauucucaagaccuucaccaauaggcuacuuaggacucuuaucccaaagaaccagagacauauauauaucucgacggcgaagaggaacuuucacauggacacucagcgacucagaaggaaaugaaacaccaggaggcuauugccucacaagauggauguuaauagaagcagaacuaaaaugcuucggaaacacagcaguugccaaaugcaacgaaaaacacgaugaagaauucugcgacaugcuaagacuuuucgauuuuaacaaacaagcaauacgaagacucaaaacaccagcccaaaugucaauacaacuaauaaacaaagccguaaaugcccuaaucaaugaccaacuuaucaugaaaaaccaucuaagagacaucaugugcauucccuacugcaauuacucaaaauacugguaucucaaucacacagucacuggaaaaacaucacuaccaagaugcuggcuaguaucaaacgguucuuaucuaaacgaaacacacuucucagacgacauugaacaacaagccgacaacaugauaacugaacuucuacaaaaagaauauauagacagacaaggcaaaacaccacuugguuuaguagacuuauucguauucucaaccucauucuaccuaaucucaaucuuccuucacuuaguuaaaauaccaacacaccgacacauaacuggcaaaccauguccaaaaccacacagacucaaccauaugggaauaugcucuugcggauuauacaaacacccaggugucccaguaaaauggaaaagauaaggacuaguaauaaggaaacuguaugaaugucugugggcaggaagugaagagauccuucuguaaagguuuuuggaauuaugucugcugaauaauaaacuuuuuugaaauaauaaaucugguagaaaaaugagaucuaaaaaaaaaaaaaaaaaaaaaaaaaaaaaaaaaaaaaaaaaaaaaaaaaaaaaaaaaaaaaaaaugcaucccccccccccccccccccccccccccccccaaaggcucuuuucagagccaccagaauu

SEQ ID NO: 6918 - RNA, 1813 nt, Artificial Sequence
  mRNA product Design b-4 comprising derived and/or modified sequence from LASV(Lassa virus/H.sapiens-wt/NGA/2016/ISTH_0009;Clade II)__AVO03571__GPCstabilized (opt6)
gggagagucccgcagucggcguccagcggcucugcuuguucgugugugugucguugcaggccuuauucaagcuuaccaugggccaaauaauaacauucuuccaagaaguaccucacguaauagaagaaguaaugaacaucgucuugauagcauuaucauuauuagccauauuaaaagguauauacaauguagcaacauguggacuacuuggauuaguaucuuucuuacuccuaugcggaagaucuugcucuaccacuuacaaagguguauacgaacuacaaacauuagaauuagacauggcaucacuaaacaugacaaugccauuaucaugcacuaaaaauaacagccaccacuacauaaugguaggaaacgaaacaggacuagaacuaacccuaaccaauacaucaauaauaaaucauaaauucuguaacuuaucugaugcacauaagaaaaaccuauaugaccacgcacuaaugagcauuauaucaaccuuccacuuaucuauaccaaauuucaaccaauaugaagccaugucaugcgauuucaacggaggaagaaucucuguacaauacaaccuaucacacuccuaugcaguagacgccgcaaaccauuguggaacaauagcuaacggaguacuacaaaccuucaugagaauggcuuggggagguucauacauagccuuagacaguggaugcgguucaugggacugcauaaugacaucauaucaauaccuaauaauacaaaauacaacuugggaagaccacugccaauuuucaagaccaucaccaauaggauauuuaggucuauuaucacaaagaacaagagacauauacauuucuagacgaagacgaggaacauucacauggacacuaucagacucagaaggaaacgaaacacccggaggcuacugucuuacacgauggaugcuaauagaagcagaacuaaaaugcuucgguaacacugcaguugcaaaauguaacgaaaaacaugaugaagaauuuugcgacaugcuccgauuauucgauuucaacaaacaagcaauacgucgacuuaaaacaccagcucaaauguccauacaauuaauaaacaaagcaguaaaugcauuaauaaaugaccaacuaauaaugaaaaaccaccuaagagauauaaugugcauaccauacugcaacuacucuaaauacugguacuuaaaccacaccguaaccggaaaaacaucacuaccccgcugcuggcuaguaucaaauggaaguuaccuaaacgaaacacacuuuucagacgacauagaacaacaagcagacaacaugauaacagaacuacuacaaaaagaauacaucgauagacaaggcaaaacaccacuuggccuagucgaucuauucguauucagcacaucauuuuaucucauaucaaucuucuuacacuuagucaaaauaccuacacacagacacauaaccggaaaaccaugucccaaaccacacagacuaaaccacaugggaauaugcuccugcggacuauauaaccacccaggaguaccaguaaaauggaaaagauaaggacuaguaauaaggaaacuguaugaaugucugugggcaggaagugaagagauccuucuguaaagguuuuuggaauuaugucugcugaauaauaaacuuuuuugaaauaauaaaucugguagaaaaaugagaucuaaaaaaaaaaaaaaaaaaaaaaaaaaaaaaaaaaaaaaaaaaaaaaaaaaaaaaaaaaaaaaaaugcaucccccccccccccccccccccccccccccccaaaggcucuuuucagagccaccagaauu

SEQ ID NO: 6919 - RNA, 1813 nt, Artificial Sequence
  mRNA product Design b-4 comprising derived and/or modified sequence from LASV(Lassa virus/H.sapiens-wt/NGA/2016/ISTH_0017;Clade II)__AVO03567__GPCstabilized (opt6)
gggagagucccgcagucggcguccagcggcucugcuuguucgugugugugucguugcaggccuuauucaagcuuaccaugggacaaauaauaacauucuuccaagaaguaccacacgucauagaagaaguuaugaacauuguacuuauagcacuuucacucuuagcaauccuaaaagguauauacaauguagcuaccugcggacuauuuggacuaguaucauucuuauuacuauguggcagaucaugcucaacaacauacaaaggaguauacgaauuacaaacacuagaacuugacauggcaucacuaaacaugacuaugccuuuauccugcaccaaaaacaacucacaccacuacauaaugguaggaaacgaaacaggccuagaacuaacauuaacaaacacaucaaucauaaaccacaaauucuguaacuuaucagaugcacacaaaaaaaaccucuacgaccacgcucuaauguccauaauaucaacauuccacuuaucuauaccaaacuucaaccaauacgaagcaaugucaugcgacuuuaacggcggaaaaauaucaguacaguacaaccuaagccacacauaugccauagacgcagccaaccauuguggaacaauagcaaauggaguacuacaaacuuucaugagaauggcauggggaggaucauauauagcccuagacucaggauguggaucaugggacuguaucaugacaucauaccaauacuuaauaauacaaaauacaaccugggaagaccacugccaauuuucccgacccucaccuauaggauaucuagguuuacuaucccaaagaacacgagacauauacaucucaagaagaagaagagguaccuucaccuggacacucuccgacagcgaaggaaacgaaaccccuggcggauacugucuuacacgauggauguuaauagaagcagaauuaaaauguuuuggaaauacagcaguugcaaaaugcaaugaaaaacacgacgaagaauucugugacaugcuccgacuauuugauuuuaauaaacaagcaauaagacgacuaaaaaccccagcccaaaugucaauacaacuaauaaacaaagcaguuaacgcacuaauaaacgaccaauuaauaaugaaaaaccaccuaagagacauaaugugcauaccauacuguaacuacagcaaauacugguacuuaaaccacaccguaacaggaaaaacaucauuacccagauguuggcuaguauccaaugguucauacuuaaacgaaacacacuuuuccgacgauauagaacaacaagcagacaacaugauaaccgaacuauuacaaaaagaauacauggacagacaaggaaaaaccccacuaggccuaguagaucuauucguauucucaaccucauucuaccucauaaguauauuucuacaccuaguaagaauaccaacccauagacacguaauaggaaaaccaugcccaaaaccacauagacucaaccauaugggaauaugcagcugcggacuguacaaacauccuggaguaccaguuaaauggaaaagauaaggacuaguaauaaggaaacuguaugaaugucugugggcaggaagugaagagauccuucuguaaagguuuuuggaauuaugucugcugaauaauaaacuuuuuugaaauaauaaaucugguagaaaaaugagaucuaaaaaaaaaaaaaaaaaaaaaaaaaaaaaaaaaaaaaaaaaaaaaaaaaaaaaaaaaaaaaaaaugcaucccccccccccccccccccccccccccccccaaaggcucuuuucagagccaccagaauu

SEQ ID NO: 6920 - RNA, 1813 nt, Artificial Sequence
  mRNA product Design b-4 comprising derived and/or modified sequence from LASV(Lassa virus/H.sapiens-wt/NGA/2018/ISTH_0959;Clade II)__AVV65099__GPCstabilized (opt6)
gggagagucccgcagucggcguccagcggcucugcuuguucgugugugugucguugcaggccuuauucaagcuuaccaugggacaaauaaucacauucuuccaagaaguaccacacguaauagaagaaguaaugaauauaguucucauagcauuaucacuccuugcaauauuaaaaggaauauauaacguaguaacuugcggacuauucggccuaguauccuuucuacuacuauguggaagaucaugcuccaccaccuauaaaggaguauacgaacuucaaacacuugaacuagacauggccucauuaaauaugaccaugccauuaaguugcacaaaaaacaacucacaccauuacauaaugguaggaaacgaaacaggacuagaauuaacacuuacaaacacaucuauaaucaaucacaaauucugcaaucuauccgacgcccacaaaaaaaaccuauacgaccaugcacuuaugucaauaauaucaaccuuccaccuuucaauuccaaacuucaaucaauacgaagcaaugucuugcgauuucaacggaggaaaaauaucaguacaauacaaucuaucccaugccuacgcaauagacgcugcaaaucacugcggaacaauagcaaacggcguccuccaaacauucaugagaauggcauggggaggcucauauaucgcauuagacucuggauguggaucaugggauuguaucaugacaaguuaccaauaccuaauuauacaaaauacaaccugggaagaccacugccaauucucaagacccuccccaauaggauaucuaggacuauuaucacaacgaacuagagacauauauauaucacgaagaagaagagguacauucacauggacacuaucagacucagaaggaaacgaaacaccaggcgguuauugcuuaacacgauggaugcuaauagaagcagaacuaaaaugcuuugguaauacagcuguagcaaaaugcaaugaaaaacaugacgaagaauucugugacaugcucagauuauuugauuuuaacaaacaagcaauaagaagguuaaaaacaccugcacaaaugucaauacaauuaauaaacaaagccguuaacgcacuaauaaacgaccaauuaauaaugaaaaaccaucuucgcgacauaaugugcauaccauacugcaacuacucuaaauacugguacuuaaaccacacaguaacaggcaaaacauccuuaccacgaugcuggcuaguaucaaacgguuccuacuuaaacgaaacccacuucucagaugacauagaacaacaagcagacaacaugaucacagaauuauuacaaaaagaauacauagauagacaaggaaaaacaccacuaggccucgucgauuuauucgucuuuucaacaucauuuuauuuaauuucaauauuccuacauuuaguaaaaauaccaacacaccgacacguaauaggaaaaccuuguccaaaaccccacagauuaaaccauaugggaauauguuccugcggccuauauaaacauccaggcguucccgucaaauggaaacguuaaggacuaguaauaaggaaacuguaugaaugucugugggcaggaagugaagagauccuucuguaaagguuuuuggaauuaugucugcugaauaauaaacuuuuuugaaauaauaaaucugguagaaaaaugagaucuaaaaaaaaaaaaaaaaaaaaaaaaaaaaaaaaaaaaaaaaaaaaaaaaaaaaaaaaaaaaaaaaugcaucccccccccccccccccccccccccccccccaaaggcucuuuucagagccaccagaauu

SEQ ID NO: 6921 - RNA, 1813 nt, Artificial Sequence
  mRNA product Design b-4 comprising derived and/or modified sequence from LASV(LASV003-NIG-2008;Clade II)__AIT17580__GPCstabilized (opt6)
gggagagucccgcagucggcguccagcggcucugcuuguucgugugugugucguugcaggccuuauucaagcuuaccaugggacaaauaauaacauuuuuccaagaagucccacacguaauagaagaaguaaugaacaucguccuaauagcauuaucauuacuagcaauucuaaaaggaauauacaauguagcaacuuguggccuauucggccuaguaucauuccuauuauuauguggccgaagcugcucaacaaccuacaaagguguauacgaacuacaaacccuagaauuagacauggcaucacuaaauaugacaaugccacuauccugcaccaaaaacaacucccaucacuacauaaugguaggcaacgaaacaggcuuagaacuaacacuaacaaacacuucaauaauaaaccacaaauucugcaaccuauccgacgcccacaagaaaaauuuauaugaccacgcauuaaugucaauaauaucaacauuccacuuauccauacccaauuucaaccaauacgaagcaaugucaugugauuucaacggagguaaaaucagcguacaauacaauuuaucacauacauaugcaguagacgcagcaaaccauuguggcacaauagcaaacggaguauuacaaacauucaugagaauggcuuggggaggaucauacauugcacucgacucaggaugcggaucaugggauugcauaaugacaucauaccaauaccuaauaauacaaaacacaaccugggaagaucacugccaauucuccagaccaucaccaaucgguuauuuaggacuacuaucacaaagaacaagagacauauauauaucacgaagaagacgaggaacauuuaccuggacccuaucagauucagaaucaaaugaaacaccaggcggauacugccuaacaagauggauguuaauagaagcagaauuaaaaugcuuuggaaauacagcaguagcaaaauguaacgaaaaacacgaugaagaauuuugcgauaugcuacgacuauuugacuucaacaaacaagcaauaagacgacuaaaagccccugcacaaaugucaauacaauuaauuaauaaagcaguuaaugcauuaauaaaugaccaacuaauaaugaaaaaccacuuaagagacaucauguguauaccauauugcaacuauagcaaauacugguacuuaaaccacacaguuacaggaagaacaagccuaccccgauguuggcucguauccaacggaucauaccuuaacgaaacacacuuuucagaugacauagaacaacaagcagauaacaugauaacagaauuauuacaaaaagaauacauggaccgacaaggcaaaacaccacuaggccuaguagaccuauuuguauuuuccaccuccuucuaccuaauaucaauuuucuuacacuuaguaaaaaucccuacacaccgacacguaauaggaaaaccaugcccaaaaccacaccgauuaaaccacaugggaauauguucauguggauuauacaaacacccaggaguaccagucaaauggaaaagauaaggacuaguaauaaggaaacuguaugaaugucugugggcaggaagugaagagauccuucuguaaagguuuuuggaauuaugucugcugaauaauaaacuuuuuugaaauaauaaaucugguagaaaaaugagaucuaaaaaaaaaaaaaaaaaaaaaaaaaaaaaaaaaaaaaaaaaaaaaaaaaaaaaaaaaaaaaaaaugcaucccccccccccccccccccccccccccccccaaaggcucuuuucagagccaccagaauu

SEQ ID NO: 6922 - RNA, 1813 nt, Artificial Sequence
  mRNA product Design b-4 comprising derived and/or modified sequence from LASV(LASV035-NIG-2009;Clade II)__AIT17588__GPCstabilized (opt6)
gggagagucccgcagucggcguccagcggcucugcuuguucgugugugugucguugcaggccuuauucaagcuuaccaugggacaaauaauaaccuuuuuccaagaaguaccacacguaauagaagaaguaaugaacauaguacuuauagcauuaagccuccuugcuauuuuaaaaggaauauacaauguagcaacauguggacuauucggacuaguaucauuucuuuuauuaugcggaagaucauguuccacaacauacaaaggaguuuacgaauuacaaacauuagaacuagacauggcaucauuaaacaugacaaugccacuauccugcacaaaaaacaacucacaucauuacaucaugguaggaaaugaaacaggauuagaacuuacacuaacaaacacaagcauaauaaaccacaaauucugcaaccuaucagacgcacacaaaaaaaaucuauaugaccacgcacuaaugucaauuauauccacauuucacuuaucaaucccaaacuucaaccaauacgaagcaaugucaugcgacuuuaauggaggaaaaauuucuguacaauauaaccuaucacaugccuacgcuguagaugcugcaaaccacugcgguacaaucgcaaauggaguauuacaaacauucaugagaauggcuuggggaggaucauacauagcauuagacucaggaugcggcucaugggacuguauaaugacaucuuaccaguaucuaauaauacaaaacacaaccugggaagaucacugccaauucucacgacccucaccaauuggauacuuagguuuacuaucacaaagaacccgcgauauauacaucuccagaagacgcagaggaacauuuaccuggacauuaagcgacuccgaaggaaaugaaacaccuggaggauacugcuuaacuagauggauguuaauagaagccgaacuuaaaugcuucggaaauacagcuguugcuaaaugcaacgaaaaacacgacgaagaauucugcgacaugcuaagauuauucgacuucaacaaacaagcuauaagaagacuaaaagcaccagcacaaaugucaauacaauuaauaaauaaagcaguuaacgcauuaauaaacgaucaacuuauuaugaaaaaccaccuaagagacauaaugugcauaccauacuguaacuacucaaaauauugguacuuaaaccacacaguaacaggaaaaacaucacucccaagauguugguuaguaagcaacggcuccuaccuaaacgaaacacauuucagugacgauaucgaacaacaagccgauaauaugaucacagaacuacuacaaaaagaauauaucgauagacaaggaaaaacacccuuaggacuaguagaccucuucguauucucaacauccuucuacuuaauauccauauucuuacaccuaguaaaaauaccaacacauagacacguaauaggaaaaccauguccaaaaccucacagacuaaaccacaugggaauuuguuccuguggacuauauaaacaccccggcguaccaguaaaauggaaacgauaaggacuaguaauaaggaaacuguaugaaugucugugggcaggaagugaagagauccuucuguaaagguuuuuggaauuaugucugcugaauaauaaacuuuuuugaaauaauaaaucugguagaaaaaugagaucuaaaaaaaaaaaaaaaaaaaaaaaaaaaaaaaaaaaaaaaaaaaaaaaaaaaaaaaaaaaaaaaaugcaucccccccccccccccccccccccccccccccaaaggcucuuuucagagccaccagaauu

SEQ ID NO: 6923 - RNA, 1813 nt, Artificial Sequence
  mRNA product Design b-4 comprising derived and/or modified sequence from LASV(LASV1000-NIG-2009;Clade II)__AIT17782__GPCstabilized (opt6)
gggagagucccgcagucggcguccagcggcucugcuuguucgugugugugucguugcaggccuuauucaagcuuaccaugggacaaauaauaaccuucuuccaagaaguaccacacguaauugaagaaguaaugaauauaguucuaauagcacucucacuauuagccauacuuaaaggcauauauaauguagcaacaugcggauuauucggauuaguaucauuucuauuacuaugcggacgauccuguagcacaacauacaaaggaguauacgaacuacaaacauuagaauuagauauggcaucacuaaauaugacaaugcccuuaucuuguaccaaaaacaacucacaccacuacauaaugguuggaaacgaaacaggacuagaauuaacacuaacaaacacaucaauaauaaaucacaaauucugcaaccuaucagacgcucauaagaaaaaccuauacgaccacgcccuaauguccauaauaucaaccuuucaccuaucaauacccaauuuuaaccaauacgaagcuaugucaugcgauuucaacggcggaaaaauauccguacaauacaauuuaucacauacauaugcaguugaugccgcaaaucacugcggaacaauagcaaauggcguucuacaaacauuuaugagaauggcuuggggcggaucauacauagcacuugauucuggcugcggaucaugggauugcauaaugacauccuaccaauacuuaauaauacaaaacaccaccugggaagaccacugccaauucucaagaccaucaccuauaggcuacuuaggacuauuaucacaaagaacccgagacauauacauauccagaagacgaagaggcaccuucacauggacacuaucagauucagaaggaaacgaaacaccagguggcuauugcuuaaccagauggaugcuaauagaagccgaauuaaaaugcuuuggaaacacagcaguagcaaaaugcaacgaaaaacaugacgaagaauuuugcgauaugcuuagauuauucgauuuuaauaaacaagcaauaaaacgucuaaaaacaccagcacaaaugagcauucaauuaauaaacaaagccgucaacgcucuaauaaaugaccaacuaauaaugaaaaaccacuuaagagacauaaugugcauaccuuauuguaacuacucaaaauauugguaccuaaaccauacugucacaggaaaaacaucauuacccagaugcuggcuaguaucaaauggaucuuaucuaaaugaaacacacuucucagacgacauagaacaacaagcagacaacaugauaaccgaacuacuucaaaaagaauacauagacagacaaggaaaaacaccauuaggccuaguagaccuauucguauucucuacauccuuuuauuuaauaagcauauuucuacaucuaguaaaaauaccuacacauagacauguaguaggcaaaccaugcccaaaaccacacagacucaaccacaugggaauauguagcuguggauuauacaaacaucccggcguucccguuaaauggaaaagauaaggacuaguaauaaggaaacuguaugaaugucugugggcaggaagugaagagauccuucuguaaagguuuuuggaauuaugucugcugaauaauaaacuuuuuugaaauaauaaaucugguagaaaaaugagaucuaaaaaaaaaaaaaaaaaaaaaaaaaaaaaaaaaaaaaaaaaaaaaaaaaaaaaaaaaaaaaaaaugcaucccccccccccccccccccccccccccccccaaaggcucuuuucagagccaccagaauu

SEQ ID NO: 6924 - RNA, 1813 nt, Artificial Sequence
  mRNA product Design b-4 comprising derived and/or modified sequence from LASV(LASV221-NIG-2010;Clade II)__AIT17624__GPCstabilized (opt6)
gggagagucccgcagucggcguccagcggcucugcuuguucgugugugugucguugcaggccuuauucaagcuuaccaugggccaaaucauaaccuuuuuccaagaaguaccucauguaauagaagaaguaaugaacauaguucucaucgcacuaucacuccuagcaauacuaaaaggaauauacaacguugcaaccuguggauuauuuggauuaguaucauuuuuauuacucugcggcagaucuuguucaacaacauauaaaggaguauacgaauuacaaacauuagaauuagacauggcaucacuuaacaugaccaugccacuaucuugcacuaaaaacaauucacaccacuauaucaugguaggaaaugaaacaggauuagaauuaacauuaacaaacacaucaauaauaaaccacaaauucugcaaucuauccgacgcacacaagaaaaacuuauaugaccaugcacuuaugagcauaauaucuacauuucaccuaucaauaccaaauuuuaaccaauacgaggcaaugucuugcgacuuuaacggaggcaaaauaucaguccaauacaaccuaucacacaccuacgcaauagacgcagcaaaccacugcggaacaaucgcuaauggaguauuacaaacauucaugagaauggccuggggcggaagcuacaucgcauuagacucaggaugcggaucaugggacuguaucaugacaucauaccaauaccuuauaauacaaaacacaacaugggaagaccacugccaauucucacgaccaucccccauaggauaccuaggacuacuaucucaaagaacaagagacauauacauaucacgaagacgucgcgguacuuuuacauggacacucucagauuccgaaggcaacgaaacaccaggagguuacugccuaacaagauggaugcuuauagaagcagaauuaaaaugcuuuggaaauacagcuguagcaaaaugcaacgaaaaacacgaugaagaauuuugcgacaugcuaagauuauucgacuuuaauaaacaagcaauaagaagacuaaaaacaccagcccaaaugucaauacaacuaauaaacaaagcuguaaacgcccucauaaacgaccaauuaauaaugaaaaaucacuuaagagacauaaugugcaucccauauuguaacuauucaaaauacugguaucuaaaccauacaguaacaggaaaaaccagcuuaccaagaugcuggcuaguauccaacggaucauacuuaaacgaaacacacuuuucagacgacauagaacaacaagcugacaauaugauaacagaaaugcuucaaaaagaauauauggaccgacaaggaaaaacaccauuaggauuaguagaucucuucguauucucaacaucauucuacuuaauaucaauauuccuacaccucgucaaaauacccacacauagacauguaauaggcaaaccauguccaaaaccacacagacucaaccauaugggaauauguucaugcggucuauauaaacacccaggagucccaguaaaauggaaaagauaaggacuaguaauaaggaaacuguaugaaugucugugggcaggaagugaagagauccuucuguaaagguuuuuggaauuaugucugcugaauaauaaacuuuuuugaaauaauaaaucugguagaaaaaugagaucuaaaaaaaaaaaaaaaaaaaaaaaaaaaaaaaaaaaaaaaaaaaaaaaaaaaaaaaaaaaaaaaaugcaucccccccccccccccccccccccccccccccaaaggcucuuuucagagccaccagaauu

SEQ ID NO: 6925 - RNA, 1813 nt, Artificial Sequence
  mRNA product Design b-4 comprising derived and/or modified sequence from LASV(LASV237-NIG-2010;Clade II)__AIT17638__GPCstabilized (opt6)
gggagagucccgcagucggcguccagcggcucugcuuguucgugugugugucguugcaggccuuauucaagcuuaccaugggacaaauaauaacuuucuuccaagaaguaccacacguaauagaagaagucaugaauauaguccuaauagcacucucauuacuagcaauacuaaaaggaauauacaacguagccaccugcggacuauucggauuaguaucauuccuucuuuuaugcgguagaucuugcucaacaacauacaaaggaguuuacgaauuacaaacacuagaacuagauauggcuucacuaaauaugacuaugccacuauccugcacaaaaaacaacucacaucacuacauaauggucggaaacgaaaccggucuagaauuaacauuaacaaacacaucaauuaucaaccauaaauuuugcaaucucuccgacgcacauaaaaaagaccuauacgaucacgcacuaaugucaauuaucucaacuuuccaccuaucaauaccaaauuuuaaucaauacgaagcaaugucaugcgauuuuaauggaggaaaaauaucuguacaauauaacuuaucacacaccuacgcaguagacgcagcaaaccauugcggaacaauagcaaacggaguuuuacaaacuuucaugagaauggcauggggaggauccuacauagcauuagacucaggaugcggaaguugggauuguauaaugacuucauaccaauaccucauaauacaaaauaccacuugggaagaccacugccaauucucacgaccuucaccaaucggauacuuaggucuccuaucacaaagaaccagagacauauacauaucaagacgaagacgcggaacuuucacauggacacuaucagauucugaaggaaacgaaacuccaggaggauacugcuuaacaagauggauguuaauagaagccgaacuaaaaugcuucggaaacacagcaguagcaaaauguaacgaaaaacacgacgaagaauuuugcgacauguuaagacucuucgacuucaauaaacaagcaauaagaagacuaaaaacaccagcacaaaugucuauacaacuaauuaauaaagcaguaaacgcauuaauaaaugaccaacuaauuaugaaaaaccaucuacgcgacauaaugugcauaccauacugcaacuauucuaaauauugguauuuaaaccacacaguaacaggaaaaacaucccuacccagguguugguuaguaagcaauggaucauacuuaaaugaaacacauuucucugaugacaucgaacaacaagcagacaauaugauaacagaacuacuucaaaaagaauacauggacagacaaggaaaaacaccauuaggucuaguagauuuauucgucuucucuacaucauuuuaucuaauaucaaucuucuuacaucuaauaaaaauaccaacccacagacauauaacaggcaaaccaugcccaaaaccucauagacuaaaccacaugggaauaugcucauguggccuauacaaacacccaggcgucccagucaaauggaaaagauaaggacuaguaauaaggaaacuguaugaaugucugugggcaggaagugaagagauccuucuguaaagguuuuuggaauuaugucugcugaauaauaaacuuuuuugaaauaauaaaucugguagaaaaaugagaucuaaaaaaaaaaaaaaaaaaaaaaaaaaaaaaaaaaaaaaaaaaaaaaaaaaaaaaaaaaaaaaaaugcaucccccccccccccccccccccccccccccccaaaggcucuuuucagagccaccagaauu

SEQ ID NO: 6926 - RNA, 1813 nt, Artificial Sequence
  mRNA product Design b-4 comprising derived and/or modified sequence from LASV(LASV253-NIG-2011;Clade II)__AIT17670__GPCstabilized (opt6)
gggagagucccgcagucggcguccagcggcucugcuuguucgugugugugucguugcaggccuuauucaagcuuaccaugggccaaauaauaacauucuuucaagaaguaccacacguaauagaagaaguaaugaauaucguacuaauagcucucucacuccuagcaauacuaaaaggaauauacaacguagcuaccugcggccuauuuggccuugucuccuuccuacuccuaugcggacgaucaugcucaacaacauauaaaggagucuacgaacuucaaacauuagaacuagacauggcaucacuaaacaugacaaugccccuaucauguacaaaaaauaauucucaccacuauaucaugguagguaacgaaacaggccuagaacuaacccucacaaacaccucaauaauuaaccacaaauucugcaauuuauccgacgcacauaaaaaaaaccucuaugaccacgcacuaauguccauaauauccacauuccaucucucaauacccaacuucaaccaauacgaagcaaugucaugugacuucaauggaggaaaaauuucaguacaauacaaccucucacauacauacgccguugacgcagcaaaccacugcggcacaauagcuaacggcguccuacaaacauucaugagaauggccuggggaggaucauauauugcuuuagauucaggauguggauccugggauugcauaaugacaucauaccaauaccuuauaauacaaaacacaacaugggaagaccauugccaauucucaagaccaucacccauaggauaccuaggacuauuaucacaacgcacacgagacaucuauauaucaagaagaagacgaggaacauucacauggacacucuccgacuccgaaggaaaugaaacaccaggaggauacugucuaaccagauggauguuaaucgaagcagaacuaaaaugcuucggaaacacagcaguagcaaaaugcaacgaaaaacaugaugaagaauucugcgacaugcuacgauuauucgauuucaauaaacaagccauaagacgacucaaagcaccagcacaaaugucaauacaacuaauaaauaaagcaguuaacgcacuaauuaacgaucaacuaauaaugaaaaaucacuuaagagauauaaugugcauaccauacuguaacuacuccaaauacugguacuuaaaccauacaguaaccggaagaacaagccuaccaagaugcuggcuagugucaaacggaucauaucucaacgaaacacauuucucagacgauaucgaacaacaagcagacaauaugauaacagaauuauuacaaaaagaauacaucgacagacaaggaaaaacuccauuaggauuaguagaucuauuuguauucucaacuucauucuauuuaauaucaauauucuuacacuuaguaaaaaucccaacacacagacacauaauaggcaaaccuugcccuaaaccacacagauuaaaccauaugggaaucugcucaugcggauuauauaaacacccaggagucccagucaaauggaaacgauaaggacuaguaauaaggaaacuguaugaaugucugugggcaggaagugaagagauccuucuguaaagguuuuuggaauuaugucugcugaauaauaaacuuuuuugaaauaauaaaucugguagaaaaaugagaucuaaaaaaaaaaaaaaaaaaaaaaaaaaaaaaaaaaaaaaaaaaaaaaaaaaaaaaaaaaaaaaaaugcaucccccccccccccccccccccccccccccccaaaggcucuuuucagagccaccagaauu

SEQ ID NO: 6927 - RNA, 1813 nt, Artificial Sequence
  mRNA product Design b-4 comprising derived and/or modified sequence from LASV(LASV254-NIG-2011;Clade II)__AIT17674__GPCstabilized (opt6)
gggagagucccgcagucggcguccagcggcucugcuuguucgugugugugucguugcaggccuuauucaagcuuaccaugggacaaauaaucacauucuuucaagaaguaccacacguaauagaagaaguaaugaacauaguccuaauagccuuaagucuccuagcaauauuaaaaggaaucuauaauguugcaacaugcggcuuauucggucuaguaucauuucuauuacuaugcggaagaucauguuccacaaccuauaaaggaguauacgaauuacaaacccuggaacuagacaugacaaacuuaaauaugacaaugccacuuaguugcaccaaaaauaauucacaccacuacauaauggucggaaacgaaacaggauuagaauuaacacuaacaaacacaucuauaauaaaccacaaauucugcaauuuaucagaugcucacaagaaaaaccuauacaaucacgcauuaauguccauaauauccaccuuccaucuaucaaucccaaacuuuaaccaauacgaagcaauguccugcgacuuuaacggaggaaaaauaucaguacaauauaacuuaucccacucauaugcaguagaugccgccaaucacugcggaacaauagcaaacggaguacuacaaacauucaugagaauggcuuggggaggaagcuacauugcccuagacucaggauguggaaauugggauuguaucaugacauccuaucaauaccuaauaauacaaaauaccacaugggaagaucacugccaauucucacgaccaucaccaauaggauauuuaggacuccucucccaacgaacucgagacauuuauauuucacgaagacgaagaggaacuuucacauggacucuaucagauagcgaaggaaaugaaacacccggaggauauugccuaacaagauggaugcugauagaagcagaacuaaaauguuucggaaauacagcaguagcaaaaugcaaugaaaaacaugacgaagaauuuugcgauauguuaagauuauucgacuucaacaaacaagcaauacgcagacuuaaaacaccagcacaagcaaacauacaacuaauaaacaaagcaguaaaugcauuaauuaacgaccaacuaauaaugaaaaaccaucuaagagacaucaugugcauaccauauuguaacuauucaaaauauugguaccuaaaucacacaguaacaggaaaaaccucacuaccuagguguugguuaguaucaaacggaagcuaccuaaacgaaacacauuucuccgacgacauagaacaacaagcagacaacaugauaacugaacuauuacaaaaagaauauauggacagacaaggaaaaacgcccuuaggacuuguagacuuauucguauucucaaccucauuuuaccuaauaucaauauuccuacaccucguaaaaauaccaacacacagacaugucauaggaaaaccuugcccaaaaccucacagacuaaaccacaugggaauaugcuccugcggccuauacaaacauccaggaguaccuguaaaauggaaaagauaaggacuaguaauaaggaaacuguaugaaugucugugggcaggaagugaagagauccuucuguaaagguuuuuggaauuaugucugcugaauaauaaacuuuuuugaaauaauaaaucugguagaaaaaugagaucuaaaaaaaaaaaaaaaaaaaaaaaaaaaaaaaaaaaaaaaaaaaaaaaaaaaaaaaaaaaaaaaaugcaucccccccccccccccccccccccccccccccaaaggcucuuuucagagccaccagaauu
